United States Patent Application Publication US 2007/0214517 A1 - sequence listing, part 43

SEQ ID NO: 49751 - DNA, 939 bp, Arabidopsis thaliana
  misc_feature (1)..(939): Ceres Seq. ID no. 13592603
  misc_feature: MA Experiment ID: 20000495 Result: Down-regulated in Transcription
  misc_feature: MA Experiment 20000495 PARAMETER Experiment Name: At_Guard_Cells_P Parameter: Harvest Date Value: 8/2/2002
  misc_feature: MA Experiment 20000495 PARAMETER Experiment Name: At_Guard_Cells_P Parameter: Organism Value: A. thaliana
  misc_feature: MA Experiment 20000495 PARAMETER Experiment Name: At_Guard_Cells_P Parameter: Tissue Value: Guard Cells vs. Leaves
  misc_feature: MA Experiment ID: 20000794 Result: Up-regulated in Transcription
  misc_feature: MA Experiment 20000794 PARAMETER Experiment Name: At_Petals_P Parameter: Age (day) Value: 23-25 days
  misc_feature: MA Experiment 20000794 PARAMETER Experiment Name: At_Petals_P Parameter: Plant Line Value: WS
  misc_feature: MA Experiment 20000794 PARAMETER Experiment Name: At_Petals_P Parameter: Tissue Value: Petals vs. Whole plant
  misc_feature: MA Experiment ID: 20001557 Result: Down-regulated in Transcription
  misc_feature: MA Experiment 20001557 PARAMETER Experiment Name: At_Drought_Soil_Dry_P Parameter: Age (day) Value: 27
  misc_feature: MA Experiment 20001557 PARAMETER Experiment Name: At_Drought_Soil_Dry_P Parameter: Organism Value: A. thaliana
  misc_feature: MA Experiment 20001557 PARAMETER Experiment Name: At_Drought_Soil_Dry_P Parameter: Plant Line Value: WS
  misc_feature: MA Experiment 20001557 PARAMETER Experiment Name: At_Drought_Soil_Dry_P Parameter: Post Timepoint (hr) Value: 3
  misc_feature: MA Experiment 20001557 PARAMETER Experiment Name: At_Drought_Soil_Dry_P Parameter: Post-Treatment Value: Re-Water vs. No Drought
  misc_feature: MA Experiment 20001557 PARAMETER Experiment Name: At_Drought_Soil_Dry_P Parameter: Timepoint (day) Value: 13
  misc_feature: MA Experiment 20001557 PARAMETER Experiment Name: At_Drought_Soil_Dry_P Parameter: Treatment Value: Drought vs. No Drought
ggacaaggctttcgaagaaacccaaacaaaaaaaaacttcaacgccgtttcttcttccattaatctcatctctcaatcaaccaaaagcttcccatctcaaatccctcagtttgattttctaggcaaacaatcatctgccaccatgtttatgaatcggctattcgggaaacccaaacaggagactagtactctccaaacgttagacaagctcaatgagactcttgagatgttagagaagaaggagaatgttcttctcaagaaagctactggagaggttgagaaagctaaggaattctcccgggcgaagaacaaacgcgcggctatacaatgtttgaaaaggaaaaggttatatgagcaacaagttgaacagctcgggaatttccagctccgtattcatgatcaaatgattatgttagaaggtgctaaagcaacaacagagactgtagatgctttgaggactggagcttctgcaatgaaagctatgcagaaagcaacaaacattgatgatgttgacaagacaatggatgagatcaatgaacaaactgagaacatgaaacagatccaagaagcattgtcggctccatttggggctaatgattttgatgaggatgaattggaagcagaacttgacgaactagaaggcgctgagctagaagagcaacttcttcagcctgttccaatccatgtgcctcaaggaaacaagcctgctcgtgctccagctcagaagcaacctactgctgaggaagatgaactcgctgccttacaagctgagatggctctctaagctgaagctagccttggaagatttcgattaagtggggagatttgtgtgtgcattatctaaaaacagaaagaaaagattttatgtatataaggatccgagtctaattgatcggaagattttttttttctttttcaatataattaacttattaaact

SEQ ID NO: 49752 - protein, 260 aa, Arabidopsis thaliana
  peptide (1)..(260): Ceres Seq. ID no. 13592604
  misc_feature (65)..(239): Pfam Name: SNF7 Pfam Description: SNF7
  misc_feature (41)..(255): Homolog of NCBI NO: 40548422 NR Description: Snf7 homologue associated with Alix 2 [Homo
  misc_feature (65)..(255): Homolog of NCBI NO: 28827795 NR Description: chromosome 20 open reading frame 178 [Homo
  misc_feature (65)..(255): Homolog of NCBI NO: 28077049 NR Description: RIKEN cDNA 2010012F05 [Mus musculus]
  misc_feature (52)..(260): Homolog of NCBI NO: 19115183 NR Description: similar to yeast Snf7 protein involved in glucose
  misc_feature (52)..(260): Homolog of NCBI NO: 28850339 NR Description: similar to C56C10.3.p
  misc_feature (55)..(256): Homolog of NCBI NO: 28278647 NR Description: Similar to RIKEN cDNA 2010012F05 gene [Danio
  misc_feature (55)..(256): Homolog of NCBI NO: 28277855 NR Description: Unknown (protein for MGC:56112) [Danio rerio]
  misc_feature (50)..(260): Homolog of NCBI NO: 21594892 NR Description: copia-like retroelement pol polyprotein
  misc_feature (50)..(260): Homolog of NCBI NO: 15233464 NR Description: expressed protein [Arabidopsis thaliana]
  misc_feature (48)..(260): Homolog of NCBI NO: 15224854 NR Description: copia-related retroelement pol polyprotein
DKAFEETQTKKNFNAVSSSINLISQSTKSFPSQIPQFDFLGKQSSATMFMNRLFGKPKQETSTLQTLDKLNETLEMLEKKENVLLKKATGEVEKAKEFSRAKNKRAAIQCLKRKRLYEQQVEQLGNFQLRIHDQMIMLEGAKATTETVDALRTGASAMKAMQKATNIDDVDKTMDEINEQTENMKQIQEALSAPFGANDFDEDELEAELDELEGAELEEQLLQPVPIHVPQGNKPARAPAQKQPTAEEDELAALQAEMAL

SEQ ID NO: 49753 - protein, 213 aa, Arabidopsis thaliana
  peptide (1)..(213): Ceres Seq. ID no. 13592605
  misc_feature (18)..(192): Pfam Name: SNF7 Pfam Description: SNF7
  misc_feature (1)..(208): Homolog of NCBI NO: 40548422 NR Description: Snf7 homologue associated with Alix 2 [Homo
  misc_feature (18)..(208): Homolog of NCBI NO: 28827795 NR Description: chromosome 20 open reading frame 178 [Homo
  misc_feature (18)..(208): Homolog of NCBI NO: 28077049 NR Description: RIKEN cDNA 2010012F05 [Mus musculus]
  misc_feature (5)..(213): Homolog of NCBI NO: 19115183 NR Description: similar to yeast Snf7 protein involved in glucose
  misc_feature (5)..(213): Homolog of NCBI NO: 28850339 NR Description: similar to C56C10.3.p
  misc_feature (8)..(209): Homolog of NCBI NO: 28278647 NR Description: Similar to RIKEN cDNA 2010012F05 gene [Danio
  misc_feature (8)..(209): Homolog of NCBI NO: 28277855 NR Description: Unknown (protein for MGC:56112) [Danio rerio]
  misc_feature (3)..(213): Homolog of NCBI NO: 21594892 NR Description: copia-like retroelement pol polyprotein
  misc_feature (3)..(213): Homolog of NCBI NO: 15233464 NR Description: expressed protein [Arabidopsis thaliana]
  misc_feature (1)..(213): Homolog of NCBI NO: 15224854 NR Description: copia-related retroelement pol polyprotein
MFMNRLFGKPKQETSTLQTLDKLNETLEMLEKKENVLLKKATGEVEKAKEFSRAKNKRAAIQCLKRKRLYEQQVEQLGNFQLRIHDQMIMLEGAKATTETVDALRTGASAMKAMQKATNIDDVDKTMDEINEQTENMKQIQEALSAPFGANDFDEDELEAELDELEGAELEEQLLQPVPIHVPQGNKPARAPAQKQPTAEEDELAALQAEMAL

SEQ ID NO: 49754 - protein, 211 aa, Arabidopsis thaliana
  peptide (1)..(211): Ceres Seq. ID no. 13592606
  misc_feature (16)..(190): Pfam Name: SNF7 Pfam Description: SNF7
  misc_feature (1)..(206): Homolog of NCBI NO: 40548422 NR Description: Snf7 homologue associated with Alix 2 [Homo
  misc_feature (16)..(206): Homolog of NCBI NO: 28827795 NR Description: chromosome 20 open reading frame 178 [Homo
  misc_feature (16)..(206): Homolog of NCBI NO: 28077049 NR Description: RIKEN cDNA 2010012F05 [Mus musculus]
  misc_feature (3)..(211): Homolog of NCBI NO: 19115183 NR Description: similar to yeast Snf7 protein involved in glucose
  misc_feature (3)..(211): Homolog of NCBI NO: 28850339 NR Description: similar to C56C10.3.p
  misc_feature (6)..(207): Homolog of NCBI NO: 28278647 NR Description: Similar to RIKEN cDNA 2010012F05 gene [Danio
  misc_feature (6)..(207): Homolog of NCBI NO: 28277855 NR Description: Unknown (protein for MGC:56112) [Danio rerio]
  misc_feature (1)..(211): Homolog of NCBI NO: 21594892 NR Description: copia-like retroelement pol polyprotein
  misc_feature (1)..(211): Homolog of NCBI NO: 15233464 NR Description: expressed protein [Arabidopsis thaliana]
  misc_feature (1)..(211): Homolog of NCBI NO: 15224854 NR Description: copia-related retroelement pol polyprotein
MNRLFGKPKQETSTLQTLDKLNETLEMLEKKENVLLKKATGEVEKAKEFSRAKNKRAAIQCLKRKRLYEQQVEQLGNFQLRIHDQMIMLEGAKATTETVDALRTGASAMKAMQKATNIDDVDKTMDEINEQTENMKQIQEALSAPFGANDFDEDELEAELDELEGAELEEQLLQPVPIHVPQGNKPARAPAQKQPTAEEDELAALQAEMAL

SEQ ID NO: 49755 - DNA, 2622 bp, Arabidopsis thaliana; identical to SEQ ID NO: 45814
  misc_feature (1)..(2622): Ceres Seq. ID no. 13647162
  misc_feature: MA Experiment ID: 20000185 Result: Up-regulated in Transcription
  misc_feature: MA Experiment 20000185 PARAMETER Experiment Name: At_Roots__P Parameter: Age (day) Value: 7 vs. 21
  misc_feature: MA Experiment 20000185 PARAMETER Experiment Name: At_Roots__P Parameter: Organism Value: A. thaliana
  misc_feature: MA Experiment 20000185 PARAMETER Experiment Name: At_Roots__P Parameter: Tissue Value: Roots vs. Whole Plant
  misc_feature: MA Experiment ID: 20000438 Result: Up-regulated in Transcription
  misc_feature: MA Experiment 20000438 PARAMETER Experiment Name: At_Shoots__P Parameter: Age (day) Value: 14
  misc_feature: MA Experiment 20000438 PARAMETER Experiment Name: At_Shoots__P Parameter: Tissue Value: Shoots vs. Whole Plant
  misc_feature: MA Experiment ID: 20000452 Result: Up-regulated in Transcription
  misc_feature: MA Experiment 20000452 PARAMETER Experiment Name: At_CS6879_Shoots-Roots_P Parameter: Age (day) Value: 14
  misc_feature: MA Experiment 20000452 PARAMETER Experiment Name: At_CS6879_Shoots-Roots_P Parameter: Organism Value: A. thaliana
  misc_feature: MA Experiment 20000452 PARAMETER Experiment Name: At_CS6879_Shoots-Roots_P Parameter: Plant Line Value: CS6879 vs. WS
  misc_feature: MA Experiment 20000452 PARAMETER Experiment Name: At_CS6879_Shoots-Roots_P Parameter: Tissue Value: Shoots
  misc_feature: MA Experiment ID: 20000573 Result: Down-regulated in Transcription
  misc_feature: MA Experiment 20000573 PARAMETER Experiment Name: At_100uM_ABA_Mutants__P Parameter: Organism Value: A. thaliana
  misc_feature: MA Experiment 20000573 PARAMETER Experiment Name: At_100uM_ABA_Mutants__P Parameter: Plant Line Value: CS22 vs. Ler wt
  misc_feature: MA Experiment 20000573 PARAMETER Experiment Name: At_100uM_ABA_Mutants__P Parameter: Timepoint (hr) Value: N/A
  misc_feature: MA Experiment 20000573 PARAMETER Experiment Name: At_100uM_ABA_Mutants__P Parameter: Tissue Value: Whole Plant
  misc_feature: MA Experiment 20000573 PARAMETER Experiment Name: At_100uM_ABA_Mutants__P Parameter: Treatment Value: None
  misc_feature: MA Experiment ID: 20000574 Result: Down-regulated in Transcription
  misc_feature: MA Experiment 20000574 PARAMETER Experiment Name: At_100uM_ABA_Mutants__P Parameter: Organism Value: A. thaliana
  misc_feature: MA Experiment 20000574 PARAMETER Experiment Name: At_100uM_ABA_Mutants__P Parameter: Plant Line Value: CS23 vs. Ler wt
  misc_feature: MA Experiment 20000574 PARAMETER Experiment Name: At_100uM_ABA_Mutants__P Parameter: Timepoint (hr) Value: N/A
  misc_feature: MA Experiment 20000574 PARAMETER Experiment Name: At_100uM_ABA_Mutants__P Parameter: Tissue Value: Whole Plant
  misc_feature: MA Experiment 20000574 PARAMETER Experiment Name: At_100uM_ABA_Mutants__P Parameter: Treatment Value: None
  misc_feature: MA Experiment ID: 20001248 Result: Down-regulated in Transcription
  misc_feature: MA Experiment 20001248 PARAMETER Experiment Name: At_Far-red-induction_P Parameter: Age (day) Value: 7
  misc_feature: MA Experiment 20001248 PARAMETER Experiment Name: At_Far-red-induction_P Parameter: Light Value: Far-red vs. White
  misc_feature: MA Experiment 20001248 PARAMETER Experiment Name: At_Far-red-induction_P Parameter: Organism Value: A. thaliana
  misc_feature: MA Experiment 20001248 PARAMETER Experiment Name: At_Far-red-induction_P Parameter: Plant Line Value: Columbia
  misc_feature: MA Experiment 20001248 PARAMETER Experiment Name: At_Far-red-induction_P Parameter: Timepoint (hr) Value: 4
  misc_feature: MA Experiment 20001248 PARAMETER Experiment Name: At_Far-red-induction_P Parameter: Tissue Value: Whole Plant

SEQ ID NO: 49756 - protein, 499 aa, Arabidopsis thaliana; identical to SEQ ID NO: 45815
  peptide (1)..(499): Ceres Seq. ID no. 13647163
  misc_feature (4)..(283): Pfam Name: Protein kinase domain Pfam Description: Protein kinase domain
  misc_feature (4)..(283): Pfam Name: Protein kinase domain Pfam Description: Protein kinase domain
  misc_feature (1)..(350): Homolog of NCBI NO: 11496279 NR Description: male germ cell-associated kinase
  misc_feature (1)..(293): Homolog of NCBI NO: 34897492 NR Description: putative protein kinase [Oryza sativa (japonica
  misc_feature (1)..(438): Homolog of NCBI NO: 34897960 NR Description: serine/threonine-protein kinase Mak (male germ
  misc_feature (1)..(411): Homolog of NCBI NO: 27948450 NR Description: GAMYB-binding protein [Hordeum vulgare subsp.
  misc_feature (1)..(284): Homolog of NCBI NO: 7488272 NR Description: protein kinase homolog T18B16.80 - Arabidopsis
  misc_feature (1)..(350): Homolog of NCBI NO: 11496279 NR Description: male germ cell-associated kinase
  misc_feature (1)..(438): Homolog of NCBI NO: 34897960 NR Description: serine/threonine-protein kinase Mak (male germ
  misc_feature (1)..(284): Homolog of NCBI NO: 7488272 NR Description: protein kinase homolog T18B16.80 - Arabidopsis
  misc_feature (1)..(474): Homolog of NCBI NO: 9758733 NR Description: serine/threonine-protein kinase Mak (male germ
  misc_feature (1)..(499): Homolog of NCBI NO: 18422554 NR Description: protein kinase, putative [Arabidopsis thaliana]
  misc_feature (1)..(499): Homolog of NCBI NO: 15450860 NR Description: serine/threonine-protein kinase Mak (male germ
  misc_feature (1)..(457): Homolog of NCBI NO: 30684655 NR Description: protein kinase, putative [Arabidopsis thaliana]
  misc_feature (1)..(457): Homolog of NCBI NO: 18415242 NR Description: protein kinase, putative [Arabidopsis thaliana]
  misc_feature (1)..(411): Homolog of NCBI NO: 27948450 NR Description: GAMYB-binding protein [Hordeum vulgare subsp.
  misc_feature (1)..(293): Homolog of NCBI NO: 34897492 NR Description: putative protein kinase [Oryza sativa (japonica
  misc_feature (1)..(457): Homolog of NCBI NO: 18415242 NR Description: protein kinase, putative [Arabidopsis thaliana]
  misc_feature (1)..(457): Homolog of NCBI NO: 30684655 NR Description: protein kinase, putative [Arabidopsis thaliana]
  misc_feature (1)..(499): Homolog of NCBI NO: 15450860 NR Description: serine/threonine-protein kinase Mak (male germ
  misc_feature (1)..(499): Homolog of NCBI NO: 18422554 NR Description: protein kinase, putative [Arabidopsis thaliana]
  misc_feature (1)..(474): Homolog of NCBI NO: 9758733 NR Description: serine/threonine-protein kinase Mak (male germ

SEQ ID NO: 49757 - protein, 465 aa, Arabidopsis thaliana; identical to SEQ ID NO: 45816
  peptide (1)..(465): Ceres Seq. ID no. 13647164
  misc_feature (1)..(249): Pfam Name: Protein kinase domain Pfam Description: Protein kinase domain
  misc_feature (1)..(249): Pfam Name: Protein kinase domain Pfam Description: Protein kinase domain
  misc_feature (1)..(316): Homolog of NCBI NO: 11496279 NR Description: male germ cell-associated kinase
  misc_feature (1)..(259): Homolog of NCBI NO: 34897492 NR Description: putative protein kinase [Oryza sativa (japonica
  misc_feature (1)..(404): Homolog of NCBI NO: 34897960 NR Description: serine/threonine-protein kinase Mak (male germ
  misc_feature (1)..(377): Homolog of NCBI NO: 27948450 NR Description: GAMYB-binding protein [Hordeum vulgare subsp.
  misc_feature (1)..(250): Homolog of NCBI NO: 7488272 NR Description: protein kinase homolog T18B16.80 - Arabidopsis
  misc_feature (1)..(316): Homolog of NCBI NO: 11496279 NR Description: male germ cell-associated kinase
  misc_feature (1)..(404): Homolog of NCBI NO: 34897960 NR Description: serine/threonine-protein kinase Mak (male germ
  misc_feature (1)..(250): Homolog of NCBI NO: 7488272 NR Description: protein kinase homolog T18B16.80 - Arabidopsis
  misc_feature (1)..(440): Homolog of NCBI NO: 9758733 NR Description: serine/threonine-protein kinase Mak (male germ
  misc_feature (1)..(465): Homolog of NCBI NO: 18422554 NR Description: protein kinase, putative [Arabidopsis thaliana]
  misc_feature (1)..(465): Homolog of NCBI NO: 15450860 NR Description: serine/threonine-protein kinase Mak (male germ
  misc_feature (1)..(423): Homolog of NCBI NO: 30684655 NR Description: protein kinase, putative [Arabidopsis thaliana]
  misc_feature (1)..(423): Homolog of NCBI NO: 18415242 NR Description: protein kinase, putative [Arabidopsis thaliana]
  misc_feature (1)..(377): Homolog of NCBI NO: 27948450 NR Description: GAMYB-binding protein [Hordeum vulgare subsp.
  misc_feature (1)..(259): Homolog of NCBI NO: 34897492 NR Description: putative protein kinase [Oryza sativa (japonica
  misc_feature (1)..(423): Homolog of NCBI NO: 18415242 NR Description: protein kinase, putative [Arabidopsis thaliana]
  misc_feature (1)..(423): Homolog of NCBI NO: 30684655 NR Description: protein kinase, putative [Arabidopsis thaliana]
  misc_feature (1)..(465): Homolog of NCBI NO: 15450860 NR Description: serine/threonine-protein kinase Mak (male germ
  misc_feature (1)..(465): Homolog of NCBI NO: 18422554 NR Description: protein kinase, putative [Arabidopsis thaliana]
  misc_feature (1)..(440): Homolog of NCBI NO: 9758733 NR Description: serine/threonine-protein kinase Mak (male germ

SEQ ID NO: 49758 - protein, 443 aa, Arabidopsis thaliana; identical to SEQ ID NO: 45817
  peptide (1)..(443): Ceres Seq. ID no. 13647165
  misc_feature (1)..(227): Pfam Name: Protein kinase domain Pfam Description: Protein kinase domain
  misc_feature (1)..(227): Pfam Name: Protein kinase domain Pfam Description: Protein kinase domain
  misc_feature (1)..(294): Homolog of NCBI NO: 11496279 NR Description: male germ cell-associated kinase
  misc_feature (1)..(237): Homolog of NCBI NO: 34897492 NR Description: putative protein kinase [Oryza sativa (japonica
  misc_feature (1)..(382): Homolog of NCBI NO: 34897960 NR Description: serine/threonine-protein kinase Mak (male germ
  misc_feature (1)..(355): Homolog of NCBI NO: 27948450 NR Description: GAMYB-binding protein [Hordeum vulgare subsp.
  misc_feature (1)..(228): Homolog of NCBI NO: 7488272 NR Description: protein kinase homolog T18B16.80 - Arabidopsis
  misc_feature (1)..(294): Homolog of NCBI NO: 11496279 NR Description: male germ cell-associated kinase
  misc_feature (1)..(382): Homolog of NCBI NO: 34897960 NR Description: serine/threonine-protein kinase Mak (male germ
  misc_feature (1)..(228): Homolog of NCBI NO: 7488272 NR Description: protein kinase homolog T18B16.80 - Arabidopsis
  misc_feature (1)..(418): Homolog of NCBI NO: 9758733 NR Description: serine/threonine-protein kinase Mak (male germ
  misc_feature (1)..(443): Homolog of NCBI NO: 18422554 NR Description: protein kinase, putative [Arabidopsis thaliana]
  misc_feature (1)..(443): Homolog of NCBI NO: 15450860 NR Description: serine/threonine-protein kinase Mak (male germ
  misc_feature (1)..(401): Homolog of NCBI NO: 30684655 NR Description: protein kinase, putative [Arabidopsis thaliana]
  misc_feature (1)..(401): Homolog of NCBI NO: 18415242 NR Description: protein kinase, putative [Arabidopsis thaliana]
  misc_feature (1)..(355): Homolog of NCBI NO: 27948450 NR Description: GAMYB-binding protein [Hordeum vulgare subsp.
  misc_feature (1)..(237): Homolog of NCBI NO: 34897492 NR Description: putative protein kinase [Oryza sativa (japonica
  misc_feature (1)..(401): Homolog of NCBI NO: 18415242 NR Description: protein kinase, putative [Arabidopsis thaliana]
  misc_feature (1)..(401): Homolog of NCBI NO: 30684655 NR Description: protein kinase, putative [Arabidopsis thaliana]
  misc_feature (1)..(443): Homolog of NCBI NO: 15450860 NR Description: serine/threonine-protein kinase Mak (male germ
  misc_feature (1)..(443): Homolog of NCBI NO: 18422554 NR Description: protein kinase, putative [Arabidopsis thaliana]
  misc_feature (1)..(418): Homolog of NCBI NO: 9758733 NR Description: serine/threonine-protein kinase Mak (male germ

SEQ ID NO: 49759 - DNA, 1488 bp, Arabidopsis thaliana; identical to SEQ ID NO: 46447
  misc_feature (1)..(1488): Ceres Seq. ID no. 13592020
  misc_feature: MA Experiment ID: 20000227 Result: Up-regulated in Transcription
  misc_feature: MA Experiment 20000227 PARAMETER Experiment Name: At_Root-Tips-vs-Tops_P Parameter: Tissue Value: Root Tips vs. Root Tops
  misc_feature: MA Experiment ID: 20000234 Result: Up-regulated in Transcription
  misc_feature: MA Experiment 20000234 PARAMETER Experiment Name: At_Siliques_P Parameter: Age (day) Value: 21
  misc_feature: MA Experiment 20000234 PARAMETER Experiment Name: At_Siliques_P Parameter: Organism Value: A. thaliana
  misc_feature: MA Experiment 20000234 PARAMETER Experiment Name: At_Siliques_P Parameter: Plant Line Value: WS
  misc_feature: MA Experiment 20000234 PARAMETER Experiment Name: At_Siliques_P Parameter: Tissue Value: Less Than 5mm Siliques vs. Whole Plant
  misc_feature: MA Experiment ID: 20000437 Result: Down-regulated in Transcription
  misc_feature: MA Experiment 20000437 PARAMETER Experiment Name: At_Drought_P Parameter: Age (day) Value: 8
  misc_feature: MA Experiment 20000437 PARAMETER Experiment Name: At_Drought_P Parameter: Organism Value: A. thaliana
  misc_feature: MA Experiment 20000437 PARAMETER Experiment Name: At_Drought_P Parameter: Plant Line Value: WS
  misc_feature: MA Experiment 20000437 PARAMETER Experiment Name: At_Drought_P Parameter: Timepoint (hr) Value: 24
  misc_feature: MA Experiment 20000437 PARAMETER Experiment Name: At_Drought_P Parameter: Tissue Value: Whole Plant
  misc_feature: MA Experiment 20000437 PARAMETER Experiment Name: At_Drought_P Parameter: Treatment Value: Drought vs. No Drought
  misc_feature: MA Experiment ID: 20000443 Result: Up-regulated in Transcription
  misc_feature: MA Experiment 20000443 PARAMETER Experiment Name: At_1uM_BR-BRZ__P Parameter: Tissue Value: Shoot Apices
  misc_feature: MA Experiment 20000443 PARAMETER Experiment Name: At_1uM_BR-BRZ__P Parameter: Treatment Value: 1uM BRZ vs. No Treatment
  misc_feature: MA Experiment ID: 20000495 Result: Up-regulated in Transcription
  misc_feature: MA Experiment 20000495 PARAMETER Experiment Name: At_Guard_Cells_P Parameter: Harvest Date Value: 8/2/2002
  misc_feature: MA Experiment 20000495 PARAMETER Experiment Name: At_Guard_Cells_P Parameter: Organism Value: A. thaliana
  misc_feature: MA Experiment 20000495 PARAMETER Experiment Name: At_Guard_Cells_P Parameter: Tissue Value: Guard Cells vs. Leaves
  misc_feature: MA Experiment ID: 20000794 Result: Down-regulated in Transcription
  misc_feature: MA Experiment 20000794 PARAMETER Experiment Name: At_Petals_P Parameter: Age (day) Value: 23-25 days
  misc_feature: MA Experiment 20000794 PARAMETER Experiment Name: At_Petals_P Parameter: Plant Line Value: WS
  misc_feature: MA Experiment 20000794 PARAMETER Experiment Name: At_Petals_P Parameter: Tissue Value: Petals vs. Whole plant
  misc_feature: MA Experiment ID: 20001248 Result: Down-regulated in Transcription
  misc_feature: MA Experiment 20001248 PARAMETER Experiment Name: At_Far-red-induction_P Parameter: Age (day) Value: 7
  misc_feature: MA Experiment 20001248 PARAMETER Experiment Name: At_Far-red-induction_P Parameter: Light Value: Far-red vs. White
  misc_feature: MA Experiment 20001248 PARAMETER Experiment Name: At_Far-red-induction_P Parameter: Organism Value: A. thaliana
  misc_feature: MA Experiment 20001248 PARAMETER Experiment Name: At_Far-red-induction_P Parameter: Plant Line Value: Columbia
  misc_feature: MA Experiment 20001248 PARAMETER Experiment Name: At_Far-red-induction_P Parameter: Timepoint (hr) Value: 4
  misc_feature: MA Experiment 20001248 PARAMETER Experiment Name: At_Far-red-induction_P Parameter: Tissue Value: Whole Plant
  misc_feature: MA Experiment ID: 20001560 Result: Up-regulated in Transcription
  misc_feature: MA Experiment 20001560 PARAMETER Experiment Name: At_Drought_Soil_Dry_P Parameter: Age (day) Value: 28
  misc_feature: MA Experiment 20001560 PARAMETER Experiment Name: At_Drought_Soil_Dry_P Parameter: Organism Value: A. thaliana
  misc_feature: MA Experiment 20001560 PARAMETER Experiment Name: At_Drought_Soil_Dry_P Parameter: Plant Line Value: WS
  misc_feature: MA Experiment 20001560 PARAMETER Experiment Name: At_Drought_Soil_Dry_P Parameter: Post Timepoint (hr) Value: None
  misc_feature: MA Experiment 20001560 PARAMETER Experiment Name: At_Drought_Soil_Dry_P Parameter: Post-Treatment Value: None
  misc_feature: MA Experiment 20001560 PARAMETER Experiment Name: At_Drought_Soil_Dry_P Parameter: Timepoint (day) Value: 14
  misc_feature: MA Experiment 20001560 PARAMETER Experiment Name: At_Drought_Soil_Dry_P Parameter: Treatment Value: Drought vs. No Drought

SEQ ID NO: 49760 - protein, 434 aa, Arabidopsis thaliana; identical to SEQ ID NO: 46448
  peptide (1)..(434): Ceres Seq. ID no. 13592021
  misc_feature (33)..(345): Pfam Name: Calreticulin family Pfam Description: Calreticulin family
  misc_feature (33)..(345): Pfam Name: Calreticulin family Pfam Description: Calreticulin family
  misc_feature (12)..(420): Homolog of NCBI NO: 11131769 NR Description: Calreticulin precursor
  misc_feature (14)..(434): Homolog of NCBI NO: 11131904 NR Description: Calreticulin precursor
  misc_feature (14)..(434): Homolog of NCBI NO: 11131745 NR Description: Calreticulin precursor
  misc_feature (30)..(434): Homolog of NCBI NO: 1009712 NR Description: calreticulin
  misc_feature (10)..(431): Homolog of NCBI NO: 25295763 NR Description: hypothetical protein [imported] - Arabidopsis
  misc_feature (12)..(420): Homolog of NCBI NO: 11131769 NR Description: Calreticulin precursor
  misc_feature (14)..(434): Homolog of NCBI NO: 11131745 NR Description: Calreticulin precursor
  misc_feature (10)..(431): Homolog of NCBI NO: 25295763 NR Description: hypothetical protein [imported] - Arabidopsis
  misc_feature (10)..(434): Homolog of NCBI NO: 15223517 NR Description: calreticulin 1 (CRT1) [Arabidopsis thaliana]
  misc_feature (10)..(424): Homolog of NCBI NO: 24417462 NR Description: unknown [Arabidopsis thaliana]
  misc_feature (10)..(434): Homolog of NCBI NO: 12643243 NR Description: CALRETICULIN 2 PRECURSOR
  misc_feature (10)..(434): Homolog of NCBI NO: 21555174 NR Description: putative calcium-binding protein, calreticulin
  misc_feature (10)..(434): Homolog of NCBI NO: 15217459 NR Description: calreticulin 2 (CRT2) [Arabidopsis thaliana]
  misc_feature (30)..(434): Homolog of NCBI NO: 1009712 NR Description: calreticulin
  misc_feature (14)..(434): Homolog of NCBI NO: 11131904 NR Description: Calreticulin precursor
  misc_feature (10)..(434): Homolog of NCBI NO: 15217459 NR Description: calreticulin 2 (CRT2) [Arabidopsis thaliana]
  misc_feature (10)..(434): Homolog of NCBI NO: 21555174 NR Description: putative calcium-binding protein, calreticulin
  misc_feature (10)..(434): Homolog of NCBI NO: 12643243 NR Description: CALRETICULIN 2 PRECURSOR
  misc_feature (10)..(424): Homolog of NCBI NO: 24417462 NR Description: unknown [Arabidopsis thaliana]
  misc_feature (10)..(434): Homolog of NCBI NO: 15223517 NR Description: calreticulin 1 (CRT1) [Arabidopsis thaliana]

SEQ ID NO: 49761 - protein, 425 aa, Arabidopsis thaliana; identical to SEQ ID NO: 46449
  peptide (1)..(425): Ceres Seq. ID no. 13592022
  misc_feature (24)..(336): Pfam Name: Calreticulin family Pfam Description: Calreticulin family
  misc_feature (24)..(336): Pfam Name: Calreticulin family Pfam Description: Calreticulin family
  misc_feature (3)..(411): Homolog of NCBI NO: 11131769 NR Description: Calreticulin precursor
  misc_feature (5)..(425): Homolog of NCBI NO: 11131904 NR Description: Calreticulin precursor
  misc_feature (5)..(425): Homolog of NCBI NO: 11131745 NR Description: Calreticulin precursor
  misc_feature (21)..(425): Homolog of NCBI NO: 1009712 NR Description: calreticulin
  misc_feature (1)..(422): Homolog of NCBI NO: 25295763 NR Description: hypothetical protein [imported] - Arabidopsis
  misc_feature (3)..(411): Homolog of NCBI NO: 11131769 NR Description: Calreticulin precursor
  misc_feature (5)..(425): Homolog of NCBI NO: 11131745 NR Description: Calreticulin precursor
  misc_feature (1)..(422): Homolog of NCBI NO: 25295763 NR Description: hypothetical protein [imported] - Arabidopsis
  misc_feature (1)..(425): Homolog of NCBI NO: 15223517 NR Description: calreticulin 1 (CRT1) [Arabidopsis thaliana]
  misc_feature (1)..(415): Homolog of NCBI NO: 24417462 NR Description: unknown [Arabidopsis thaliana]
  misc_feature (1)..(425): Homolog of NCBI NO: 12643243 NR Description: CALRETICULIN 2 PRECURSOR
  misc_feature (1)..(425): Homolog of NCBI NO: 21555174 NR Description: putative calcium-binding protein, calreticulin
  misc_feature (1)..(425): Homolog of NCBI NO: 15217459 NR Description: calreticulin 2 (CRT2) [Arabidopsis thaliana]
  misc_feature (21)..(425): Homolog of NCBI NO: 1009712 NR Description: calreticulin
  misc_feature (5)..(425): Homolog of NCBI NO: 11131904 NR Description: Calreticulin precursor
  misc_feature (1)..(425): Homolog of NCBI NO: 15217459 NR Description: calreticulin 2 (CRT2) [Arabidopsis thaliana]
  misc_feature (1)..(425): Homolog of NCBI NO: 21555174 NR Description: putative calcium-binding protein, calreticulin
  misc_feature (1)..(425): Homolog of NCBI NO: 12643243 NR Description: CALRETICULIN 2 PRECURSOR
  misc_feature (1)..(415): Homolog of NCBI NO: 24417462 NR Description: unknown [Arabidopsis thaliana]
  misc_feature (1)..(425): Homolog of NCBI NO: 15223517 NR Description: calreticulin 1 (CRT1) [Arabidopsis thaliana]

SEQ ID NO: 49762 - protein, 313 aa, Arabidopsis thaliana; identical to SEQ ID NO: 46450
  peptide (1)..(313): Ceres Seq. ID no. 13592023
  misc_feature (1)..(224): Pfam Name: Calreticulin family Pfam Description: Calreticulin family
  misc_feature (1)..(224): Pfam Name: Calreticulin family Pfam Description: Calreticulin family
  misc_feature (1)..(299): Homolog of NCBI NO: 11131769 NR Description: Calreticulin precursor
  misc_feature (1)..(313): Homolog of NCBI NO: 11131904 NR Description: Calreticulin precursor
  misc_feature (1)..(313): Homolog of NCBI NO: 11131745 NR Description: Calreticulin precursor
  misc_feature (1)..(313): Homolog of NCBI NO: 1009712 NR Description: calreticulin
  misc_feature (1)..(310): Homolog of NCBI NO: 25295763 NR Description: hypothetical protein [imported] - Arabidopsis
  misc_feature (1)..(299): Homolog of NCBI NO: 11131769 NR Description: Calreticulin precursor
  misc_feature (1)..(313): Homolog of NCBI NO: 11131745 NR Description: Calreticulin precursor
  misc_feature (1)..(310): Homolog of NCBI NO: 25295763 NR Description: hypothetical protein [imported] - Arabidopsis
  misc_feature (1)..(313): Homolog of NCBI NO: 15223517 NR Description: calreticulin 1 (CRT1) [Arabidopsis thaliana]
  misc_feature (1)..(303): Homolog of NCBI NO: 24417462 NR Description: unknown [Arabidopsis thaliana]
  misc_feature (1)..(313): Homolog of NCBI NO: 12643243 NR Description: CALRETICULIN 2 PRECURSOR
  misc_feature (1)..(313): Homolog of NCBI NO: 21555174 NR Description: putative calcium-binding protein, calreticulin
  misc_feature (1)..(313): Homolog of NCBI NO: 15217459 NR Description: calreticulin 2 (CRT2) [Arabidopsis thaliana]
  misc_feature (1)..(313): Homolog of NCBI NO: 1009712 NR Description: calreticulin
  misc_feature (1)..(313): Homolog of NCBI NO: 11131904 NR Description: Calreticulin precursor
  misc_feature (1)..(313): Homolog of NCBI NO: 15217459 NR Description: calreticulin 2 (CRT2) [Arabidopsis thaliana]
  misc_feature (1)..(313): Homolog of NCBI NO: 21555174 NR Description: putative calcium-binding protein, calreticulin
  misc_feature (1)..(313): Homolog of NCBI NO: 12643243 NR Description: CALRETICULIN 2 PRECURSOR
  misc_feature (1)..(303): Homolog of NCBI NO: 24417462 NR Description: unknown [Arabidopsis thaliana]
  misc_feature (1)..(313): Homolog of NCBI NO: 15223517 NR Description: calreticulin 1 (CRT1) [Arabidopsis thaliana]

SEQ ID NO: 49763 - DNA, 2362 bp, Arabidopsis thaliana; identical to SEQ ID NO: 45950
  misc_feature (1)..(2362): Ceres Seq. ID no. 12560857
  misc_feature: MA Experiment ID: 108577 Result: Down-regulated in Transcription
  misc_feature: MA Experiment 108577 PARAMETER Experiment Name: At_42deg_Heat_cDNA_P Parameter: Temperature (deg C) Value: 42 vs. 22
  misc_feature: MA Experiment 108577 PARAMETER Experiment Name: At_42deg_Heat_cDNA_P Parameter: Timepoint (hr) Value: 6
  misc_feature: MA Experiment 108577 PARAMETER Experiment Name: At_42deg_Heat_cDNA_P Parameter: Tissue Value: Aerial
  misc_feature: MA Experiment ID: 108579 Result: Down-regulated in Transcription
  misc_feature: MA Experiment 108579 PARAMETER Experiment Name: At_4deg_Cold_cDNA_P Parameter: Temperature (deg C) Value: 4 vs. 22
  misc_feature: MA Experiment 108579 PARAMETER Experiment Name: At_4deg_Cold_cDNA_P Parameter: Timepoint (hr) Value: 6
  misc_feature: MA Experiment 108579 PARAMETER Experiment Name: At_4deg_Cold_cDNA_P Parameter: Tissue Value: Aerial
  misc_feature: MA Experiment ID: 20000224 Result: Down-regulated in Transcription
  misc_feature: MA Experiment ID: 20001247 Result: Up-regulated in Transcription
  misc_feature: MA Experiment 20001247 PARAMETER Experiment Name: At_Far-red-induction_P Parameter: Age (day) Value: 7
  misc_feature: MA Experiment 20001247 PARAMETER Experiment Name: At_Far-red-induction_P Parameter: Light Value: Far-red vs. White
  misc_feature: MA Experiment 20001247 PARAMETER Experiment Name: At_Far-red-induction_P Parameter: Organism Value: A. thaliana
  misc_feature: MA Experiment 20001247 PARAMETER Experiment Name: At_Far-red-induction_P Parameter: Plant Line Value: Columbia
  misc_feature: MA Experiment 20001247 PARAMETER Experiment Name: At_Far-red-induction_P Parameter: Timepoint (hr) Value: 1
  misc_feature: MA Experiment 20001247 PARAMETER Experiment Name: At_Far-red-induction_P Parameter: Tissue Value: Whole Plant
  misc_feature: MA Experiment ID: 20001450 Result: Up-regulated in Transcription
  misc_feature: MA Experiment 20001450 PARAMETER Experiment Name: At_Far-red-induction_P Parameter: Age (day) Value: 7
  misc_feature: MA Experiment 20001450 PARAMETER Experiment Name: At_Far-red-induction_P Parameter: Light Value: Far-red vs. White
  misc_feature: MA Experiment 20001450 PARAMETER Experiment Name: At_Far-red-induction_P Parameter: Organism Value: A. thaliana
  misc_feature: MA Experiment 20001450 PARAMETER Experiment Name: At_Far-red-induction_P Parameter: Plant Line Value: Columbia
  misc_feature: MA Experiment 20001450 PARAMETER Experiment Name: At_Far-red-induction_P Parameter: Timepoint (hr) Value: 8
  misc_feature: MA Experiment 20001450 PARAMETER Experiment Name: At_Far-red-induction_P Parameter: Tissue Value: Whole Plant
  misc_feature: MA Experiment ID: 20001451 Result: Down-regulated in Transcription
  misc_feature: MA Experiment 20001451 PARAMETER Experiment Name: At_Far-red-induction_P Parameter: Age (day) Value: 7
  misc_feature: MA Experiment 20001451 PARAMETER Experiment Name: At_Far-red-induction_P Parameter: Light Value: Far-red vs. White
  misc_feature: MA Experiment 20001451 PARAMETER Experiment Name: At_Far-red-induction_P Parameter: Organism Value: A. thaliana
  misc_feature: MA Experiment 20001451 PARAMETER Experiment Name: At_Far-red-induction_P Parameter: Plant Line Value: Columbia
  misc_feature: MA Experiment 20001451 PARAMETER Experiment Name: At_Far-red-induction_P Parameter: Timepoint (hr) Value: 24
  misc_feature: MA Experiment 20001451 PARAMETER Experiment Name: At_Far-red-induction_P Parameter: Tissue Value: Whole Plant

SEQ ID NO: 49764 - protein, 549 aa, Arabidopsis thaliana; identical to SEQ ID NO: 45951
  peptide (1)..(549): Ceres Seq. ID no. 12560858
  misc_feature (339)..(361): Pfam Name: Leucine Rich Repeat Pfam Description: Leucine Rich Repeat
  misc_feature (339)..(361): Pfam Name: Leucine Rich Repeat Pfam Description: Leucine Rich Repeat
  misc_feature (209)..(497): Homolog of NCBI NO: 24216020 NR Description: Leucine-rich repeat containing protein
  misc_feature (216)..(510): Homolog of NCBI NO: 7489337 NR Description: leucine-rich protein - common sunflower
  misc_feature (206)..(509): Homolog of NCBI NO: 15239256 NR Description: putative protein; protein id: At5g05850.1
  misc_feature (233)..(527): Homolog of NCBI NO: 18391461 NR Description: expressed protein
  misc_feature (111)..(509): Homolog of NCBI NO: 30688342 NR Description: leucine rich repeat protein family [Arabidopsis
  misc_feature (209)..(497): Homolog of NCBI NO: 24216020 NR Description: Leucine-rich repeat containing protein
  misc_feature (206)..(509): Homolog of NCBI NO: 15239256 NR Description: putative protein; protein id: At5g05850.1
  misc_feature (111)..(509): Homolog of NCBI NO: 30688342 NR Description: leucine rich repeat protein family [Arabidopsis
  misc_feature (1)..(549): Homolog of NCBI NO: 15237011 NR Description: putative protein
  misc_feature (4)..(537): Homolog of NCBI NO: 20148766 NR Description: PSR9 [Brassica nigra]
  misc_feature (10)..(539): Homolog of NCBI NO: 15227838 NR Description: unknown protein; protein id: At2g17440.1
  misc_feature (12)..(548): Homolog of NCBI NO: 37537048 NR Description: putative leucine-rich repeat protein
  misc_feature (162)..(509): Homolog of NCBI NO: 22330985 NR Description: hypothetical protein
  misc_feature (233)..(527): Homolog of NCBI NO: 18391461 NR Description: expressed protein
  misc_feature (216)..(510): Homolog of NCBI NO: 7489337 NR Description: leucine-rich protein - common sunflower
  misc_feature (162)..(509): Homolog of NCBI NO: 22330985 NR Description: hypothetical protein
  misc_feature (12)..(548): Homolog of NCBI NO: 37537048 NR Description: putative leucine-rich repeat protein
  misc_feature (10)..(539): Homolog of NCBI NO: 15227838 NR Description: unknown protein; protein id: At2g17440.1
  misc_feature (4)..(537): Homolog of NCBI NO: 20148766 NR Description: PSR9 [Brassica nigra]
  misc_feature (1)..(549): Homolog of NCBI NO: 15237011 NR Description: putative protein

SEQ ID NO: 49765 - protein, 546 aa, Arabidopsis thaliana; identical to SEQ ID NO: 45952
  peptide (1)..(546): Ceres Seq. ID no. 12560859
  misc_feature (336)..(358): Pfam Name: Leucine Rich Repeat Pfam Description: Leucine Rich Repeat
  misc_feature (336)..(358): Pfam Name: Leucine Rich Repeat Pfam Description: Leucine Rich Repeat
  misc_feature (206)..(494): Homolog of NCBI NO: 24216020 NR Description: Leucine-rich repeat containing protein
  misc_feature (213)..(507): Homolog of NCBI NO: 7489337 NR Description: leucine-rich protein - common sunflower
  misc_feature (203)..(506): Homolog of NCBI NO: 15239256 NR Description: putative protein; protein id: At5g05850.1
  misc_feature (230)..(524): Homolog of NCBI NO: 18391461 NR Description: expressed protein
  misc_feature (108)..(506): Homolog of NCBI NO: 30688342 NR Description: leucine rich repeat protein family [Arabidopsis
  misc_feature (206)..(494): Homolog of NCBI NO: 24216020 NR Description: Leucine-rich repeat containing protein
  misc_feature (203)..(506): Homolog of NCBI NO: 15239256 NR Description: putative protein; protein id: At5g05850.1
  misc_feature (108)..(506): Homolog of NCBI NO: 30688342 NR Description: leucine rich repeat protein family [Arabidopsis
  misc_feature (1)..(546): Homolog of NCBI NO: 15237011 NR Description: putative protein
  misc_feature (1)..(534): Homolog of NCBI NO: 20148766 NR Description: PSR9 [Brassica nigra]
  misc_feature (7)..(536): Homolog of NCBI NO: 15227838 NR Description: unknown protein; protein id: At2g17440.1
  misc_feature (9)..(545): Homolog of NCBI NO: 37537048 NR Description: putative leucine-rich repeat protein
  misc_feature (159)..(506): Homolog of NCBI NO: 22330985 NR Description: hypothetical protein
  misc_feature (230)..(524): Homolog of NCBI NO: 18391461 NR Description: expressed protein
  misc_feature (213)..(507): Homolog of NCBI NO: 7489337 NR Description: leucine-rich protein - common sunflower
  misc_feature (159)..(506): Homolog of NCBI NO: 22330985 NR Description: hypothetical protein
  misc_feature (9)..(545): Homolog of NCBI NO: 37537048 NR Description: putative leucine-rich repeat protein
  misc_feature (7)..(536): Homolog of NCBI NO: 15227838 NR Description: unknown protein; protein id: At2g17440.1
  misc_feature (1)..(534): Homolog of NCBI NO: 20148766 NR Description: PSR9 [Brassica nigra]
  misc_feature (1)..(546): Homolog of NCBI NO: 15237011 NR Description: putative protein

SEQ ID NO: 49766 - protein, 544 aa, Arabidopsis thaliana; identical to SEQ ID NO: 45953
  peptide (1)..(544): Ceres Seq. ID no. 12560860
  misc_feature (334)..(356): Pfam Name: Leucine Rich Repeat Pfam Description: Leucine Rich Repeat
  misc_feature (334)..(356): Pfam Name: Leucine Rich Repeat Pfam Description: Leucine Rich Repeat
  misc_feature (204)..(492): Homolog of NCBI NO: 24216020 NR Description: Leucine-rich repeat containing protein
  misc_feature (211)..(505): Homolog of NCBI NO: 7489337 NR Description: leucine-rich protein - common sunflower
  misc_feature (201)..(504): Homolog of NCBI NO: 15239256 NR Description: putative protein; protein id: At5g05850.1
  misc_feature (228)..(522): Homolog of NCBI NO: 18391461 NR Description: expressed protein
  misc_feature (106)..(504): Homolog of NCBI NO: 30688342 NR Description: leucine rich repeat protein family [Arabidopsis
  misc_feature (204)..(492): Homolog of NCBI NO: 24216020 NR Description: Leucine-rich repeat containing protein
  misc_feature (201)..(504): Homolog of NCBI NO: 15239256 NR Description: putative protein; protein id: At5g05850.1
  misc_feature (106)..(504): Homolog of NCBI NO: 30688342 NR Description: leucine rich repeat protein family [Arabidopsis
  misc_feature (1)..(544): Homolog of NCBI NO: 15237011 NR Description: putative protein
  misc_feature (1)..(532): Homolog of NCBI NO: 20148766 NR Description: PSR9 [Brassica nigra]
  misc_feature (5)..(534): Homolog of NCBI NO: 15227838 NR Description: unknown protein; protein id: At2g17440.1
  misc_feature (7)..(543): Homolog of NCBI NO: 37537048 NR Description: putative leucine-rich repeat protein
  misc_feature (157)..(504): Homolog of NCBI NO: 22330985 NR Description: hypothetical protein
  misc_feature (228)..(522): Homolog of NCBI NO: 18391461 NR Description: expressed protein
  misc_feature (211)..(505): Homolog of NCBI NO: 7489337 NR Description: leucine-rich protein - common sunflower
  misc_feature (157)..(504): Homolog of NCBI NO: 22330985 NR Description: hypothetical protein
  misc_feature (7)..(543): Homolog of NCBI NO: 37537048 NR Description: putative leucine-rich repeat protein
  misc_feature (5)..(534): Homolog of NCBI NO: 15227838 NR Description: unknown protein; protein id: At2g17440.1
  misc_feature (1)..(532): Homolog of NCBI NO: 20148766 NR Description: PSR9 [Brassica nigra]
  misc_feature (1)..(544): Homolog of NCBI NO: 15237011 NR Description: putative protein

SEQ ID NO: 49767 - DNA, 1359 bp, Arabidopsis thaliana
  misc_feature (1)..(1359): Ceres Seq. ID no. 13587957
  misc_feature: MA Experiment ID: 20000314 Result: Down-regulated in Transcription
  misc_feature: MA Experiment 20000314 PARAMETER Experiment Name: At_14day_Shoots-Roots_Sub_P Parameter: Age (day) Value: 14
  misc_feature: MA Experiment 20000314 PARAMETER Experiment Name: At_14day_Shoots-Roots_Sub_P Parameter: Organism Value: A. thaliana
  misc_feature: MA Experiment 20000314 PARAMETER Experiment Name: At_14day_Shoots-Roots_Sub_P Parameter: Plant Line Value: WS
  misc_feature: MA Experiment 20000314 PARAMETER Experiment Name: At_14day_Shoots-Roots_Sub_P Parameter: Tissue Value: Roots vs. Whole Plant
  misc_feature: MA Experiment ID: 20000315 Result: Down-regulated in Transcription
  misc_feature: MA Experiment 20000315 PARAMETER Experiment Name: At_14day_Shoots-Roots_Sub_P Parameter: Age (day) Value: 14
  misc_feature: MA Experiment 20000315 PARAMETER Experiment Name: At_14day_Shoots-Roots_Sub_P Parameter: Organism Value: A. thaliana
  misc_feature: MA Experiment 20000315 PARAMETER Experiment Name: At_14day_Shoots-Roots_Sub_P Parameter: Plant Line Value: WS
  misc_feature: MA Experiment 20000315 PARAMETER Experiment Name: At_14day_Shoots-Roots_Sub_P Parameter: Tissue Value: Shoots vs. Whole Plant
  misc_feature: MA Experiment ID: 20000328 Result: Down-regulated in Transcription
  misc_feature: MA Experiment 20000328 PARAMETER Experiment Name: At_42deg_Heat_Sub_P Parameter: Age (day) Value: 14
  misc_feature: MA Experiment 20000328 PARAMETER Experiment Name: At_42deg_Heat_Sub_P Parameter: Organism Value: A. thaliana
  misc_feature: MA Experiment 20000328 PARAMETER Experiment Name: At_42deg_Heat_Sub_P Parameter: Plant Line Value: WS
  misc_feature: MA Experiment 20000328 PARAMETER Experiment Name: At_42deg_Heat_Sub_P Parameter: Temperature (deg C) Value: 42 vs. 22
  misc_feature: MA Experiment 20000328 PARAMETER Experiment Name: At_42deg_Heat_Sub_P Parameter: Timepoint (hr) Value: 6
  misc_feature: MA Experiment 20000328 PARAMETER Experiment Name: At_42deg_Heat_Sub_P Parameter: Tissue Value: Aerial
  misc_feature: MA Experiment ID: 20000355 Result: Down-regulated in Transcription
  misc_feature: MA Experiment 20000355 PARAMETER Experiment Name: At_Siliques_Sub_P Parameter: Age (day) Value: 21
  misc_feature: MA Experiment 20000355 PARAMETER Experiment Name: At_Siliques_Sub_P Parameter: Organism Value: A. thaliana
  misc_feature: MA Experiment 20000355 PARAMETER Experiment Name: At_Siliques_Sub_P Parameter: Plant Line Value: WS
  misc_feature: MA Experiment 20000355 PARAMETER Experiment Name: At_Siliques_Sub_P Parameter: Tissue Value: Less Than 5mm Siliques vs. Whole Plant
  misc_feature: MA Experiment ID: 20000440 Result: Down-regulated in Transcription
  misc_feature: MA Experiment 20000440 PARAMETER Experiment Name: At_Closed-Flower__Sub_P Parameter: Tissue Value: Closed Flower vs. Whole Plant
atgaagaagattgagctcgtgttcataccttcgccgggaatcggccatctccggccaaccgtgaagctagcaaagcaactcatcggaagcgaagaacattttttcaatcaccagtctcaagatcgcctccgctacgaacccatctccgtcgaaaaacaaccaccaaccgcaaatcttgagccgtctcaagtctacatcgagaaacaaaaaccacaagtgagagacaccgtctccagaatcatcaatccaacaagaaaactcgccggattcgtggtggacatgttctgttcttcaatgatcgatatagctaacgaatttggagttccttgttatatgatctacacatcaaacgctacgtttttgggaatcacacttcacgttcaagaaatgtacgacgacaaaaagtatgacgtcagcgatttggatgagtcagtcaacgaattggagtttccttgtttgactcgtccttatccagtgaagtgccttcctcatatccttagttcaaaagattggttacctttttttgcagctcaaggtaggtctttccggaagatgaaaggtattttggtaaatacagttgctgagcttgagcctcacgctttgaagatgtttaacaatgttgatcttcctcaagcttatcctgttggaccagtgttgcatcttgataacggcgatgacgacgatgaaaagagattggaggttttgcggtggcttgatgatcaaccgcctaaatctgttttgtttctctgttttggaagtatgggaggtttcactgaggaacaaactagagaggtagctgtggcgttaaaccgaagtggtcaccggtttctttggtctctccgtcgtgcatcgccgaatataatgatggaacgtcccggagattataagaatcttgaggaggttttaccggacgggttcttggaacggactttggatagagggaaagtgattggatgggctccacaagtggcggtgttagagaagccggcgataggagggtttgttactcattgtgggtggaactctatgttagagagcttgtggtttggtgttccgatggtgacgtggccgctttacgcggagcagaaggttaacgcgtttgagatggtggaggagctgggattggcggtggagatacgtaagtgcattagtggagatttgttgttgatcggagagatggagatagtgacggcggaggatatagagagagctataaggtgtgtgatggagcaggatagtgatgtaaggagtcgagtgaaggagatggcggagaagtgtcacgtggcgttgatggacggtggatcttccaagacggctttgcaaaagtttattcaagacgtgatagagaatgttgcttaa

SEQ ID NO: 49768 - protein, 452 aa, Arabidopsis thaliana
  peptide (1)..(452): Ceres Seq. ID no. 13587958
  misc_feature (5)..(451): Pfam Name: UDP-glucoronosyl and UDP-glucosyl transferase Pfam Description: UDP-glucoronosyl and UDP-glucosyl transferase
  misc_feature (3)..(31): Homolog of NCBI NO: 15233157 NR Description: glycosyltransferase family [Arabidopsis thaliana]
  misc_feature (3)..(31): Homolog of NCBI NO: 11994646 NR Description: UTP-glucose glucosyltransferase [Arabidopsis
  misc_feature (28)..(451): Homolog of NCBI NO: 15233157 NR Description: glycosyltransferase family [Arabidopsis thaliana]
  misc_feature (28)..(451): Homolog of NCBI NO: 11994646 NR Description: UTP-glucose glucosyltransferase [Arabidopsis
  misc_feature (3)..(84): Homolog of NCBI NO: 11994645 NR Description: UTP-glucose glucosyltransferase [Arabidopsis
  misc_feature (39)..(452): Homolog of NCBI NO: 11994645 NR Description: UTP-glucose glucosyltransferase [Arabidopsis
  misc_feature (3)..(31): Homolog of NCBI NO: 15233761 NR Description: UDP-glycosyltransferase family [Arabidopsis
  misc_feature (41)..(451): Homolog of NCBI NO: 15233761 NR Description: UDP-glycosyltransferase family [Arabidopsis
  misc_feature (94)..(452): Homolog of NCBI NO: 30683191 NR Description: UDP-glycosyltransferase family [Arabidopsis
  misc_feature (1)..(452): Homolog of NCBI NO: 7488111 NR Description: probable glucosyltransferase - Arabidopsis
MKKIELVFIPSPGIGHLRPTVKLAKQLIGSEEHFFNHQSQDRLRYEPISVEKQPPTANLEPSQVYIEKQKPQVRDTVSRIINPTRKLAGFVVDMFCSSMIDIANEFGVPCYMIYTSNATFLGITLHVQEMYDDKKYDVSDLDESVNELEFPCLTRPYPVKCLPHILSSKDWLPFFAAQGRSFRKMKGILVNTVAELEPHALKMFNNVDLPQAYPVGPVLHLDNGDDDDEKRLEVLRWLDDQPPKSVLFLCFGSMGGFTEEQTREVAVALNRSGHRFLWSLRRASPNIMMERPGDYKNLEEVLPDGFLERTLDRGKVIGWAPQVAVLEKPAIGGFVTHCGWNSMLESLWFGVPMVTWPLYAEQKVNAFEMVEELGLAVEIRKCISGDLLLIGEMEIVTAEDIERAIRCVMEQDSDVRSRVKEMAEKCHVALMDGGSSKTALQKFIQDVIENVA

SEQ ID NO: 49769 - protein, 359 aa, Arabidopsis thaliana
  peptide (1)..(359): Ceres Seq. ID no. 13587959
  misc_feature (1)..(358): Pfam Name: UDP-glucoronosyl and UDP-glucosyl transferase Pfam Description: UDP-glucoronosyl and UDP-glucosyl transferase
  misc_feature (1)..(358): Homolog of NCBI NO: 15233149 NR Description: UDP-glycosyltransferase family [Arabidopsis
  misc_feature (1)..(359): Homolog of NCBI NO: 15233158 NR Description: glycosyltransferase family [Arabidopsis thaliana]
  misc_feature (1)..(359): Homolog of NCBI NO: 15233155 NR Description: UDP-glycosyltransferase family [Arabidopsis
  misc_feature (1)..(359): Homolog of NCBI NO: 15233151 NR Description: glycosyltransferase family [Arabidopsis thaliana]
  misc_feature (1)..(358): Homolog of NCBI NO: 15233157 NR Description: glycosyltransferase family [Arabidopsis thaliana]
  misc_feature (1)..(358): Homolog of NCBI NO: 11994646 NR Description: UTP-glucose glucosyltransferase [Arabidopsis
  misc_feature (1)..(359): Homolog of NCBI NO: 11994645 NR Description: UTP-glucose glucosyltransferase [Arabidopsis
  misc_feature (1)..(358): Homolog of NCBI NO: 15233761 NR Description: UDP-glycosyltransferase family [Arabidopsis
  misc_feature (1)..(359): Homolog of NCBI NO: 30683191 NR Description: UDP-glycosyltransferase family [Arabidopsis
  misc_feature (1)..(359): Homolog of NCBI NO: 7488111 NR Description: probable glucosyltransferase - Arabidopsis
MFCSSMIDIANEFGVPCYMIYTSNATFLGITLHVQEMYDDKKYDVSDLDESVNELEFPCLTRPYPVKCLPHILSSKDWLPFFAAQGRSFRKMKGILVNTVAELEPHALKMFNNVDLPQAYPVGPVLHLDNGDDDDEKRLEVLRWLDDQPPKSVLFLCFGSMGGFTEEQTREVAVALNRSGHRFLWSLRRASPNIMMERPGDYKNLEEVLPDGFLERTLDRGKVIGWAPQVAVLEKPAIGGFVTHCGWNSMLESLWFGVPMVTWPLYAEQKVNAFEMVEELGLAVEIRKCISGDLLLIGEMEIVTAEDIERAIRCVMEQDSDVRSRVKEMAEKCHVALMDGGSSKTALQKFIQDVIENVA

SEQ ID NO: 49770 - protein, 354 aa, Arabidopsis thaliana
  peptide (1)..(354): Ceres Seq. ID no. 13587960
  misc_feature (1)..(353): Pfam Name: UDP-glucoronosyl and UDP-glucosyl transferase Pfam Description: UDP-glucoronosyl and UDP-glucosyl transferase
  misc_feature (1)..(353): Homolog of NCBI NO: 15233149 NR Description: UDP-glycosyltransferase family [Arabidopsis
  misc_feature (1)..(354): Homolog of NCBI NO: 15233158 NR Description: glycosyltransferase family [Arabidopsis thaliana]
  misc_feature (1)..(354): Homolog of NCBI NO: 15233155 NR Description: UDP-glycosyltransferase family [Arabidopsis
  misc_feature (1)..(354): Homolog of NCBI NO: 15233151 NR Description: glycosyltransferase family [Arabidopsis thaliana]
  misc_feature (1)..(353): Homolog of NCBI NO: 15233157 NR Description: glycosyltransferase family [Arabidopsis thaliana]
  misc_feature (1)..(353): Homolog of NCBI NO: 11994646 NR Description: UTP-glucose glucosyltransferase [Arabidopsis
  misc_feature (1)..(354): Homolog of NCBI NO: 11994645 NR Description: UTP-glucose glucosyltransferase [Arabidopsis
  misc_feature (1)..(353): Homolog of NCBI NO: 15233761 NR Description: UDP-glycosyltransferase family [Arabidopsis
  misc_feature (1)..(354): Homolog of NCBI NO: 30683191 NR Description: UDP-glycosyltransferase family [Arabidopsis
  misc_feature (1)..(354): Homolog of NCBI NO: 7488111 NR Description: probable glucosyltransferase - Arabidopsis
MIDIANEFGVPCYMIYTSNATFLGITLHVQEMYDDKKYDVSDLDESVNELEFPCLTRPYPVKCLPHILSSKDWLPFFAAQGRSFRKMKGILVNTVAELEPHALKMFNNVDLPQAYPVGPVLHLDNGDDDDEKRLEVLRWLDDQPPKSVLFLCFGSMGGFTEEQTREVAVALNRSGHRFLWSLRRASPNIMMERPGDYKNLEEVLPDGFLERTLDRGKVIGWAPQVAVLEKPAIGGFVTHCGWNSMLESLWFGVPMVTWPLYAEQKVNAFEMVEELGLAVEIRKCISGDLLLIGEMEIVTAEDIERAIRCVMEQDSDVRSRVKEMAEKCHVALMDGGSSKTALQKFIQDVIENVA

SEQ ID NO: 49771 - DNA, 1201 bp, Arabidopsis thaliana
  misc_feature (1)..(1201): Ceres Seq. ID no. 13648117
  misc_feature: MA Experiment ID: 20000171 Result: Down-regulated in Transcription
  misc_feature: MA Experiment 20000171 PARAMETER Experiment Name: At_42deg_Heat_P Parameter: Age (day) Value: 14
  misc_feature: MA Experiment 20000171 PARAMETER Experiment Name: At_42deg_Heat_P Parameter: Organism Value: A. thaliana
  misc_feature: MA Experiment 20000171 PARAMETER Experiment Name: At_42deg_Heat_P Parameter: Plant Line Value: WS
  misc_feature: MA Experiment 20000171 PARAMETER Experiment Name: At_42deg_Heat_P Parameter: Temperature (deg C) Value: 42 vs. 22
  misc_feature: MA Experiment 20000171 PARAMETER Experiment Name: At_42deg_Heat_P Parameter: Timepoint (hr) Value: 1
  misc_feature: MA Experiment 20000171 PARAMETER Experiment Name: At_42deg_Heat_P Parameter: Tissue Value: Aerial
  misc_feature: MA Experiment ID: 20000184 Result: Down-regulated in Transcription
  misc_feature: MA Experiment 20000184 PARAMETER Experiment Name: At_Shoots__P Parameter: Age (day) Value: 7
  misc_feature: MA Experiment 20000184 PARAMETER Experiment Name: At_Shoots__P Parameter: Tissue Value: Shoots vs. Whole Plant
  misc_feature: MA Experiment ID: 20000234 Result: Down-regulated in Transcription
  misc_feature: MA Experiment 20000234 PARAMETER Experiment Name: At_Siliques_P Parameter: Age (day) Value: 21
  misc_feature: MA Experiment 20000234 PARAMETER Experiment Name: At_Siliques_P Parameter: Organism Value: A. thaliana
  misc_feature: MA Experiment 20000234 PARAMETER Experiment Name: At_Siliques_P Parameter: Plant Line Value: WS
  misc_feature: MA Experiment 20000234 PARAMETER Experiment Name: At_Siliques_P Parameter: Tissue Value: Less Than 5mm Siliques vs. Whole Plant
  misc_feature: MA Experiment ID: 20000264 Result: Down-regulated in Transcription
  misc_feature: MA Experiment 20000264 PARAMETER Experiment Name: At_Open_Flower_P Parameter: Age (day) Value: 21
  misc_feature: MA Experiment 20000264 PARAMETER Experiment Name: At_Open_Flower_P Parameter: Plant Line Value: WS
  misc_feature: MA Experiment 20000264 PARAMETER Experiment Name: At_Open_Flower_P Parameter: Tissue Value: Open Flower vs. Whole Plant
  misc_feature: MA Experiment ID: 20000265 Result: Down-regulated in Transcription
  misc_feature: MA Experiment 20000265 PARAMETER Experiment Name: At_Open_Flower_P Parameter: Age (day) Value: 21
  misc_feature: MA Experiment 20000265 PARAMETER Experiment Name: At_Open_Flower_P Parameter: Plant Line Value: WS
  misc_feature: MA Experiment 20000265 PARAMETER Experiment Name: At_Open_Flower_P Parameter: Tissue Value: Closed Flower vs. Whole Plant
  misc_feature: MA Experiment ID: 20000495 Result: Down-regulated in Transcription
  misc_feature: MA Experiment 20000495 PARAMETER Experiment Name: At_Guard_Cells_P Parameter: Harvest Date Value: 8/2/2002
  misc_feature: MA Experiment 20000495 PARAMETER Experiment Name: At_Guard_Cells_P Parameter: Organism Value: A. thaliana
  misc_feature: MA Experiment 20000495 PARAMETER Experiment Name: At_Guard_Cells_P Parameter: Tissue Value: Guard Cells vs. Leaves
  misc_feature: MA Experiment ID: 20001247 Result: Up-regulated in Transcription
  misc_feature: MA Experiment 20001247 PARAMETER Experiment Name: At_Far-red-induction_P Parameter: Age (day) Value: 7
  misc_feature: MA Experiment 20001247 PARAMETER Experiment Name: At_Far-red-induction_P Parameter: Light Value: Far-red vs. White
  misc_feature: MA Experiment 20001247 PARAMETER Experiment Name: At_Far-red-induction_P Parameter: Organism Value: A. thaliana
  misc_feature: MA Experiment 20001247 PARAMETER Experiment Name: At_Far-red-induction_P Parameter: Plant Line Value: Columbia
  misc_feature: MA Experiment 20001247 PARAMETER Experiment Name: At_Far-red-induction_P Parameter: Timepoint (hr) Value: 1
  misc_feature: MA Experiment 20001247 PARAMETER Experiment Name: At_Far-red-induction_P Parameter: Tissue Value: Whole Plant
  misc_feature: MA Experiment ID: 20001560 Result: Down-regulated in Transcription
  misc_feature: MA Experiment 20001560 PARAMETER Experiment Name: At_Drought_Soil_Dry_P Parameter: Age (day) Value: 28
  misc_feature: MA Experiment 20001560 PARAMETER Experiment Name: At_Drought_Soil_Dry_P Parameter: Organism Value: A. thaliana
  misc_feature: MA Experiment 20001560 PARAMETER Experiment Name: At_Drought_Soil_Dry_P Parameter: Plant Line Value: WS
  misc_feature: MA Experiment 20001560 PARAMETER Experiment Name: At_Drought_Soil_Dry_P Parameter: Post Timepoint (hr) Value: None
  misc_feature: MA Experiment 20001560 PARAMETER Experiment Name: At_Drought_Soil_Dry_P Parameter: Post-Treatment Value: None
  misc_feature: MA Experiment 20001560 PARAMETER Experiment Name: At_Drought_Soil_Dry_P Parameter: Timepoint (day) Value: 14
  misc_feature: MA Experiment 20001560 PARAMETER Experiment Name: At_Drought_Soil_Dry_P Parameter: Treatment Value: Drought vs. No Drought
gacggtgaagagaagaggcaagagagagagagagagggaaaaggaagacgatgatgatttctcggagacccgtttcaagtccgggtcgggtagagaaatatccaccgccttttatggggtttttgagaagtaagagcaacggcggaagtacaagcaggagtagaagtcgaagcagaggaaggtcacgcgctagtcctcttttcgttcgccggaataaatccgcggcggcggtgactcaagaaccgtcgtctccgaaggttacttgcatgggtcaagtccgggtcaaccgatcgaagcccaaaattaaacccgaatctcgagataacccgacccgacgacgatgtgagtggctccgaaacgcgtcgttttataacaaattcgccgggaaaatcaaaacgatgacgttttggcctaaatggagactgtgttcgttttcgtgtgcttgtcggaatttgaaggagaaagattctccgagaagtcaattagatcatccgacaacggaatcagtcagagaaatcaaagaagaaatcgaaggagaagaaaatttcgaaatccctaaattatttgtgtctccggctactacgccgcctataaacgctctgttgttgacgagaagcagatctgcaccgtatagatcgtcgtcgttggctttcagattctgggaagaaaataaccaacgagaagttgaatcacagcaaaatgtgagatcggagaaaactgaatcggaagttcccatcgagaaaatcaatggttttcacgagccggagtatgttgacagagatgaagaagaattcacgaagttaagatttgtacggcagccggtgttgacaaggagcaaatcggagccggcgaggatcggcgagaagatgatggtgttgcttcccgatgaagaagaaggttaggtagggtttaggtctctcacgtgattagtcaataattgcactaatcttaattaattaatcgctggtatgactaatttaatttgcattgtttaggataatttgactgtgttttagatatagtagaggaaacaaatttgtataaagatttgtaaccatacatataacgtaaggtgtagatatgtttggcattcaaaaaaaaaatgtttaacaatacactatgtaatcattttcaatttgtaaatttacattatctgtttgattgaaaaaaaaaaaaaaaaaaactcgagggggggcccggt

SEQ ID NO: 49772 - protein, 283 aa, Arabidopsis thaliana
  peptide (1)..(283): Ceres Seq. ID no. 13648118
  misc_feature (35)..(80): Pfam Name: Protamine P1 Pfam Description: Protamine P1
  misc_feature (4)..(228): Homolog of NCBI NO: 15228086 NR Description: expressed protein [Arabidopsis thaliana]
  misc_feature (1)..(283): Homolog of NCBI NO: 15242640 NR Description: expressed protein [Arabidopsis thaliana]
MMISRRPVSSPGRVEKYPPPFMGFLRSKSNGGSTSRSRSRSRGRSRASPLFVRRNKSAAAVTQEPSSPKVTCMGQVRVNRSKPKIKPESRDNPTRRRCEWLRNASFYNKFAGKIKTMTFWPKWRLCSFSCACRNLKEKDSPRSQLDHPTTESVREIKEEIEGEENFEIPKLFVSPATTPPINALLLTRSRSAPYRSSSLAFRFWEENNQREVESQQNVRSEKTESEVPIEKINGFHEPEYVDRDEEEFTKLRFVRQPVLTRSKSEPARIGEKMMVLLPDEEEG

SEQ ID NO: 49773 - protein, 282 aa, Arabidopsis thaliana
  peptide (1)..(282): Ceres Seq. ID no. 13648119
  misc_feature (34)..(79): Pfam Name: Protamine P1 Pfam Description: Protamine P1
  misc_feature (3)..(227): Homolog of NCBI NO: 15228086 NR Description: expressed protein [Arabidopsis thaliana]
  misc_feature (1)..(282): Homolog of NCBI NO: 15242640 NR Description: expressed protein [Arabidopsis thaliana]
MISRRPVSSPGRVEKYPPPFMGFLRSKSNGGSTSRSRSRSRGRSRASPLFVRRNKSAAAVTQEPSSPKVTCMGQVRVNRSKPKIKPESRDNPTRRRCEWLRNASFYNKFAGKIKTMTFWPKWRLCSFSCACRNLKEKDSPRSQLDHPTTESVREIKEEIEGEENFEIPKLFVSPATTPPINALLLTRSRSAPYRSSSLAFRFWEENNQREVESQQNVRSEKTESEVPIEKINGFHEPEYVDRDEEEFTKLRFVRQPVLTRSKSEPARIGEKMMVLLPDEEEG

SEQ ID NO: 49774 - protein, 262 aa, Arabidopsis thaliana
  peptide (1)..(262): Ceres Seq. ID no. 13648120
  misc_feature (14)..(59): Pfam Name: Protamine P1 Pfam Description: Protamine P1
  misc_feature (1)..(207): Homolog of NCBI NO: 15228086 NR Description: expressed protein [Arabidopsis thaliana]
  misc_feature (1)..(262): Homolog of NCBI NO: 15242640 NR Description: expressed protein [Arabidopsis thaliana]
MGFLRSKSNGGSTSRSRSRSRGRSRASPLFVRRNKSAAAVTQEPSSPKVTCMGQVRVNRSKPKIKPESRDNPTRRRCEWLRNASFYNKFAGKIKTMTFWPKWRLCSFSCACRNLKEKDSPRSQLDHPTTESVREIKEEIEGEENFEIPKLFVSPATTPPINALLLTRSRSAPYRSSSLAFRFWEENNQREVESQQNVRSEKTESEVPIEKINGFHEPEYVDRDEEEFTKLRFVRQPVLTRSKSEPARIGEKMMVLLPDEEEG

SEQ ID NO: 49775 - DNA, 1183 bp, Arabidopsis thaliana
  misc_feature (1)..(1183): Ceres Seq. ID no. 13648121
  misc_feature: MA Experiment ID: 20000173 Result: Down-regulated in Transcription
  misc_feature: MA Experiment 20000173 PARAMETER Experiment Name: At_42deg_Heat_P Parameter: Age (day) Value: 14
  misc_feature: MA Experiment 20000173 PARAMETER Experiment Name: At_42deg_Heat_P Parameter: Organism Value: A. thaliana
  misc_feature: MA Experiment 20000173 PARAMETER Experiment Name: At_42deg_Heat_P Parameter: Plant Line Value: WS
  misc_feature: MA Experiment 20000173 PARAMETER Experiment Name: At_42deg_Heat_P Parameter: Temperature (deg C) Value: 42 vs. 22
  misc_feature: MA Experiment 20000173 PARAMETER Experiment Name: At_42deg_Heat_P Parameter: Timepoint (hr) Value: 6
  misc_feature: MA Experiment 20000173 PARAMETER Experiment Name: At_42deg_Heat_P Parameter: Tissue Value: Aerial
  misc_feature: MA Experiment ID: 20000179 Result: Up-regulated in Transcription
  misc_feature: MA Experiment 20000179 PARAMETER Experiment Name: At_Germinating_Seeds_P Parameter: Age (hr) Value: 6 vs. 0
  misc_feature: MA Experiment 20000179 PARAMETER Experiment Name: At_Germinating_Seeds_P Parameter: Tissue Value: Germinating Seeds
  misc_feature: MA Experiment ID: 20000184 Result: Down-regulated in Transcription
  misc_feature: MA Experiment 20000184 PARAMETER Experiment Name: At_Shoots__P Parameter: Age (day) Value: 7
  misc_feature: MA Experiment 20000184 PARAMETER Experiment Name: At_Shoots__P Parameter: Tissue Value: Shoots vs. Whole Plant
aaatcgtggtaattggtgatggagaaagacgataacagtgacaaggtttgtctttcagtgaaggagaaatatacgtcagagcagcctgaggaaatggtgacaaatctgaaggcatctgtaagagaattgagtgtgaaagtgaaagaacagaatcagagaaaatgtgatgctaaggataagttgcagcagttgcgagaaagaataagcaaggaagttgttgatgtttcagtccaggagttgataccgcttcttagatcactcaaggaatttgtgaaggaggaatctgaagtcaggtctcgttgtaatgttaaacgttctgctttagaagatgcagttcatgatttggaggagagagctggtaaggggcttgatggtgagattcaagaggaagatttagatggtttgttggttgtatctttagataatctcacttcagcaaagaaggagcttggagcaacgctaagagagatagtctctctgaagcgacagattgacgatgtgccatgccaatctgaactcctccaatatgaaagaagattctcagagctgaatgtctgtattcaggagaaacttcaacaaactaggaagctctatgcaacatacaatgctcttttagaaatcaaagatttgatgcttaaggagacatcattattgaattccataggttcacagtttcaagacgtgattggtactcctgctggccgtgtgaagcttattgattcaatggaaggagtcatgaaaggaatccaacagaagattggaaaaatacaacttgggcttcaagaagagcagaggctccgtgatgcttcaaaagaaaagtatatagctgcagctgcagagcaaagaaaatgctacactgtactaagagcataccaggaggaatgtactaagaatgagaggctgagaagtcatatatctgccatgaacgaacacctctgactcgaagaagggtttgaataaggtgatatgaagtgactctcctttcgagttacagctaaccagagtagagccagagttgatttagatatgattctcttgtgatgtgatgtatccatatgctcagccttacatggaaatatacgaaaatcgataggcctagaaatagtaggtttggttgaccaatatgtttatatatgagctatgagaaaatattattctctaaatcattgaggagatgagtttg

SEQ ID NO: 49776 - protein, 306 aa, Arabidopsis thaliana
  peptide (1)..(306): Ceres Seq. ID no. 13648122
  misc_feature (43)..(302): Homolog of NCBI NO: 17647427 NR Description: fidipidine CG7773-PA [Drosophila melanogaster]
  misc_feature (81)..(301): Homolog of NCBI NO: 7023387 NR Description: unnamed protein product [Homo sapiens]
  misc_feature (15)..(301): Homolog of NCBI NO: 32450714 NR Description: 4633402D15Rik protein [Mus musculus]
  misc_feature (15)..(301): Homolog of NCBI NO: 26351751 NR Description: unnamed protein product [Mus musculus]
  misc_feature (15)..(301): Homolog of NCBI NO: 19353319 NR Description: 4633402D15Rik protein [Mus musculus]
  misc_feature (12)..(301): Homolog of NCBI NO: 21361623 NR Description: hypothetical protein FLJ10996 [Homo sapiens]
  misc_feature (12)..(301): Homolog of NCBI NO: 10438181 NR Description: unnamed protein product [Homo sapiens]
  misc_feature (32)..(302): Homolog of NCBI NO: 31238540 NR Description: ENSANGP00000005196 [Anopheles gambiae]
  misc_feature (1)..(286): Homolog of NCBI NO: 7486769 NR Description: hypothetical protein L23H3.40 - Arabidopsis
  misc_feature (1)..(306): Homolog of NCBI NO: 18418036 NR Description: expressed protein [Arabidopsis thaliana]
MEKDDNSDKVCLSVKEKYTSEQPEEMVTNLKASVRELSVKVKEQNQRKCDAKDKLQQLRERISKEVVDVSVQELIPLLRSLKEFVKEESEVRSRCNVKRSALEDAVHDLEERAGKGLDGEIQEEDLDGLLVVSLDNLTSAKKELGATLREIVSLKRQIDDVPCQSELLQYERRFSELNVCIQEKLQQTRKLYATYNALLEIKDLMLKETSLLNSIGSQFQDVIGTPAGRVKLIDSMEGVMKGIQQKIGKIQLGLQEEQRLRDASKEKYIAAAAEQRKCYTVLRAYQEECTKNERLRSHISAMNEHL

SEQ ID NO: 49777 - protein, 281 aa, Arabidopsis thaliana
  peptide (1)..(281): Ceres Seq. ID no. 13648123
  misc_feature (18)..(277): Homolog of NCBI NO: 17647427 NR Description: fidipidine CG7773-PA [Drosophila melanogaster]
  misc_feature (56)..(276): Homolog of NCBI NO: 7023387 NR Description: unnamed protein product [Homo sapiens]
  misc_feature (1)..(276): Homolog of NCBI NO: 32450714 NR Description: 4633402D15Rik protein [Mus musculus]
  misc_feature (1)..(276): Homolog of NCBI NO: 26351751 NR Description: unnamed protein product [Mus musculus]
  misc_feature (1)..(276): Homolog of NCBI NO: 19353319 NR Description: 4633402D15Rik protein [Mus musculus]
  misc_feature (1)..(276): Homolog of NCBI NO: 21361623 NR Description: hypothetical protein FLJ10996 [Homo sapiens]
  misc_feature (1)..(276): Homolog of NCBI NO: 10438181 NR Description: unnamed protein product [Homo sapiens]
  misc_feature (7)..(277): Homolog of NCBI NO: 31238540 NR Description: ENSANGP00000005196 [Anopheles gambiae]
  misc_feature (1)..(261): Homolog of NCBI NO: 7486769 NR Description: hypothetical protein L23H3.40 - Arabidopsis
  misc_feature (1)..(281): Homolog of NCBI NO: 18418036 NR Description: expressed protein [Arabidopsis thaliana]
MVTNLKASVRELSVKVKEQNQRKCDAKDKLQQLRERISKEVVDVSVQELIPLLRSLKEFVKEESEVRSRCNVKRSALEDAVHDLEERAGKGLDGEIQEEDLDGLLVVSLDNLTSAKKELGATLREIVSLKRQIDDVPCQSELLQYERRFSELNVCIQEKLQQTRKLYATYNALLEIKDLMLKETSLLNSIGSQFQDVIGTPAGRVKLIDSMEGVMKGIQQKIGKIQLGLQEEQRLRDASKEKYIAAAAEQRKCYTVLRAYQEECTKNERLRSHISAMNEHL

SEQ ID NO: 49778 - DNA, 1830 bp, Arabidopsis thaliana
  misc_feature (1)..(1830): Ceres Seq. ID no. 13587961
  misc_feature: MA Experiment ID: 108434 Result: Up-regulated in Transcription
  misc_feature: MA Experiment 108434 PARAMETER Experiment Name: At_Root_Tips_cDNA_P Parameter: Tissue Value: Root Tips
  misc_feature: MA Experiment ID: 108435 Result: Up-regulated in Transcription
  misc_feature: MA Experiment 108435 PARAMETER Experiment Name: At_stm_Mutants_cDNA_P Parameter: Plant Line Value: wt Landsburg vs stm
  misc_feature: MA Experiment 108435 PARAMETER Experiment Name: At_stm_Mutants_cDNA_P Parameter: Tissue Value: Shoot Apical Meristem Region
  misc_feature: MA Experiment ID: 108461 Result: Down-regulated in Transcription
  misc_feature: MA Experiment 108461 PARAMETER Experiment Name: At_Germinating_Seeds_cDNA_P Parameter: Age (day) Value: 1 vs. 0
  misc_feature: MA Experiment 108461 PARAMETER Experiment Name: At_Germinating_Seeds_cDNA_P Parameter: Tissue Value: Germinating Seeds
  misc_feature: MA Experiment ID: 108462 Result: Down-regulated in Transcription
  misc_feature: MA Experiment 108462 PARAMETER Experiment Name: At_Germinating_Seeds_cDNA_P Parameter: Age (day) Value: 2 vs. 0
  misc_feature: MA Experiment 108462 PARAMETER Experiment Name: At_Germinating_Seeds_cDNA_P Parameter: Tissue Value: Germinating Seeds
  misc_feature: MA Experiment ID: 108463 Result: Down-regulated in Transcription
  misc_feature: MA Experiment 108463 PARAMETER Experiment Name: At_Germinating_Seeds_cDNA_P Parameter: Age (day) Value: 3 vs. 0
  misc_feature: MA Experiment 108463 PARAMETER Experiment Name: At_Germinating_Seeds_cDNA_P Parameter: Tissue Value: Germinating Seeds
  misc_feature: MA Experiment ID: 108464 Result: Down-regulated in Transcription
  misc_feature: MA Experiment 108464 PARAMETER Experiment Name: At_Germinating_Seeds_cDNA_P Parameter: Age (day) Value: 4 vs. 0
  misc_feature: MA Experiment 108464 PARAMETER Experiment Name: At_Germinating_Seeds_cDNA_P Parameter: Tissue Value: Germinating Seeds
  misc_feature: MA Experiment ID: 108561 Result: Down-regulated in Transcription
  misc_feature: MA Experiment 108561 PARAMETER Experiment Name: At_100uM_ABA_cDNA_P Parameter: Timepoint (hr) Value: 6
  misc_feature: MA Experiment 108561 PARAMETER Experiment Name: At_100uM_ABA_cDNA_P Parameter: Tissue Value: Aerial
  misc_feature: MA Experiment 108561 PARAMETER Experiment Name: At_100uM_ABA_cDNA_P Parameter: Treatment Value: 100uM ABA vs. No Treatment
  misc_feature: MA Experiment ID: 108573 Result: Down-regulated in Transcription
  misc_feature: MA Experiment 108573 PARAMETER Experiment Name: At_Drought_cDNA_P Parameter: Timepoint (hr) Value: 6
  misc_feature: MA Experiment 108573 PARAMETER Experiment Name: At_Drought_cDNA_P Parameter: Tissue Value: Aerial
  misc_feature: MA Experiment 108573 PARAMETER Experiment Name: At_Drought_cDNA_P Parameter: Treatment Value: Drought vs. No Drought
  misc_feature: MA Experiment ID: 20000264 Result: Up-regulated in Transcription
  misc_feature: MA Experiment 20000264 PARAMETER Experiment Name: At_Open_Flower_P Parameter: Age (day) Value: 21
  misc_feature: MA Experiment 20000264 PARAMETER Experiment Name: At_Open_Flower_P Parameter: Plant Line Value: WS
  misc_feature: MA Experiment 20000264 PARAMETER Experiment Name: At_Open_Flower_P Parameter: Tissue Value: Open Flower vs. Whole Plant
  misc_feature: MA Experiment ID: 20000286 Result: Up-regulated in Transcription
  misc_feature: MA Experiment 20000286 PARAMETER Experiment Name: At_Open_Flower_P Parameter: Age (day) Value: 21
  misc_feature: MA Experiment 20000286 PARAMETER Experiment Name: At_Open_Flower_P Parameter: Plant Line Value: WS
  misc_feature: MA Experiment 20000286 PARAMETER Experiment Name: At_Open_Flower_P Parameter: Tissue Value: Half Open vs. Whole Plant
  misc_feature: MA Experiment ID: 20000437 Result: Down-regulated in Transcription
  misc_feature: MA Experiment 20000437 PARAMETER Experiment Name: At_Drought_P Parameter: Age (day) Value: 8
  misc_feature: MA Experiment 20000437 PARAMETER Experiment Name: At_Drought_P Parameter: Organism Value: A. thaliana
  misc_feature: MA Experiment 20000437 PARAMETER Experiment Name: At_Drought_P Parameter: Plant Line Value: WS
  misc_feature: MA Experiment 20000437 PARAMETER Experiment Name: At_Drought_P Parameter: Timepoint (hr) Value: 24
  misc_feature: MA Experiment 20000437 PARAMETER Experiment Name: At_Drought_P Parameter: Tissue Value: Whole Plant
  misc_feature: MA Experiment 20000437 PARAMETER Experiment Name: At_Drought_P Parameter: Treatment Value: Drought vs. No Drought
  misc_feature: MA Experiment ID: 20000794 Result: Down-regulated in Transcription
  misc_feature: MA Experiment 20000794 PARAMETER Experiment Name: At_Petals_P Parameter: Age (day) Value: 23-25 days
  misc_feature: MA Experiment 20000794 PARAMETER Experiment Name: At_Petals_P Parameter: Plant Line Value: WS
  misc_feature: MA Experiment 20000794 PARAMETER Experiment Name: At_Petals_P Parameter: Tissue Value: Petals vs. Whole plant
atggttggtggtggaaacaggagagatgagggatcgatgccgattcagaacaccaacttgtttgctgctttggatacttcgaggaagaagaagaagtctgataaggctggtaagagcaaagcttcctctaagagagaagattcacagaaggagcctgagccacaggttttctgggcacctacgcctctcaaagcaaaggcttgggctgatatcgatagcgatgatgaagatgatgattattacgctaccactgctccacctcagtccctgtggagcacttctgaagcctcccattcagatgctaaagacgttcccgctgaggaaattgaaagcgaagaagacactcttgatgatggagatgatgatgatgtggaggaagatcacgagcagggaacagagacacaagttcatccagaagcagagcctgaggtgaaaaaggctcctgaagttcgtgctcctcctaaggaggcagagaggcaactttccaagaaagagaggaaaaagaaggaacttgctgagcttgaggctttgctagcagattttggagttgcaaccaaagatgagaatggtcaacaagactctcaagataagggggagaagaaagaagtgaatgatgagggagagaagaaggagaacacaaccggagaatcaaaggcctcaaagaagaagaaaaagaaggacaaacagaaggagctaaaagaatcccagagtgaagtgaagagcaactcggatgctgcaagtgagtccgctgagcaggaggagtcttcttcttccatcgacgtcaaagaacggctaaagaagattgcatcaatgaagaagaagaaatcaagcaaggaggttgatggtgcttcaacagctgctgcaaaggaagcagctgcgaggaaggcaaagttggccgcagcgaagaaaaaagaaaagaaaaactacaatcagcaacctgtgagacaattcgtcgtgttgcttgctactctcgacgacggagaagtagaaatgtggagaagagtgatcggaaatgtcgccgtccggcatcaattacagcgagcgctatctagtaaagccggtggaagtggaaagagcgccaacgtttcagctgcagtggattcgatgcttctgcgttccctcaaggaacattacttagaggtttctaagatgactcctcctccgaaagtgagtcctccgtcaccatttgagattgtgaaagggtcgcttgaaggaagtactggtgctgttctgaagaaatctgttggaaatgaagagatcaatcttttcgttatgcgcttggctcacggaggtgatgaagaagacgatggtgggatcaaccagttgttccttcatgttgctgtatcaaagccaaatcagcctgattctttgcatttcctttgtggcctttaccctgatgcattgggtattcattctgtttccatgaggccaaaacttgaggctttggagatgtctgatgatcctactcaatacacaggcccttcttttgaagagctcgatgagaagatgagagatgtattccatggattcctagaggaacgaggtgtgaacgagagtctcttcccctttcttcaggcatggctctatgtaaaggatcaccgtaacctactgcgatggttcaaatcagttggcacgtttgttcatgaaaacccatctgcagaaaacaccgcctagaaggacgtgtcttttcggtctctggatcggtttctgcggttaatttttttagtatggcactataccgcttttaaatgtttcaggaactgaatcacttttattttcaaaccatttcaaaacatatgcatccgagattaatgttaagaaaaagttctc

SEQ ID NO: 49779 - protein, 557 aa, Arabidopsis thaliana
  peptide (1)..(557): Ceres Seq. ID no. 13587962
  misc_feature (370)..(547): Pfam Name: Mitochondrial glycoprotein Pfam Description: Mitochondrial glycoprotein
  misc_feature (107)..(315): Homolog of NCBI NO: 7522210 NR Description: hypothetical protein pAFD103 - apple tree
  misc_feature (1)..(315): Homolog of NCBI NO: 33620414 NR Description: M355 [Lilium longiflorum]
  misc_feature (1)..(114): Homolog of NCBI NO: 34906156 NR Description: P0509B06.15 [Oryza sativa (japonica
  misc_feature (105)..(315): Homolog of NCBI NO: 34906156 NR Description: P0509B06.15 [Oryza sativa (japonica
  misc_feature (1)..(315): Homolog of NCBI NO: 17529066 NR Description: unknown protein [Arabidopsis thaliana]
  misc_feature (1)..(315): Homolog of NCBI NO: 21537167 NR Description: unknown [Arabidopsis thaliana]
  misc_feature (1)..(315): Homolog of NCBI NO: 18400901 NR Description: expressed protein [Arabidopsis thaliana]
  misc_feature (331)..(557): Homolog of NCBI NO: 21593492 NR Description: unknown [Arabidopsis thaliana]
  misc_feature (331)..(557): Homolog of NCBI NO: 22136062 NR Description: putative protein [Arabidopsis thaliana]
  misc_feature (1)..(557): Homolog of NCBI NO: 15233865 NR Description: expressed protein [Arabidopsis thaliana]
MVGGGNRRDEGSMPIQNTNLFAALDTSRKKKKSDKAGKSKASSKREDSQKEPEPQVFWAPTPLKAKAWADIDSDDEDDDYYATTAPPQSLWSTSEASHSDAKDVPAEEIESEEDTLDDGDDDDVEEDHEQGTETQVHPEAEPEVKKAPEVRAPPKEAERQLSKKERKKKELAELEALLADFGVATKDENGQQDSQDKGEKKEVNDEGEKKENTTGESKASKKKKKKDKQKELKESQSEVKSNSDAASESAEQEESSSSIDVKERLKKIASMKKKKSSKEVDGASTAAAKEAAARKAKLAAAKKKEKKNYNQQPVRQFVVLLATLDDGEVEMWRRVIGNVAVRHQLQRALSSKAGGSGKSANVSAAVDSMLLRSLKEHYLEVSKMTPPPKVSPPSPFEIVKGSLEGSTGAVLKKSVGNEEINLFVMRLAHGGDEEDDGGINQLFLHVAVSKPNQPDSLHFLCGLYPDALGIHSVSMRPKLEALEMSDDPTQYTGPSFEELDEKMRDVFHGFLEERGVNESLFPFLQAWLYVKDHRNLLRWFKSVGTFVHENPSAENTA

SEQ ID NO: 49780 - protein, 545 aa, Arabidopsis thaliana
  peptide (1)..(545): Ceres Seq. ID no. 13587963
  misc_feature (358)..(535): Pfam Name: Mitochondrial glycoprotein Pfam Description: Mitochondrial glycoprotein
  misc_feature (95)..(303): Homolog of NCBI NO: 7522210 NR Description: hypothetical protein pAFD103 - apple tree
  misc_feature (1)..(303): Homolog of NCBI NO: 33620414 NR Description: M355 [Lilium longiflorum]
  misc_feature (1)..(102): Homolog of NCBI NO: 34906156 NR Description: P0509B06.15 [Oryza sativa (japonica
  misc_feature (93)..(303): Homolog of NCBI NO: 34906156 NR Description: P0509B06.15 [Oryza sativa (japonica
  misc_feature (1)..(303): Homolog of NCBI NO: 17529066 NR Description: unknown protein [Arabidopsis thaliana]
  misc_feature (1)..(303): Homolog of NCBI NO: 21537167 NR Description: unknown [Arabidopsis thaliana]
  misc_feature (1)..(303): Homolog of NCBI NO: 18400901 NR Description: expressed protein [Arabidopsis thaliana]
  misc_feature (319)..(545): Homolog of NCBI NO: 21593492 NR Description: unknown [Arabidopsis thaliana]
  misc_feature (319)..(545): Homolog of NCBI NO: 22136062 NR Description: putative protein [Arabidopsis thaliana]
  misc_feature (1)..(545): Homolog of NCBI NO: 15233865 NR Description: expressed protein [Arabidopsis thaliana]
MPIQNTNLFAALDTSRKKKKSDKAGKSKASSKREDSQKEPEPQVFWAPTPLKAKAWADIDSDDEDDDYYATTAPPQSLWSTSEASHSDAKDVPAEEIESEEDTLDDGDDDDVEEDHEQGTETQVHPEAEPEVKKAPEVRAPPKEAERQLSKKERKKKELAELEALLADFGVATKDENGQQDSQDKGEKKEVNDEGEKKENTTGESKASKKKKKKDKQKELKESQSEVKSNSDAASESAEQEESSSSIDVKERLKKIASMKKKKSSKEVDGASTAAAKEAAARKAKLAAAKKKEKKNYNQQPVRQFVVLLATLDDGEVEMWRRVIGNVAVRHQLQRALSSKAGGSGKSANVSAAVDSMLLRSLKEHYLEVSKMTPPPKVSPPSPFEIVKGSLEGSTGAVLKKSVGNEEINLFVMRLAHGGDEEDDGGINQLFLHVAVSKPNQPDSLHFLCGLYPDALGIHSVSMRPKLEALEMSDDPTQYTGPSFEELDEKMRDVFHGFLEERGVNESLFPFLQAWLYVKDHRNLLRWFKSVGTFVHENPSAENTA

SEQ ID NO: 49781 - protein, 287 aa, Arabidopsis thaliana
  peptide (1)..(287): Ceres Seq. ID no. 13587964
  misc_feature (100)..(277): Pfam Name: Mitochondrial glycoprotein Pfam Description: Mitochondrial glycoprotein
  misc_feature (61)..(208): Homolog of NCBI NO: 34909926 NR Description: P0665A11.23 [Oryza sativa (japonica
  misc_feature (1)..(45): Homolog of NCBI NO: 7522210 NR Description: hypothetical protein pAFD103 - apple tree
  misc_feature (1)..(45): Homolog of NCBI NO: 33620414 NR Description: M355 [Lilium longiflorum]
  misc_feature (1)..(45): Homolog of NCBI NO: 34906156 NR Description: P0509B06.15 [Oryza sativa (japonica
  misc_feature (1)..(45): Homolog of NCBI NO: 17529066 NR Description: unknown protein [Arabidopsis thaliana]
  misc_feature (1)..(45): Homolog of NCBI NO: 21537167 NR Description: unknown [Arabidopsis thaliana]
  misc_feature (1)..(45): Homolog of NCBI NO: 18400901 NR Description: expressed protein [Arabidopsis thaliana]
  misc_feature (61)..(287): Homolog of NCBI NO: 21593492 NR Description: unknown [Arabidopsis thaliana]
  misc_feature (61)..(287): Homolog of NCBI NO: 22136062 NR Description: putative protein [Arabidopsis thaliana]
  misc_feature (1)..(287): Homolog of NCBI NO: 15233865 NR Description: expressed protein [Arabidopsis thaliana]
MKKKKSSKEVDGASTAAAKEAAARKAKLAAAKKKEKKNYNQQPVRQFVVLLATLDDGEVEMWRRVIGNVAVRHQLQRALSSKAGGSGKSANVSAAVDSMLLRSLKEHYLEVSKMTPPPKVSPPSPFEIVKGSLEGSTGAVLKKSVGNEEINLFVMRLAHGGDEEDDGGINQLFLHVAVSKPNQPDSLHFLCGLYPDALGIHSVSMRPKLEALEMSDDPTQYTGPSFEELDEKMRDVFHGFLEERGVNESLFPFLQAWLYVKDHRNLLRWFKSVGTFVHENPSAENTA

SEQ ID NO: 49782 - DNA, 789 bp, Arabidopsis thaliana
  misc_feature (1)..(789): Ceres Seq. ID no. 13588691
  misc_feature: MA Experiment ID: 20000171 Result: Down-regulated in Transcription
  misc_feature: MA Experiment 20000171 PARAMETER Experiment Name: At_42deg_Heat_P Parameter: Age (day) Value: 14
  misc_feature: MA Experiment 20000171 PARAMETER Experiment Name: At_42deg_Heat_P Parameter: Organism Value: A. thaliana
  misc_feature: MA Experiment 20000171 PARAMETER Experiment Name: At_42deg_Heat_P Parameter: Plant Line Value: WS
  misc_feature: MA Experiment 20000171 PARAMETER Experiment Name: At_42deg_Heat_P Parameter: Temperature (deg C) Value: 42 vs. 22
  misc_feature: MA Experiment 20000171 PARAMETER Experiment Name: At_42deg_Heat_P Parameter: Timepoint (hr) Value: 1
  misc_feature: MA Experiment 20000171 PARAMETER Experiment Name: At_42deg_Heat_P Parameter: Tissue Value: Aerial
  misc_feature: MA Experiment ID: 20000184 Result: Up-regulated in Transcription
  misc_feature: MA Experiment 20000184 PARAMETER Experiment Name: At_Shoots__P Parameter: Age (day) Value: 7
  misc_feature: MA Experiment 20000184 PARAMETER Experiment Name: At_Shoots__P Parameter: Tissue Value: Shoots vs. Whole Plant
  misc_feature: MA Experiment ID: 20000234 Result: Down-regulated in Transcription
  misc_feature: MA Experiment 20000234 PARAMETER Experiment Name: At_Siliques_P Parameter: Age (day) Value: 21
  misc_feature: MA Experiment 20000234 PARAMETER Experiment Name: At_Siliques_P Parameter: Organism Value: A. thaliana
  misc_feature: MA Experiment 20000234 PARAMETER Experiment Name: At_Siliques_P Parameter: Plant Line Value: WS
  misc_feature: MA Experiment 20000234 PARAMETER Experiment Name: At_Siliques_P Parameter: Tissue Value: Less Than 5mm Siliques vs. Whole Plant
  misc_feature: MA Experiment ID: 20000264 Result: Down-regulated in Transcription
  misc_feature: MA Experiment 20000264 PARAMETER Experiment Name: At_Open_Flower_P Parameter: Age (day) Value: 21
  misc_feature: MA Experiment 20000264 PARAMETER Experiment Name: At_Open_Flower_P Parameter: Plant Line Value: WS
  misc_feature: MA Experiment 20000264 PARAMETER Experiment Name: At_Open_Flower_P Parameter: Tissue Value: Open Flower vs. Whole Plant
  misc_feature: MA Experiment ID: 20000436 Result: Down-regulated in Transcription
  misc_feature: MA Experiment 20000436 PARAMETER Experiment Name: At_Drought_P Parameter: Age (day) Value: 7
  misc_feature: MA Experiment 20000436 PARAMETER Experiment Name: At_Drought_P Parameter: Organism Value: A. thaliana
  misc_feature: MA Experiment 20000436 PARAMETER Experiment Name: At_Drought_P Parameter: Plant Line Value: WS
  misc_feature: MA Experiment 20000436 PARAMETER Experiment Name: At_Drought_P Parameter: Timepoint (hr) Value: 12
  misc_feature: MA Experiment 20000436 PARAMETER Experiment Name: At_Drought_P Parameter: Tissue Value: Whole Plant
  misc_feature: MA Experiment 20000436 PARAMETER Experiment Name: At_Drought_P Parameter: Treatment Value: Drought vs. No Drought
  misc_feature: MA Experiment ID: 20000437 Result: Down-regulated in Transcription
  misc_feature: MA Experiment 20000437 PARAMETER Experiment Name: At_Drought_P Parameter: Age (day) Value: 8
  misc_feature: MA Experiment 20000437 PARAMETER Experiment Name: At_Drought_P Parameter: Organism Value: A. thaliana
  misc_feature: MA Experiment 20000437 PARAMETER Experiment Name: At_Drought_P Parameter: Plant Line Value: WS
  misc_feature: MA Experiment 20000437 PARAMETER Experiment Name: At_Drought_P Parameter: Timepoint (hr) Value: 24
  misc_feature: MA Experiment 20000437 PARAMETER Experiment Name: At_Drought_P Parameter: Tissue Value: Whole Plant
  misc_feature: MA Experiment 20000437 PARAMETER Experiment Name: At_Drought_P Parameter: Treatment Value: Drought vs. No Drought
  misc_feature: MA Experiment ID: 20000495 Result: Down-regulated in Transcription
  misc_feature: MA Experiment 20000495 PARAMETER Experiment Name: At_Guard_Cells_P Parameter: Harvest Date Value: 8/2/2002
  misc_feature: MA Experiment 20000495 PARAMETER Experiment Name: At_Guard_Cells_P Parameter: Organism Value: A. thaliana
  misc_feature: MA Experiment 20000495 PARAMETER Experiment Name: At_Guard_Cells_P Parameter: Tissue Value: Guard Cells vs. Leaves
  misc_feature: MA Experiment ID: 20001556 Result: Down-regulated in Transcription
  misc_feature: MA Experiment 20001556 PARAMETER Experiment Name: At_Drought_Soil_Dry_P Parameter: Age (day) Value: 26
  misc_feature: MA Experiment 20001556 PARAMETER Experiment Name: At_Drought_Soil_Dry_P Parameter: Organism Value: A. thaliana
  misc_feature: MA Experiment 20001556 PARAMETER Experiment Name: At_Drought_Soil_Dry_P Parameter: Plant Line Value: WS
  misc_feature: MA Experiment 20001556 PARAMETER Experiment Name: At_Drought_Soil_Dry_P Parameter: Post Timepoint (hr) Value: None
  misc_feature: MA Experiment 20001556 PARAMETER Experiment Name: At_Drought_Soil_Dry_P Parameter: Post-Treatment Value: None
  misc_feature: MA Experiment 20001556 PARAMETER Experiment Name: At_Drought_Soil_Dry_P Parameter: Timepoint (day) Value: 12
  misc_feature: MA Experiment 20001556 PARAMETER Experiment Name: At_Drought_Soil_Dry_P Parameter: Treatment Value: Drought vs. No Drought
  misc_feature: MA Experiment ID: 20001557 Result: Down-regulated in Transcription
  misc_feature: MA Experiment 20001557 PARAMETER Experiment Name: At_Drought_Soil_Dry_P Parameter: Age (day) Value: 27
  misc_feature: MA Experiment 20001557 PARAMETER Experiment Name: At_Drought_Soil_Dry_P Parameter: Organism Value: A. thaliana
  misc_feature: MA Experiment 20001557 PARAMETER Experiment Name: At_Drought_Soil_Dry_P Parameter: Plant Line Value: WS
  misc_feature: MA Experiment 20001557 PARAMETER Experiment Name: At_Drought_Soil_Dry_P Parameter: Post Timepoint (hr) Value: 3
  misc_feature: MA Experiment 20001557 PARAMETER Experiment Name: At_Drought_Soil_Dry_P Parameter: Post-Treatment Value: Re-Water vs. No Drought
  misc_feature: MA Experiment 20001557 PARAMETER Experiment Name: At_Drought_Soil_Dry_P Parameter: Timepoint (day) Value: 13
  misc_feature: MA Experiment 20001557 PARAMETER Experiment Name: At_Drought_Soil_Dry_P Parameter: Treatment Value: Drought vs. No Drought
  misc_feature: MA Experiment ID: 20001558 Result: Down-regulated in Transcription
  misc_feature: MA Experiment 20001558 PARAMETER Experiment Name: At_Drought_Soil_Dry_P Parameter: Age (day) Value: 27
  misc_feature: MA Experiment 20001558 PARAMETER Experiment Name: At_Drought_Soil_Dry_P Parameter: Organism Value: A. thaliana
  misc_feature: MA Experiment 20001558 PARAMETER Experiment Name: At_Drought_Soil_Dry_P Parameter: Plant Line Value: WS
  misc_feature: MA Experiment 20001558 PARAMETER Experiment Name: At_Drought_Soil_Dry_P Parameter: Post Timepoint (hr) Value: 6
  misc_feature: MA Experiment 20001558 PARAMETER Experiment Name: At_Drought_Soil_Dry_P Parameter: Post-Treatment Value: Re-Water vs. No Drought
  misc_feature: MA Experiment 20001558 PARAMETER Experiment Name: At_Drought_Soil_Dry_P Parameter: Timepoint (day) Value: 13
  misc_feature: MA Experiment 20001558 PARAMETER Experiment Name: At_Drought_Soil_Dry_P Parameter: Treatment Value: Drought vs. No Drought
  misc_feature: MA Experiment ID: 20001559 Result: Down-regulated in Transcription
  misc_feature: MA Experiment 20001559 PARAMETER Experiment Name: At_Drought_Soil_Dry_P Parameter: Age (day) Value: 28
  misc_feature: MA Experiment 20001559 PARAMETER Experiment Name: At_Drought_Soil_Dry_P Parameter: Organism Value: A. thaliana
  misc_feature: MA Experiment 20001559 PARAMETER Experiment Name: At_Drought_Soil_Dry_P Parameter: Plant Line Value: WS
  misc_feature: MA Experiment 20001559 PARAMETER Experiment Name: At_Drought_Soil_Dry_P Parameter: Post Timepoint (hr) Value: 29
  misc_feature: MA Experiment 20001559 PARAMETER Experiment Name: At_Drought_Soil_Dry_P Parameter: Post-Treatment Value: Re-Water vs. No Drought
  misc_feature: MA Experiment 20001559 PARAMETER Experiment Name: At_Drought_Soil_Dry_P Parameter: Timepoint (day) Value: 14
  misc_feature: MA Experiment 20001559 PARAMETER Experiment Name: At_Drought_Soil_Dry_P Parameter: Treatment Value: Drought vs. No Drought
  misc_feature: MA Experiment ID: 20001560 Result: Down-regulated in Transcription
  misc_feature: MA Experiment 20001560 PARAMETER Experiment Name: At_Drought_Soil_Dry_P Parameter: Age (day) Value: 28
  misc_feature: MA Experiment 20001560 PARAMETER Experiment Name: At_Drought_Soil_Dry_P Parameter: Organism Value: A. thaliana
  misc_feature: MA Experiment 20001560 PARAMETER Experiment Name: At_Drought_Soil_Dry_P Parameter: Plant Line Value: WS
  misc_feature: MA Experiment 20001560 PARAMETER Experiment Name: At_Drought_Soil_Dry_P Parameter: Post Timepoint (hr) Value: None
  misc_feature: MA Experiment 20001560 PARAMETER Experiment Name: At_Drought_Soil_Dry_P Parameter: Post-Treatment Value: None
  misc_feature: MA Experiment 20001560 PARAMETER Experiment Name: At_Drought_Soil_Dry_P Parameter: Timepoint (day) Value: 14
  misc_feature: MA Experiment 20001560 PARAMETER Experiment Name: At_Drought_Soil_Dry_P Parameter: Treatment Value: Drought vs. No Drought
  misc_feature: MA Experiment ID: 20001757 Result: Up-regulated in Transcription
  misc_feature: MA Experiment 20001757 PARAMETER Experiment Name: At_50mM_NH4NO3_L-to-H_P Parameter: Timepoint (hr) Value: 6
  misc_feature: MA Experiment 20001757 PARAMETER Experiment Name: At_50mM_NH4NO3_L-to-H_P Parameter: Tissue Value: Leaf
  misc_feature: MA Experiment 20001757 PARAMETER Experiment Name: At_50mM_NH4NO3_L-to-H_P Parameter: Treatment Value: 50mM NH4NO3 vs 100mM Mannitol
  misc_feature: MA Experiment ID: 20001904 Result: Down-regulated in Transcription
  misc_feature: MA Experiment 20001904 PARAMETER Experiment Name: At_Drought_Reproduction_P Parameter: Age (day) Value: 37
  misc_feature: MA Experiment 20001904 PARAMETER Experiment Name: At_Drought_Reproduction_P Parameter: Organism Value: A. thaliana
  misc_feature: MA Experiment 20001904 PARAMETER Experiment Name: At_Drought_Reproduction_P Parameter: Plant Line Value: WS
  misc_feature: MA Experiment 20001904 PARAMETER Experiment Name: At_Drought_Reproduction_P Parameter: Timepoint (day) Value: 7
  misc_feature: MA Experiment 20001904 PARAMETER Experiment Name: At_Drought_Reproduction_P Parameter: Tissue Value: Rosettes
  misc_feature: MA Experiment 20001904 PARAMETER Experiment Name: At_Drought_Reproduction_P Parameter: Treatment Value: Drought vs. No Drought
  misc_feature: MA Experiment ID: 20001910 Result: Down-regulated in Transcription
  misc_feature: MA Experiment 20001910 PARAMETER Experiment Name: At_Drought_Reproduction_P Parameter: Age (day) Value: 37
  misc_feature: MA Experiment 20001910 PARAMETER Experiment Name: At_Drought_Reproduction_P Parameter: Organism Value: A. thaliana
  misc_feature: MA Experiment 20001910 PARAMETER Experiment Name: At_Drought_Reproduction_P Parameter: Plant Line Value: WS
  misc_feature: MA Experiment 20001910 PARAMETER Experiment Name: At_Drought_Reproduction_P Parameter: Timepoint (day) Value: 7
  misc_feature: MA Experiment 20001910 PARAMETER Experiment Name: At_Drought_Reproduction_P Parameter: Tissue Value: Flowers
  misc_feature: MA Experiment 20001910 PARAMETER Experiment Name: At_Drought_Reproduction_P Parameter: Treatment Value: Drought vs. No Drought
atggataaaagatggagtcttcaaggtatgaatgctcttgtgaccggtggcactaaaggcatcggggaagctgttgtggaggaactgtcaattttgggagcaagagtccacacatgtgctagagacgagactcagcttcaagaacgtttacgtgaatggcaagaaaaagggtttcaggtcaccacttctatctgcgacgtttctttgcgtgagcaacgagagaaactcatggaaaccgtttcctctctcttccaaggaaaactcaacatcctcgtgaacaatgtgggaacgttaatgctcaagccgaccacagagtatacagcagaagaattctcgtttcttatggctacaaatctcgactcagctttccatatttcacagcttgcgcaccctttgttgaaagcctctggctcagggagcattgtgctcatgtcctctattgccggagtcgtgcatgtcggtgttggatccatctatggagcaacaaaaggagccatgaatcagttggctagaaacttagcttgcgaatgggcaagcgacaacataaggactaacgctatttgtccatggttaatcacaactcctttgattagtgatcttctcagtgttgaggagatgaaaaaagaagcagaggaaaggacacccatggggcgtgtgggagaggcaaatgaagtctcaccgcttgtggcatttctttgtcttcctgcagcttcttatattactggtcaagtcatttgtgttgatggaggtctcactgttaatggcttctcctatcagccacatgcttga

SEQ ID NO: 49783 - protein, 262 aa, Arabidopsis thaliana
  peptide (1)..(262): Ceres Seq. ID no. 13588692
  misc_feature (3)..(260): Homolog of NCBI NO: 15222399 NR Description: short-chain dehydrogenase/reductase family
  misc_feature (2)..(257): Homolog of NCBI NO: 25283134 NR Description: probable tropinone reductase [imported] -
  misc_feature (2)..(260): Homolog of NCBI NO: 15227043 NR Description: short-chain dehydrogenase/reductase family
  misc_feature (2)..(260): Homolog of NCBI NO: 21554716 NR Description: putative tropinone reductase [Arabidopsis
  misc_feature (2)..(260): Homolog of NCBI NO: 15227076 NR Description: short-chain dehydrogenase/reductase family
  misc_feature (2)..(92): Homolog of NCBI NO: 6457349 NR Description: short chain alcohol dehydrogenase [Arabidopsis
  misc_feature (96)..(259): Homolog of NCBI NO: 6457349 NR Description: short chain alcohol dehydrogenase [Arabidopsis
  misc_feature (2)..(260): Homolog of NCBI NO: 15227040 NR Description: short-chain dehydrogenase/reductase family
  misc_feature (2)..(259): Homolog of NCBI NO: 15227075 NR Description: short-chain dehydrogenase/reductase family
  misc_feature (1)..(262): Homolog of NCBI NO: 15227069 NR Description: short-chain dehydrogenase/reductase family
MDKRWSLQGMNALVTGGTKGIGEAVVEELSILGARVHTCARDETQLQERLREWQEKGFQVTTSICDVSLREQREKLMETVSSLFQGKLNILVNNVGTLMLKPTTEYTAEEFSFLMATNLDSAFHISQLAHPLLKASGSGSIVLMSSIAGVVHVGVGSIYGATKGAMNQLARNLACEWASDNIRTNAICPWLITTPLISDLLSVEEMKKEAEERTPMGRVGEANEVSPLVAFLCLPAASYITGQVICVDGGLTVNGFSYQPHA

SEQ ID NO: 49784 - protein, 253 aa, Arabidopsis thaliana
  peptide (1)..(253): Ceres Seq. ID no. 13588693
  misc_feature (1)..(251): Homolog of NCBI NO: 15222399 NR Description: short-chain dehydrogenase/reductase family
  misc_feature (1)..(248): Homolog of NCBI NO: 25283134 NR Description: probable tropinone reductase [imported] -
  misc_feature (1)..(251): Homolog of NCBI NO: 15227043 NR Description: short-chain dehydrogenase/reductase family
  misc_feature (1)..(251): Homolog of NCBI NO: 21554716 NR Description: putative tropinone reductase [Arabidopsis
  misc_feature (1)..(251): Homolog of NCBI NO: 15227076 NR Description: short-chain dehydrogenase/reductase family
  misc_feature (1)..(83): Homolog of NCBI NO: 6457349 NR Description: short chain alcohol dehydrogenase [Arabidopsis
  misc_feature (87)..(250): Homolog of NCBI NO: 6457349 NR Description: short chain alcohol dehydrogenase [Arabidopsis
  misc_feature (1)..(251): Homolog of NCBI NO: 15227040 NR Description: short-chain dehydrogenase/reductase family
  misc_feature (1)..(250): Homolog of NCBI NO: 15227075 NR Description: short-chain dehydrogenase/reductase family
  misc_feature (1)..(253): Homolog of NCBI NO: 15227069 NR Description: short-chain dehydrogenase/reductase family
MNALVTGGTKGIGEAVVEELSILGARVHTCARDETQLQERLREWQEKGFQVTTSICDVSLREQREKLMETVSSLFQGKLNILVNNVGTLMLKPTTEYTAEEFSFLMATNLDSAFHISQLAHPLLKASGSGSIVLMSSIAGVVHVGVGSIYGATKGAMNQLARNLACEWASDNIRTNAICPWLITTPLISDLLSVEEMKKEAEERTPMGRVGEANEVSPLVAFLCLPAASYITGQVICVDGGLTVNGFSYQPHA

SEQ ID NO: 49785 - protein, 186 aa, Arabidopsis thaliana
  peptide (1)..(186): Ceres Seq. ID no. 13588694
  misc_feature (1)..(184): Homolog of NCBI NO: 15222399 NR Description: short-chain dehydrogenase/reductase family
  misc_feature (1)..(181): Homolog of NCBI NO: 25283134 NR Description: probable tropinone reductase [imported] -
  misc_feature (1)..(184): Homolog of NCBI NO: 15227043 NR Description: short-chain dehydrogenase/reductase family
  misc_feature (1)..(184): Homolog of NCBI NO: 21554716 NR Description: putative tropinone reductase [Arabidopsis
  misc_feature (1)..(184): Homolog of NCBI NO: 15227076 NR Description: short-chain dehydrogenase/reductase family
  misc_feature (1)..(16): Homolog of NCBI NO: 6457349 NR Description: short chain alcohol dehydrogenase [Arabidopsis
  misc_feature (20)..(183): Homolog of NCBI NO: 6457349 NR Description: short chain alcohol dehydrogenase [Arabidopsis
  misc_feature (1)..(184): Homolog of NCBI NO: 15227040 NR Description: short-chain dehydrogenase/reductase family
  misc_feature (1)..(183): Homolog of NCBI NO: 15227075 NR Description: short-chain dehydrogenase/reductase family
  misc_feature (1)..(186): Homolog of NCBI NO: 15227069 NR Description: short-chain dehydrogenase/reductase family
METVSSLFQGKLNILVNNVGTLMLKPTTEYTAEEFSFLMATNLDSAFHISQLAHPLLKASGSGSIVLMSSIAGVVHVGVGSIYGATKGAMNQLARNLACEWASDNIRTNAICPWLITTPLISDLLSVEEMKKEAEERTPMGRVGEANEVSPLVAFLCLPAASYITGQVICVDGGLTVNGFSYQPHA

SEQ ID NO: 49786 - DNA, 1182 bp, Arabidopsis thaliana
  misc_feature (1)..(1182): Ceres Seq. ID no. 13588695
  misc_feature: MA Experiment ID: 20000184 Result: Down-regulated in Transcription
  misc_feature: MA Experiment 20000184 PARAMETER Experiment Name: At_Shoots__P Parameter: Age (day) Value: 7
  misc_feature: MA Experiment 20000184 PARAMETER Experiment Name: At_Shoots__P Parameter: Tissue Value: Shoots vs. Whole Plant
  misc_feature: MA Experiment ID: 20000234 Result: Down-regulated in Transcription
  misc_feature: MA Experiment 20000234 PARAMETER Experiment Name: At_Siliques_P Parameter: Age (day) Value: 21
  misc_feature: MA Experiment 20000234 PARAMETER Experiment Name: At_Siliques_P Parameter: Organism Value: A. thaliana
  misc_feature: MA Experiment 20000234 PARAMETER Experiment Name: At_Siliques_P Parameter: Plant Line Value: WS
  misc_feature: MA Experiment 20000234 PARAMETER Experiment Name: At_Siliques_P Parameter: Tissue Value: Less Than 5mm Siliques vs. Whole Plant
  misc_feature: MA Experiment ID: 20000235 Result: Down-regulated in Transcription
  misc_feature: MA Experiment 20000235 PARAMETER Experiment Name: At_Siliques_P Parameter: Age (day) Value: 21
  misc_feature: MA Experiment 20000235 PARAMETER Experiment Name: At_Siliques_P Parameter: Organism Value: A. thaliana
  misc_feature: MA Experiment 20000235 PARAMETER Experiment Name: At_Siliques_P Parameter: Plant Line Value: WS
  misc_feature: MA Experiment 20000235 PARAMETER Experiment Name: At_Siliques_P Parameter: Tissue Value: 5-10mm Siliques vs. Whole Plant
  misc_feature: MA Experiment ID: 20000264 Result: Down-regulated in Transcription
  misc_feature: MA Experiment 20000264 PARAMETER Experiment Name: At_Open_Flower_P Parameter: Age (day) Value: 21
  misc_feature: MA Experiment 20000264 PARAMETER Experiment Name: At_Open_Flower_P Parameter: Plant Line Value: WS
  misc_feature: MA Experiment 20000264 PARAMETER Experiment Name: At_Open_Flower_P Parameter: Tissue Value: Open Flower vs. Whole Plant
  misc_feature: MA Experiment ID: 20000265 Result: Down-regulated in Transcription
  misc_feature: MA Experiment 20000265 PARAMETER Experiment Name: At_Open_Flower_P Parameter: Age (day) Value: 21
  misc_feature: MA Experiment 20000265 PARAMETER Experiment Name: At_Open_Flower_P Parameter: Plant Line Value: WS
  misc_feature: MA Experiment 20000265 PARAMETER Experiment Name: At_Open_Flower_P Parameter: Tissue Value: Closed Flower vs. Whole Plant
  misc_feature: MA Experiment ID: 20000286 Result: Down-regulated in Transcription
  misc_feature: MA Experiment 20000286 PARAMETER Experiment Name: At_Open_Flower_P Parameter: Age (day) Value: 21
  misc_feature: MA Experiment 20000286 PARAMETER Experiment Name: At_Open_Flower_P Parameter: Plant Line Value: WS
  misc_feature: MA Experiment 20000286 PARAMETER Experiment Name: At_Open_Flower_P Parameter: Tissue Value: Half Open vs. Whole Plant
  misc_feature: MA Experiment ID: 20000438 Result: Down-regulated in Transcription
  misc_feature: MA Experiment 20000438 PARAMETER Experiment Name: At_Shoots__P Parameter: Age (day) Value: 14
  misc_feature: MA Experiment 20000438 PARAMETER Experiment Name: At_Shoots__P Parameter: Tissue Value: Shoots vs. Whole Plant
  misc_feature: MA Experiment ID: 20000441 Result: Up-regulated in Transcription
  misc_feature: MA Experiment 20000441 PARAMETER Experiment Name: At_1uM_BR-BRZ__P Parameter: Tissue Value: Shoot Apices
  misc_feature: MA Experiment 20000441 PARAMETER Experiment Name: At_1uM_BR-BRZ__P Parameter: Treatment Value: 1uM BR vs. No Treatment
  misc_feature: MA Experiment ID: 20001557 Result: Down-regulated in Transcription
  misc_feature: MA Experiment 20001557 PARAMETER Experiment Name: At_Drought_Soil_Dry_P Parameter: Age (day) Value: 27
  misc_feature: MA Experiment 20001557 PARAMETER Experiment Name: At_Drought_Soil_Dry_P Parameter: Organism Value: A. thaliana
  misc_feature: MA Experiment 20001557 PARAMETER Experiment Name: At_Drought_Soil_Dry_P Parameter: Plant Line Value: WS
  misc_feature: MA Experiment 20001557 PARAMETER Experiment Name: At_Drought_Soil_Dry_P Parameter: Post Timepoint (hr) Value: 3
  misc_feature: MA Experiment 20001557 PARAMETER Experiment Name: At_Drought_Soil_Dry_P Parameter: Post-Treatment Value: Re-Water vs. No Drought
  misc_feature: MA Experiment 20001557 PARAMETER Experiment Name: At_Drought_Soil_Dry_P Parameter: Timepoint (day) Value: 13
  misc_feature: MA Experiment 20001557 PARAMETER Experiment Name: At_Drought_Soil_Dry_P Parameter: Treatment Value: Drought vs. No Drought
  misc_feature: MA Experiment ID: 20001558 Result: Down-regulated in Transcription
  misc_feature: MA Experiment 20001558 PARAMETER Experiment Name: At_Drought_Soil_Dry_P Parameter: Age (day) Value: 27
  misc_feature: MA Experiment 20001558 PARAMETER Experiment Name: At_Drought_Soil_Dry_P Parameter: Organism Value: A. thaliana
  misc_feature: MA Experiment 20001558 PARAMETER Experiment Name: At_Drought_Soil_Dry_P Parameter: Plant Line Value: WS
  misc_feature: MA Experiment 20001558 PARAMETER Experiment Name: At_Drought_Soil_Dry_P Parameter: Post Timepoint (hr) Value: 6
  misc_feature: MA Experiment 20001558 PARAMETER Experiment Name: At_Drought_Soil_Dry_P Parameter: Post-Treatment Value: Re-Water vs. No Drought
  misc_feature: MA Experiment 20001558 PARAMETER Experiment Name: At_Drought_Soil_Dry_P Parameter: Timepoint (day) Value: 13
  misc_feature: MA Experiment 20001558 PARAMETER Experiment Name: At_Drought_Soil_Dry_P Parameter: Treatment Value: Drought vs. No Drought
  misc_feature: MA Experiment ID: 20001560 Result: Down-regulated in Transcription
  misc_feature: MA Experiment 20001560 PARAMETER Experiment Name: At_Drought_Soil_Dry_P Parameter: Age (day) Value: 28
  misc_feature: MA Experiment 20001560 PARAMETER Experiment Name: At_Drought_Soil_Dry_P Parameter: Organism Value: A. thaliana
  misc_feature: MA Experiment 20001560 PARAMETER Experiment Name: At_Drought_Soil_Dry_P Parameter: Plant Line Value: WS
  misc_feature: MA Experiment 20001560 PARAMETER Experiment Name: At_Drought_Soil_Dry_P Parameter: Post Timepoint (hr) Value: None
  misc_feature: MA Experiment 20001560 PARAMETER Experiment Name: At_Drought_Soil_Dry_P Parameter: Post-Treatment Value: None
  misc_feature: MA Experiment 20001560 PARAMETER Experiment Name: At_Drought_Soil_Dry_P Parameter: Timepoint (day) Value: 14
  misc_feature: MA Experiment 20001560 PARAMETER Experiment Name: At_Drought_Soil_Dry_P Parameter: Treatment Value: Drought vs. No Drought
atggaagtttccggcgtcgtcctccgacaaattccatgtgtttcttcaggttccgttgcaggtctccgattagtatcggaattttccggtaataccagaacggtagggtttcgaaccagaagatttcgtggtattgtgtgtaataatgagtttgcggataaagggcatgtgaattactatatcgagccaacgagatgcggcgaggagaaagagaaggttaaggttatggagaaggagaagaaggcgttgaagaagaaggcgaaagttcttaaaagtctttctaagaacttggatatgttctctagtatagggtttggtcttgatcctgaagctggtttggttggtgagattcagaccaagacaatctcggaagctacagagatattggttaagcagctggagcagttgaaagcagaggagaagatattgaagaaacagaggaaagaagagaaggctaaagccaaagccatgaagaagatgactgaaatggactctgaatcatcttcttcgtctgaatcaagtgatagtgattgtgataaaggcaaagttgtggacatgagctctttaagaaacaaggctaaaccggttcttgagccgttacaaccagaagccacagtagcaacccttcctaggatccaagaggatgcaatttcttgcaagaacaccagtgaagcattgcagattgctctacaaacatccacaatttttccttcaatggccaatcctggacagacattgaagacggtagaagcggtttcagtggttggattaccattgaatagagtagaagtgtgtatgggagggaagtgtaagagatcaggaggagctttgttgttggatgagtttcaaagggcgatgacgggtttcgaaggatctgctgtggcttgcaagtgcatggggaagtgtcgtgatggcccaaacgttagagttgtgaaggagactgatgctgtgatgactgattcagttaggacaccatccaagaccctttgtgtaggagttggattgcaggatgtggaaactattgtgacaagtttctttgatgaagaatgtagcagagaaggactcggttctgtctcatattgaaagtgttttgaaacggctaatgttttatatagtgtggtgctttctcattgtacatatttaccttctcgataagtcattgatataagccgtgtaattgcg

SEQ ID NO: 49787 - protein, 360 aa, Arabidopsis thaliana
  peptide (1)..(360): Ceres Seq. ID no. 13588696
  misc_feature (157)..(360): Homolog of NCBI NO: 30102610 NR Description: At1g48300 [Arabidopsis thaliana]
  misc_feature (76)..(360): Homolog of NCBI NO: 22330104 NR Description: expressed protein [Arabidopsis thaliana]
  misc_feature (1)..(360): Homolog of NCBI NO: 25405260 NR Description: hypothetical protein F11A17.15 [imported] -
MEVSGVVLRQIPCVSSGSVAGLRLVSEFSGNTRTVGFRTRRFRGIVCNNEFADKGHVNYYIEPTRCGEEKEKVKVMEKEKKALKKKAKVLKSLSKNLDMFSSIGFGLDPEAGLVGEIQTKTISEATEILVKQLEQLKAEEKILKKQRKEEKAKAKAMKKMTEMDSESSSSSESSDSDCDKGKVVDMSSLRNKAKPVLEPLQPEATVATLPRIQEDAISCKNTSEALQIALQTSTIFPSMANPGQTLKTVEAVSVVGLPLNRVEVCMGGKCKRSGGALLLDEFQRAMTGFEGSAVACKCMGKCRDGPNVRVVKETDAVMTDSVRTPSKTLCVGVGLQDVETIVTSFFDEECSREGLGSVSY

SEQ ID NO: 49788 - protein, 285 aa, Arabidopsis thaliana
  peptide (1)..(285): Ceres Seq. ID no. 13588697
  misc_feature (82)..(285): Homolog of NCBI NO: 30102610 NR Description: At1g48300 [Arabidopsis thaliana]
  misc_feature (1)..(285): Homolog of NCBI NO: 22330104 NR Description: expressed protein [Arabidopsis thaliana]
  misc_feature (1)..(285): Homolog of NCBI NO: 25405260 NR Description: hypothetical protein F11A17.15 [imported] -
MEKEKKALKKKAKVLKSLSKNLDMFSSIGFGLDPEAGLVGEIQTKTISEATEILVKQLEQLKAEEKILKKQRKEEKAKAKAMKKMTEMDSESSSSSESSDSDCDKGKVVDMSSLRNKAKPVLEPLQPEATVATLPRIQEDAISCKNTSEALQIALQTSTIFPSMANPGQTLKTVEAVSVVGLPLNRVEVCMGGKCKRSGGALLLDEFQRAMTGFEGSAVACKCMGKCRDGPNVRVVKETDAVMTDSVRTPSKTLCVGVGLQDVETIVTSFFDEECSREGLGSVSY

SEQ ID NO: 49789 - protein, 262 aa, Arabidopsis thaliana
  peptide (1)..(262): Ceres Seq. ID no. 13588698
  misc_feature (59)..(262): Homolog of NCBI NO: 30102610 NR Description: At1g48300 [Arabidopsis thaliana]
  misc_feature (1)..(262): Homolog of NCBI NO: 22330104 NR Description: expressed protein [Arabidopsis thaliana]
  misc_feature (1)..(262): Homolog of NCBI NO: 25405260 NR Description: hypothetical protein F11A17.15 [imported] -
MFSSIGFGLDPEAGLVGEIQTKTISEATEILVKQLEQLKAEEKILKKQRKEEKAKAKAMKKMTEMDSESSSSSESSDSDCDKGKVVDMSSLRNKAKPVLEPLQPEATVATLPRIQEDAISCKNTSEALQIALQTSTIFPSMANPGQTLKTVEAVSVVGLPLNRVEVCMGGKCKRSGGALLLDEFQRAMTGFEGSAVACKCMGKCRDGPNVRVVKETDAVMTDSVRTPSKTLCVGVGLQDVETIVTSFFDEECSREGLGSVSY

SEQ ID NO: 49790 - DNA, 1815 bp, Arabidopsis thaliana; identical to SEQ ID NO: 40621
  misc_feature (1)..(1815): Ceres Seq. ID no. 13622016
  misc_feature: MA Experiment ID: 20000180 Result: Down-regulated in Transcription
  misc_feature: MA Experiment 20000180 PARAMETER Experiment Name: At_Germinating_Seeds_P Parameter: Age (hr) Value: 24 vs. 0
  misc_feature: MA Experiment 20000180 PARAMETER Experiment Name: At_Germinating_Seeds_P Parameter: Tissue Value: Germinating Seeds
  misc_feature: MA Experiment ID: 20000227 Result: Up-regulated in Transcription
  misc_feature: MA Experiment 20000227 PARAMETER Experiment Name: At_Root-Tips-vs-Tops_P Parameter: Tissue Value: Root Tips vs. Root Tops
  misc_feature: MA Experiment ID: 20000234 Result: Up-regulated in Transcription
  misc_feature: MA Experiment 20000234 PARAMETER Experiment Name: At_Siliques_P Parameter: Age (day) Value: 21
  misc_feature: MA Experiment 20000234 PARAMETER Experiment Name: At_Siliques_P Parameter: Organism Value: A. thaliana
  misc_feature: MA Experiment 20000234 PARAMETER Experiment Name: At_Siliques_P Parameter: Plant Line Value: WS
  misc_feature: MA Experiment 20000234 PARAMETER Experiment Name: At_Siliques_P Parameter: Tissue Value: Less Than 5mm Siliques vs. Whole Plant
  misc_feature: MA Experiment ID: 20000495 Result: Up-regulated in Transcription
  misc_feature: MA Experiment 20000495 PARAMETER Experiment Name: At_Guard_Cells_P Parameter: Harvest Date Value: 8/2/2002
  misc_feature: MA Experiment 20000495 PARAMETER Experiment Name: At_Guard_Cells_P Parameter: Organism Value: A. thaliana
  misc_feature: MA Experiment 20000495 PARAMETER Experiment Name: At_Guard_Cells_P Parameter: Tissue Value: Guard Cells vs. Leaves
  misc_feature: MA Experiment ID: 20001458 Result: Up-regulated in Transcription
  misc_feature: MA Experiment 20001458 PARAMETER Experiment Name: At_50mM_NH4NO3_L-to-H_P Parameter: Age (day) Value: Undefined
  misc_feature: MA Experiment 20001458 PARAMETER Experiment Name: At_50mM_NH4NO3_L-to-H_P Parameter: Organism Value: Undefined
  misc_feature: MA Experiment 20001458 PARAMETER Experiment Name: At_50mM_NH4NO3_L-to-H_P Parameter: Plant Line Value: Undefined
  misc_feature: MA Experiment 20001458 PARAMETER Experiment Name: At_50mM_NH4NO3_L-to-H_P Parameter: Timepoint (hr) Value: 2
  misc_feature: MA Experiment 20001458 PARAMETER Experiment Name: At_50mM_NH4NO3_L-to-H_P Parameter: Tissue Value: Siliques
  misc_feature: MA Experiment 20001458 PARAMETER Experiment Name: At_50mM_NH4NO3_L-to-H_P Parameter: Treatment Value: 50mM NH4NO3 vs. 100mM Manitol
  misc_feature: MA Experiment ID: 20001557 Result: Up-regulated in Transcription
  misc_feature: MA Experiment 20001557 PARAMETER Experiment Name: At_Drought_Soil_Dry_P Parameter: Age (day) Value: 27
  misc_feature: MA Experiment 20001557 PARAMETER Experiment Name: At_Drought_Soil_Dry_P Parameter: Organism Value: A. thaliana
  misc_feature: MA Experiment 20001557 PARAMETER Experiment Name: At_Drought_Soil_Dry_P Parameter: Plant Line Value: WS
  misc_feature: MA Experiment 20001557 PARAMETER Experiment Name: At_Drought_Soil_Dry_P Parameter: Post Timepoint (hr) Value: 3
  misc_feature: MA Experiment 20001557 PARAMETER Experiment Name: At_Drought_Soil_Dry_P Parameter: Post-Treatment Value: Re-Water vs. No Drought
  misc_feature: MA Experiment 20001557 PARAMETER Experiment Name: At_Drought_Soil_Dry_P Parameter: Timepoint (day) Value: 13
  misc_feature: MA Experiment 20001557 PARAMETER Experiment Name: At_Drought_Soil_Dry_P Parameter: Treatment Value: Drought vs. No Drought
  misc_feature: MA Experiment ID: 20001560 Result: Up-regulated in Transcription
  misc_feature: MA Experiment 20001560 PARAMETER Experiment Name: At_Drought_Soil_Dry_P Parameter: Age (day) Value: 28
  misc_feature: MA Experiment 20001560 PARAMETER Experiment Name: At_Drought_Soil_Dry_P Parameter: Organism Value: A. thaliana
  misc_feature: MA Experiment 20001560 PARAMETER Experiment Name: At_Drought_Soil_Dry_P Parameter: Plant Line Value: WS
  misc_feature: MA Experiment 20001560 PARAMETER Experiment Name: At_Drought_Soil_Dry_P Parameter: Post Timepoint (hr) Value: None
  misc_feature: MA Experiment 20001560 PARAMETER Experiment Name: At_Drought_Soil_Dry_P Parameter: Post-Treatment Value: None
  misc_feature: MA Experiment 20001560 PARAMETER Experiment Name: At_Drought_Soil_Dry_P Parameter: Timepoint (day) Value: 14
  misc_feature: MA Experiment 20001560 PARAMETER Experiment Name: At_Drought_Soil_Dry_P Parameter: Treatment Value: Drought vs. No Drought

SEQ ID NO: 49791 - protein, 495 aa, Arabidopsis thaliana; identical to SEQ ID NO: 40622
  peptide (1)..(495): Ceres Seq. ID no. 15219327
  misc_feature (311)..(401): Pfam Name: YT521-B-like family Pfam Description: YT521-B-like family
  misc_feature (311)..(401): Pfam Name: YT521-B-like family Pfam Description: YT521-B-like family
  misc_feature (78)..(439): Homolog of NCBI NO: 25372787 NR Description: Rubisco subunit binding-protein beta subunit
  misc_feature (93)..(434): Homolog of NCBI NO: 6223640 NR Description: unknown protein [Arabidopsis thaliana]
  misc_feature (93)..(436): Homolog of NCBI NO: 30678991 NR Description: expressed protein [Arabidopsis thaliana]
  misc_feature (93)..(436): Homolog of NCBI NO: 18396717 NR Description: expressed protein [Arabidopsis thaliana]
  misc_feature (119)..(495): Homolog of NCBI NO: 30682679 NR Description: expressed protein [Arabidopsis thaliana]
  misc_feature (78)..(439): Homolog of NCBI NO: 25372787 NR Description: Rubisco subunit binding-protein beta subunit
  misc_feature (93)..(436): Homolog of NCBI NO: 30678991 NR Description: expressed protein [Arabidopsis thaliana]
  misc_feature (119)..(495): Homolog of NCBI NO: 30682679 NR Description: expressed protein [Arabidopsis thaliana]
  misc_feature (1)..(495): Homolog of NCBI NO: 30697464 NR Description: expressed protein [Arabidopsis thaliana]
  misc_feature (1)..(495): Homolog of NCBI NO: 15912287 NR Description: AT5g61020/maf19_20 [Arabidopsis thaliana]
  misc_feature (1)..(495): Homolog of NCBI NO: 30697466 NR Description: expressed protein [Arabidopsis thaliana]
  misc_feature (119)..(495): Homolog of NCBI NO: 25084169 NR Description: Unknown protein [Arabidopsis thaliana]
  misc_feature (119)..(495): Homolog of NCBI NO: 30682683 NR Description: expressed protein [Arabidopsis thaliana]
  misc_feature (93)..(436): Homolog of NCBI NO: 18396717 NR Description: expressed protein [Arabidopsis thaliana]
  misc_feature (93)..(434): Homolog of NCBI NO: 6223640 NR Description: unknown protein [Arabidopsis thaliana]
  misc_feature (119)..(495): Homolog of NCBI NO: 30682683 NR Description: expressed protein [Arabidopsis thaliana]
  misc_feature (119)..(495): Homolog of NCBI NO: 25084169 NR Description: Unknown protein [Arabidopsis thaliana]
  misc_feature (1)..(495): Homolog of NCBI NO: 30697466 NR Description: expressed protein [Arabidopsis thaliana]
  misc_feature (1)..(495): Homolog of NCBI NO: 15912287 NR Description: AT5g61020/maf19_20 [Arabidopsis thaliana]
  misc_feature (1)..(495): Homolog of NCBI NO: 30697464 NR Description: expressed protein [Arabidopsis thaliana]

SEQ ID NO: 49792 - protein, 352 aa, Arabidopsis thaliana; identical to SEQ ID NO: 40623
  peptide (1)..(352): Ceres Seq. ID no. 15219328
  misc_feature (168)..(258): Pfam Name: YT521-B-like family Pfam Description: YT521-B-like family
  misc_feature (168)..(258): Pfam Name: YT521-B-like family Pfam Description: YT521-B-like family
  misc_feature (1)..(296): Homolog of NCBI NO: 25372787 NR Description: Rubisco subunit binding-protein beta subunit
  misc_feature (1)..(291): Homolog of NCBI NO: 6223640 NR Description: unknown protein [Arabidopsis thaliana]
  misc_feature (1)..(293): Homolog of NCBI NO: 30678991 NR Description: expressed protein [Arabidopsis thaliana]
  misc_feature (1)..(293): Homolog of NCBI NO: 18396717 NR Description: expressed protein [Arabidopsis thaliana]
  misc_feature (1)..(352): Homolog of NCBI NO: 30682683 NR Description: expressed protein [Arabidopsis thaliana]
  misc_feature (1)..(296): Homolog of NCBI NO: 25372787 NR Description: Rubisco subunit binding-protein beta subunit
  misc_feature (1)..(293): Homolog of NCBI NO: 30678991 NR Description: expressed protein [Arabidopsis thaliana]
  misc_feature (1)..(352): Homolog of NCBI NO: 30682683 NR Description: expressed protein [Arabidopsis thaliana]
  misc_feature (1)..(352): Homolog of NCBI NO: 30697464 NR Description: expressed protein [Arabidopsis thaliana]
  misc_feature (1)..(352): Homolog of NCBI NO: 15912287 NR Description: AT5g61020/maf19_20 [Arabidopsis thaliana]
  misc_feature (1)..(352): Homolog of NCBI NO: 30697466 NR Description: expressed protein [Arabidopsis thaliana]
  misc_feature (1)..(352): Homolog of NCBI NO: 25084169 NR Description: Unknown protein [Arabidopsis thaliana]
  misc_feature (1)..(352): Homolog of NCBI NO: 30682679 NR Description: expressed protein [Arabidopsis thaliana]
  misc_feature (1)..(293): Homolog of NCBI NO: 18396717 NR Description: expressed protein [Arabidopsis thaliana]
  misc_feature (1)..(291): Homolog of NCBI NO: 6223640 NR Description: unknown protein [Arabidopsis thaliana]
  misc_feature (1)..(352): Homolog of NCBI NO: 30682679 NR Description: expressed protein [Arabidopsis thaliana]
  misc_feature (1)..(352): Homolog of NCBI NO: 25084169 NR Description: Unknown protein [Arabidopsis thaliana]
  misc_feature (1)..(352): Homolog of NCBI NO: 30697466 NR Description: expressed protein [Arabidopsis thaliana]
  misc_feature (1)..(352): Homolog of NCBI NO: 15912287 NR Description: AT5g61020/maf19_20 [Arabidopsis thaliana]
  misc_feature (1)..(352): Homolog of NCBI NO: 30697464 NR Description: expressed protein [Arabidopsis thaliana]

SEQ ID NO: 49793 - protein, 343 aa, Arabidopsis thaliana; identical to SEQ ID NO: 40624
  peptide (1)..(343): Ceres Seq. ID no. 15219329
  misc_feature (159)..(249): Pfam Name: YT521-B-like family Pfam Description: YT521-B-like family
  misc_feature (159)..(249): Pfam Name: YT521-B-like family Pfam Description: YT521-B-like family
  misc_feature (1)..(287): Homolog of NCBI NO: 25372787 NR Description: Rubisco subunit binding-protein beta subunit
  misc_feature (1)..(282): Homolog of NCBI NO: 6223640 NR Description: unknown protein [Arabidopsis thaliana]
  misc_feature (1)..(284): Homolog of NCBI NO: 30678991 NR Description: expressed protein [Arabidopsis thaliana]
  misc_feature (1)..(284): Homolog of NCBI NO: 18396717 NR Description: expressed protein [Arabidopsis thaliana]
  misc_feature (1)..(343): Homolog of NCBI NO: 30682683 NR Description: expressed protein [Arabidopsis thaliana]
  misc_feature (1)..(287): Homolog of NCBI NO: 25372787 NR Description: Rubisco subunit binding-protein beta subunit
  misc_feature (1)..(284): Homolog of NCBI NO: 30678991 NR Description: expressed protein [Arabidopsis thaliana]
  misc_feature (1)..(343): Homolog of NCBI NO: 30682683 NR Description: expressed protein [Arabidopsis thaliana]
  misc_feature (1)..(343): Homolog of NCBI NO: 30697464 NR Description: expressed protein [Arabidopsis thaliana]
  misc_feature (1)..(343): Homolog of NCBI NO: 15912287 NR Description: AT5g61020/maf19_20 [Arabidopsis thaliana]
  misc_feature (1)..(343): Homolog of NCBI NO: 30697466 NR Description: expressed protein [Arabidopsis thaliana]
  misc_feature (1)..(343): Homolog of NCBI NO: 25084169 NR Description: Unknown protein [Arabidopsis thaliana]
  misc_feature (1)..(343): Homolog of NCBI NO: 30682679 NR Description: expressed protein [Arabidopsis thaliana]
  misc_feature (1)..(284): Homolog of NCBI NO: 18396717 NR Description: expressed protein [Arabidopsis thaliana]
  misc_feature (1)..(282): Homolog of NCBI NO: 6223640 NR Description: unknown protein [Arabidopsis thaliana]
  misc_feature (1)..(343): Homolog of NCBI NO: 30682679 NR Description: expressed protein [Arabidopsis thaliana]
  misc_feature (1)..(343): Homolog of NCBI NO: 25084169 NR Description: Unknown protein [Arabidopsis thaliana]
  misc_feature (1)..(343): Homolog of NCBI NO: 30697466 NR Description: expressed protein [Arabidopsis thaliana]
  misc_feature (1)..(343): Homolog of NCBI NO: 15912287 NR Description: AT5g61020/maf19_20 [Arabidopsis thaliana]
  misc_feature (1)..(343): Homolog of NCBI NO: 30697464 NR Description: expressed protein [Arabidopsis thaliana]

SEQ ID NO: 49794 - DNA, 2089 bp, Arabidopsis thaliana; identical to SEQ ID NO: 48678
  misc_feature (1)..(2089): Ceres Seq. ID no. 13591931
  misc_feature: MA Experiment ID: 20000171 Result: Down-regulated in Transcription
  misc_feature: MA Experiment 20000171 PARAMETER Experiment Name: At_42deg_Heat_P Parameter: Age (day) Value: 14
  misc_feature: MA Experiment 20000171 PARAMETER Experiment Name: At_42deg_Heat_P Parameter: Organism Value: A. thaliana
  misc_feature: MA Experiment 20000171 PARAMETER Experiment Name: At_42deg_Heat_P Parameter: Plant Line Value: WS
  misc_feature: MA Experiment 20000171 PARAMETER Experiment Name: At_42deg_Heat_P Parameter: Temperature (deg C) Value: 42 vs. 22
  misc_feature: MA Experiment 20000171 PARAMETER Experiment Name: At_42deg_Heat_P Parameter: Timepoint (hr) Value: 1
  misc_feature: MA Experiment 20000171 PARAMETER Experiment Name: At_42deg_Heat_P Parameter: Tissue Value: Aerial
  misc_feature: MA Experiment ID: 20000173 Result: Down-regulated in Transcription
  misc_feature: MA Experiment 20000173 PARAMETER Experiment Name: At_42deg_Heat_P Parameter: Age (day) Value: 14
  misc_feature: MA Experiment 20000173 PARAMETER Experiment Name: At_42deg_Heat_P Parameter: Organism Value: A. thaliana
  misc_feature: MA Experiment 20000173 PARAMETER Experiment Name: At_42deg_Heat_P Parameter: Plant Line Value: WS
  misc_feature: MA Experiment 20000173 PARAMETER Experiment Name: At_42deg_Heat_P Parameter: Temperature (deg C) Value: 42 vs. 22
  misc_feature: MA Experiment 20000173 PARAMETER Experiment Name: At_42deg_Heat_P Parameter: Timepoint (hr) Value: 6
  misc_feature: MA Experiment 20000173 PARAMETER Experiment Name: At_42deg_Heat_P Parameter: Tissue Value: Aerial
  misc_feature: MA Experiment ID: 20000182 Result: Up-regulated in Transcription
  misc_feature: MA Experiment 20000182 PARAMETER Experiment Name: At_2mM_SA_P Parameter: Age (day) Value: 14
  misc_feature: MA Experiment 20000182 PARAMETER Experiment Name: At_2mM_SA_P Parameter: Organism Value: A. thaliana
  misc_feature: MA Experiment 20000182 PARAMETER Experiment Name: At_2mM_SA_P Parameter: Plant Line Value: WS
  misc_feature: MA Experiment 20000182 PARAMETER Experiment Name: At_2mM_SA_P Parameter: Timepoint (hr) Value: 6
  misc_feature: MA Experiment 20000182 PARAMETER Experiment Name: At_2mM_SA_P Parameter: Tissue Value: Aerial
  misc_feature: MA Experiment 20000182 PARAMETER Experiment Name: At_2mM_SA_P Parameter: Treatment Value: 2mM SA vs. No Treatment
  misc_feature: MA Experiment ID: 20000184 Result: Down-regulated in Transcription
  misc_feature: MA Experiment 20000184 PARAMETER Experiment Name: At_Shoots__P Parameter: Age (day) Value: 7
  misc_feature: MA Experiment 20000184 PARAMETER Experiment Name: At_Shoots__P Parameter: Tissue Value: Shoots vs. Whole Plant
  misc_feature: MA Experiment ID: 20000185 Result: Up-regulated in Transcription
  misc_feature: MA Experiment 20000185 PARAMETER Experiment Name: At_Roots__P Parameter: Age (day) Value: 7 vs. 21
  misc_feature: MA Experiment 20000185 PARAMETER Experiment Name: At_Roots__P Parameter: Organism Value: A. thaliana
  misc_feature: MA Experiment 20000185 PARAMETER Experiment Name: At_Roots__P Parameter: Tissue Value: Roots vs. Whole Plant
  misc_feature: MA Experiment ID: 20000439 Result: Up-regulated in Transcription
  misc_feature: MA Experiment 20000439 PARAMETER Experiment Name: At_Roots__P Parameter: Age (day) Value: 14 vs. 21
  misc_feature: MA Experiment 20000439 PARAMETER Experiment Name: At_Roots__P Parameter: Organism Value: A. thaliana
  misc_feature: MA Experiment 20000439 PARAMETER Experiment Name: At_Roots__P Parameter: Tissue Value: Roots vs. Whole Plant

SEQ ID NO: 49795 - protein, 482 aa, Arabidopsis thaliana; identical to SEQ ID NO: 48679
  peptide (1)..(482): Ceres Seq. ID no. 13591932
  misc_feature (31)..(286): Pfam Name: Protein kinase domain Pfam Description: Protein kinase domain
  misc_feature (31)..(286): Pfam Name: Protein kinase domain Pfam Description: Protein kinase domain
  misc_feature (18)..(459): Homolog of NCBI NO: 34902248 NR Description: Putative serine/threonine kinase
  misc_feature (20)..(456): Homolog of NCBI NO: 7446372 NR Description: probable serine/threonine kinase (EC 2.7.1.-)
  misc_feature (20)..(458): Homolog of NCBI NO: 7446371 NR Description: probable serine/threonine kinase (EC 2.7.1.-)
  misc_feature (20)..(461): Homolog of NCBI NO: 25387057 NR Description: protein T25K16.13 [imported] - Arabidopsis
  misc_feature (20)..(461): Homolog of NCBI NO: 30677901 NR Description: CBL-interacting protein kinase 9 [Arabidopsis
  misc_feature (18)..(459): Homolog of NCBI NO: 34902248 NR Description: Putative serine/threonine kinase
  misc_feature (20)..(458): Homolog of NCBI NO: 7446371 NR Description: probable serine/threonine kinase (EC 2.7.1.-)
  misc_feature (20)..(461): Homolog of NCBI NO: 30677901 NR Description: CBL-interacting protein kinase 9 [Arabidopsis
  misc_feature (1)..(482): Homolog of NCBI NO: 18397430 NR Description: CBL-interacting protein kinase 23 [Arabidopsis
  misc_feature (1)..(482): Homolog of NCBI NO: 25387051 NR Description: probable serine/threonine kinase
  misc_feature (20)..(461): Homolog of NCBI NO: 15223317 NR Description: CBL-interacting protein kinase 9 [Arabidopsis
  misc_feature (20)..(461): Homolog of NCBI NO: 14423524 NR Description: similar to wpk4 protein kinase [Arabidopsis
  misc_feature (20)..(461): Homolog of NCBI NO: 30677898 NR Description: CBL-interacting protein kinase 9 [Arabidopsis
  misc_feature (20)..(461): Homolog of NCBI NO: 25387057 NR Description: protein T25K16.13 [imported] - Arabidopsis
  misc_feature (20)..(456): Homolog of NCBI NO: 7446372 NR Description: probable serine/threonine kinase (EC 2.7.1.-)
  misc_feature (20)..(461): Homolog of NCBI NO: 30677898 NR Description: CBL-interacting protein kinase 9 [Arabidopsis
  misc_feature (20)..(461): Homolog of NCBI NO: 14423524 NR Description: similar to wpk4 protein kinase [Arabidopsis
  misc_feature (20)..(461): Homolog of NCBI NO: 15223317 NR Description: CBL-interacting protein kinase 9 [Arabidopsis
  misc_feature (1)..(482): Homolog of NCBI NO: 25387051 NR Description: probable serine/threonine kinase
  misc_feature (1)..(482): Homolog of NCBI NO: 18397430 NR Description: CBL-interacting protein kinase 23 [Arabidopsis

SEQ ID NO: 49796 - protein, 411 aa, Arabidopsis thaliana; identical to SEQ ID NO: 48680
  peptide (1)..(411): Ceres Seq. ID no. 13591933
  misc_feature (1)..(215): Pfam Name: Protein kinase domain Pfam Description: Protein kinase domain
  misc_feature (1)..(215): Pfam Name: Protein kinase domain Pfam Description: Protein kinase domain
  misc_feature (1)..(388): Homolog of NCBI NO: 34902248 NR Description: Putative serine/threonine kinase
  misc_feature (1)..(385): Homolog of NCBI NO: 7446372 NR Description: probable serine/threonine kinase (EC 2.7.1.-)
  misc_feature (1)..(387): Homolog of NCBI NO: 7446371 NR Description: probable serine/threonine kinase (EC 2.7.1.-)
  misc_feature (1)..(390): Homolog of NCBI NO: 25387057 NR Description: protein T25K16.13 [imported] - Arabidopsis
  misc_feature (1)..(390): Homolog of NCBI NO: 30677901 NR Description: CBL-interacting protein kinase 9 [Arabidopsis
  misc_feature (1)..(388): Homolog of NCBI NO: 34902248 NR Description: Putative serine/threonine kinase
  misc_feature (1)..(387): Homolog of NCBI NO: 7446371 NR Description: probable serine/threonine kinase (EC 2.7.1.-)
  misc_feature (1)..(390): Homolog of NCBI NO: 30677901 NR Description: CBL-interacting protein kinase 9 [Arabidopsis
  misc_feature (1)..(411): Homolog of NCBI NO: 18397430 NR Description: CBL-interacting protein kinase 23 [Arabidopsis
  misc_feature (1)..(411): Homolog of NCBI NO: 25387051 NR Description: probable serine/threonine kinase
  misc_feature (1)..(390): Homolog of NCBI NO: 15223317 NR Description: CBL-interacting protein kinase 9 [Arabidopsis
  misc_feature (1)..(390): Homolog of NCBI NO: 14423524 NR Description: similar to wpk4 protein kinase [Arabidopsis
  misc_feature (1)..(390): Homolog of NCBI NO: 30677898 NR Description: CBL-interacting protein kinase 9 [Arabidopsis
  misc_feature (1)..(390): Homolog of NCBI NO: 25387057 NR Description: protein T25K16.13 [imported] - Arabidopsis
  misc_feature (1)..(385): Homolog of NCBI NO: 7446372 NR Description: probable serine/threonine kinase (EC 2.7.1.-)
  misc_feature (1)..(390): Homolog of NCBI NO: 30677898 NR Description: CBL-interacting protein kinase 9 [Arabidopsis
  misc_feature (1)..(390): Homolog of NCBI NO: 14423524 NR Description: similar to wpk4 protein kinase [Arabidopsis
  misc_feature (1)..(390): Homolog of NCBI NO: 15223317 NR Description: CBL-interacting protein kinase 9 [Arabidopsis
  misc_feature (1)..(411): Homolog of NCBI NO: 25387051 NR Description: probable serine/threonine kinase
  misc_feature (1)..(411): Homolog of NCBI NO: 18397430 NR Description: CBL-interacting protein kinase 23 [Arabidopsis

SEQ ID NO: 49797 - protein, 400 aa, Arabidopsis thaliana; identical to SEQ ID NO: 48681
  peptide (1)..(400): Ceres Seq. ID no. 13591934
  misc_feature (1)..(204): Pfam Name: Protein kinase domain Pfam Description: Protein kinase domain
  misc_feature (1)..(204): Pfam Name: Protein kinase domain Pfam Description: Protein kinase domain
  misc_feature (1)..(377): Homolog of NCBI NO: 34902248 NR Description: Putative serine/threonine kinase
  misc_feature (1)..(374): Homolog of NCBI NO: 7446372 NR Description: probable serine/threonine kinase (EC 2.7.1.-)
  misc_feature (1)..(376): Homolog of NCBI NO: 7446371 NR Description: probable serine/threonine kinase (EC 2.7.1.-)
  misc_feature (1)..(379): Homolog of NCBI NO: 25387057 NR Description: protein T25K16.13 [imported] - Arabidopsis
  misc_feature (1)..(379): Homolog of NCBI NO: 30677901 NR Description: CBL-interacting protein kinase 9 [Arabidopsis
  misc_feature (1)..(377): Homolog of NCBI NO: 34902248 NR Description: Putative serine/threonine kinase
  misc_feature (1)..(376): Homolog of NCBI NO: 7446371 NR Description: probable serine/threonine kinase (EC 2.7.1.-)
  misc_feature (1)..(379): Homolog of NCBI NO: 30677901 NR Description: CBL-interacting protein kinase 9 [Arabidopsis
  misc_feature (1)..(400): Homolog of NCBI NO: 18397430 NR Description: CBL-interacting protein kinase 23 [Arabidopsis
  misc_feature (1)..(400): Homolog of NCBI NO: 25387051 NR Description: probable serine/threonine kinase
  misc_feature (1)..(379): Homolog of NCBI NO: 15223317 NR Description: CBL-interacting protein kinase 9 [Arabidopsis
  misc_feature (1)..(379): Homolog of NCBI NO: 14423524 NR Description: similar to wpk4 protein kinase [Arabidopsis
  misc_feature (1)..(379): Homolog of NCBI NO: 30677898 NR Description: CBL-interacting protein kinase 9 [Arabidopsis
  misc_feature (1)..(379): Homolog of NCBI NO: 25387057 NR Description: protein T25K16.13 [imported] - Arabidopsis
  misc_feature (1)..(374): Homolog of NCBI NO: 7446372 NR Description: probable serine/threonine kinase (EC 2.7.1.-)
  misc_feature (1)..(379): Homolog of NCBI NO: 30677898 NR Description: CBL-interacting protein kinase 9 [Arabidopsis
  misc_feature (1)..(379): Homolog of NCBI NO: 14423524 NR Description: similar to wpk4 protein kinase [Arabidopsis
  misc_feature (1)..(379): Homolog of NCBI NO: 15223317 NR Description: CBL-interacting protein kinase 9 [Arabidopsis
  misc_feature (1)..(400): Homolog of NCBI NO: 25387051 NR Description: probable serine/threonine kinase
  misc_feature (1)..(400): Homolog of NCBI NO: 18397430 NR Description: CBL-interacting protein kinase 23 [Arabidopsis

SEQ ID NO: 49798 - DNA, 1979 bp, Arabidopsis thaliana
  misc_feature (1)..(1979): Ceres Seq. ID no. 12673269
  misc_feature: MA Experiment ID: 20000173 Result: Down-regulated in Transcription
  misc_feature: MA Experiment 20000173 PARAMETER Experiment Name: At_42deg_Heat_P Parameter: Age (day) Value: 14
  misc_feature: MA Experiment 20000173 PARAMETER Experiment Name: At_42deg_Heat_P Parameter: Organism Value: A. thaliana
  misc_feature: MA Experiment 20000173 PARAMETER Experiment Name: At_42deg_Heat_P Parameter: Plant Line Value: WS
  misc_feature: MA Experiment 20000173 PARAMETER Experiment Name: At_42deg_Heat_P Parameter: Temperature (deg C) Value: 42 vs. 22
  misc_feature: MA Experiment 20000173 PARAMETER Experiment Name: At_42deg_Heat_P Parameter: Timepoint (hr) Value: 6
  misc_feature: MA Experiment 20000173 PARAMETER Experiment Name: At_42deg_Heat_P Parameter: Tissue Value: Aerial
  misc_feature: MA Experiment ID: 20000184 Result: Down-regulated in Transcription
  misc_feature: MA Experiment 20000184 PARAMETER Experiment Name: At_Shoots__P Parameter: Age (day) Value: 7
  misc_feature: MA Experiment 20000184 PARAMETER Experiment Name: At_Shoots__P Parameter: Tissue Value: Shoots vs. Whole Plant
  misc_feature: MA Experiment ID: 20001905 Result: Down-regulated in Transcription
  misc_feature: MA Experiment 20001905 PARAMETER Experiment Name: At_Drought_Reproduction_P Parameter: Age (day) Value: 40
  misc_feature: MA Experiment 20001905 PARAMETER Experiment Name: At_Drought_Reproduction_P Parameter: Organism Value: A. thaliana
  misc_feature: MA Experiment 20001905 PARAMETER Experiment Name: At_Drought_Reproduction_P Parameter: Plant Line Value: WS
  misc_feature: MA Experiment 20001905 PARAMETER Experiment Name: At_Drought_Reproduction_P Parameter: Timepoint (day) Value: 10
  misc_feature: MA Experiment 20001905 PARAMETER Experiment Name: At_Drought_Reproduction_P Parameter: Tissue Value: Rosettes
  misc_feature: MA Experiment 20001905 PARAMETER Experiment Name: At_Drought_Reproduction_P Parameter: Treatment Value: Drought vs. No Drought
aattccaattccagtcaaacaaaaccttcacaactcaattattcttccgattttggtttctctcttccaatcatccttcaagctcatctttttcttctacccaataacgaaagtctcctcctttactaatgggttgcttcagcagtaaacaccggaaaactcaaaacgacggcggagaaaaatcaatcccgatcaatccagttcaaacccatgtagtccccgagcatcgtaaacctcaaaccccaacaccaaaacccatgactcaaccaatccatcagcagatttcaacaccgtcttcaaatccagtctcagttcgagatccagatacgattttaggtaaaccattcgaagacatcaggaaattttacagcttggggaaagaattaggtcgaggtcaatttgggattacgtatatgtgtaaagagattggtactggtaacacttatgcttgcaaatcgattcttaagaggaagctaattagtaagcaagataaagaagatgtgaagagagagattcagataatgcagtatttgtctggacaacctaacattgttgagatcaaaggtgcttatgaagatagacaatctatacatttggttatggagttgtgtgctggtggtgagttgtttgataggattatagctcaaggtcattactctgagagagctgctgctggtatcattaggtctattgtcaatgttgttcagatttgtcattttatgggtgtggttcatcgagatctcaagcctgagaatttcttgctttcgagtaaagaggagaatgctatgcttaaagctactgatttcggtttgtccgtcttcatcgaagaaggaaaagtttaccgggatatagttgggagtgcttactacgttgctccagaagtattaaggcgaagttacggaaaagaaatcgacatttggagtgcaggtgtcattttatacatcctactcagcggtgtacctcctttttgggccgaaaatgagaaaggaatattcgatgaggtcataaaaggcgaaattgattttgtaagtgagccatggccttctatatctgaaagcgcgaaagatcttgttaggaagatgctaaccaaagacccgaagagacgaatcacggctgcacaggttcttgaacatccttggatcaaagggggagaagcaccagacaagcctattgatagcgctgtgttatcccgcatgaagcaattccgagcaatgaacaagcttaagaagctagctctaaaggttatcgcggagagtctatcagaagaggagattaaaggtcttaaaaccatgtttgcgaatatagataccgacaaaagcgggacaatcacttatgaagaactcaaaactgggctaactagacttgggtctagactctcggaaactgaagttaagcaactcatggaagccgctgacgtcgatggtaatggaacaatcgactactacgagtttatctctgcgacaatgcatagatacaaattagatcgagatgagcatgtatacaaagcattccaacactttgataaagacaacagcgggcacataactagagatgagttggaaagtgccatgaaggaatatggaatgggagatgaagctagcatcaaagaagttatatccgaagttgataccgacaatgatggaagaataaactttgaagaattttgcgcgatgatgagaagtggcagcacgcagccacaggggaaactgcttccattccattgatcaagtcggcataaatcccaacggtttatcaaccgaaagcgattcttgaacccagagtagaagagctaaaccgggggtaaaccgaggtgagcatagttgatatactgtctcaaaatgttgttctatcttctctgtgtttgaacagatttatttatccttctccttagttagtctgaaactgattttgagagactgtcatgtcttagctccttgtaacagtaacatatccacttatatttttttgaaactttcttg

SEQ ID NO: 49799 - protein, 531 aa, Arabidopsis thaliana
  peptide (1)..(531): Ceres Seq. ID no. 12673270
  misc_feature (80)..(338): Pfam Name: Protein kinase domain Pfam Description: Protein kinase domain
  misc_feature (24)..(527): Homolog of NCBI NO: 23616997 NR Description: CDP2_ORYSA Calcium-dependent protein kinase
  misc_feature (1)..(527): Homolog of NCBI NO: 13561063 NR Description: protein kinase [Medicago sativa]
  misc_feature (2)..(517): Homolog of NCBI NO: 2827773 NR Description: Calcium-dependent protein kinase (CDPK)
  misc_feature (24)..(527): Homolog of NCBI NO: 19171502 NR Description: calcium-dependent protein kinase [Lycopersicon
  misc_feature (1)..(526): Homolog of NCBI NO: 4115945 NR Description: contains similarity to eukaryotic protein kinase
  misc_feature (2)..(527): Homolog of NCBI NO: 7428009 NR Description: calcium-dependent protein kinase (EC 2.7.1.-) 1 -
  misc_feature (21)..(529): Homolog of NCBI NO: 15234656 NR Description: calcium-dependent protein kinase - like protein
  misc_feature (1)..(531): Homolog of NCBI NO: 15234441 NR Description: putative calcium dependent protein kinase
  misc_feature (1)..(531): Homolog of NCBI NO: 15292915 NR Description: putative calcium dependent protein kinase
  misc_feature (1)..(531): Homolog of NCBI NO: 15234435 NR Description: putative calcium dependent protein kinase
MGCFSSKHRKTQNDGGEKSIPINPVQTHVVPEHRKPQTPTPKPMTQPIHQQISTPSSNPVSVRDPDTILGKPFEDIRKFYSLGKELGRGQFGITYMCKEIGTGNTYACKSILKRKLISKQDKEDVKREIQIMQYLSGQPNIVEIKGAYEDRQSIHLVMELCAGGELFDRIIAQGHYSERAAAGIIRSIVNVVQICHFMGVVHRDLKPENFLLSSKEENAMLKATDFGLSVFIEEGKVYRDIVGSAYYVAPEVLRRSYGKEIDIWSAGVILYILLSGVPPFWAENEKGIFDEVIKGEIDFVSEPWPSISESAKDLVRKMLTKDPKRRITAAQVLEHPWIKGGEAPDKPIDSAVLSRMKQFRAMNKLKKLALKVIAESLSEEEIKGLKTMFANIDTDKSGTITYEELKTGLTRLGSRLSETEVKQLMEAADVDGNGTIDYYEFISATMHRYKLDRDEHVYKAFQHFDKDNSGHITRDELESAMKEYGMGDEASIKEVISEVDTDNDGRINFEEFCAMMRSGSTQPQGKLLPFH

SEQ ID NO: 49800 - protein, 488 aa, Arabidopsis thaliana
  peptide (1)..(488): Ceres Seq. ID no. 12673271
  misc_feature (37)..(295): Pfam Name: Protein kinase domain Pfam Description: Protein kinase domain
  misc_feature (1)..(484): Homolog of NCBI NO: 23616997 NR Description: CDP2_ORYSA Calcium-dependent protein kinase
  misc_feature (1)..(484): Homolog of NCBI NO: 13561063 NR Description: protein kinase [Medicago sativa]
  misc_feature (1)..(474): Homolog of NCBI NO: 2827773 NR Description: Calcium-dependent protein kinase (CDPK)
  misc_feature (1)..(484): Homolog of NCBI NO: 19171502 NR Description: calcium-dependent protein kinase [Lycopersicon
  misc_feature (1)..(483): Homolog of NCBI NO: 4115945 NR Description: contains similarity to eukaryotic protein kinase
  misc_feature (1)..(484): Homolog of NCBI NO: 7428009 NR Description: calcium-dependent protein kinase (EC 2.7.1.-) 1 -
  misc_feature (1)..(486): Homolog of NCBI NO: 15234656 NR Description: calcium-dependent protein kinase - like protein
  misc_feature (1)..(488): Homolog of NCBI NO: 15234441 NR Description: putative calcium dependent protein kinase
  misc_feature (1)..(488): Homolog of NCBI NO: 15292915 NR Description: putative calcium dependent protein kinase
  misc_feature (1)..(488): Homolog of NCBI NO: 15234435 NR Description: putative calcium dependent protein kinase
MTQPIHQQISTPSSNPVSVRDPDTILGKPFEDIRKFYSLGKELGRGQFGITYMCKEIGTGNTYACKSILKRKLISKQDKEDVKREIQIMQYLSGQPNIVEIKGAYEDRQSIHLVMELCAGGELFDRIIAQGHYSERAAAGIIRSIVNVVQICHFMGVVHRDLKPENFLLSSKEENAMLKATDFGLSVFIEEGKVYRDIVGSAYYVAPEVLRRSYGKEIDIWSAGVILYILLSGVPPFWAENEKGIFDEVIKGEIDFVSEPWPSISESAKDLVRKMLTKDPKRRITAAQVLEHPWIKGGEAPDKPIDSAVLSRMKQFRAMNKLKKLALKVIAESLSEEEIKGLKTMFANIDTDKSGTITYEELKTGLTRLGSRLSETEVKQLMEAADVDGNGTIDYYEFISATMHRYKLDRDEHVYKAFQHFDKDNSGHITRDELESAMKEYGMGDEASIKEVISEVDTDNDGRINFEEFCAMMRSGSTQPQGKLLPFH

SEQ ID NO: 49801 - protein, 436 aa, Arabidopsis thaliana
  peptide (1)..(436): Ceres Seq. ID no. 12673272
  misc_feature (1)..(243): Pfam Name: Protein kinase domain Pfam Description: Protein kinase domain
  misc_feature (1)..(432): Homolog of NCBI NO: 23616997 NR Description: CDP2_ORYSA Calcium-dependent protein kinase
  misc_feature (1)..(432): Homolog of NCBI NO: 13561063 NR Description: protein kinase [Medicago sativa]
  misc_feature (1)..(422): Homolog of NCBI NO: 2827773 NR Description: Calcium-dependent protein kinase (CDPK)
  misc_feature (1)..(432): Homolog of NCBI NO: 19171502 NR Description: calcium-dependent protein kinase [Lycopersicon
  misc_feature (1)..(431): Homolog of NCBI NO: 4115945 NR Description: contains similarity to eukaryotic protein kinase
  misc_feature (1)..(432): Homolog of NCBI NO: 7428009 NR Description: calcium-dependent protein kinase (EC 2.7.1.-) 1 -
  misc_feature (1)..(434): Homolog of NCBI NO: 15234656 NR Description: calcium-dependent protein kinase - like protein
  misc_feature (1)..(436): Homolog of NCBI NO: 15234441 NR Description: putative calcium dependent protein kinase
  misc_feature (1)..(436): Homolog of NCBI NO: 15292915 NR Description: putative calcium dependent protein kinase
  misc_feature (1)..(436): Homolog of NCBI NO: 15234435 NR Description: putative calcium dependent protein kinase
MCKEIGTGNTYACKSILKRKLISKQDKEDVKREIQIMQYLSGQPNIVEIKGAYEDRQSIHLVMELCAGGELFDRIIAQGHYSERAAAGIIRSIVNVVQICHFMGVVHRDLKPENFLLSSKEENAMLKATDFGLSVFIEEGKVYRDIVGSAYYVAPEVLRRSYGKEIDIWSAGVILYILLSGVPPFWAENEKGIFDEVIKGEIDFVSEPWPSISESAKDLVRKMLTKDPKRRITAAQVLEHPWIKGGEAPDKPIDSAVLSRMKQFRAMNKLKKLALKVIAESLSEEEIKGLKTMFANIDTDKSGTITYEELKTGLTRLGSRLSETEVKQLMEAADVDGNGTIDYYEFISATMHRYKLDRDEHVYKAFQHFDKDNSGHITRDELESAMKEYGMGDEASIKEVISEVDTDNDGRINFEEFCAMMRSGSTQPQGKLLPFH

SEQ ID NO: 49802 - DNA, 1741 bp, Arabidopsis thaliana; identical to SEQ ID NO: 45145
  misc_feature (1)..(1741): Ceres Seq. ID no. 13575914
  misc_feature: MA Experiment ID: 20000182 Result: Down-regulated in Transcription
  misc_feature: MA Experiment 20000182 PARAMETER Experiment Name: At_2mM_SA_P Parameter: Age (day) Value: 14
  misc_feature: MA Experiment 20000182 PARAMETER Experiment Name: At_2mM_SA_P Parameter: Organism Value: A. thaliana
  misc_feature: MA Experiment 20000182 PARAMETER Experiment Name: At_2mM_SA_P Parameter: Plant Line Value: WS
  misc_feature: MA Experiment 20000182 PARAMETER Experiment Name: At_2mM_SA_P Parameter: Timepoint (hr) Value: 6
  misc_feature: MA Experiment 20000182 PARAMETER Experiment Name: At_2mM_SA_P Parameter: Tissue Value: Aerial
  misc_feature: MA Experiment 20000182 PARAMETER Experiment Name: At_2mM_SA_P Parameter: Treatment Value: 2mM SA vs. No Treatment
  misc_feature: MA Experiment ID: 20000265 Result: Up-regulated in Transcription
  misc_feature: MA Experiment 20000265 PARAMETER Experiment Name: At_Open_Flower_P Parameter: Age (day) Value: 21
  misc_feature: MA Experiment 20000265 PARAMETER Experiment Name: At_Open_Flower_P Parameter: Plant Line Value: WS
  misc_feature: MA Experiment 20000265 PARAMETER Experiment Name: At_Open_Flower_P Parameter: Tissue Value: Closed Flower vs. Whole Plant
  misc_feature: MA Experiment ID: 20001248 Result: Down-regulated in Transcription
  misc_feature: MA Experiment 20001248 PARAMETER Experiment Name: At_Far-red-induction_P Parameter: Age (day) Value: 7
  misc_feature: MA Experiment 20001248 PARAMETER Experiment Name: At_Far-red-induction_P Parameter: Light Value: Far-red vs. White
  misc_feature: MA Experiment 20001248 PARAMETER Experiment Name: At_Far-red-induction_P Parameter: Organism Value: A. thaliana
  misc_feature: MA Experiment 20001248 PARAMETER Experiment Name: At_Far-red-induction_P Parameter: Plant Line Value: Columbia
  misc_feature: MA Experiment 20001248 PARAMETER Experiment Name: At_Far-red-induction_P Parameter: Timepoint (hr) Value: 4
  misc_feature: MA Experiment 20001248 PARAMETER Experiment Name: At_Far-red-induction_P Parameter: Tissue Value: Whole Plant
  misc_feature: MA Experiment ID: 20001760 Result: Up-regulated in Transcription
  misc_feature: MA Experiment 20001760 PARAMETER Experiment Name: At_50mM_NH4NO3_L-to-H_P Parameter: Timepoint (hr) Value: 2
  misc_feature: MA Experiment 20001760 PARAMETER Experiment Name: At_50mM_NH4NO3_L-to-H_P Parameter: Tissue Value: Siliques
  misc_feature: MA Experiment 20001760 PARAMETER Experiment Name: At_50mM_NH4NO3_L-to-H_P Parameter: Treatment Value: 50mM NH4NO3 vs 100mM Mannitol

SEQ ID NO: 49803 - protein, 530 aa, Arabidopsis thaliana; identical to SEQ ID NO: 45146
  peptide (1)..(530): Ceres Seq. ID no. 13575915
  misc_feature (72)..(527): Pfam Name: Glycosyl hydrolase family 9 Pfam Description: Glycosyl hydrolase family 9
  misc_feature (72)..(527): Pfam Name: Glycosyl hydrolase family 9 Pfam Description: Glycosyl hydrolase family 9
  misc_feature (70)..(528): Homolog of NCBI NO: 4691450 NR Description: endo-1,4-beta glucanase [Populus alba]
  misc_feature (70)..(530): Homolog of NCBI NO: 11357128 NR Description: cellulase (EC 3.2.1.4) 2 precursor - Monterey
  misc_feature (42)..(530): Homolog of NCBI NO: 7484476 NR Description: cellulase (EC 3.2.1.4) 1 precursor - Monterey
  misc_feature (38)..(530): Homolog of NCBI NO: 34894544 NR Description: putative endo-1,3(4)-beta-glucanase
  misc_feature (30)..(530): Homolog of NCBI NO: 6009979 NR Description: endo-1,4-beta-glucanase [Pisum sativum]
  misc_feature (70)..(528): Homolog of NCBI NO: 4691450 NR Description: endo-1,4-beta glucanase [Populus alba]
  misc_feature (42)..(530): Homolog of NCBI NO: 7484476 NR Description: cellulase (EC 3.2.1.4) 1 precursor - Monterey
  misc_feature (30)..(530): Homolog of NCBI NO: 6009979 NR Description: endo-1,4-beta-glucanase [Pisum sativum]
  misc_feature (30)..(530): Homolog of NCBI NO: 15218612 NR Description: glycosyl hydrolase family 9
  misc_feature (30)..(530): Homolog of NCBI NO: 25350173 NR Description: cellulase (EC 3.2.1.4) [imported] - Arabidopsis
  misc_feature (30)..(530): Homolog of NCBI NO: 15235301 NR Description: glycosyl hydrolase family 9 [Arabidopsis
  misc_feature (30)..(530): Homolog of NCBI NO: 11358947 NR Description: endo-1,3(4)-beta-glucanase (EC 3.2.1.6) - garden
  misc_feature (45)..(530): Homolog of NCBI NO: 1362091 NR Description: cellulase (EC 3.2.1.4) precursor - tomato
  misc_feature (38)..(530): Homolog of NCBI NO: 34894544 NR Description: putative endo-1,3(4)-beta-glucanase
  misc_feature (70)..(530): Homolog of NCBI NO: 11357128 NR Description: cellulase (EC 3.2.1.4) 2 precursor - Monterey
  misc_feature (45)..(530): Homolog of NCBI NO: 1362091 NR Description: cellulase (EC 3.2.1.4) precursor - tomato
  misc_feature (30)..(530): Homolog of NCBI NO: 11358947 NR Description: endo-1,3(4)-beta-glucanase (EC 3.2.1.6) - garden
  misc_feature (30)..(530): Homolog of NCBI NO: 15235301 NR Description: glycosyl hydrolase family 9 [Arabidopsis
  misc_feature (30)..(530): Homolog of NCBI NO: 25350173 NR Description: cellulase (EC 3.2.1.4) [imported] - Arabidopsis
  misc_feature (30)..(530): Homolog of NCBI NO: 15218612 NR Description: glycosyl hydrolase family 9

SEQ ID NO: 49804 - protein, 501 aa, Arabidopsis thaliana; identical to SEQ ID NO: 45147
  peptide (1)..(501): Ceres Seq. ID no. 13575916
  misc_feature (43)..(498): Pfam Name: Glycosyl hydrolase family 9 Pfam Description: Glycosyl hydrolase family 9
  misc_feature (43)..(498): Pfam Name: Glycosyl hydrolase family 9 Pfam Description: Glycosyl hydrolase family 9
  misc_feature (41)..(499): Homolog of NCBI NO: 4691450 NR Description: endo-1,4-beta glucanase [Populus alba]
  misc_feature (41)..(501): Homolog of NCBI NO: 11357128 NR Description: cellulase (EC 3.2.1.4) 2 precursor - Monterey
  misc_feature (13)..(501): Homolog of NCBI NO: 7484476 NR Description: cellulase (EC 3.2.1.4) 1 precursor - Monterey
  misc_feature (9)..(501): Homolog of NCBI NO: 34894544 NR Description: putative endo-1,3(4)-beta-glucanase
  misc_feature (1)..(501): Homolog of NCBI NO: 6009979 NR Description: endo-1,4-beta-glucanase [Pisum sativum]
  misc_feature (41)..(499): Homolog of NCBI NO: 4691450 NR Description: endo-1,4-beta glucanase [Populus alba]
  misc_feature (13)..(501): Homolog of NCBI NO: 7484476 NR Description: cellulase (EC 3.2.1.4) 1 precursor - Monterey
  misc_feature (1)..(501): Homolog of NCBI NO: 6009979 NR Description: endo-1,4-beta-glucanase [Pisum sativum]
  misc_feature (1)..(501): Homolog of NCBI NO: 15218612 NR Description: glycosyl hydrolase family 9
  misc_feature (1)..(501): Homolog of NCBI NO: 25350173 NR Description: cellulase (EC 3.2.1.4) [imported] - Arabidopsis
  misc_feature (1)..(501): Homolog of NCBI NO: 15235301 NR Description: glycosyl hydrolase family 9 [Arabidopsis
  misc_feature (1)..(501): Homolog of NCBI NO: 11358947 NR Description: endo-1,3(4)-beta-glucanase (EC 3.2.1.6) - garden
  misc_feature (16)..(501): Homolog of NCBI NO: 1362091 NR Description: cellulase (EC 3.2.1.4) precursor - tomato
  misc_feature (9)..(501): Homolog of NCBI NO: 34894544 NR Description: putative endo-1,3(4)-beta-glucanase
  misc_feature (41)..(501): Homolog of NCBI NO: 11357128 NR Description: cellulase (EC 3.2.1.4) 2 precursor - Monterey
  misc_feature (16)..(501): Homolog of NCBI NO: 1362091 NR Description: cellulase (EC 3.2.1.4) precursor - tomato
  misc_feature (1)..(501): Homolog of NCBI NO: 11358947 NR Description: endo-1,3(4)-beta-glucanase (EC 3.2.1.6) - garden
  misc_feature (1)..(501): Homolog of NCBI NO: 15235301 NR Description: glycosyl hydrolase family 9 [Arabidopsis
  misc_feature (1)..(501): Homolog of NCBI NO: 25350173 NR Description: cellulase (EC 3.2.1.4) [imported] - Arabidopsis
  misc_feature (1)..(501): Homolog of NCBI NO: 15218612 NR Description: glycosyl hydrolase family 9

SEQ ID NO: 49805 - protein, 433 aa, Arabidopsis thaliana; identical to SEQ ID NO: 45148
  peptide (1)..(433): Ceres Seq. ID no. 13575917
  misc_feature (1)..(430): Pfam Name: Glycosyl hydrolase family 9 Pfam Description: Glycosyl hydrolase family 9
  misc_feature (1)..(430): Pfam Name: Glycosyl hydrolase family 9 Pfam Description: Glycosyl hydrolase family 9
  misc_feature (1)..(431): Homolog of NCBI NO: 4691450 NR Description: endo-1,4-beta glucanase [Populus alba]
  misc_feature (1)..(433): Homolog of NCBI NO: 11357128 NR Description: cellulase (EC 3.2.1.4) 2 precursor - Monterey
  misc_feature (1)..(433): Homolog of NCBI NO: 7484476 NR Description: cellulase (EC 3.2.1.4) 1 precursor - Monterey
  misc_feature (1)..(433): Homolog of NCBI NO: 34894544 NR Description: putative endo-1,3(4)-beta-glucanase
  misc_feature (1)..(433): Homolog of NCBI NO: 6009979 NR Description: endo-1,4-beta-glucanase [Pisum sativum]
  misc_feature (1)..(431): Homolog of NCBI NO: 4691450 NR Description: endo-1,4-beta glucanase [Populus alba]
  misc_feature (1)..(433): Homolog of NCBI NO: 7484476 NR Description: cellulase (EC 3.2.1.4) 1 precursor - Monterey
  misc_feature (1)..(433): Homolog of NCBI NO: 6009979 NR Description: endo-1,4-beta-glucanase [Pisum sativum]
  misc_feature (1)..(433): Homolog of NCBI NO: 15218612 NR Description: glycosyl hydrolase family 9
  misc_feature (1)..(433): Homolog of NCBI NO: 25350173 NR Description: cellulase (EC 3.2.1.4) [imported] - Arabidopsis
  misc_feature (1)..(433): Homolog of NCBI NO: 15235301 NR Description: glycosyl hydrolase family 9 [Arabidopsis
  misc_feature (1)..(433): Homolog of NCBI NO: 11358947 NR Description: endo-1,3(4)-beta-glucanase (EC 3.2.1.6) - garden
  misc_feature (1)..(433): Homolog of NCBI NO: 1362091 NR Description: cellulase (EC 3.2.1.4) precursor - tomato
  misc_feature (1)..(433): Homolog of NCBI NO: 34894544 NR Description: putative endo-1,3(4)-beta-glucanase
  misc_feature (1)..(433): Homolog of NCBI NO: 11357128 NR Description: cellulase (EC 3.2.1.4) 2 precursor - Monterey
  misc_feature (1)..(433): Homolog of NCBI NO: 1362091 NR Description: cellulase (EC 3.2.1.4) precursor - tomato
  misc_feature (1)..(433): Homolog of NCBI NO: 11358947 NR Description: endo-1,3(4)-beta-glucanase (EC 3.2.1.6) - garden
  misc_feature (1)..(433): Homolog of NCBI NO: 15235301 NR Description: glycosyl hydrolase family 9 [Arabidopsis
  misc_feature (1)..(433): Homolog of NCBI NO: 25350173 NR Description: cellulase (EC 3.2.1.4) [imported] - Arabidopsis
  misc_feature (1)..(433): Homolog of NCBI NO: 15218612 NR Description: glycosyl hydrolase family 9

SEQ ID NO: 49806 - DNA, 1776 bp, Arabidopsis thaliana; identical to SEQ ID NO: 45411
  misc_feature (1)..(1776): Ceres Seq. ID no. 12600395
  misc_feature: MA Experiment ID: 20000495 Result: Down-regulated in Transcription
  misc_feature: MA Experiment 20000495 PARAMETER Experiment Name: At_Guard_Cells_P Parameter: Harvest Date Value: 8/2/2002
  misc_feature: MA Experiment 20000495 PARAMETER Experiment Name: At_Guard_Cells_P Parameter: Organism Value: A. thaliana
  misc_feature: MA Experiment 20000495 PARAMETER Experiment Name: At_Guard_Cells_P Parameter: Tissue Value: Guard Cells vs. Leaves

SEQ ID NO: 49807 - protein, 336 aa, Arabidopsis thaliana; identical to SEQ ID NO: 45412
  peptide (1)..(336): Ceres Seq. ID no. 12600396
  misc_feature (24)..(84): Pfam Name: RNA recognition motif. (a.k.a. RRM, RBD, or RNP domain) Pfam Description: RNA recognition motif. (a.k.a. RRM, RBD, or RNP
  misc_feature (24)..(84): Pfam Name: RNA recognition motif. (a.k.a. RRM, RBD, or RNP domain) Pfam Description: RNA recognition motif. (a.k.a. RRM, RBD, or RNP
  misc_feature (13)..(250): Homolog of NCBI NO: 22330665 NR Description: RRM-containing protein; protein id: At1g76460.1
  misc_feature (18)..(249): Homolog of NCBI NO: 25518109 NR Description: T16E15.6 protein - Arabidopsis thaliana
  misc_feature (9)..(255): Homolog of NCBI NO: 18395177 NR Description: RRM-containing protein
  misc_feature (13)..(274): Homolog of NCBI NO: 23505939 NR Description: At1g20880/F9H16_14 [Arabidopsis thaliana]
  misc_feature (13)..(274): Homolog of NCBI NO: 15010636 NR Description: At1g20880/F9H16_14 [Arabidopsis thaliana]
  misc_feature (13)..(250): Homolog of NCBI NO: 22330665 NR Description: RRM-containing protein; protein id: At1g76460.1
  misc_feature (9)..(255): Homolog of NCBI NO: 18395177 NR Description: RRM-containing protein
  misc_feature (13)..(274): Homolog of NCBI NO: 15010636 NR Description: At1g20880/F9H16_14 [Arabidopsis thaliana]
  misc_feature (1)..(187): Homolog of NCBI NO: 15226439 NR Description: RRM-containing protein
  misc_feature (18)..(242): Homolog of NCBI NO: 34907334 NR Description: P0698A10.29 [Oryza sativa (japonica
  misc_feature (18)..(240): Homolog of NCBI NO: 14532532 NR Description: At1g33470/F10C21_14 [Arabidopsis thaliana]
  misc_feature (18)..(242): Homolog of NCBI NO: 34905758 NR Description: similar to RNA-binding protein
  misc_feature (13)..(274): Homolog of NCBI NO: 18394923 NR Description: RRM-containing protein
  misc_feature (13)..(274): Homolog of NCBI NO: 23505939 NR Description: At1g20880/F9H16_14 [Arabidopsis thaliana]
  misc_feature (18)..(249): Homolog of NCBI NO: 25518109 NR Description: T16E15.6 protein - Arabidopsis thaliana
  misc_feature (13)..(274): Homolog of NCBI NO: 18394923 NR Description: RRM-containing protein
  misc_feature (18)..(242): Homolog of NCBI NO: 34905758 NR Description: similar to RNA-binding protein
  misc_feature (18)..(240): Homolog of NCBI NO: 14532532 NR Description: At1g33470/F10C21_14 [Arabidopsis thaliana]
  misc_feature (18)..(242): Homolog of NCBI NO: 34907334 NR Description: P0698A10.29 [Oryza sativa (japonica
  misc_feature (1)..(187): Homolog of NCBI NO: 15226439 NR Description: RRM-containing protein

SEQ ID NO: 49808 - protein, 328 aa, Arabidopsis thaliana; identical to SEQ ID NO: 45413
  peptide (1)..(328): Ceres Seq. ID no. 12600397
  misc_feature (16)..(76): Pfam Name: RNA recognition motif. (a.k.a. RRM, RBD, or RNP domain) Pfam Description: RNA recognition motif. (a.k.a. RRM, RBD, or RNP
  misc_feature (16)..(76): Pfam Name: RNA recognition motif. (a.k.a. RRM, RBD, or RNP domain) Pfam Description: RNA recognition motif. (a.k.a. RRM, RBD, or RNP
  misc_feature (5)..(242): Homolog of NCBI NO: 22330665 NR Description: RRM-containing protein; protein id: At1g76460.1
  misc_feature (10)..(241): Homolog of NCBI NO: 25518109 NR Description: T16E15.6 protein - Arabidopsis thaliana
  misc_feature (1)..(247): Homolog of NCBI NO: 18395177 NR Description: RRM-containing protein
  misc_feature (5)..(266): Homolog of NCBI NO: 23505939 NR Description: At1g20880/F9H16_14 [Arabidopsis thaliana]
  misc_feature (5)..(266): Homolog of NCBI NO: 15010636 NR Description: At1g20880/F9H16_14 [Arabidopsis thaliana]
  misc_feature (5)..(242): Homolog of NCBI NO: 22330665 NR Description: RRM-containing protein; protein id: At1g76460.1
  misc_feature (1)..(247): Homolog of NCBI NO: 18395177 NR Description: RRM-containing protein
  misc_feature (5)..(266): Homolog of NCBI NO: 15010636 NR Description: At1g20880/F9H16_14 [Arabidopsis thaliana]
  misc_feature (1)..(179): Homolog of NCBI NO: 15226439 NR Description: RRM-containing protein
  misc_feature (10)..(234): Homolog of NCBI NO: 34907334 NR Description: P0698A10.29 [Oryza sativa (japonica
  misc_feature (10)..(232): Homolog of NCBI NO: 14532532 NR Description: At1g33470/F10C21_14 [Arabidopsis thaliana]
  misc_feature (10)..(234): Homolog of NCBI NO: 34905758 NR Description: similar to RNA-binding protein
  misc_feature (5)..(266): Homolog of NCBI NO: 18394923 NR Description: RRM-containing protein
  misc_feature (5)..(266): Homolog of NCBI NO: 23505939 NR Description: At1g20880/F9H16_14 [Arabidopsis thaliana]
  misc_feature (10)..(241): Homolog of NCBI NO: 25518109 NR Description: T16E15.6 protein - Arabidopsis thaliana
  misc_feature (5)..(266): Homolog of NCBI NO: 18394923 NR Description: RRM-containing protein
  misc_feature (10)..(234): Homolog of NCBI NO: 34905758 NR Description: similar to RNA-binding protein
  misc_feature (10)..(232): Homolog of NCBI NO: 14532532 NR Description: At1g33470/F10C21_14 [Arabidopsis thaliana]
  misc_feature (10)..(234): Homolog of NCBI NO: 34907334 NR Description: P0698A10.29 [Oryza sativa (japonica
  misc_feature (1)..(179): Homolog of NCBI NO: 15226439 NR Description: RRM-containing protein

SEQ ID NO: 49809 - protein, 299 aa, Arabidopsis thaliana; identical to SEQ ID NO: 45414
  peptide (1)..(299): Ceres Seq. ID no. 12600398
  misc_feature (1)..(47): Pfam Name: RNA recognition motif. (a.k.a. RRM, RBD, or RNP domain) Pfam Description: RNA recognition motif. (a.k.a. RRM, RBD, or RNP
  misc_feature (1)..(47): Pfam Name: RNA recognition motif. (a.k.a. RRM, RBD, or RNP domain) Pfam Description: RNA recognition motif. (a.k.a. RRM, RBD, or RNP
  misc_feature (1)..(213): Homolog of NCBI NO: 22330665 NR Description: RRM-containing protein; protein id: At1g76460.1
  misc_feature (1)..(212): Homolog of NCBI NO: 25518109 NR Description: T16E15.6 protein - Arabidopsis thaliana
  misc_feature (1)..(218): Homolog of NCBI NO: 18395177 NR Description: RRM-containing protein
  misc_feature (1)..(237): Homolog of NCBI NO: 23505939 NR Description: At1g20880/F9H16_14 [Arabidopsis thaliana]
  misc_feature (1)..(237): Homolog of NCBI NO: 15010636 NR Description: At1g20880/F9H16_14 [Arabidopsis thaliana]
  misc_feature (1)..(213): Homolog of NCBI NO: 22330665 NR Description: RRM-containing protein; protein id: At1g76460.1
  misc_feature (1)..(218): Homolog of NCBI NO: 18395177 NR Description: RRM-containing protein
  misc_feature (1)..(237): Homolog of NCBI NO: 15010636 NR Description: At1g20880/F9H16_14 [Arabidopsis thaliana]
  misc_feature (1)..(150): Homolog of NCBI NO: 15226439 NR Description: RRM-containing protein
  misc_feature (1)..(205): Homolog of NCBI NO: 34907334 NR Description: P0698A10.29 [Oryza sativa (japonica
  misc_feature (1)..(203): Homolog of NCBI NO: 14532532 NR Description: At1g33470/F10C21_14 [Arabidopsis thaliana]
  misc_feature (1)..(205): Homolog of NCBI NO: 34905758 NR Description: similar to RNA-binding protein
  misc_feature (1)..(237): Homolog of NCBI NO: 18394923 NR Description: RRM-containing protein
  misc_feature (1)..(237): Homolog of NCBI NO: 23505939 NR Description: At1g20880/F9H16_14 [Arabidopsis thaliana]
  misc_feature (1)..(212): Homolog of NCBI NO: 25518109 NR Description: T16E15.6 protein - Arabidopsis thaliana
  misc_feature (1)..(237): Homolog of NCBI NO: 18394923 NR Description: RRM-containing protein
  misc_feature (1)..(205): Homolog of NCBI NO: 34905758 NR Description: similar to RNA-binding protein
  misc_feature (1)..(203): Homolog of NCBI NO: 14532532 NR Description: At1g33470/F10C21_14 [Arabidopsis thaliana]
  misc_feature (1)..(205): Homolog of NCBI NO: 34907334 NR Description: P0698A10.29 [Oryza sativa (japonica
  misc_feature (1)..(150): Homolog of NCBI NO: 15226439 NR Description: RRM-containing protein

SEQ ID NO: 49810 - DNA, 1387 bp, Arabidopsis thaliana
  misc_feature (1)..(1387): Ceres Seq. ID no. 14304385
  misc_feature: MA Experiment ID: 20000286 Result: Up-regulated in Transcription
  misc_feature: MA Experiment 20000286 PARAMETER Experiment Name: At_Open_Flower_P Parameter: Age (day) Value: 21
  misc_feature: MA Experiment 20000286 PARAMETER Experiment Name: At_Open_Flower_P Parameter: Plant Line Value: WS
  misc_feature: MA Experiment 20000286 PARAMETER Experiment Name: At_Open_Flower_P Parameter: Tissue Value: Half Open vs. Whole Plant
  misc_feature: MA Experiment ID: 20001904 Result: Up-regulated in Transcription
  misc_feature: MA Experiment 20001904 PARAMETER Experiment Name: At_Drought_Reproduction_P Parameter: Age (day) Value: 37
  misc_feature: MA Experiment 20001904 PARAMETER Experiment Name: At_Drought_Reproduction_P Parameter: Organism Value: A. thaliana
  misc_feature: MA Experiment 20001904 PARAMETER Experiment Name: At_Drought_Reproduction_P Parameter: Plant Line Value: WS
  misc_feature: MA Experiment 20001904 PARAMETER Experiment Name: At_Drought_Reproduction_P Parameter: Timepoint (day) Value: 7
  misc_feature: MA Experiment 20001904 PARAMETER Experiment Name: At_Drought_Reproduction_P Parameter: Tissue Value: Rosettes
  misc_feature: MA Experiment 20001904 PARAMETER Experiment Name: At_Drought_Reproduction_P Parameter: Treatment Value: Drought vs. No Drought
atcttcattctcacactcaacccctctctctcctttcattctcattctctctcggctttgttttctctttaatctgattcatctattctatttctatcaccacacaaaaagaagaaaaaaaacaaactttactttaagaattttgaagaataaaatcaaaagagaataaccatggttttctcctccatccaagcctatcttgattcatccaactggcaacaggctcctccgagcaattataatcatgacggaacaggcgcctcagcaaatggaggtcatgttcttcgtcctcagctgcagccacagcagcagccacagcagcagccgcatcctaatgggagcgggggcggaggtggaggtggaggcggctcgatccgagcaggatcaatggtggacagagcaagacaagcaaacgtagccttgccagaagcagcactgaaatgtccgagatgcgaatccaccaacaccaagttctgctacttcaacaactacagcctcactcaaccacgccacttctgcaagacctgccggagatactggacacgtggcggagctctccgcaacgtcccagtcggcggtggctgccggagaaacaggcgtaccaaaagcaacagcaacaacaacaataacagcactgctactagcaataacaccagtttctcctccgggaatgcatccaccatcagcacgattctctcctcccactatggaggaaaccaagagagtatcttaagccagattttgtctccggcgaggctaatgaatcctacttacaatcatctcggagatctcacaagtaatacaaaaacagacaacaacatgagcttgttgaactatggaggattgagtcaagacttgaggtcaatccacatgggagcttctggtggctcgcttatgagctgtgttgatgaatggagatcggcgtcttatcatcagcagtcaagtatgggcggtgggaacttggaggattcttctaatcctaatccatccgcaaatgggttttactcttttgagtcgccgaggataacttcagcgtcaatctcttctgctttagcatcgcagttttcttcggttaaagttgaagataatccttacaaatgggttaatgtcaatggtaattgctcttcctggaatgatctttctgctttcggctcttctcgttgagttcaaccacacaacaaaaaggaaacttgagggtatactttggtggggaaaaaactagttaccaggttaattttgtcttatttttcgtttttgattagttaatgttgtttactactttcctcgttctcaatctactatgcttctagttctaggtagcctaagttattggatgtttttgagactatccctttgttatttttgtcgacaatgttctttcgttatc

SEQ ID NO: 49811 - protein, 330 aa, Arabidopsis thaliana
  peptide (1)..(330): Ceres Seq. ID no. 14304386
  misc_feature (84)..(146): Pfam Name: Dof domain, zinc finger Pfam Description: Dof domain, zinc finger
  misc_feature (12)..(309): Homolog of NCBI NO: 21593773 NR Description: zinc finger protein OBP2 [Arabidopsis thaliana]
  misc_feature (12)..(309): Homolog of NCBI NO: 30680246 NR Description: Dof zinc finger protein [Arabidopsis thaliana]
  misc_feature (64)..(249): Homolog of NCBI NO: 11282341 NR Description: zinc finger protein OBP3 - Arabidopsis thaliana
  misc_feature (1)..(170): Homolog of NCBI NO: 25352305 NR Description: probable DOF zinc finger protein
  misc_feature (13)..(309): Homolog of NCBI NO: 25406987 NR Description: hypothetical protein [imported] - Arabidopsis
  misc_feature (1)..(306): Homolog of NCBI NO: 30684022 NR Description: Dof zinc finger protein [Arabidopsis thaliana]
  misc_feature (46)..(201): Homolog of NCBI NO: 7688355 NR Description: Dof zinc finger protein [Solanum tuberosum]
  misc_feature (55)..(306): Homolog of NCBI NO: 29124139 NR Description: putative DNA-binding protein
  misc_feature (1)..(283): Homolog of NCBI NO: 15241827 NR Description: Dof zinc finger protein [Arabidopsis thaliana]
  misc_feature (1)..(330): Homolog of NCBI NO: 15224320 NR Description: Dof zinc finger protein [Arabidopsis thaliana]
MVFSSIQAYLDSSNWQQAPPSNYNHDGTGASANGGHVLRPQLQPQQQPQQQPHPNGSGGGGGGGGGSIRAGSMVDRARQANVALPEAALKCPRCESTNTKFCYFNNYSLTQPRHFCKTCRRYWTRGGALRNVPVGGGCRRNRRTKSNSNNNNNSTATSNNTSFSSGNASTISTILSSHYGGNQESILSQILSPARLMNPTYNHLGDLTSNTKTDNNMSLLNYGGLSQDLRSIHMGASGGSLMSCVDEWRSASYHQQSSMGGGNLEDSSNPNPSANGFYSFESPRITSASISSALASQFSSVKVEDNPYKWVNVNGNCSSWNDLSAFGSSR

SEQ ID NO: 49812 - protein, 258 aa, Arabidopsis thaliana
  peptide (1)..(258): Ceres Seq. ID no. 14304387
  misc_feature (12)..(74): Pfam Name: Dof domain, zinc finger Pfam Description: Dof domain, zinc finger
  misc_feature (1)..(237): Homolog of NCBI NO: 21593773 NR Description: zinc finger protein OBP2 [Arabidopsis thaliana]
  misc_feature (1)..(237): Homolog of NCBI NO: 30680246 NR Description: Dof zinc finger protein [Arabidopsis thaliana]
  misc_feature (1)..(177): Homolog of NCBI NO: 11282341 NR Description: zinc finger protein OBP3 - Arabidopsis thaliana
  misc_feature (1)..(98): Homolog of NCBI NO: 25352305 NR Description: probable DOF zinc finger protein
  misc_feature (1)..(237): Homolog of NCBI NO: 25406987 NR Description: hypothetical protein [imported] - Arabidopsis
  misc_feature (1)..(234): Homolog of NCBI NO: 30684022 NR Description: Dof zinc finger protein [Arabidopsis thaliana]
  misc_feature (1)..(129): Homolog of NCBI NO: 7688355 NR Description: Dof zinc finger protein [Solanum tuberosum]
  misc_feature (1)..(234): Homolog of NCBI NO: 29124139 NR Description: putative DNA-binding protein
  misc_feature (1)..(211): Homolog of NCBI NO: 15241827 NR Description: Dof zinc finger protein [Arabidopsis thaliana]
  misc_feature (1)..(258): Homolog of NCBI NO: 15224320 NR Description: Dof zinc finger protein [Arabidopsis thaliana]
MVDRARQANVALPEAALKCPRCESTNTKFCYFNNYSLTQPRHFCKTCRRYWTRGGALRNVPVGGGCRRNRRTKSNSNNNNNSTATSNNTSFSSGNASTISTILSSHYGGNQESILSQILSPARLMNPTYNHLGDLTSNTKTDNNMSLLNYGGLSQDLRSIHMGASGGSLMSCVDEWRSASYHQQSSMGGGNLEDSSNPNPSANGFYSFESPRITSASISSALASQFSSVKVEDNPYKWVNVNGNCSSWNDLSAFGSSR

SEQ ID NO: 49813 - DNA, 2139 bp, Arabidopsis thaliana
  misc_feature (1)..(2139): Ceres Seq. ID no. 13592484
  misc_feature: MA Experiment ID: 20000315 Result: Down-regulated in Transcription
  misc_feature: MA Experiment 20000315 PARAMETER Experiment Name: At_14day_Shoots-Roots_Sub_P Parameter: Age (day) Value: 14
  misc_feature: MA Experiment 20000315 PARAMETER Experiment Name: At_14day_Shoots-Roots_Sub_P Parameter: Organism Value: A. thaliana
  misc_feature: MA Experiment 20000315 PARAMETER Experiment Name: At_14day_Shoots-Roots_Sub_P Parameter: Plant Line Value: WS
  misc_feature: MA Experiment 20000315 PARAMETER Experiment Name: At_14day_Shoots-Roots_Sub_P Parameter: Tissue Value: Shoots vs. Whole Plant
gggtatctctctaatttatttatttatttcagattgctcaaaagaataaataaataaaagaatttggctgtctgatttccttgttcggaatcggagaagaaggaagactagattcgatgtgttggtgaagaagatctcgactttgttcaaaattccaatttcgttcgcctcaaagatcattctctcatcttctcgactttgatgcgattgattaaatatggtggatacggttattcccggagatatggcttgtttggatgcagatttgttgcagcttcaggaaatgtcttcctttgttctcaattctaaacctggattcactcagaagctcttcgaccagtggctttctcttcccgaagctcagcgacaggttggatcattgcttaaggatgctgtagctggagctcctatcaatgttactggaagtgcatcgggttctaattctgccactataccatctatgtttcctgcgggaagcgctcctcctctttcaccaagaagttgtggttcaccccgtacaaccaaacagagagccccttctaacttaggttctactctcaaagtagtcaacgagcctgttaaagagcctatacctcagttttatttccaaaatggtcgccctccaccaagcgagattaaagagcaatgtatgtttagaatcaatcacttcttttatggtcacatggatggcttgcagatacaagaattcaagttagtcaccagagaaatctgcaagctcccatctttcttctccacttcccttttccggaagatcgatctcaacaatacaggttttgttactagagatgcatttattgatttttgggtaaacgggaacatgttgataatggatacaacgacccaaatcttcaagatcctaaagcagaaagatcagagtttcattgttaaggatgatttcaaaccactacttaaagaactgttggcgacgcatcctggcctagagttcctgcaatccacacctgaattccaagaaagatatgctgaaactgtcacctacagaatattttactacataaatagatctggcaatggtcgaattacatttagggagcttaaacggggaaacttaattgatgctatgctacatgctgatgaagaagaagatattaacaaagtgttgagatacttctcatatgagcatttctatgtcatatactgcaagttctgggagctggatacggatcacgatttcctgattgacaaagaaaatcttatgagatatggaaaccatgctcttacctaccggattgtcgacagaatattctcccaggttgctaggaagttcactagcaaagttgaagggaagatggggtatgaagactttgtctatttcattcttgcggaagaagataaatcgtcagtgcctagcctagaatattggtttaagtgcatagacttggatgcaaatgggattataacgcgaaatgagatgcaattcttttatgaagagcagttgcatagaatggagtgcatggcgcaagaggctgttcttttcgaggatatcttatgtcagatgattgatatgatcggacctgagaacgaaagccatataacgctgcatgacctgaaaggctcaaagctctctggaaacgtcttcaacatcctttttaatctaaacaaatttatggcatttgaaacccgggatccgttcctcattcgtcaggagcgcgagaacccgacattgacagactgggaccgttttgcacatagagagtatattcggctatcaatggaagaagatgttgaagatgcatccaatggaagtgctgaggtttgggatgactcgtcactggaggctcccttctgagttcataaagaagagaaatgtaaagtccctgagaagaacatttggagctttgttgaggaaggaaagtgaaaaacaaacgaaaagccggtagtatcctctgttgaataccatacttagcttggatttgttttctaacttctctttatttgttagctgattctacagttatatttattaacaatcgtctagattttacagtcttcttcacctgtattgcattcactttgctctgatgtttctatctctgggtgttacttcatcatctccagatgttgagacttgtgaatttcaatgctatagttcctttaatt

SEQ ID NO: 49814 - protein, 536 aa, Arabidopsis thaliana
  peptide (1)..(536): Ceres Seq. ID no. 15221112
  misc_feature (391)..(419): Pfam Name: EF hand Pfam Description: EF hand
  misc_feature (6)..(536): Homolog of NCBI NO: 15219596 NR Description: protein phosphatase 2A -related [Arabidopsis
  misc_feature (9)..(196): Homolog of NCBI NO: 16905168 NR Description: putative phosphatase subunit, 3'-partial [Oryza
  misc_feature (186)..(489): Homolog of NCBI NO: 16905168 NR Description: putative phosphatase subunit, 3'-partial [Oryza
  misc_feature (6)..(536): Homolog of NCBI NO: 28393301 NR Description: putative protein phosphatase 2A [Arabidopsis
  misc_feature (9)..(536): Homolog of NCBI NO: 15240089 NR Description: protein phosphatase 2A 62 kDa B regulatory
  misc_feature (9)..(196): Homolog of NCBI NO: 37535364 NR Description: putative protein phosphatase 2A regulatory
  misc_feature (186)..(536): Homolog of NCBI NO: 37535364 NR Description: putative protein phosphatase 2A regulatory
  misc_feature (13)..(536): Homolog of NCBI NO: 15221817 NR Description: protein phosphatase 2A 72 kDa regulatory subunit
  misc_feature (1)..(536): Homolog of NCBI NO: 15241978 NR Description: protein phosphatase 2A regulatory subunit
  misc_feature (1)..(536): Homolog of NCBI NO: 18421273 NR Description: protein phosphatase 2A regulatory subunit
MVDTVIPGDMACLDADLLQLQEMSSFVLNSKPGFTQKLFDQWLSLPEAQRQVGSLLKDAVAGAPINVTGSASGSNSATIPSMFPAGSAPPLSPRSCGSPRTTKQRAPSNLGSTLKVVNEPVKEPIPQFYFQNGRPPPSEIKEQCMFRINHFFYGHMDGLQIQEFKLVTREICKLPSFFSTSLFRKIDLNNTGFVTRDAFIDFWVNGNMLIMDTTTQIFKILKQKDQSFIVKDDFKPLLKELLATHPGLEFLQSTPEFQERYAETVTYRIFYYINRSGNGRITFRELKRGNLIDAMLHADEEEDINKVLRYFSYEHFYVIYCKFWELDTDHDFLIDKENLMRYGNHALTYRIVDRIFSQVARKFTSKVEGKMGYEDFVYFILAEEDKSSVPSLEYWFKCIDLDANGIITRNEMQFFYEEQLHRMECMAQEAVLFEDILCQMIDMIGPENESHITLHDLKGSKLSGNVFNILFNLNKFMAFETRDPFLIRQERENPTLTDWDRFAHREYIRLSMEEDVEDASNGSAEVWDDSSLEAPF

SEQ ID NO: 49815 - protein, 527 aa, Arabidopsis thaliana
  peptide (1)..(527): Ceres Seq. ID no. 15221113
  misc_feature (382)..(410): Pfam Name: EF hand Pfam Description: EF hand
  misc_feature (1)..(527): Homolog of NCBI NO: 15219596 NR Description: protein phosphatase 2A -related [Arabidopsis
  misc_feature (1)..(187): Homolog of NCBI NO: 16905168 NR Description: putative phosphatase subunit, 3'-partial [Oryza
  misc_feature (177)..(480): Homolog of NCBI NO: 16905168 NR Description: putative phosphatase subunit, 3'-partial [Oryza
  misc_feature (1)..(527): Homolog of NCBI NO: 28393301 NR Description: putative protein phosphatase 2A [Arabidopsis
  misc_feature (1)..(527): Homolog of NCBI NO: 15240089 NR Description: protein phosphatase 2A 62 kDa B regulatory
  misc_feature (1)..(187): Homolog of NCBI NO: 37535364 NR Description: putative protein phosphatase 2A regulatory
  misc_feature (177)..(527): Homolog of NCBI NO: 37535364 NR Description: putative protein phosphatase 2A regulatory
  misc_feature (4)..(527): Homolog of NCBI NO: 15221817 NR Description: protein phosphatase 2A 72 kDa regulatory subunit
  misc_feature (1)..(527): Homolog of NCBI NO: 15241978 NR Description: protein phosphatase 2A regulatory subunit
  misc_feature (1)..(527): Homolog of NCBI NO: 18421273 NR Description: protein phosphatase 2A regulatory subunit
MACLDADLLQLQEMSSFVLNSKPGFTQKLFDQWLSLPEAQRQVGSLLKDAVAGAPINVTGSASGSNSATIPSMFPAGSAPPLSPRSCGSPRTTKQRAPSNLGSTLKVVNEPVKEPIPQFYFQNGRPPPSEIKEQCMFRINHFFYGHMDGLQIQEFKLVTREICKLPSFFSTSLFRKIDLNNTGFVTRDAFIDFWVNGNMLIMDTTTQIFKILKQKDQSFIVKDDFKPLLKELLATHPGLEFLQSTPEFQERYAETVTYRIFYYINRSGNGRITFRELKRGNLIDAMLHADEEEDINKVLRYFSYEHFYVIYCKFWELDTDHDFLIDKENLMRYGNHALTYRIVDRIFSQVARKFTSKVEGKMGYEDFVYFILAEEDKSSVPSLEYWFKCIDLDANGIITRNEMQFFYEEQLHRMECMAQEAVLFEDILCQMIDMIGPENESHITLHDLKGSKLSGNVFNILFNLNKFMAFETRDPFLIRQERENPTLTDWDRFAHREYIRLSMEEDVEDASNGSAEVWDDSSLEAPF

SEQ ID NO: 49816 - protein, 514 aa, Arabidopsis thaliana
  peptide (1)..(514): Ceres Seq. ID no. 15221114
  misc_feature (369)..(397): Pfam Name: EF hand Pfam Description: EF hand
  misc_feature (1)..(514): Homolog of NCBI NO: 15219596 NR Description: protein phosphatase 2A -related [Arabidopsis
  misc_feature (1)..(174): Homolog of NCBI NO: 16905168 NR Description: putative phosphatase subunit, 3'-partial [Oryza
  misc_feature (164)..(467): Homolog of NCBI NO: 16905168 NR Description: putative phosphatase subunit, 3'-partial [Oryza
  misc_feature (1)..(514): Homolog of NCBI NO: 28393301 NR Description: putative protein phosphatase 2A [Arabidopsis
  misc_feature (1)..(514): Homolog of NCBI NO: 15240089 NR Description: protein phosphatase 2A 62 kDa B regulatory
  misc_feature (1)..(174): Homolog of NCBI NO: 37535364 NR Description: putative protein phosphatase 2A regulatory
  misc_feature (164)..(514): Homolog of NCBI NO: 37535364 NR Description: putative protein phosphatase 2A regulatory
  misc_feature (1)..(514): Homolog of NCBI NO: 15221817 NR Description: protein phosphatase 2A 72 kDa regulatory subunit
  misc_feature (1)..(514): Homolog of NCBI NO: 15241978 NR Description: protein phosphatase 2A regulatory subunit
  misc_feature (1)..(514): Homolog of NCBI NO: 18421273 NR Description: protein phosphatase 2A regulatory subunit
MSSFVLNSKPGFTQKLFDQWLSLPEAQRQVGSLLKDAVAGAPINVTGSASGSNSATIPSMFPAGSAPPLSPRSCGSPRTTKQRAPSNLGSTLKVVNEPVKEPIPQFYFQNGRPPPSEIKEQCMFRINHFFYGHMDGLQIQEFKLVTREICKLPSFFSTSLFRKIDLNNTGFVTRDAFIDFWVNGNMLIMDTTTQIFKILKQKDQSFIVKDDFKPLLKELLATHPGLEFLQSTPEFQERYAETVTYRIFYYINRSGNGRITFRELKRGNLIDAMLHADEEEDINKVLRYFSYEHFYVIYCKFWELDTDHDFLIDKENLMRYGNHALTYRIVDRIFSQVARKFTSKVEGKMGYEDFVYFILAEEDKSSVPSLEYWFKCIDLDANGIITRNEMQFFYEEQLHRMECMAQEAVLFEDILCQMIDMIGPENESHITLHDLKGSKLSGNVFNILFNLNKFMAFETRDPFLIRQERENPTLTDWDRFAHREYIRLSMEEDVEDASNGSAEVWDDSSLEAPF

SEQ ID NO: 49817 - DNA, 1775 bp, Arabidopsis thaliana
  misc_feature (1)..(1775): Ceres Seq. ID no. 13578549
  misc_feature: MA Experiment ID: 20000169 Result: Up-regulated in Transcription
  misc_feature: MA Experiment 20000169 PARAMETER Experiment Name: At_100uM_ABA_P Parameter: Age (day) Value: 14
  misc_feature: MA Experiment 20000169 PARAMETER Experiment Name: At_100uM_ABA_P Parameter: Organism Value: A. thaliana
  misc_feature: MA Experiment 20000169 PARAMETER Experiment Name: At_100uM_ABA_P Parameter: Plant Line Value: WS
  misc_feature: MA Experiment 20000169 PARAMETER Experiment Name: At_100uM_ABA_P Parameter: Timepoint (hr) Value: 6
  misc_feature: MA Experiment 20000169 PARAMETER Experiment Name: At_100uM_ABA_P Parameter: Tissue Value: Aerial
  misc_feature: MA Experiment 20000169 PARAMETER Experiment Name: At_100uM_ABA_P Parameter: Treatment Value: 100uM ABA vs. No Treatment
  misc_feature: MA Experiment ID: 20000179 Result: Down-regulated in Transcription
  misc_feature: MA Experiment 20000179 PARAMETER Experiment Name: At_Germinating_Seeds_P Parameter: Age (hr) Value: 6 vs. 0
  misc_feature: MA Experiment 20000179 PARAMETER Experiment Name: At_Germinating_Seeds_P Parameter: Tissue Value: Germinating Seeds
  misc_feature: MA Experiment ID: 20000180 Result: Down-regulated in Transcription
  misc_feature: MA Experiment 20000180 PARAMETER Experiment Name: At_Germinating_Seeds_P Parameter: Age (hr) Value: 24 vs. 0
  misc_feature: MA Experiment 20000180 PARAMETER Experiment Name: At_Germinating_Seeds_P Parameter: Tissue Value: Germinating Seeds
  misc_feature: MA Experiment ID: 20000182 Result: Up-regulated in Transcription
  misc_feature: MA Experiment 20000182 PARAMETER Experiment Name: At_2mM_SA_P Parameter: Age (day) Value: 14
  misc_feature: MA Experiment 20000182 PARAMETER Experiment Name: At_2mM_SA_P Parameter: Organism Value: A. thaliana
  misc_feature: MA Experiment 20000182 PARAMETER Experiment Name: At_2mM_SA_P Parameter: Plant Line Value: WS
  misc_feature: MA Experiment 20000182 PARAMETER Experiment Name: At_2mM_SA_P Parameter: Timepoint (hr) Value: 6
  misc_feature: MA Experiment 20000182 PARAMETER Experiment Name: At_2mM_SA_P Parameter: Tissue Value: Aerial
  misc_feature: MA Experiment 20000182 PARAMETER Experiment Name: At_2mM_SA_P Parameter: Treatment Value: 2mM SA vs. No Treatment
  misc_feature: MA Experiment ID: 20000438 Result: Up-regulated in Transcription
  misc_feature: MA Experiment 20000438 PARAMETER Experiment Name: At_Shoots__P Parameter: Age (day) Value: 14
  misc_feature: MA Experiment 20000438 PARAMETER Experiment Name: At_Shoots__P Parameter: Tissue Value: Shoots vs. Whole Plant
  misc_feature: MA Experiment ID: 20000441 Result: Up-regulated in Transcription
  misc_feature: MA Experiment 20000441 PARAMETER Experiment Name: At_1uM_BR-BRZ__P Parameter: Tissue Value: Shoot Apices
  misc_feature: MA Experiment 20000441 PARAMETER Experiment Name: At_1uM_BR-BRZ__P Parameter: Treatment Value: 1uM BR vs. No Treatment
  misc_feature: MA Experiment ID: 20000443 Result: Up-regulated in Transcription
  misc_feature: MA Experiment 20000443 PARAMETER Experiment Name: At_1uM_BR-BRZ__P Parameter: Tissue Value: Shoot Apices
  misc_feature: MA Experiment 20000443 PARAMETER Experiment Name: At_1uM_BR-BRZ__P Parameter: Treatment Value: 1uM BRZ vs. No Treatment
  misc_feature: MA Experiment ID: 20000445 Result: Up-regulated in Transcription
  misc_feature: MA Experiment 20000445 PARAMETER Experiment Name: At_100uM_NAA__P Parameter: Age (day) Value: 14
  misc_feature: MA Experiment 20000445 PARAMETER Experiment Name: At_100uM_NAA__P Parameter: Organism Value: A. thaliana
  misc_feature: MA Experiment 20000445 PARAMETER Experiment Name: At_100uM_NAA__P Parameter: Plant Line Value: WS
  misc_feature: MA Experiment 20000445 PARAMETER Experiment Name: At_100uM_NAA__P Parameter: Timepoint (hr) Value: 6
  misc_feature: MA Experiment 20000445 PARAMETER Experiment Name: At_100uM_NAA__P Parameter: Tissue Value: Aerial
  misc_feature: MA Experiment 20000445 PARAMETER Experiment Name: At_100uM_NAA__P Parameter: Treatment Value: 100uM NAA vs. No Treatment
  misc_feature: MA Experiment ID: 20000496 Result: Down-regulated in Transcription
  misc_feature: MA Experiment 20000496 PARAMETER Experiment Name: At_Guard_Cells_P Parameter: Harvest Date Value: 7/19/2002
  misc_feature: MA Experiment 20000496 PARAMETER Experiment Name: At_Guard_Cells_P Parameter: Organism Value: Canola
  misc_feature: MA Experiment 20000496 PARAMETER Experiment Name: At_Guard_Cells_P Parameter: Tissue Value: Guard Cells vs. Leaves
  misc_feature: MA Experiment ID: 20000794 Result: Up-regulated in Transcription
  misc_feature: MA Experiment 20000794 PARAMETER Experiment Name: At_Petals_P Parameter: Age (day) Value: 23-25 days
  misc_feature: MA Experiment 20000794 PARAMETER Experiment Name: At_Petals_P Parameter: Plant Line Value: WS
  misc_feature: MA Experiment 20000794 PARAMETER Experiment Name: At_Petals_P Parameter: Tissue Value: Petals vs. Whole plant
  misc_feature: MA Experiment ID: 20001248 Result: Down-regulated in Transcription
  misc_feature: MA Experiment 20001248 PARAMETER Experiment Name: At_Far-red-induction_P Parameter: Age (day) Value: 7
  misc_feature: MA Experiment 20001248 PARAMETER Experiment Name: At_Far-red-induction_P Parameter: Light Value: Far-red vs. White
  misc_feature: MA Experiment 20001248 PARAMETER Experiment Name: At_Far-red-induction_P Parameter: Organism Value: A. thaliana
  misc_feature: MA Experiment 20001248 PARAMETER Experiment Name: At_Far-red-induction_P Parameter: Plant Line Value: Columbia
  misc_feature: MA Experiment 20001248 PARAMETER Experiment Name: At_Far-red-induction_P Parameter: Timepoint (hr) Value: 4
  misc_feature: MA Experiment 20001248 PARAMETER Experiment Name: At_Far-red-induction_P Parameter: Tissue Value: Whole Plant
  misc_feature: MA Experiment ID: 20001458 Result: Down-regulated in Transcription
  misc_feature: MA Experiment 20001458 PARAMETER Experiment Name: At_50mM_NH4NO3_L-to-H_P Parameter: Age (day) Value: Undefined
  misc_feature: MA Experiment 20001458 PARAMETER Experiment Name: At_50mM_NH4NO3_L-to-H_P Parameter: Organism Value: Undefined
  misc_feature: MA Experiment 20001458 PARAMETER Experiment Name: At_50mM_NH4NO3_L-to-H_P Parameter: Plant Line Value: Undefined
  misc_feature: MA Experiment 20001458 PARAMETER Experiment Name: At_50mM_NH4NO3_L-to-H_P Parameter: Timepoint (hr) Value: 2
  misc_feature: MA Experiment 20001458 PARAMETER Experiment Name: At_50mM_NH4NO3_L-to-H_P Parameter: Tissue Value: Siliques
  misc_feature: MA Experiment 20001458 PARAMETER Experiment Name: At_50mM_NH4NO3_L-to-H_P Parameter: Treatment Value: 50mM NH4NO3 vs. 100mM Manitol
  misc_feature: MA Experiment ID: 20001557 Result: Up-regulated in Transcription
  misc_feature: MA Experiment 20001557 PARAMETER Experiment Name: At_Drought_Soil_Dry_P Parameter: Age (day) Value: 27
  misc_feature: MA Experiment 20001557 PARAMETER Experiment Name: At_Drought_Soil_Dry_P Parameter: Organism Value: A. thaliana
  misc_feature: MA Experiment 20001557 PARAMETER Experiment Name: At_Drought_Soil_Dry_P Parameter: Plant Line Value: WS
  misc_feature: MA Experiment 20001557 PARAMETER Experiment Name: At_Drought_Soil_Dry_P Parameter: Post Timepoint (hr) Value: 3
  misc_feature: MA Experiment 20001557 PARAMETER Experiment Name: At_Drought_Soil_Dry_P Parameter: Post-Treatment Value: Re-Water vs. No Drought
  misc_feature: MA Experiment 20001557 PARAMETER Experiment Name: At_Drought_Soil_Dry_P Parameter: Timepoint (day) Value: 13
  misc_feature: MA Experiment 20001557 PARAMETER Experiment Name: At_Drought_Soil_Dry_P Parameter: Treatment Value: Drought vs. No Drought
  misc_feature: MA Experiment ID: 20001558 Result: Up-regulated in Transcription
  misc_feature: MA Experiment 20001558 PARAMETER Experiment Name: At_Drought_Soil_Dry_P Parameter: Age (day) Value: 27
  misc_feature: MA Experiment 20001558 PARAMETER Experiment Name: At_Drought_Soil_Dry_P Parameter: Organism Value: A. thaliana
  misc_feature: MA Experiment 20001558 PARAMETER Experiment Name: At_Drought_Soil_Dry_P Parameter: Plant Line Value: WS
  misc_feature: MA Experiment 20001558 PARAMETER Experiment Name: At_Drought_Soil_Dry_P Parameter: Post Timepoint (hr) Value: 6
  misc_feature: MA Experiment 20001558 PARAMETER Experiment Name: At_Drought_Soil_Dry_P Parameter: Post-Treatment Value: Re-Water vs. No Drought
  misc_feature: MA Experiment 20001558 PARAMETER Experiment Name: At_Drought_Soil_Dry_P Parameter: Timepoint (day) Value: 13
  misc_feature: MA Experiment 20001558 PARAMETER Experiment Name: At_Drought_Soil_Dry_P Parameter: Treatment Value: Drought vs. No Drought
  misc_feature: MA Experiment ID: 20001560 Result: Up-regulated in Transcription
  misc_feature: MA Experiment 20001560 PARAMETER Experiment Name: At_Drought_Soil_Dry_P Parameter: Age (day) Value: 28
  misc_feature: MA Experiment 20001560 PARAMETER Experiment Name: At_Drought_Soil_Dry_P Parameter: Organism Value: A. thaliana
  misc_feature: MA Experiment 20001560 PARAMETER Experiment Name: At_Drought_Soil_Dry_P Parameter: Plant Line Value: WS
  misc_feature: MA Experiment 20001560 PARAMETER Experiment Name: At_Drought_Soil_Dry_P Parameter: Post Timepoint (hr) Value: None
  misc_feature: MA Experiment 20001560 PARAMETER Experiment Name: At_Drought_Soil_Dry_P Parameter: Post-Treatment Value: None
  misc_feature: MA Experiment 20001560 PARAMETER Experiment Name: At_Drought_Soil_Dry_P Parameter: Timepoint (day) Value: 14
  misc_feature: MA Experiment 20001560 PARAMETER Experiment Name: At_Drought_Soil_Dry_P Parameter: Treatment Value: Drought vs. No Drought
  misc_feature: MA Experiment ID: 20001904 Result: Up-regulated in Transcription
  misc_feature: MA Experiment 20001904 PARAMETER Experiment Name: At_Drought_Reproduction_P Parameter: Age (day) Value: 37
  misc_feature: MA Experiment 20001904 PARAMETER Experiment Name: At_Drought_Reproduction_P Parameter: Organism Value: A. thaliana
  misc_feature: MA Experiment 20001904 PARAMETER Experiment Name: At_Drought_Reproduction_P Parameter: Plant Line Value: WS
  misc_feature: MA Experiment 20001904 PARAMETER Experiment Name: At_Drought_Reproduction_P Parameter: Timepoint (day) Value: 7
  misc_feature: MA Experiment 20001904 PARAMETER Experiment Name: At_Drought_Reproduction_P Parameter: Tissue Value: Rosettes
  misc_feature: MA Experiment 20001904 PARAMETER Experiment Name: At_Drought_Reproduction_P Parameter: Treatment Value: Drought vs. No Drought
  misc_feature: MA Experiment ID: 20001905 Result: Up-regulated in Transcription
  misc_feature: MA Experiment 20001905 PARAMETER Experiment Name: At_Drought_Reproduction_P Parameter: Age (day) Value: 40
  misc_feature: MA Experiment 20001905 PARAMETER Experiment Name: At_Drought_Reproduction_P Parameter: Organism Value: A. thaliana
  misc_feature: MA Experiment 20001905 PARAMETER Experiment Name: At_Drought_Reproduction_P Parameter: Plant Line Value: WS
  misc_feature: MA Experiment 20001905 PARAMETER Experiment Name: At_Drought_Reproduction_P Parameter: Timepoint (day) Value: 10
  misc_feature: MA Experiment 20001905 PARAMETER Experiment Name: At_Drought_Reproduction_P Parameter: Tissue Value: Rosettes
  misc_feature: MA Experiment 20001905 PARAMETER Experiment Name: At_Drought_Reproduction_P Parameter: Treatment Value: Drought vs. No Drought
  misc_feature: MA Experiment ID: 20001911 Result: Up-regulated in Transcription
  misc_feature: MA Experiment 20001911 PARAMETER Experiment Name: At_Drought_Reproduction_P Parameter: Age (day) Value: 40
  misc_feature: MA Experiment 20001911 PARAMETER Experiment Name: At_Drought_Reproduction_P Parameter: Organism Value: A. thaliana
  misc_feature: MA Experiment 20001911 PARAMETER Experiment Name: At_Drought_Reproduction_P Parameter: Plant Line Value: WS
  misc_feature: MA Experiment 20001911 PARAMETER Experiment Name: At_Drought_Reproduction_P Parameter: Timepoint (day) Value: 10
  misc_feature: MA Experiment 20001911 PARAMETER Experiment Name: At_Drought_Reproduction_P Parameter: Tissue Value: Flowers
  misc_feature: MA Experiment 20001911 PARAMETER Experiment Name: At_Drought_Reproduction_P Parameter: Treatment Value: Drought vs. No Drought
gaagacgtttctctctgcttcaccaccagagagatacatccaaaaattcatatctttccttcatttttattggcgttttaagaaaacaaagcttccccaattagggttttgtattagaagaatgggattgtggaatggaaaaggcaccggaggatttatcctctaccttctcgtggctttctccgtcgccgtcttctctgtttcttacgtcggagacacaacaaaccctattcatcatcatctctcttctctctctgccaccgaaaaaatttggccggatttgaagtttagctggaaacttgtgttggctacagtgatagcgtttctaggatcagcttgtgggactgttggtggtgttggaggtggtgggatttttgttcctatgctcactcttatactcgggttcgatacaaaatccgcagctgcaatatcaaaatgtatgataatgggagcatcagcatcatcagtttggtacaatgtacgagttcgtcatccgacaaaagaagtaccaatcttagattatgatcttgctcttctctttcaaccaatgcttcttctcggtatcactgttggtgtttctctcagtgttgtgttcccttattggctcattactgtcctcatcatcattcttttcgtcggtacttcttcgagatctttttttaaaggcattgagatgtggaaggaagagacattgttaaagaacgaaatggcgcagcaacgagctaatatggttaattcccggggagaacttttaatcgatacagagtatgagccgctttacccgagagaagaaaaatcagagctggaaataatacgctccaacctcaaatggaaagggcttctaattctagtaactgtgtggttgactttcttgctcattcaaattgtcaagaacgaaataaaggtctgcagcacaatatattggatactattcatcgtacagttcccagttgctttagcggtgtttgggtttgaagcaagcaaattgtatacagcgaacaaaaagaggttaaacagtggcaacactgaatgtatctgtgaagctacgattgagtggactcctctgagtctaatcttctgtggtctctgtggtctcattggaggtatcgtaggtggtctccttggatccggtggtggatttgttctcgggcctttgcttcttgagattggagtcatcccacaggttgctagcgcaacagctacctttgtgatgatgttttcttcgtccttatccgtagtcgagttctatctcctcaagagattcccaataccatacgcaatgtacttgatttcggtatcgattcttgccggtttttggggacaatcctttataagaaagctcgtggcgatcctgagaagagcttccataatcgttttcgttctctcaggagtcatttgtgcaagtgctctcacaatgggagtgattgggatagagaagagcataaagatgatacataaccatgaattcatgggattcttaggattctgcagcagtcaatgaatcaaccatctatctgaacaaaaatttcaagtgttttgttttcatttactggacaatttcggttgtccaacaccattattgtgagaagttataaaattagattgttttacttgcagtccaagtcatttgtgctctgttcttggtcaatacatagttgaccatcttcagaaatagagtttgtctaaattgttgtcattgtgttttgcttgtattcaaacgttgtattattatttgcgagacgatagataaaataaaaatggaagtctttttctat

SEQ ID NO: 49818 - protein, 499 aa, Arabidopsis thaliana; identical to SEQ ID NO: 48758
  peptide (1)..(499): Ceres Seq. ID no. 13578550
  misc_feature (68)..(492): Homolog of NCBI NO: 6554197 NR Description: T23J18.20 [Arabidopsis thaliana]
  misc_feature (290)..(491): Homolog of NCBI NO: 16660290 NR Description: hypothetical protein [Musa acuminata]
  misc_feature (53)..(492): Homolog of NCBI NO: 15220419 NR Description: expressed protein [Arabidopsis thaliana]
  misc_feature (101)..(492): Homolog of NCBI NO: 34908754 NR Description: P0415A04.10 [Oryza sativa (japonica
  misc_feature (90)..(496): Homolog of NCBI NO: 40253486 NR Description: unknown protein [Oryza sativa (japonica
  misc_feature (60)..(497): Homolog of NCBI NO: 40253412 NR Description: membrane protein-like [Oryza sativa (japonica
  misc_feature (90)..(496): Homolog of NCBI NO: 30682879 NR Description: expressed protein [Arabidopsis thaliana]
  misc_feature (312)..(395): Homolog of NCBI NO: 25408492 NR Description: hypothetical protein At2g36630 [imported] -
  misc_feature (41)..(237): Homolog of NCBI NO: 25408492 NR Description: hypothetical protein At2g36630 [imported] -
  misc_feature (41)..(499): Homolog of NCBI NO: 30686851 NR Description: expressed protein [Arabidopsis thaliana]

SEQ ID NO: 49819 - protein, 459 aa, Arabidopsis thaliana; identical to SEQ ID NO: 48759
  peptide (1)..(459): Ceres Seq. ID no. 13578551
  misc_feature (28)..(452): Homolog of NCBI NO: 6554197 NR Description: T23J18.20 [Arabidopsis thaliana]
  misc_feature (250)..(451): Homolog of NCBI NO: 16660290 NR Description: hypothetical protein [Musa acuminata]
  misc_feature (13)..(452): Homolog of NCBI NO: 15220419 NR Description: expressed protein [Arabidopsis thaliana]
  misc_feature (61)..(452): Homolog of NCBI NO: 34908754 NR Description: P0415A04.10 [Oryza sativa (japonica
  misc_feature (50)..(456): Homolog of NCBI NO: 40253486 NR Description: unknown protein [Oryza sativa (japonica
  misc_feature (20)..(457): Homolog of NCBI NO: 40253412 NR Description: membrane protein-like [Oryza sativa (japonica
  misc_feature (50)..(456): Homolog of NCBI NO: 30682879 NR Description: expressed protein [Arabidopsis thaliana]
  misc_feature (272)..(355): Homolog of NCBI NO: 25408492 NR Description: hypothetical protein At2g36630 [imported] -
  misc_feature (1)..(197): Homolog of NCBI NO: 25408492 NR Description: hypothetical protein At2g36630 [imported] -
  misc_feature (1)..(459): Homolog of NCBI NO: 30686851 NR Description: expressed protein [Arabidopsis thaliana]

SEQ ID NO: 49820 - protein, 372 aa, Arabidopsis thaliana; identical to SEQ ID NO: 48760
  peptide (1)..(372): Ceres Seq. ID no. 13578552
  misc_feature (1)..(365): Homolog of NCBI NO: 6554197 NR Description: T23J18.20 [Arabidopsis thaliana]
  misc_feature (163)..(364): Homolog of NCBI NO: 16660290 NR Description: hypothetical protein [Musa acuminata]
  misc_feature (1)..(365): Homolog of NCBI NO: 15220419 NR Description: expressed protein [Arabidopsis thaliana]
  misc_feature (1)..(365): Homolog of NCBI NO: 34908754 NR Description: P0415A04.10 [Oryza sativa (japonica
  misc_feature (1)..(369): Homolog of NCBI NO: 40253486 NR Description: unknown protein [Oryza sativa (japonica
  misc_feature (1)..(370): Homolog of NCBI NO: 40253412 NR Description: membrane protein-like [Oryza sativa (japonica
  misc_feature (1)..(369): Homolog of NCBI NO: 30682879 NR Description: expressed protein [Arabidopsis thaliana]
  misc_feature (185)..(268): Homolog of NCBI NO: 25408492 NR Description: hypothetical protein At2g36630 [imported] -
  misc_feature (1)..(110): Homolog of NCBI NO: 25408492 NR Description: hypothetical protein At2g36630 [imported] -
  misc_feature (1)..(372): Homolog of NCBI NO: 30686851 NR Description: expressed protein [Arabidopsis thaliana]

SEQ ID NO: 49821 - DNA, 783 bp, Arabidopsis thaliana
  misc_feature (1)..(783): Ceres Seq. ID no. 13587945
  misc_feature: MA Experiment ID: 20000574 Result: Up-regulated in Transcription
  misc_feature: MA Experiment 20000574 PARAMETER Experiment Name: At_100uM_ABA_Mutants__P Parameter: Organism Value: A. thaliana
  misc_feature: MA Experiment 20000574 PARAMETER Experiment Name: At_100uM_ABA_Mutants__P Parameter: Plant Line Value: CS23 vs. Ler wt
  misc_feature: MA Experiment 20000574 PARAMETER Experiment Name: At_100uM_ABA_Mutants__P Parameter: Timepoint (hr) Value: N/A
  misc_feature: MA Experiment 20000574 PARAMETER Experiment Name: At_100uM_ABA_Mutants__P Parameter: Tissue Value: Whole Plant
  misc_feature: MA Experiment 20000574 PARAMETER Experiment Name: At_100uM_ABA_Mutants__P Parameter: Treatment Value: None
  misc_feature: MA Experiment ID: 20001451 Result: Down-regulated in Transcription
  misc_feature: MA Experiment 20001451 PARAMETER Experiment Name: At_Far-red-induction_P Parameter: Age (day) Value: 7
  misc_feature: MA Experiment 20001451 PARAMETER Experiment Name: At_Far-red-induction_P Parameter: Light Value: Far-red vs. White
  misc_feature: MA Experiment 20001451 PARAMETER Experiment Name: At_Far-red-induction_P Parameter: Organism Value: A. thaliana
  misc_feature: MA Experiment 20001451 PARAMETER Experiment Name: At_Far-red-induction_P Parameter: Plant Line Value: Columbia
  misc_feature: MA Experiment 20001451 PARAMETER Experiment Name: At_Far-red-induction_P Parameter: Timepoint (hr) Value: 24
  misc_feature: MA Experiment 20001451 PARAMETER Experiment Name: At_Far-red-induction_P Parameter: Tissue Value: Whole Plant
attttattcaataacccttacaacaccgaatataactttgaaaaaaaaaacaaatggcttcaaagaactcagcctctcttgctcttttctttgcgctcaacatcctctttttcaccttaaccgttgcaacaaattgcaactgcaagccaagtcctaaaccaaagccagtcccaagtcctaagcccaagccggtccaatgtcctcctccaccccgtccttcagtcccaagtcctaatcctaggccggtcacacctccacgcacccctggttcatccggaaacagctgtcctattgatgctctcaagctcggtgtatgtgcaaatgtcttaagcagtctactcaacatccagttgggacagccatcctctcaacaatgttgctcgctcatccaaggtttggttgacgtcgacgctgcgatttgtctatgcactgctctgagggctaacgttcttggtatcaaccttaacgttccgatatctctcagcgttcttctcaacgtttgtaacagaaagcttccatctggtttccaatgtgcttgagcaatatccattatgcatacgatgcgatgccagtgcacaatatcgtcttcgaaatttattatagtttgaataaatgcatgtaaggtatagtttatgtatcaatcttaatttgttaaagagaaaaaataaatgtgtgagatttttatagtttttcattttgtttgtaaacgttgtcccccgccttccaagctttgtatgcttctgtagcaatctatttctatttctatttcaacgaaattttaat

SEQ ID NO: 49822 - protein, 161 aa, Arabidopsis thaliana
  peptide (1)..(161): Ceres Seq. ID no. 15220838
  misc_feature (78)..(160): Pfam Name: Protease inhibitor/seed storage/LTP family Pfam Description: Protease inhibitor/seed storage/LTP family
  misc_feature (1)..(160): Homolog of NCBI NO: 629597 NR Description: proline-rich protein - rape
  misc_feature (1)..(160): Homolog of NCBI NO: 15221484 NR Description: protease inhibitor/seed storage/lipid transfer
  misc_feature (1)..(161): Homolog of NCBI NO: 4103618 NR Description: HyPRP [Fragaria x ananassa]
  misc_feature (32)..(161): Homolog of NCBI NO: 15235388 NR Description: protease inhibitor/seed storage/lipid transfer
  misc_feature (1)..(161): Homolog of NCBI NO: 15235390 NR Description: protease inhibitor/seed storage/lipid transfer
  misc_feature (1)..(161): Homolog of NCBI NO: 15235386 NR Description: protease inhibitor/seed storage/lipid transfer
  misc_feature (1)..(161): Homolog of NCBI NO: 15235383 NR Description: protease inhibitor/seed storage/lipid transfer
MASKNSASLALFFALNILFFTLTVATNCNCKPSPKPKPVPSPKPKPVQCPPPPRPSVPSPNPRPVTPPRTPGSSGNSCPIDALKLGVCANVLSSLLNIQLGQPSSQQCCSLIQGLVDVDAAICLCTALRANVLGINLNVPISLSVLLNVCNRKLPSGFQCA

SEQ ID NO: 49823 - DNA, 2186 bp, Arabidopsis thaliana
  misc_feature (1)..(2186): Ceres Seq. ID no. 12591109
  misc_feature: MA Experiment ID: 20000327 Result: Down-regulated in Transcription
  misc_feature: MA Experiment 20000327 PARAMETER Experiment Name: At_42deg_Heat_Sub_P Parameter: Age (day) Value: 14
  misc_feature: MA Experiment 20000327 PARAMETER Experiment Name: At_42deg_Heat_Sub_P Parameter: Organism Value: A. thaliana
  misc_feature: MA Experiment 20000327 PARAMETER Experiment Name: At_42deg_Heat_Sub_P Parameter: Plant Line Value: WS
  misc_feature: MA Experiment 20000327 PARAMETER Experiment Name: At_42deg_Heat_Sub_P Parameter: Temperature (deg C) Value: 42 vs. 22
  misc_feature: MA Experiment 20000327 PARAMETER Experiment Name: At_42deg_Heat_Sub_P Parameter: Timepoint (hr) Value: 1
  misc_feature: MA Experiment 20000327 PARAMETER Experiment Name: At_42deg_Heat_Sub_P Parameter: Tissue Value: Aerial
attacagagtttctggttttttttggcttgcgtgatctctctcttctcttctctctctcactcatccaaatctttgatcatctcatcatcattggacttgaagctaactccagagttttatccagattcatcattttccaacgtttttcttcaatcgaatcatcagcgagtttggttccgacgacgatcttagtagcttcataagctcaagattcttcaggtttcggtggattttcttgagctcttctaagcttctccattttgtgagcctccgatttcgaacctggtagtgttgtggatctcactggaccacgaagctttcttcactgagctaagcttgaagtcaattcctctgttcgacaatcaatagaggaagatgaattatttcccagacgaggttatagagcacgtgtttgacttcgtagcttctcacaaagacaggaactcgatatctctggtctgcaaatcatggcacaagatcgagaggtttagtaggaaggaagtgttcatcggaaactgctacgcgattaacccggagaggttgatcaggaggtttccatgtctcaaatccttaactttaaaagggaagcctcattttgcagacttcaacttggttcctcatgaatggggaggtttcgtgcatccttggattgaagctttggctagaagccgtgtgggacttgaggagctgaggttgaagcggatggttgtaacagatgaaagcttggaccttctttcacgttcttttgcaaatttcaagtctttggttcttgttagctgtgaagggtttaccactgatggcttagcttccattgccgctaattgcaggcatcttcgtgagctggacttgcaagagaatgagattgatgatcatagaggtcaatggctgaactgttttccagatagctgcactactcttatgtcgttgaatttcgcttgccttaaaggagagaccaatgttgctgctttagaaaggcttgttgctaggtcaccaaacctgaagagcttgaagttaaaccgtgcagtaccgcttgacgcactcgcaaggttaatgagttgtgcgccgcagctagtggacttaggagtagggtcttatgagaatgagccagatcctgaatcttttgcaaaactcatgactgccattaagaaatacacatcgttaaggagcttgtctggctttttagaggttgctccactctgcctcccagcgttctacccaatttgccaaaaccttatctctttgaacctcagctatgcagctgaaatccaaggcaaccacctcattaagcttattcagctttgcaagagacttcaacgattatggatattggatagtattggtgacaaaggacttgcggttgtcgctgccacatgtaaagagttacaagagcttagagtttttccctctgatgtacatggtgaagaagataacaacgcatctgtgactgaggttggactagtcgccatttccgcaggttgccctaaacttcattcgattctgtacttctgcaaacagatgacaaacgcagcgctcatagccgtggccaaaaactgtccaaacttcatccggttcaggctatgcattctcgagccacacaaacctgaccacattacatttcaatcactggacgagggctttggtgcaatcgtacaagcttgcaagggtctaagacggctctctgtctccggtctcttaaccgatcaagtctttctctacatcggtatgtacgcggaacagctcgagatgctttcgatagcttttgcgggggacactgacaaaggaatgctctatgtgttgaatggatgcaaaaaaatgaggaagctggagataagggacagtccttttgggaacgctgcgcttcttgctgacgtgggtaggtacgaaacaatgcgatccctttggatgtcgtcttgtgaagtaacactcggtggctgcaagaggctcgcgcagaattcgccacggcttaacgtagagatcatcaacgagaatgagaataatgggatggaacagaatgaagaagatgaaagagagaaggttgataaactttacctctaccgaacagtggttgggactagaaaagatgcaccaccatatgttaggattctttagtctctttgcaccttcatgtgttttcaaacttttctttgtactagtttttgccttttatcaaacttggaacaaatac

SEQ ID NO: 49824 - protein, 577 aa, Arabidopsis thaliana
  peptide (1)..(577): Ceres Seq. ID no. 12591110
  misc_feature (1)..(46): Pfam Name: F-box domain Pfam Description: F-box domain
  misc_feature (4)..(577): Homolog of NCBI NO: 18423092 NR Description: transport inhibitor response 1 (TIR1), putative
  misc_feature (4)..(577): Homolog of NCBI NO: 13249030 NR Description: F-box containing protein TIR1
  misc_feature (4)..(574): Homolog of NCBI NO: 15027885 NR Description: putative F-box protein GRR1 protein 1, AtFBL18
  misc_feature (5)..(577): Homolog of NCBI NO: 12083523 NR Description: similar to Arabidopsis thaliana transport
  misc_feature (4)..(574): Homolog of NCBI NO: 12658970 NR Description: GRR1-like protein 1 [Arabidopsis thaliana]
  misc_feature (4)..(574): Homolog of NCBI NO: 18412177 NR Description: F-box protein GRR1-like protein 1, AtFBL18
  misc_feature (4)..(574): Homolog of NCBI NO: 18412567 NR Description: transport inhibitor response 1 (TIR1), AtFBL1
  misc_feature (1)..(577): Homolog of NCBI NO: 21740736 NR Description: OSJNBa0072K14.1 [Oryza sativa (japonica
  misc_feature (1)..(577): Homolog of NCBI NO: 18405102 NR Description: transport inhibitor response 1 (TIR1), putative
  misc_feature (1)..(577): Homolog of NCBI NO: 18391439 NR Description: transport inhibitor response 1 (TIR1), putative
MNYFPDEVIEHVFDFVASHKDRNSISLVCKSWHKIERFSRKEVFIGNCYAINPERLIRRFPCLKSLTLKGKPHFADFNLVPHEWGGFVHPWIEALARSRVGLEELRLKRMVVTDESLDLLSRSFANFKSLVLVSCEGFTTDGLASIAANCRHLRELDLQENEIDDHRGQWLNCFPDSCTTLMSLNFACLKGETNVAALERLVARSPNLKSLKLNRAVPLDALARLMSCAPQLVDLGVGSYENEPDPESFAKLMTAIKKYTSLRSLSGFLEVAPLCLPAFYPICQNLISLNLSYAAEIQGNHLIKLIQLCKRLQRLWILDSIGDKGLAVVAATCKELQELRVFPSDVHGEEDNNASVTEVGLVAISAGCPKLHSILYFCKQMTNAALIAVAKNCPNFIRFRLCILEPHKPDHITFQSLDEGFGAIVQACKGLRRLSVSGLLTDQVFLYIGMYAEQLEMLSIAFAGDTDKGMLYVLNGCKKMRKLEIRDSPFGNAALLADVGRYETMRSLWMSSCEVTLGGCKRLAQNSPRLNVEIINENENNGMEQNEEDEREKVDKLYLYRTVVGTRKDAPPYVRIL

SEQ ID NO: 49825 - protein, 468 aa, Arabidopsis thaliana
  peptide (1)..(468): Ceres Seq. ID no. 12591111
  misc_feature (1)..(468): Homolog of NCBI NO: 18423092 NR Description: transport inhibitor response 1 (TIR1), putative
  misc_feature (1)..(468): Homolog of NCBI NO: 13249030 NR Description: F-box containing protein TIR1
  misc_feature (1)..(465): Homolog of NCBI NO: 15027885 NR Description: putative F-box protein GRR1 protein 1, AtFBL18
  misc_feature (1)..(468): Homolog of NCBI NO: 12083523 NR Description: similar to Arabidopsis thaliana transport
  misc_feature (1)..(465): Homolog of NCBI NO: 12658970 NR Description: GRR1-like protein 1 [Arabidopsis thaliana]
  misc_feature (1)..(465): Homolog of NCBI NO: 18412177 NR Description: F-box protein GRR1-like protein 1, AtFBL18
  misc_feature (1)..(465): Homolog of NCBI NO: 18412567 NR Description: transport inhibitor response 1 (TIR1), AtFBL1
  misc_feature (1)..(468): Homolog of NCBI NO: 21740736 NR Description: OSJNBa0072K14.1 [Oryza sativa (japonica
  misc_feature (1)..(468): Homolog of NCBI NO: 18405102 NR Description: transport inhibitor response 1 (TIR1), putative
  misc_feature (1)..(468): Homolog of NCBI NO: 18391439 NR Description: transport inhibitor response 1 (TIR1), putative
MVVTDESLDLLSRSFANFKSLVLVSCEGFTTDGLASIAANCRHLRELDLQENEIDDHRGQWLNCFPDSCTTLMSLNFACLKGETNVAALERLVARSPNLKSLKLNRAVPLDALARLMSCAPQLVDLGVGSYENEPDPESFAKLMTAIKKYTSLRSLSGFLEVAPLCLPAFYPICQNLISLNLSYAAEIQGNHLIKLIQLCKRLQRLWILDSIGDKGLAVVAATCKELQELRVFPSDVHGEEDNNASVTEVGLVAISAGCPKLHSILYFCKQMTNAALIAVAKNCPNFIRFRLCILEPHKPDHITFQSLDEGFGAIVQACKGLRRLSVSGLLTDQVFLYIGMYAEQLEMLSIAFAGDTDKGMLYVLNGCKKMRKLEIRDSPFGNAALLADVGRYETMRSLWMSSCEVTLGGCKRLAQNSPRLNVEIINENENNGMEQNEEDEREKVDKLYLYRTVVGTRKDAPPYVRIL

SEQ ID NO: 49826 - protein, 396 aa, Arabidopsis thaliana
  peptide (1)..(396): Ceres Seq. ID no. 12591112
  misc_feature (1)..(396): Homolog of NCBI NO: 18423092 NR Description: transport inhibitor response 1 (TIR1), putative
  misc_feature (1)..(396): Homolog of NCBI NO: 13249030 NR Description: F-box containing protein TIR1
  misc_feature (1)..(393): Homolog of NCBI NO: 15027885 NR Description: putative F-box protein GRR1 protein 1, AtFBL18
  misc_feature (1)..(396): Homolog of NCBI NO: 12083523 NR Description: similar to Arabidopsis thaliana transport
  misc_feature (1)..(393): Homolog of NCBI NO: 12658970 NR Description: GRR1-like protein 1 [Arabidopsis thaliana]
  misc_feature (1)..(393): Homolog of NCBI NO: 18412177 NR Description: F-box protein GRR1-like protein 1, AtFBL18
  misc_feature (1)..(393): Homolog of NCBI NO: 18412567 NR Description: transport inhibitor response 1 (TIR1), AtFBL1
  misc_feature (1)..(396): Homolog of NCBI NO: 21740736 NR Description: OSJNBa0072K14.1 [Oryza sativa (japonica
  misc_feature (1)..(396): Homolog of NCBI NO: 18405102 NR Description: transport inhibitor response 1 (TIR1), putative
  misc_feature (1)..(396): Homolog of NCBI NO: 18391439 NR Description: transport inhibitor response 1 (TIR1), putative
MSLNFACLKGETNVAALERLVARSPNLKSLKLNRAVPLDALARLMSCAPQLVDLGVGSYENEPDPESFAKLMTAIKKYTSLRSLSGFLEVAPLCLPAFYPICQNLISLNLSYAAEIQGNHLIKLIQLCKRLQRLWILDSIGDKGLAVVAATCKELQELRVFPSDVHGEEDNNASVTEVGLVAISAGCPKLHSILYFCKQMTNAALIAVAKNCPNFIRFRLCILEPHKPDHITFQSLDEGFGAIVQACKGLRRLSVSGLLTDQVFLYIGMYAEQLEMLSIAFAGDTDKGMLYVLNGCKKMRKLEIRDSPFGNAALLADVGRYETMRSLWMSSCEVTLGGCKRLAQNSPRLNVEIINENENNGMEQNEEDEREKVDKLYLYRTVVGTRKDAPPYVRIL

SEQ ID NO: 49827 - DNA, 1049 bp, Arabidopsis thaliana
  misc_feature (1)..(1049): Ceres Seq. ID no. 13647430
  misc_feature: MA Experiment ID: 108434 Result: Up-regulated in Transcription
  misc_feature: MA Experiment 108434 PARAMETER Experiment Name: At_Root_Tips_cDNA_P Parameter: Tissue Value: Root Tips
  misc_feature: MA Experiment ID: 108461 Result: Down-regulated in Transcription
  misc_feature: MA Experiment 108461 PARAMETER Experiment Name: At_Germinating_Seeds_cDNA_P Parameter: Age (day) Value: 1 vs. 0
  misc_feature: MA Experiment 108461 PARAMETER Experiment Name: At_Germinating_Seeds_cDNA_P Parameter: Tissue Value: Germinating Seeds
  misc_feature: MA Experiment ID: 108462 Result: Down-regulated in Transcription
  misc_feature: MA Experiment 108462 PARAMETER Experiment Name: At_Germinating_Seeds_cDNA_P Parameter: Age (day) Value: 2 vs. 0
  misc_feature: MA Experiment 108462 PARAMETER Experiment Name: At_Germinating_Seeds_cDNA_P Parameter: Tissue Value: Germinating Seeds
  misc_feature: MA Experiment ID: 108463 Result: Down-regulated in Transcription
  misc_feature: MA Experiment 108463 PARAMETER Experiment Name: At_Germinating_Seeds_cDNA_P Parameter: Age (day) Value: 3 vs. 0
  misc_feature: MA Experiment 108463 PARAMETER Experiment Name: At_Germinating_Seeds_cDNA_P Parameter: Tissue Value: Germinating Seeds
  misc_feature: MA Experiment ID: 108464 Result: Down-regulated in Transcription
  misc_feature: MA Experiment 108464 PARAMETER Experiment Name: At_Germinating_Seeds_cDNA_P Parameter: Age (day) Value: 4 vs. 0
  misc_feature: MA Experiment 108464 PARAMETER Experiment Name: At_Germinating_Seeds_cDNA_P Parameter: Tissue Value: Germinating Seeds
  misc_feature: MA Experiment ID: 108595 Result: Down-regulated in Transcription
  misc_feature: MA Experiment 108595 PARAMETER Experiment Name: At_Ler-pi_Ovule_cDNA_P Parameter: Plant Line Value: null
  misc_feature: MA Experiment ID: 20000265 Result: Up-regulated in Transcription
  misc_feature: MA Experiment 20000265 PARAMETER Experiment Name: At_Open_Flower_P Parameter: Age (day) Value: 21
  misc_feature: MA Experiment 20000265 PARAMETER Experiment Name: At_Open_Flower_P Parameter: Plant Line Value: WS
  misc_feature: MA Experiment 20000265 PARAMETER Experiment Name: At_Open_Flower_P Parameter: Tissue Value: Closed Flower vs. Whole Plant
agaaaccttgagagcttaaaaattcttcacttgggtctcttctctctctcttctcttgcgaccattccgttgttcgatccatatatcaaagcttgatttagttggttttcaatgggggacagtcagtactcgttttctctcaccaccttcagcccatcagggaagctggttcagatagaacatgccctaacagctgttggatcaggccaaacatcacttggaattaaagcttcaaatggagttgtcattgcaactgaaaagaaacttccttctatattggttgatgaagcgtctgttcaaaagattcaacatttgactcccaacattggaactgtttacagtggtatgggtcctgatttccgagttcttgtgcgaaagagtaggaagcaggctgagcaatatctccgtctgtacaaggaacccatccccgttactcaacttgtaagggaaactgccacggtgatgcaagagttcactcaatcgggtggtgttaggccgtttggagtttctctactggtggctgggtatgatgacaagggtccacaactgtatcaagtggatccatctggctcttatttctcatggaaagcttctgcaatgggaaagaatgtttcgaatgcaaagacgtttcttgagaagaggtacacagaagatatggaacttgatgatgccattcacacggcaatattgacattgaaggaaggtttcgagggagaaatctcaagcaaaaacatcgagattggcaaaatcggtactgacaaagttttcagggtgctaacaccagcagaaatcgatgattacttggctgaagtcgagtaaaactttcacttaaccgtgcaaccaacctgatttgaatctcagtatactctcagagttgatggttcttgcttttgtaaaacttttggaatttgttaaggagactcgtgacccaataatttagaatatgttttttcactcatttaaacgtctgttgtgaaaattcagtttcatataaccaagtttcatgcacacaaaaaaaaaaaaaaaaaaaactcgagggggggcccggt

SEQ ID NO: 49828 - protein, 235 aa, Arabidopsis thaliana
  peptide (1)..(235): Ceres Seq. ID no. 13647431
  misc_feature (1)..(234): Homolog of NCBI NO: 4506181 NR Description: proteasome alpha 2 subunit
  misc_feature (1)..(234): Homolog of NCBI NO: 19168518 NR Description: PROSAg25 protein [Anopheles gambiae]
  misc_feature (1)..(234): Homolog of NCBI NO: 31241267 NR Description: ENSANGP00000011336 [Anopheles gambiae]
  misc_feature (1)..(234): Homolog of NCBI NO: 130852 NR Description: Proteasome subunit alpha type 2 (Proteasome C3) (Macropain subunit C3) (Multicatalytic endopeptidase complex
  misc_feature (1)..(234): Homolog of NCBI NO: 6093780 NR Description: Proteasome subunit alpha type 2
  misc_feature (1)..(235): Homolog of NCBI NO: 7435867 NR Description: hypothetical protein YUP8H12R.19 - Arabidopsis
  misc_feature (1)..(227): Homolog of NCBI NO: 7435868 NR Description: proteasome chain - rice
  misc_feature (1)..(235): Homolog of NCBI NO: 12229921 NR Description: Proteasome subunit alpha type 2 (20S proteasome
  misc_feature (1)..(235): Homolog of NCBI NO: 15219257 NR Description: 20S proteasome alpha subunit B (PAB1)
  misc_feature (1)..(235): Homolog of NCBI NO: 15219317 NR Description: 20S proteasome alpha subunit B, putative
MGDSQYSFSLTTFSPSGKLVQIEHALTAVGSGQTSLGIKASNGVVIATEKKLPSILVDEASVQKIQHLTPNIGTVYSGMGPDFRVLVRKSRKQAEQYLRLYKEPIPVTQLVRETATVMQEFTQSGGVRPFGVSLLVAGYDDKGPQLYQVDPSGSYFSWKASAMGKNVSNAKTFLEKRYTEDMELDDAIHTAILTLKEGFEGEISSKNIEIGKIGTDKVFRVLTPAEIDDYLAEVE

SEQ ID NO: 49829 - protein, 157 aa, Arabidopsis thaliana
  peptide (1)..(157): Ceres Seq. ID no. 13647432
  misc_feature (1)..(156): Homolog of NCBI NO: 4506181 NR Description: proteasome alpha 2 subunit
  misc_feature (1)..(156): Homolog of NCBI NO: 19168518 NR Description: PROSAg25 protein [Anopheles gambiae]
  misc_feature (1)..(156): Homolog of NCBI NO: 31241267 NR Description: ENSANGP00000011336 [Anopheles gambiae]
  misc_feature (1)..(156): Homolog of NCBI NO: 130852 NR Description: Proteasome subunit alpha type 2 (Proteasome C3) (Macropain subunit C3) (Multicatalytic endopeptidase complex
  misc_feature (1)..(156): Homolog of NCBI NO: 6093780 NR Description: Proteasome subunit alpha type 2
  misc_feature (1)..(157): Homolog of NCBI NO: 7435867 NR Description: hypothetical protein YUP8H12R.19 - Arabidopsis
  misc_feature (1)..(149): Homolog of NCBI NO: 7435868 NR Description: proteasome chain - rice
  misc_feature (1)..(157): Homolog of NCBI NO: 12229921 NR Description: Proteasome subunit alpha type 2 (20S proteasome
  misc_feature (1)..(157): Homolog of NCBI NO: 15219257 NR Description: 20S proteasome alpha subunit B (PAB1)
  misc_feature (1)..(157): Homolog of NCBI NO: 15219317 NR Description: 20S proteasome alpha subunit B, putative
MGPDFRVLVRKSRKQAEQYLRLYKEPIPVTQLVRETATVMQEFTQSGGVRPFGVSLLVAGYDDKGPQLYQVDPSGSYFSWKASAMGKNVSNAKTFLEKRYTEDMELDDAIHTAILTLKEGFEGEISSKNIEIGKIGTDKVFRVLTPAEIDDYLAEVE

SEQ ID NO: 49830 - protein, 118 aa, Arabidopsis thaliana
  peptide (1)..(118): Ceres Seq. ID no. 13647433
  misc_feature (1)..(117): Homolog of NCBI NO: 4506181 NR Description: proteasome alpha 2 subunit
  misc_feature (1)..(117): Homolog of NCBI NO: 19168518 NR Description: PROSAg25 protein [Anopheles gambiae]
  misc_feature (1)..(117): Homolog of NCBI NO: 31241267 NR Description: ENSANGP00000011336 [Anopheles gambiae]
  misc_feature (1)..(117): Homolog of NCBI NO: 130852 NR Description: Proteasome subunit alpha type 2 (Proteasome C3) (Macropain subunit C3) (Multicatalytic endopeptidase complex
  misc_feature (1)..(117): Homolog of NCBI NO: 6093780 NR Description: Proteasome subunit alpha type 2
  misc_feature (1)..(118): Homolog of NCBI NO: 7435867 NR Description: hypothetical protein YUP8H12R.19 - Arabidopsis
  misc_feature (1)..(110): Homolog of NCBI NO: 7435868 NR Description: proteasome chain - rice
  misc_feature (1)..(118): Homolog of NCBI NO: 12229921 NR Description: Proteasome subunit alpha type 2 (20S proteasome
  misc_feature (1)..(118): Homolog of NCBI NO: 15219257 NR Description: 20S proteasome alpha subunit B (PAB1)
  misc_feature (1)..(118): Homolog of NCBI NO: 15219317 NR Description: 20S proteasome alpha subunit B, putative
MQEFTQSGGVRPFGVSLLVAGYDDKGPQLYQVDPSGSYFSWKASAMGKNVSNAKTFLEKRYTEDMELDDAIHTAILTLKEGFEGEISSKNIEIGKIGTDKVFRVLTPAEIDDYLAEVE

SEQ ID NO: 49831 - DNA, 416 bp, Arabidopsis thaliana
  misc_feature (1)..(416): Ceres Seq. ID no. 11405393
  misc_feature: MA Experiment ID: 20000314 Result: Down-regulated in Transcription
  misc_feature: MA Experiment 20000314 PARAMETER Experiment Name: At_14day_Shoots-Roots_Sub_P Parameter: Age (day) Value: 14
  misc_feature: MA Experiment 20000314 PARAMETER Experiment Name: At_14day_Shoots-Roots_Sub_P Parameter: Organism Value: A. thaliana
  misc_feature: MA Experiment 20000314 PARAMETER Experiment Name: At_14day_Shoots-Roots_Sub_P Parameter: Plant Line Value: WS
  misc_feature: MA Experiment 20000314 PARAMETER Experiment Name: At_14day_Shoots-Roots_Sub_P Parameter: Tissue Value: Roots vs. Whole Plant
  misc_feature: MA Experiment ID: 20000315 Result: Down-regulated in Transcription
  misc_feature: MA Experiment 20000315 PARAMETER Experiment Name: At_14day_Shoots-Roots_Sub_P Parameter: Age (day) Value: 14
  misc_feature: MA Experiment 20000315 PARAMETER Experiment Name: At_14day_Shoots-Roots_Sub_P Parameter: Organism Value: A. thaliana
  misc_feature: MA Experiment 20000315 PARAMETER Experiment Name: At_14day_Shoots-Roots_Sub_P Parameter: Plant Line Value: WS
  misc_feature: MA Experiment 20000315 PARAMETER Experiment Name: At_14day_Shoots-Roots_Sub_P Parameter: Tissue Value: Shoots vs. Whole Plant
  misc_feature: MA Experiment ID: 20000327 Result: Up-regulated in Transcription
  misc_feature: MA Experiment 20000327 PARAMETER Experiment Name: At_42deg_Heat_Sub_P Parameter: Age (day) Value: 14
  misc_feature: MA Experiment 20000327 PARAMETER Experiment Name: At_42deg_Heat_Sub_P Parameter: Organism Value: A. thaliana
  misc_feature: MA Experiment 20000327 PARAMETER Experiment Name: At_42deg_Heat_Sub_P Parameter: Plant Line Value: WS
  misc_feature: MA Experiment 20000327 PARAMETER Experiment Name: At_42deg_Heat_Sub_P Parameter: Temperature (deg C) Value: 42 vs. 22
  misc_feature: MA Experiment 20000327 PARAMETER Experiment Name: At_42deg_Heat_Sub_P Parameter: Timepoint (hr) Value: 1
  misc_feature: MA Experiment 20000327 PARAMETER Experiment Name: At_42deg_Heat_Sub_P Parameter: Tissue Value: Aerial
  misc_feature: MA Experiment ID: 20000328 Result: Up-regulated in Transcription
  misc_feature: MA Experiment 20000328 PARAMETER Experiment Name: At_42deg_Heat_Sub_P Parameter: Age (day) Value: 14
  misc_feature: MA Experiment 20000328 PARAMETER Experiment Name: At_42deg_Heat_Sub_P Parameter: Organism Value: A. thaliana
  misc_feature: MA Experiment 20000328 PARAMETER Experiment Name: At_42deg_Heat_Sub_P Parameter: Plant Line Value: WS
  misc_feature: MA Experiment 20000328 PARAMETER Experiment Name: At_42deg_Heat_Sub_P Parameter: Temperature (deg C) Value: 42 vs. 22
  misc_feature: MA Experiment 20000328 PARAMETER Experiment Name: At_42deg_Heat_Sub_P Parameter: Timepoint (hr) Value: 6
  misc_feature: MA Experiment 20000328 PARAMETER Experiment Name: At_42deg_Heat_Sub_P Parameter: Tissue Value: Aerial
  misc_feature: MA Experiment ID: 20000329 Result: Up-regulated in Transcription
  misc_feature: MA Experiment 20000329 PARAMETER Experiment Name: At_4deg_Cold_Sub_P Parameter: Age (day) Value: 14
  misc_feature: MA Experiment 20000329 PARAMETER Experiment Name: At_4deg_Cold_Sub_P Parameter: Organism Value: A. thaliana
  misc_feature: MA Experiment 20000329 PARAMETER Experiment Name: At_4deg_Cold_Sub_P Parameter: Plant Line Value: WS
  misc_feature: MA Experiment 20000329 PARAMETER Experiment Name: At_4deg_Cold_Sub_P Parameter: Temperature (deg C) Value: 4 vs. 22
  misc_feature: MA Experiment 20000329 PARAMETER Experiment Name: At_4deg_Cold_Sub_P Parameter: Timepoint (hr) Value: 6
  misc_feature: MA Experiment 20000329 PARAMETER Experiment Name: At_4deg_Cold_Sub_P Parameter: Tissue Value: Aerial
  misc_feature: MA Experiment ID: 20000332 Result: Up-regulated in Transcription
  misc_feature: MA Experiment 20000332 PARAMETER Experiment Name: At_4deg_Cold_Sub_P Parameter: Age (day) Value: 14
  misc_feature: MA Experiment 20000332 PARAMETER Experiment Name: At_4deg_Cold_Sub_P Parameter: Organism Value: A. thaliana
  misc_feature: MA Experiment 20000332 PARAMETER Experiment Name: At_4deg_Cold_Sub_P Parameter: Plant Line Value: WS
  misc_feature: MA Experiment 20000332 PARAMETER Experiment Name: At_4deg_Cold_Sub_P Parameter: Temperature (deg C) Value: 4 vs. 22
  misc_feature: MA Experiment 20000332 PARAMETER Experiment Name: At_4deg_Cold_Sub_P Parameter: Timepoint (hr) Value: 2
  misc_feature: MA Experiment 20000332 PARAMETER Experiment Name: At_4deg_Cold_Sub_P Parameter: Tissue Value: Aerial
  misc_feature: MA Experiment ID: 20000440 Result: Down-regulated in Transcription
  misc_feature: MA Experiment 20000440 PARAMETER Experiment Name: At_Closed-Flower__Sub_P Parameter: Tissue Value: Closed Flower vs. Whole Plant
  misc_feature: Pfam Name: TPP_enzyme_C Pfam Description: Thiamine pyrophosphate enzyme, C-terminal TPP binding domain
aaagaactggaactacacagcttttgttgaggccatacacaatggagaaggaaaatgctggactgccaaggtgagatgcgaggaggagctagtgaaagcaatcaacacggcaaccaatgaggaaaaagagagcttttgtttcattgaagtgatagtgcacaaagacgatacaagcaaggaacttttggagtggggctctagagtctctgctgctaatagtcgtcccccaaatccgcagtagagtatatagatgcactcaacttatatatatatatatgtcagatttggtagtgtcttcgccgttttatgtaaagtagtgtgtatccttttacatccatctggatgggaaaacaatgtgtgtccccttgggatataaactgtttgagtgcctaaatacgaactcgtttcctctgctc

SEQ ID NO: 49832 - protein, 79 aa, Arabidopsis thaliana
  peptide (1)..(79): Ceres Seq. ID no. 11405394
  misc_feature: Pfam Name: TPP_enzyme_C Pfam Description: Thiamine pyrophosphate enzyme, C-terminal TPP binding domain
  misc_feature (1)..(79): Homolog of NCBI NO: 17225598 NR Description: pyruvate decarboxylase [Fragaria x ananassa]
  misc_feature (1)..(79): Homolog of NCBI NO: 15240950 NR Description: pyruvate decarboxylase-like protein; protein id:
  misc_feature (1)..(79): Homolog of NCBI NO: 28393679 NR Description: putative pyruvate decarboxylase [Arabidopsis
  misc_feature (1)..(79): Homolog of NCBI NO: 15240952 NR Description: pyruvate decarboxylase-like protein; protein id:
  misc_feature (1)..(79): Homolog of NCBI NO: 20800444 NR Description: pyruvate decarboxylase protein [Fragaria x
  misc_feature (1)..(79): Homolog of NCBI NO: 24745919 NR Description: pyruvate decarboxylase [Solanum tuberosum]
  misc_feature (1)..(79): Homolog of NCBI NO: 10121330 NR Description: pyruvate decarboxylase [Fragaria x ananassa]
  misc_feature (1)..(79): Homolog of NCBI NO: 1616787 NR Description: pyruvate decarboxylase [Arabidopsis thaliana]
  misc_feature (1)..(79): Homolog of NCBI NO: 20268786 NR Description: putative pyruvate decarboxylase [Arabidopsis
  misc_feature (1)..(79): Homolog of NCBI NO: 15240423 NR Description: pyruvate decarboxylase (gb|AAB16855.1); protein
KNWNYTAFVEAIHNGEGKCWTAKVRCEEELVKAINTATNEEKESFCFIEVIVHKDDTSKELLEWGSRVSAANSRPPNPQ

SEQ ID NO: 49833 - protein, 41 aa, Arabidopsis thaliana
  peptide (1)..(41): Ceres Seq. ID no. 11405395
  misc_feature: Pfam Name: TPP_enzyme_C Pfam Description: Thiamine pyrophosphate enzyme, C-terminal TPP binding domain
MHSTYIYIYVRFGSVFAVLCKVVCILLHPSGWENNVCPLGI

SEQ ID NO: 49834 - DNA, 1196 bp, Arabidopsis thaliana
  misc_feature (1)..(1196): Ceres Seq. ID no. 14302949
  misc_feature: MA Experiment ID: 20000171 Result: Down-regulated in Transcription
  misc_feature: MA Experiment 20000171 PARAMETER Experiment Name: At_42deg_Heat_P Parameter: Age (day) Value: 14
  misc_feature: MA Experiment 20000171 PARAMETER Experiment Name: At_42deg_Heat_P Parameter: Organism Value: A. thaliana
  misc_feature: MA Experiment 20000171 PARAMETER Experiment Name: At_42deg_Heat_P Parameter: Plant Line Value: WS
  misc_feature: MA Experiment 20000171 PARAMETER Experiment Name: At_42deg_Heat_P Parameter: Temperature (deg C) Value: 42 vs. 22
  misc_feature: MA Experiment 20000171 PARAMETER Experiment Name: At_42deg_Heat_P Parameter: Timepoint (hr) Value: 1
  misc_feature: MA Experiment 20000171 PARAMETER Experiment Name: At_42deg_Heat_P Parameter: Tissue Value: Aerial
  misc_feature: MA Experiment ID: 20000173 Result: Down-regulated in Transcription
  misc_feature: MA Experiment 20000173 PARAMETER Experiment Name: At_42deg_Heat_P Parameter: Age (day) Value: 14
  misc_feature: MA Experiment 20000173 PARAMETER Experiment Name: At_42deg_Heat_P Parameter: Organism Value: A. thaliana
  misc_feature: MA Experiment 20000173 PARAMETER Experiment Name: At_42deg_Heat_P Parameter: Plant Line Value: WS
  misc_feature: MA Experiment 20000173 PARAMETER Experiment Name: At_42deg_Heat_P Parameter: Temperature (deg C) Value: 42 vs. 22
  misc_feature: MA Experiment 20000173 PARAMETER Experiment Name: At_42deg_Heat_P Parameter: Timepoint (hr) Value: 6
  misc_feature: MA Experiment 20000173 PARAMETER Experiment Name: At_42deg_Heat_P Parameter: Tissue Value: Aerial
  misc_feature: MA Experiment ID: 20000179 Result: Up-regulated in Transcription
  misc_feature: MA Experiment 20000179 PARAMETER Experiment Name: At_Germinating_Seeds_P Parameter: Age (hr) Value: 6 vs. 0
  misc_feature: MA Experiment 20000179 PARAMETER Experiment Name: At_Germinating_Seeds_P Parameter: Tissue Value: Germinating Seeds
  misc_feature: MA Experiment ID: 20000180 Result: Up-regulated in Transcription
  misc_feature: MA Experiment 20000180 PARAMETER Experiment Name: At_Germinating_Seeds_P Parameter: Age (hr) Value: 24 vs. 0
  misc_feature: MA Experiment 20000180 PARAMETER Experiment Name: At_Germinating_Seeds_P Parameter: Tissue Value: Germinating Seeds
  misc_feature: MA Experiment ID: 20000182 Result: Down-regulated in Transcription
  misc_feature: MA Experiment 20000182 PARAMETER Experiment Name: At_2mM_SA_P Parameter: Age (day) Value: 14
  misc_feature: MA Experiment 20000182 PARAMETER Experiment Name: At_2mM_SA_P Parameter: Organism Value: A. thaliana
  misc_feature: MA Experiment 20000182 PARAMETER Experiment Name: At_2mM_SA_P Parameter: Plant Line Value: WS
  misc_feature: MA Experiment 20000182 PARAMETER Experiment Name: At_2mM_SA_P Parameter: Timepoint (hr) Value: 6
  misc_feature: MA Experiment 20000182 PARAMETER Experiment Name: At_2mM_SA_P Parameter: Tissue Value: Aerial
  misc_feature: MA Experiment 20000182 PARAMETER Experiment Name: At_2mM_SA_P Parameter: Treatment Value: 2mM SA vs. No Treatment
  misc_feature: MA Experiment ID: 20000234 Result: Up-regulated in Transcription
  misc_feature: MA Experiment 20000234 PARAMETER Experiment Name: At_Siliques_P Parameter: Age (day) Value: 21
  misc_feature: MA Experiment 20000234 PARAMETER Experiment Name: At_Siliques_P Parameter: Organism Value: A. thaliana
  misc_feature: MA Experiment 20000234 PARAMETER Experiment Name: At_Siliques_P Parameter: Plant Line Value: WS
  misc_feature: MA Experiment 20000234 PARAMETER Experiment Name: At_Siliques_P Parameter: Tissue Value: Less Than 5mm Siliques vs. Whole Plant
  misc_feature: MA Experiment ID: 20000235 Result: Up-regulated in Transcription
  misc_feature: MA Experiment 20000235 PARAMETER Experiment Name: At_Siliques_P Parameter: Age (day) Value: 21
  misc_feature: MA Experiment 20000235 PARAMETER Experiment Name: At_Siliques_P Parameter: Organism Value: A. thaliana
  misc_feature: MA Experiment 20000235 PARAMETER Experiment Name: At_Siliques_P Parameter: Plant Line Value: WS
  misc_feature: MA Experiment 20000235 PARAMETER Experiment Name: At_Siliques_P Parameter: Tissue Value: 5-10mm Siliques vs. Whole Plant
  misc_feature: MA Experiment ID: 20000265 Result: Up-regulated in Transcription
  misc_feature: MA Experiment 20000265 PARAMETER Experiment Name: At_Open_Flower_P Parameter: Age (day) Value: 21
  misc_feature: MA Experiment 20000265 PARAMETER Experiment Name: At_Open_Flower_P Parameter: Plant Line Value: WS
  misc_feature: MA Experiment 20000265 PARAMETER Experiment Name: At_Open_Flower_P Parameter: Tissue Value: Closed Flower vs. Whole Plant
  misc_feature: MA Experiment ID: 20000436 Result: Down-regulated in Transcription
  misc_feature: MA Experiment 20000436 PARAMETER Experiment Name: At_Drought_P Parameter: Age (day) Value: 7
  misc_feature: MA Experiment 20000436 PARAMETER Experiment Name: At_Drought_P Parameter: Organism Value: A. thaliana
  misc_feature: MA Experiment 20000436 PARAMETER Experiment Name: At_Drought_P Parameter: Plant Line Value: WS
  misc_feature: MA Experiment 20000436 PARAMETER Experiment Name: At_Drought_P Parameter: Timepoint (hr) Value: 12
  misc_feature: MA Experiment 20000436 PARAMETER Experiment Name: At_Drought_P Parameter: Tissue Value: Whole Plant
  misc_feature: MA Experiment 20000436 PARAMETER Experiment Name: At_Drought_P Parameter: Treatment Value: Drought vs. No Drought
  misc_feature: MA Experiment ID: 20000437 Result: Down-regulated in Transcription
  misc_feature: MA Experiment 20000437 PARAMETER Experiment Name: At_Drought_P Parameter: Age (day) Value: 8
  misc_feature: MA Experiment 20000437 PARAMETER Experiment Name: At_Drought_P Parameter: Organism Value: A. thaliana
  misc_feature: MA Experiment 20000437 PARAMETER Experiment Name: At_Drought_P Parameter: Plant Line Value: WS
  misc_feature: MA Experiment 20000437 PARAMETER Experiment Name: At_Drought_P Parameter: Timepoint (hr) Value: 24
  misc_feature: MA Experiment 20000437 PARAMETER Experiment Name: At_Drought_P Parameter: Tissue Value: Whole Plant
  misc_feature: MA Experiment 20000437 PARAMETER Experiment Name: At_Drought_P Parameter: Treatment Value: Drought vs. No Drought
  misc_feature: MA Experiment ID: 20001248 Result: Down-regulated in Transcription
  misc_feature: MA Experiment 20001248 PARAMETER Experiment Name: At_Far-red-induction_P Parameter: Age (day) Value: 7
  misc_feature: MA Experiment 20001248 PARAMETER Experiment Name: At_Far-red-induction_P Parameter: Light Value: Far-red vs. White
  misc_feature: MA Experiment 20001248 PARAMETER Experiment Name: At_Far-red-induction_P Parameter: Organism Value: A. thaliana
  misc_feature: MA Experiment 20001248 PARAMETER Experiment Name: At_Far-red-induction_P Parameter: Plant Line Value: Columbia
  misc_feature: MA Experiment 20001248 PARAMETER Experiment Name: At_Far-red-induction_P Parameter: Timepoint (hr) Value: 4
  misc_feature: MA Experiment 20001248 PARAMETER Experiment Name: At_Far-red-induction_P Parameter: Tissue Value: Whole Plant
  misc_feature: MA Experiment ID: 20001450 Result: Down-regulated in Transcription
  misc_feature: MA Experiment 20001450 PARAMETER Experiment Name: At_Far-red-induction_P Parameter: Age (day) Value: 7
  misc_feature: MA Experiment 20001450 PARAMETER Experiment Name: At_Far-red-induction_P Parameter: Light Value: Far-red vs. White
  misc_feature: MA Experiment 20001450 PARAMETER Experiment Name: At_Far-red-induction_P Parameter: Organism Value: A. thaliana
  misc_feature: MA Experiment 20001450 PARAMETER Experiment Name: At_Far-red-induction_P Parameter: Plant Line Value: Columbia
  misc_feature: MA Experiment 20001450 PARAMETER Experiment Name: At_Far-red-induction_P Parameter: Timepoint (hr) Value: 8
  misc_feature: MA Experiment 20001450 PARAMETER Experiment Name: At_Far-red-induction_P Parameter: Tissue Value: Whole Plant
  misc_feature: MA Experiment ID: 20001560 Result: Up-regulated in Transcription
  misc_feature: MA Experiment 20001560 PARAMETER Experiment Name: At_Drought_Soil_Dry_P Parameter: Age (day) Value: 28
  misc_feature: MA Experiment 20001560 PARAMETER Experiment Name: At_Drought_Soil_Dry_P Parameter: Organism Value: A. thaliana
  misc_feature: MA Experiment 20001560 PARAMETER Experiment Name: At_Drought_Soil_Dry_P Parameter: Plant Line Value: WS
  misc_feature: MA Experiment 20001560 PARAMETER Experiment Name: At_Drought_Soil_Dry_P Parameter: Post Timepoint (hr) Value: None
  misc_feature: MA Experiment 20001560 PARAMETER Experiment Name: At_Drought_Soil_Dry_P Parameter: Post-Treatment Value: None
  misc_feature: MA Experiment 20001560 PARAMETER Experiment Name: At_Drought_Soil_Dry_P Parameter: Timepoint (day) Value: 14
  misc_feature: MA Experiment 20001560 PARAMETER Experiment Name: At_Drought_Soil_Dry_P Parameter: Treatment Value: Drought vs. No Drought
  misc_feature: MA Experiment ID: 20001906 Result: Down-regulated in Transcription
  misc_feature: MA Experiment 20001906 PARAMETER Experiment Name: At_Drought_Reproduction_P Parameter: Age (day) Value: 35
  misc_feature: MA Experiment 20001906 PARAMETER Experiment Name: At_Drought_Reproduction_P Parameter: Organism Value: A. thaliana
  misc_feature: MA Experiment 20001906 PARAMETER Experiment Name: At_Drought_Reproduction_P Parameter: Plant Line Value: WS
  misc_feature: MA Experiment 20001906 PARAMETER Experiment Name: At_Drought_Reproduction_P Parameter: Timepoint (day) Value: 5
  misc_feature: MA Experiment 20001906 PARAMETER Experiment Name: At_Drought_Reproduction_P Parameter: Tissue Value: Siliques
  misc_feature: MA Experiment 20001906 PARAMETER Experiment Name: At_Drought_Reproduction_P Parameter: Treatment Value: Drought vs. No Drought
atcttcttcttctacttcttattaagctccattgggtttagagattctggtgtataaactgctaatgacgagtaaccttatccagccaccatcaatggcagcttcacgaggagcaatctcgagaagaacaggaaacgtgaaagtattagtctctttcaccagttctaatagcaaaacgctgagttttagtgacaactcatttaggctcagacccatgttcatcgggaaagtcacagaacagagttcttgctcctctttaaatgaacaacaacaagatgaagaacaagaacaagaagaagaagagattacagtttctcatataaaagaagagctctacgaagctctcaaagggatcaatagagggatattcggagttaagtcggataaaaagacagagatcgagggactggtgaagcttttggaatgtcggaatccgacaccggagccgactggagagttagacaagatcggaggttgctggaaactcatttacagtacaatcactgtattgggttctaaacgaactaaattgggtcttcgagatttcgtctctcttggtgatcttcttcaacagattgacattgctcagggcaaaacggtccatgtgttgaaattcgatgtccggggattgaatctactcgacggcgagtttagaatcgtcgcttccttcaagatctcgtccaaatcgagtgtagagattacttatgaaagctcaacgatcaaaccagaccagttgatgaacatatttaggaagaacatggatcttcttttgggaatcttcaaccccgagggactattcgagatttcatacttagacgaagatttacaagtagggagagatgggaaagggaatgtttttgttttggaaagaatagagaaaccttaaatcttttataccaaaatgtttactgcatttttttcaaactcatttccataagaagaaattgcttgtttctcaagaaaattttcaattttttctttggtttgggttatgaccatcagtatttcttctttcttttggtttaaaagaagaagaaaaatctagatttagtctttttttgtcttgggaatgttagtaactccagttcattcattattgacataattgattgctcaataatactgtataagtactattagcttgctcccatctgtttacttctaaatcctagtgttgatattacaacaaaagaact

SEQ ID NO: 49835 - protein, 273 aa, Arabidopsis thaliana
  peptide (1)..(273): Ceres Seq. ID no. 14302950
  misc_feature (84)..(208): Pfam Name: PAP_fibrillin Pfam Description: PAP_fibrillin
  misc_feature (104)..(272): Homolog of NCBI NO: 17232189 NR Description: fibrillin [Nostoc sp. PCC 7120]
  misc_feature (87)..(269): Homolog of NCBI NO: 17231810 NR Description: fibrillin [Nostoc sp. PCC 7120]
  misc_feature (87)..(269): Homolog of NCBI NO: 5020103 NR Description: fibrillin [Nostoc sp. PCC 8009]
  misc_feature (87)..(269): Homolog of NCBI NO: 23126201 NR Description: hypothetical protein [Nostoc punctiforme]
  misc_feature (87)..(270): Homolog of NCBI NO: 23041005 NR Description: hypothetical protein [Trichodesmium erythraeum
  misc_feature (87)..(270): Homolog of NCBI NO: 22297962 NR Description: fibrillin [Thermosynechococcus elongatus BP-1]
  misc_feature (87)..(270): Homolog of NCBI NO: 16329838 NR Description: fibrillin [Synechocystis sp. PCC 6803]
  misc_feature (5)..(249): Homolog of NCBI NO: 32489298 NR Description: OSJNBa0028I23.21 [Oryza sativa (japonica
  misc_feature (1)..(208): Homolog of NCBI NO: 9758960 NR Description: gene_id:MYH9.3~pir||S75332~similar to unknown
  misc_feature (1)..(273): Homolog of NCBI NO: 30682868 NR Description: plastid-lipid associated protein PAP/fibrillin
MTSNLIQPPSMAASRGAISRRTGNVKVLVSFTSSNSKTLSFSDNSFRLRPMFIGKVTEQSSCSSLNEQQQDEEQEQEEEEITVSHIKEELYEALKGINRGIFGVKSDKKTEIEGLVKLLECRNPTPEPTGELDKIGGCWKLIYSTITVLGSKRTKLGLRDFVSLGDLLQQIDIAQGKTVHVLKFDVRGLNLLDGEFRIVASFKISSKSSVEITYESSTIKPDQLMNIFRKNMDLLLGIFNPEGLFEISYLDEDLQVGRDGKGNVFVLERIEKP

SEQ ID NO: 49836 - protein, 263 aa, Arabidopsis thaliana
  peptide (1)..(263): Ceres Seq. ID no. 14302951
  misc_feature (74)..(198): Pfam Name: PAP_fibrillin Pfam Description: PAP_fibrillin
  misc_feature (94)..(262): Homolog of NCBI NO: 17232189 NR Description: fibrillin [Nostoc sp. PCC 7120]
  misc_feature (77)..(259): Homolog of NCBI NO: 17231810 NR Description: fibrillin [Nostoc sp. PCC 7120]
  misc_feature (77)..(259): Homolog of NCBI NO: 5020103 NR Description: fibrillin [Nostoc sp. PCC 8009]
  misc_feature (77)..(259): Homolog of NCBI NO: 23126201 NR Description: hypothetical protein [Nostoc punctiforme]
  misc_feature (77)..(260): Homolog of NCBI NO: 23041005 NR Description: hypothetical protein [Trichodesmium erythraeum
  misc_feature (77)..(260): Homolog of NCBI NO: 22297962 NR Description: fibrillin [Thermosynechococcus elongatus BP-1]
  misc_feature (77)..(260): Homolog of NCBI NO: 16329838 NR Description: fibrillin [Synechocystis sp. PCC 6803]
  misc_feature (1)..(239): Homolog of NCBI NO: 32489298 NR Description: OSJNBa0028I23.21 [Oryza sativa (japonica
  misc_feature (1)..(198): Homolog of NCBI NO: 9758960 NR Description: gene_id:MYH9.3~pir||S75332~similar to unknown
  misc_feature (1)..(263): Homolog of NCBI NO: 30682868 NR Description: plastid-lipid associated protein PAP/fibrillin
MAASRGAISRRTGNVKVLVSFTSSNSKTLSFSDNSFRLRPMFIGKVTEQSSCSSLNEQQQDEEQEQEEEEITVSHIKEELYEALKGINRGIFGVKSDKKTEIEGLVKLLECRNPTPEPTGELDKIGGCWKLIYSTITVLGSKRTKLGLRDFVSLGDLLQQIDIAQGKTVHVLKFDVRGLNLLDGEFRIVASFKISSKSSVEITYESSTIKPDQLMNIFRKNMDLLLGIFNPEGLFEISYLDEDLQVGRDGKGNVFVLERIEKP

SEQ ID NO: 49837 - protein, 223 aa, Arabidopsis thaliana
  peptide (1)..(223): Ceres Seq. ID no. 14302952
  misc_feature (34)..(158): Pfam Name: PAP_fibrillin Pfam Description: PAP_fibrillin
  misc_feature (54)..(222): Homolog of NCBI NO: 17232189 NR Description: fibrillin [Nostoc sp. PCC 7120]
  misc_feature (37)..(219): Homolog of NCBI NO: 17231810 NR Description: fibrillin [Nostoc sp. PCC 7120]
  misc_feature (37)..(219): Homolog of NCBI NO: 5020103 NR Description: fibrillin [Nostoc sp. PCC 8009]
  misc_feature (37)..(219): Homolog of NCBI NO: 23126201 NR Description: hypothetical protein [Nostoc punctiforme]
  misc_feature (37)..(220): Homolog of NCBI NO: 23041005 NR Description: hypothetical protein [Trichodesmium erythraeum
  misc_feature (37)..(220): Homolog of NCBI NO: 22297962 NR Description: fibrillin [Thermosynechococcus elongatus BP-1]
  misc_feature (37)..(220): Homolog of NCBI NO: 16329838 NR Description: fibrillin [Synechocystis sp. PCC 6803]
  misc_feature (1)..(199): Homolog of NCBI NO: 32489298 NR Description: OSJNBa0028I23.21 [Oryza sativa (japonica
  misc_feature (1)..(158): Homolog of NCBI NO: 9758960 NR Description: gene_id:MYH9.3~pir||S75332~similar to unknown
  misc_feature (1)..(223): Homolog of NCBI NO: 30682868 NR Description: plastid-lipid associated protein PAP/fibrillin
MFIGKVTEQSSCSSLNEQQQDEEQEQEEEEITVSHIKEELYEALKGINRGIFGVKSDKKTEIEGLVKLLECRNPTPEPTGELDKIGGCWKLIYSTITVLGSKRTKLGLRDFVSLGDLLQQIDIAQGKTVHVLKFDVRGLNLLDGEFRIVASFKISSKSSVEITYESSTIKPDQLMNIFRKNMDLLLGIFNPEGLFEISYLDEDLQVGRDGKGNVFVLERIEKP

SEQ ID NO: 49838 - DNA, 1223 bp, Arabidopsis thaliana; identical to SEQ ID NO: 45780
  misc_feature (1)..(1223): Ceres Seq. ID no. 13591684
  misc_feature: MA Experiment ID: 20000185 Result: Up-regulated in Transcription
  misc_feature: MA Experiment 20000185 PARAMETER Experiment Name: At_Roots__P Parameter: Age (day) Value: 7 vs. 21
  misc_feature: MA Experiment 20000185 PARAMETER Experiment Name: At_Roots__P Parameter: Organism Value: A. thaliana
  misc_feature: MA Experiment 20000185 PARAMETER Experiment Name: At_Roots__P Parameter: Tissue Value: Roots vs. Whole Plant
  misc_feature: MA Experiment ID: 20000265 Result: Up-regulated in Transcription
  misc_feature: MA Experiment 20000265 PARAMETER Experiment Name: At_Open_Flower_P Parameter: Age (day) Value: 21
  misc_feature: MA Experiment 20000265 PARAMETER Experiment Name: At_Open_Flower_P Parameter: Plant Line Value: WS
  misc_feature: MA Experiment 20000265 PARAMETER Experiment Name: At_Open_Flower_P Parameter: Tissue Value: Closed Flower vs. Whole Plant
  misc_feature: MA Experiment ID: 20000286 Result: Up-regulated in Transcription
  misc_feature: MA Experiment 20000286 PARAMETER Experiment Name: At_Open_Flower_P Parameter: Age (day) Value: 21
  misc_feature: MA Experiment 20000286 PARAMETER Experiment Name: At_Open_Flower_P Parameter: Plant Line Value: WS
  misc_feature: MA Experiment 20000286 PARAMETER Experiment Name: At_Open_Flower_P Parameter: Tissue Value: Half Open vs. Whole Plant
  misc_feature: MA Experiment ID: 20000794 Result: Up-regulated in Transcription
  misc_feature: MA Experiment 20000794 PARAMETER Experiment Name: At_Petals_P Parameter: Age (day) Value: 23-25 days
  misc_feature: MA Experiment 20000794 PARAMETER Experiment Name: At_Petals_P Parameter: Plant Line Value: WS
  misc_feature: MA Experiment 20000794 PARAMETER Experiment Name: At_Petals_P Parameter: Tissue Value: Petals vs. Whole plant
  misc_feature: MA Experiment ID: 20001451 Result: Down-regulated in Transcription
  misc_feature: MA Experiment 20001451 PARAMETER Experiment Name: At_Far-red-induction_P Parameter: Age (day) Value: 7
  misc_feature: MA Experiment 20001451 PARAMETER Experiment Name: At_Far-red-induction_P Parameter: Light Value: Far-red vs. White
  misc_feature: MA Experiment 20001451 PARAMETER Experiment Name: At_Far-red-induction_P Parameter: Organism Value: A. thaliana
  misc_feature: MA Experiment 20001451 PARAMETER Experiment Name: At_Far-red-induction_P Parameter: Plant Line Value: Columbia
  misc_feature: MA Experiment 20001451 PARAMETER Experiment Name: At_Far-red-induction_P Parameter: Timepoint (hr) Value: 24
  misc_feature: MA Experiment 20001451 PARAMETER Experiment Name: At_Far-red-induction_P Parameter: Tissue Value: Whole Plant
  misc_feature: MA Experiment ID: 20001555 Result: Up-regulated in Transcription
  misc_feature: MA Experiment 20001555 PARAMETER Experiment Name: At_Drought_Soil_Dry_P Parameter: Age (day) Value: 24
  misc_feature: MA Experiment 20001555 PARAMETER Experiment Name: At_Drought_Soil_Dry_P Parameter: Organism Value: A. thaliana
  misc_feature: MA Experiment 20001555 PARAMETER Experiment Name: At_Drought_Soil_Dry_P Parameter: Plant Line Value: WS
  misc_feature: MA Experiment 20001555 PARAMETER Experiment Name: At_Drought_Soil_Dry_P Parameter: Post Timepoint (hr) Value: None
  misc_feature: MA Experiment 20001555 PARAMETER Experiment Name: At_Drought_Soil_Dry_P Parameter: Post-Treatment Value: None
  misc_feature: MA Experiment 20001555 PARAMETER Experiment Name: At_Drought_Soil_Dry_P Parameter: Timepoint (day) Value: 10
  misc_feature: MA Experiment 20001555 PARAMETER Experiment Name: At_Drought_Soil_Dry_P Parameter: Treatment Value: Drought vs. No Drought
  misc_feature: MA Experiment ID: 20001556 Result: Up-regulated in Transcription
  misc_feature: MA Experiment 20001556 PARAMETER Experiment Name: At_Drought_Soil_Dry_P Parameter: Age (day) Value: 26
  misc_feature: MA Experiment 20001556 PARAMETER Experiment Name: At_Drought_Soil_Dry_P Parameter: Organism Value: A. thaliana
  misc_feature: MA Experiment 20001556 PARAMETER Experiment Name: At_Drought_Soil_Dry_P Parameter: Plant Line Value: WS
  misc_feature: MA Experiment 20001556 PARAMETER Experiment Name: At_Drought_Soil_Dry_P Parameter: Post Timepoint (hr) Value: None
  misc_feature: MA Experiment 20001556 PARAMETER Experiment Name: At_Drought_Soil_Dry_P Parameter: Post-Treatment Value: None
  misc_feature: MA Experiment 20001556 PARAMETER Experiment Name: At_Drought_Soil_Dry_P Parameter: Timepoint (day) Value: 12
  misc_feature: MA Experiment 20001556 PARAMETER Experiment Name: At_Drought_Soil_Dry_P Parameter: Treatment Value: Drought vs. No Drought
  misc_feature: MA Experiment ID: 20001557 Result: Up-regulated in Transcription
  misc_feature: MA Experiment 20001557 PARAMETER Experiment Name: At_Drought_Soil_Dry_P Parameter: Age (day) Value: 27
  misc_feature: MA Experiment 20001557 PARAMETER Experiment Name: At_Drought_Soil_Dry_P Parameter: Organism Value: A. thaliana
  misc_feature: MA Experiment 20001557 PARAMETER Experiment Name: At_Drought_Soil_Dry_P Parameter: Plant Line Value: WS
  misc_feature: MA Experiment 20001557 PARAMETER Experiment Name: At_Drought_Soil_Dry_P Parameter: Post Timepoint (hr) Value: 3
  misc_feature: MA Experiment 20001557 PARAMETER Experiment Name: At_Drought_Soil_Dry_P Parameter: Post-Treatment Value: Re-Water vs. No Drought
  misc_feature: MA Experiment 20001557 PARAMETER Experiment Name: At_Drought_Soil_Dry_P Parameter: Timepoint (day) Value: 13
  misc_feature: MA Experiment 20001557 PARAMETER Experiment Name: At_Drought_Soil_Dry_P Parameter: Treatment Value: Drought vs. No Drought
  misc_feature: MA Experiment ID: 20001558 Result: Up-regulated in Transcription
  misc_feature: MA Experiment 20001558 PARAMETER Experiment Name: At_Drought_Soil_Dry_P Parameter: Age (day) Value: 27
  misc_feature: MA Experiment 20001558 PARAMETER Experiment Name: At_Drought_Soil_Dry_P Parameter: Organism Value: A. thaliana
  misc_feature: MA Experiment 20001558 PARAMETER Experiment Name: At_Drought_Soil_Dry_P Parameter: Plant Line Value: WS
  misc_feature: MA Experiment 20001558 PARAMETER Experiment Name: At_Drought_Soil_Dry_P Parameter: Post Timepoint (hr) Value: 6
  misc_feature: MA Experiment 20001558 PARAMETER Experiment Name: At_Drought_Soil_Dry_P Parameter: Post-Treatment Value: Re-Water vs. No Drought
  misc_feature: MA Experiment 20001558 PARAMETER Experiment Name: At_Drought_Soil_Dry_P Parameter: Timepoint (day) Value: 13
  misc_feature: MA Experiment 20001558 PARAMETER Experiment Name: At_Drought_Soil_Dry_P Parameter: Treatment Value: Drought vs. No Drought

SEQ ID NO: 49839 - protein, 312 aa, Arabidopsis thaliana; identical to SEQ ID NO: 45781
  peptide (1)..(312): Ceres Seq. ID no. 13591685
  misc_feature (9)..(201): Pfam Name: GDSL-like Lipase/Acylhydrolase Pfam Description: GDSL-like Lipase/Acylhydrolase
  misc_feature (9)..(201): Pfam Name: GDSL-like Lipase/Acylhydrolase Pfam Description: GDSL-like Lipase/Acylhydrolase
  misc_feature (5)..(237): Homolog of NCBI NO: 38454102 NR Description: At5g45920 [Arabidopsis thaliana]
  misc_feature (5)..(237): Homolog of NCBI NO: 15242539 NR Description: GDSL-motif lipase/hydrolase protein [Arabidopsis
  misc_feature (5)..(226): Homolog of NCBI NO: 34903948 NR Description: OSJNBa0038J17.19 [Oryza sativa (japonica
  misc_feature (5)..(227): Homolog of NCBI NO: 15242002 NR Description: GDSL-motif lipase/hydrolase protein [Arabidopsis
  misc_feature (5)..(224): Homolog of NCBI NO: 37535366 NR Description: putative esterase [Oryza sativa (japonica
  misc_feature (5)..(237): Homolog of NCBI NO: 38454102 NR Description: At5g45920 [Arabidopsis thaliana]
  misc_feature (5)..(226): Homolog of NCBI NO: 34903948 NR Description: OSJNBa0038J17.19 [Oryza sativa (japonica
  misc_feature (5)..(224): Homolog of NCBI NO: 37535366 NR Description: putative esterase [Oryza sativa (japonica
  misc_feature (1)..(312): Homolog of NCBI NO: 18404664 NR Description: GDSL-motif lipase/hydrolase protein [Arabidopsis
  misc_feature (1)..(312): Homolog of NCBI NO: 16974631 NR Description: At2g38180/F16M14.11 [Arabidopsis thaliana]
  misc_feature (1)..(226): Homolog of NCBI NO: 13161403 NR Description: CPRD49 [Vigna unguiculata]
  misc_feature (1)..(244): Homolog of NCBI NO: 21554235 NR Description: CPRD49 [Arabidopsis thaliana]
  misc_feature (1)..(244): Homolog of NCBI NO: 18399151 NR Description: GDSL-motif lipase/hydrolase protein [Arabidopsis
  misc_feature (5)..(227): Homolog of NCBI NO: 15242002 NR Description: GDSL-motif lipase/hydrolase protein [Arabidopsis
  misc_feature (5)..(237): Homolog of NCBI NO: 15242539 NR Description: GDSL-motif lipase/hydrolase protein [Arabidopsis
  misc_feature (1)..(244): Homolog of NCBI NO: 18399151 NR Description: GDSL-motif lipase/hydrolase protein [Arabidopsis
  misc_feature (1)..(244): Homolog of NCBI NO: 21554235 NR Description: CPRD49 [Arabidopsis thaliana]
  misc_feature (1)..(226): Homolog of NCBI NO: 13161403 NR Description: CPRD49 [Vigna unguiculata]
  misc_feature (1)..(312): Homolog of NCBI NO: 16974631 NR Description: At2g38180/F16M14.11 [Arabidopsis thaliana]
  misc_feature (1)..(312): Homolog of NCBI NO: 18404664 NR Description: GDSL-motif lipase/hydrolase protein [Arabidopsis

SEQ ID NO: 49840 - protein, 211 aa, Arabidopsis thaliana; identical to SEQ ID NO: 45782
  peptide (1)..(211): Ceres Seq. ID no. 13591686
  misc_feature (1)..(100): Pfam Name: GDSL-like Lipase/Acylhydrolase Pfam Description: GDSL-like Lipase/Acylhydrolase
  misc_feature (1)..(100): Pfam Name: GDSL-like Lipase/Acylhydrolase Pfam Description: GDSL-like Lipase/Acylhydrolase
  misc_feature (1)..(136): Homolog of NCBI NO: 38454102 NR Description: At5g45920 [Arabidopsis thaliana]
  misc_feature (1)..(136): Homolog of NCBI NO: 15242539 NR Description: GDSL-motif lipase/hydrolase protein [Arabidopsis
  misc_feature (1)..(125): Homolog of NCBI NO: 34903948 NR Description: OSJNBa0038J17.19 [Oryza sativa (japonica
  misc_feature (1)..(126): Homolog of NCBI NO: 15242002 NR Description: GDSL-motif lipase/hydrolase protein [Arabidopsis
  misc_feature (1)..(123): Homolog of NCBI NO: 37535366 NR Description: putative esterase [Oryza sativa (japonica
  misc_feature (1)..(136): Homolog of NCBI NO: 38454102 NR Description: At5g45920 [Arabidopsis thaliana]
  misc_feature (1)..(125): Homolog of NCBI NO: 34903948 NR Description: OSJNBa0038J17.19 [Oryza sativa (japonica
  misc_feature (1)..(123): Homolog of NCBI NO: 37535366 NR Description: putative esterase [Oryza sativa (japonica
  misc_feature (1)..(211): Homolog of NCBI NO: 18404664 NR Description: GDSL-motif lipase/hydrolase protein [Arabidopsis
  misc_feature (1)..(211): Homolog of NCBI NO: 16974631 NR Description: At2g38180/F16M14.11 [Arabidopsis thaliana]
  misc_feature (1)..(125): Homolog of NCBI NO: 13161403 NR Description: CPRD49 [Vigna unguiculata]
  misc_feature (1)..(143): Homolog of NCBI NO: 21554235 NR Description: CPRD49 [Arabidopsis thaliana]
  misc_feature (1)..(143): Homolog of NCBI NO: 18399151 NR Description: GDSL-motif lipase/hydrolase protein [Arabidopsis
  misc_feature (1)..(126): Homolog of NCBI NO: 15242002 NR Description: GDSL-motif lipase/hydrolase protein [Arabidopsis
  misc_feature (1)..(136): Homolog of NCBI NO: 15242539 NR Description: GDSL-motif lipase/hydrolase protein [Arabidopsis
  misc_feature (1)..(143): Homolog of NCBI NO: 18399151 NR Description: GDSL-motif lipase/hydrolase protein [Arabidopsis
  misc_feature (1)..(143): Homolog of NCBI NO: 21554235 NR Description: CPRD49 [Arabidopsis thaliana]
  misc_feature (1)..(125): Homolog of NCBI NO: 13161403 NR Description: CPRD49 [Vigna unguiculata]
  misc_feature (1)..(211): Homolog of NCBI NO: 16974631 NR Description: At2g38180/F16M14.11 [Arabidopsis thaliana]
  misc_feature (1)..(211): Homolog of NCBI NO: 18404664 NR Description: GDSL-motif lipase/hydrolase protein [Arabidopsis

SEQ ID NO: 49841 - protein, 187 aa, Arabidopsis thaliana; identical to SEQ ID NO: 45783
  peptide (1)..(187): Ceres Seq. ID no. 13591687
  misc_feature (1)..(76): Pfam Name: GDSL-like Lipase/Acylhydrolase Pfam Description: GDSL-like Lipase/Acylhydrolase
  misc_feature (1)..(76): Pfam Name: GDSL-like Lipase/Acylhydrolase Pfam Description: GDSL-like Lipase/Acylhydrolase
  misc_feature (1)..(112): Homolog of NCBI NO: 38454102 NR Description: At5g45920 [Arabidopsis thaliana]
  misc_feature (1)..(112): Homolog of NCBI NO: 15242539 NR Description: GDSL-motif lipase/hydrolase protein [Arabidopsis
  misc_feature (1)..(101): Homolog of NCBI NO: 34903948 NR Description: OSJNBa0038J17.19 [Oryza sativa (japonica
  misc_feature (1)..(102): Homolog of NCBI NO: 15242002 NR Description: GDSL-motif lipase/hydrolase protein [Arabidopsis
  misc_feature (1)..(99): Homolog of NCBI NO: 37535366 NR Description: putative esterase [Oryza sativa (japonica
  misc_feature (1)..(112): Homolog of NCBI NO: 38454102 NR Description: At5g45920 [Arabidopsis thaliana]
  misc_feature (1)..(101): Homolog of NCBI NO: 34903948 NR Description: OSJNBa0038J17.19 [Oryza sativa (japonica
  misc_feature (1)..(99): Homolog of NCBI NO: 37535366 NR Description: putative esterase [Oryza sativa (japonica
  misc_feature (1)..(187): Homolog of NCBI NO: 18404664 NR Description: GDSL-motif lipase/hydrolase protein [Arabidopsis
  misc_feature (1)..(187): Homolog of NCBI NO: 16974631 NR Description: At2g38180/F16M14.11 [Arabidopsis thaliana]
  misc_feature (1)..(101): Homolog of NCBI NO: 13161403 NR Description: CPRD49 [Vigna unguiculata]
  misc_feature (1)..(119): Homolog of NCBI NO: 21554235 NR Description: CPRD49 [Arabidopsis thaliana]
  misc_feature (1)..(119): Homolog of NCBI NO: 18399151 NR Description: GDSL-motif lipase/hydrolase protein [Arabidopsis
  misc_feature (1)..(102): Homolog of NCBI NO: 15242002 NR Description: GDSL-motif lipase/hydrolase protein [Arabidopsis
  misc_feature (1)..(112): Homolog of NCBI NO: 15242539 NR Description: GDSL-motif lipase/hydrolase protein [Arabidopsis
  misc_feature (1)..(119): Homolog of NCBI NO: 18399151 NR Description: GDSL-motif lipase/hydrolase protein [Arabidopsis
  misc_feature (1)..(119): Homolog of NCBI NO: 21554235 NR Description: CPRD49 [Arabidopsis thaliana]
  misc_feature (1)..(101): Homolog of NCBI NO: 13161403 NR Description: CPRD49 [Vigna unguiculata]
  misc_feature (1)..(187): Homolog of NCBI NO: 16974631 NR Description: At2g38180/F16M14.11 [Arabidopsis thaliana]
  misc_feature (1)..(187): Homolog of NCBI NO: 18404664 NR Description: GDSL-motif lipase/hydrolase protein [Arabidopsis

SEQ ID NO: 49842 - DNA, 1458 bp, Arabidopsis thaliana
  misc_feature (1)..(1458): Ceres Seq. ID no. 13592224
  misc_feature: MA Experiment ID: 20000315 Result: Down-regulated in Transcription
  misc_feature: MA Experiment 20000315 PARAMETER Experiment Name: At_14day_Shoots-Roots_Sub_P Parameter: Age (day) Value: 14
  misc_feature: MA Experiment 20000315 PARAMETER Experiment Name: At_14day_Shoots-Roots_Sub_P Parameter: Organism Value: A. thaliana
  misc_feature: MA Experiment 20000315 PARAMETER Experiment Name: At_14day_Shoots-Roots_Sub_P Parameter: Plant Line Value: WS
  misc_feature: MA Experiment 20000315 PARAMETER Experiment Name: At_14day_Shoots-Roots_Sub_P Parameter: Tissue Value: Shoots vs. Whole Plant
gagaagagaaaagggttttttaggattctttaaacgcagagctgagctgagttacataagatcgagagaattcgcaaactcgtttcttcattcgtcttcgtctttcgccatggctgctctacaatacttggaatctctgaaaaatacgcatccagagctcggcgaatggtacaattcccttgcagatctgtatcagaaaaagctctggcatcaactcacccttaagctcgaacagttcatcgctctcgctgtctttcaggctggtgatgctttgattcagttctatcacaatttcatcactgactttgagacgaagatcaatcttctgaagcttgcgcattttgctgtggtggtctctcgacagtactctgagaaagaagctgcagttagctatcttgaaagcgtgattgagaaacttagagctactaaagagcctaggattactgaaccaatcatttatattgaaacacaaaaagctttattcaagcttgagcaaggtgatcagaaggagtgcaaaaaaatcttggacgatggaaagagctctcttgatagtatgactgacattgatccatcagtctatgccaacttctattgggtgtcttctcagtaccataagtgccgtcaagaattttctgatttctacaaaagtgctctgctttatcttgcatacacgtctgtggaggacctttcagaatcgtttaagctggatttggctttcgatttgtcactatcagctctacttggggagaacatctataactttggggaactgttagcccatcccattttgaaaagtctccttggaacaaatgtggaatggctctaccacattctacaggcattcaaccatggtgatttagttcagtatcaagaactatgccgtgtgcacaacgcatccttgattgctcaaccagcacttgttgagaacgagaagaagcttttggaaaagatcaacattctctgccttatcgagatcatcttcagccgacccgctgaagatagaaccattcctttgagcatcatcgctgagcgtactaaactttccattgaagatgttgagcaccttctcatgaagagcctttctgtgcatttgatcgagggcatcatagaccaagtgaacggaacaatttatgtctcatgggcgcaaccgagagtactagggattccacagatcaaggctttgagggatcaattagacagttgggttgacaaagttcacaccactttactatctgttgaagccgagacaccagatcttgttgcagcataagagaaaagaaaaccttcttcctccttttgaagctactgaatgtaaaacaccatcttctctgggattagattcaagttttttatttcagtcgtagaagaaattacaattgctttttaatcttttgacttccatttcaagatgtccgaaatttcagttctacatttagactattttcatacattttttct

SEQ ID NO: 49843 - protein, 422 aa, Arabidopsis thaliana
  peptide (1)..(422): Ceres Seq. ID no. 13592225
  misc_feature (272)..(380): Pfam Name: PCI domain Pfam Description: PCI domain
  misc_feature (42)..(420): Homolog of NCBI NO: 3746882 NR Description: 26S proteasome subunit 11 [Homo sapiens]
  misc_feature (42)..(420): Homolog of NCBI NO: 32880133 NR Description: proteasome (prosome, macropain) 26S subunit,
  misc_feature (42)..(420): Homolog of NCBI NO: 28872728 NR Description: proteasome 26S non-ATPase subunit 13 isoform 1
  misc_feature (42)..(420): Homolog of NCBI NO: 3618343 NR Description: 26S proteasome subunit p40.5 [Homo sapiens]
  misc_feature (51)..(420): Homolog of NCBI NO: 29612578 NR Description: Similar to proteasome (prosome, macropain) 26S
  misc_feature (142)..(422): Homolog of NCBI NO: 17298163 NR Description: 26S proteasome regulatory particle non-ATPase
  misc_feature (39)..(422): Homolog of NCBI NO: 34914614 NR Description: putative 26S proteasome subunit
  misc_feature (37)..(361): Homolog of NCBI NO: 9758666 NR Description: 26S proteasome subunit-like protein [Arabidopsis
  misc_feature (37)..(422): Homolog of NCBI NO: 30684612 NR Description: 26S proteasome regulatory subunit (RPN9) -related
  misc_feature (37)..(422): Homolog of NCBI NO: 22327608 NR Description: 26S proteasome regulatory subunit (RPN9),
RREKGFLGFFKRRAELSYIRSREFANSFLHSSSSFAMAALQYLESLKNTHPELGEWYNSLADLYQKKLWHQLTLKLEQFIALAVFQAGDALIQFYHNFITDFETKINLLKLAHFAVVVSRQYSEKEAAVSYLESVIEKLRATKEPRITEPIIYIETQKALFKLEQGDQKECKKILDDGKSSLDSMTDIDPSVYANFYWVSSQYHKCRQEFSDFYKSALLYLAYTSVEDLSESFKLDLAFDLSLSALLGENIYNFGELLAHPILKSLLGTNVEWLYHILQAFNHGDLVQYQELCRVHNASLIAQPALVENEKKLLEKINILCLIEIIFSRPAEDRTIPLSIIAERTKLSIEDVEHLLMKSLSVHLIEGIIDQVNGTIYVSWAQPRVLGIPQIKALRDQLDSWVDKVHTTLLSVEAETPDLVAA

SEQ ID NO: 49844 - protein, 386 aa, Arabidopsis thaliana
  peptide (1)..(386): Ceres Seq. ID no. 13592226
  misc_feature (236)..(344): Pfam Name: PCI domain Pfam Description: PCI domain
  misc_feature (6)..(384): Homolog of NCBI NO: 3746882 NR Description: 26S proteasome subunit 11 [Homo sapiens]
  misc_feature (6)..(384): Homolog of NCBI NO: 32880133 NR Description: proteasome (prosome, macropain) 26S subunit,
  misc_feature (6)..(384): Homolog of NCBI NO: 28872728 NR Description: proteasome 26S non-ATPase subunit 13 isoform 1
  misc_feature (6)..(384): Homolog of NCBI NO: 3618343 NR Description: 26S proteasome subunit p40.5 [Homo sapiens]
  misc_feature (15)..(384): Homolog of NCBI NO: 29612578 NR Description: Similar to proteasome (prosome, macropain) 26S
  misc_feature (106)..(386): Homolog of NCBI NO: 17298163 NR Description: 26S proteasome regulatory particle non-ATPase
  misc_feature (3)..(386): Homolog of NCBI NO: 34914614 NR Description: putative 26S proteasome subunit
  misc_feature (1)..(325): Homolog of NCBI NO: 9758666 NR Description: 26S proteasome subunit-like protein [Arabidopsis
  misc_feature (1)..(386): Homolog of NCBI NO: 30684612 NR Description: 26S proteasome regulatory subunit (RPN9) -related
  misc_feature (1)..(386): Homolog of NCBI NO: 22327608 NR Description: 26S proteasome regulatory subunit (RPN9),
MAALQYLESLKNTHPELGEWYNSLADLYQKKLWHQLTLKLEQFIALAVFQAGDALIQFYHNFITDFETKINLLKLAHFAVVVSRQYSEKEAAVSYLESVIEKLRATKEPRITEPIIYIETQKALFKLEQGDQKECKKILDDGKSSLDSMTDIDPSVYANFYWVSSQYHKCRQEFSDFYKSALLYLAYTSVEDLSESFKLDLAFDLSLSALLGENIYNFGELLAHPILKSLLGTNVEWLYHILQAFNHGDLVQYQELCRVHNASLIAQPALVENEKKLLEKINILCLIEIIFSRPAEDRTIPLSIIAERTKLSIEDVEHLLMKSLSVHLIEGIIDQVNGTIYVSWAQPRVLGIPQIKALRDQLDSWVDKVHTTLLSVEAETPDLVAA

SEQ ID NO: 49845 - protein, 238 aa, Arabidopsis thaliana
  peptide (1)..(238): Ceres Seq. ID no. 13592227
  misc_feature (88)..(196): Pfam Name: PCI domain Pfam Description: PCI domain
  misc_feature (1)..(236): Homolog of NCBI NO: 3746882 NR Description: 26S proteasome subunit 11 [Homo sapiens]
  misc_feature (1)..(236): Homolog of NCBI NO: 32880133 NR Description: proteasome (prosome, macropain) 26S subunit,
  misc_feature (1)..(236): Homolog of NCBI NO: 28872728 NR Description: proteasome 26S non-ATPase subunit 13 isoform 1
  misc_feature (1)..(236): Homolog of NCBI NO: 3618343 NR Description: 26S proteasome subunit p40.5 [Homo sapiens]
  misc_feature (1)..(236): Homolog of NCBI NO: 29612578 NR Description: Similar to proteasome (prosome, macropain) 26S
  misc_feature (1)..(238): Homolog of NCBI NO: 17298163 NR Description: 26S proteasome regulatory particle non-ATPase
  misc_feature (1)..(238): Homolog of NCBI NO: 34914614 NR Description: putative 26S proteasome subunit
  misc_feature (1)..(177): Homolog of NCBI NO: 9758666 NR Description: 26S proteasome subunit-like protein [Arabidopsis
  misc_feature (1)..(238): Homolog of NCBI NO: 30684612 NR Description: 26S proteasome regulatory subunit (RPN9) -related
  misc_feature (1)..(238): Homolog of NCBI NO: 22327608 NR Description: 26S proteasome regulatory subunit (RPN9),
MTDIDPSVYANFYWVSSQYHKCRQEFSDFYKSALLYLAYTSVEDLSESFKLDLAFDLSLSALLGENIYNFGELLAHPILKSLLGTNVEWLYHILQAFNHGDLVQYQELCRVHNASLIAQPALVENEKKLLEKINILCLIEIIFSRPAEDRTIPLSIIAERTKLSIEDVEHLLMKSLSVHLIEGIIDQVNGTIYVSWAQPRVLGIPQIKALRDQLDSWVDKVHTTLLSVEAETPDLVAA

SEQ ID NO: 49846 - DNA, 2405 bp, Arabidopsis thaliana
  misc_feature (1)..(2405): Ceres Seq. ID no. 14302972
  misc_feature: MA Experiment ID: 20000171 Result: Up-regulated in Transcription
  misc_feature: MA Experiment 20000171 PARAMETER Experiment Name: At_42deg_Heat_P Parameter: Age (day) Value: 14
  misc_feature: MA Experiment 20000171 PARAMETER Experiment Name: At_42deg_Heat_P Parameter: Organism Value: A. thaliana
  misc_feature: MA Experiment 20000171 PARAMETER Experiment Name: At_42deg_Heat_P Parameter: Plant Line Value: WS
  misc_feature: MA Experiment 20000171 PARAMETER Experiment Name: At_42deg_Heat_P Parameter: Temperature (deg C) Value: 42 vs. 22
  misc_feature: MA Experiment 20000171 PARAMETER Experiment Name: At_42deg_Heat_P Parameter: Timepoint (hr) Value: 1
  misc_feature: MA Experiment 20000171 PARAMETER Experiment Name: At_42deg_Heat_P Parameter: Tissue Value: Aerial
  misc_feature: MA Experiment ID: 20000179 Result: Down-regulated in Transcription
  misc_feature: MA Experiment 20000179 PARAMETER Experiment Name: At_Germinating_Seeds_P Parameter: Age (hr) Value: 6 vs. 0
  misc_feature: MA Experiment 20000179 PARAMETER Experiment Name: At_Germinating_Seeds_P Parameter: Tissue Value: Germinating Seeds
  misc_feature: MA Experiment ID: 20000180 Result: Down-regulated in Transcription
  misc_feature: MA Experiment 20000180 PARAMETER Experiment Name: At_Germinating_Seeds_P Parameter: Age (hr) Value: 24 vs. 0
  misc_feature: MA Experiment 20000180 PARAMETER Experiment Name: At_Germinating_Seeds_P Parameter: Tissue Value: Germinating Seeds
  misc_feature: MA Experiment ID: 20000184 Result: Down-regulated in Transcription
  misc_feature: MA Experiment 20000184 PARAMETER Experiment Name: At_Shoots__P Parameter: Age (day) Value: 7
  misc_feature: MA Experiment 20000184 PARAMETER Experiment Name: At_Shoots__P Parameter: Tissue Value: Shoots vs. Whole Plant
  misc_feature: MA Experiment ID: 20000234 Result: Down-regulated in Transcription
  misc_feature: MA Experiment 20000234 PARAMETER Experiment Name: At_Siliques_P Parameter: Age (day) Value: 21
  misc_feature: MA Experiment 20000234 PARAMETER Experiment Name: At_Siliques_P Parameter: Organism Value: A. thaliana
  misc_feature: MA Experiment 20000234 PARAMETER Experiment Name: At_Siliques_P Parameter: Plant Line Value: WS
  misc_feature: MA Experiment 20000234 PARAMETER Experiment Name: At_Siliques_P Parameter: Tissue Value: Less Than 5mm Siliques vs. Whole Plant
  misc_feature: MA Experiment ID: 20000235 Result: Down-regulated in Transcription
  misc_feature: MA Experiment 20000235 PARAMETER Experiment Name: At_Siliques_P Parameter: Age (day) Value: 21
  misc_feature: MA Experiment 20000235 PARAMETER Experiment Name: At_Siliques_P Parameter: Organism Value: A. thaliana
  misc_feature: MA Experiment 20000235 PARAMETER Experiment Name: At_Siliques_P Parameter: Plant Line Value: WS
  misc_feature: MA Experiment 20000235 PARAMETER Experiment Name: At_Siliques_P Parameter: Tissue Value: 5-10mm Siliques vs. Whole Plant
  misc_feature: MA Experiment ID: 20000265 Result: Down-regulated in Transcription
  misc_feature: MA Experiment 20000265 PARAMETER Experiment Name: At_Open_Flower_P Parameter: Age (day) Value: 21
  misc_feature: MA Experiment 20000265 PARAMETER Experiment Name: At_Open_Flower_P Parameter: Plant Line Value: WS
  misc_feature: MA Experiment 20000265 PARAMETER Experiment Name: At_Open_Flower_P Parameter: Tissue Value: Closed Flower vs. Whole Plant
  misc_feature: MA Experiment ID: 20001558 Result: Down-regulated in Transcription
  misc_feature: MA Experiment 20001558 PARAMETER Experiment Name: At_Drought_Soil_Dry_P Parameter: Age (day) Value: 27
  misc_feature: MA Experiment 20001558 PARAMETER Experiment Name: At_Drought_Soil_Dry_P Parameter: Organism Value: A. thaliana
  misc_feature: MA Experiment 20001558 PARAMETER Experiment Name: At_Drought_Soil_Dry_P Parameter: Plant Line Value: WS
  misc_feature: MA Experiment 20001558 PARAMETER Experiment Name: At_Drought_Soil_Dry_P Parameter: Post Timepoint (hr) Value: 6
  misc_feature: MA Experiment 20001558 PARAMETER Experiment Name: At_Drought_Soil_Dry_P Parameter: Post-Treatment Value: Re-Water vs. No Drought
  misc_feature: MA Experiment 20001558 PARAMETER Experiment Name: At_Drought_Soil_Dry_P Parameter: Timepoint (day) Value: 13
  misc_feature: MA Experiment 20001558 PARAMETER Experiment Name: At_Drought_Soil_Dry_P Parameter: Treatment Value: Drought vs. No Drought
  misc_feature: MA Experiment ID: 20001560 Result: Down-regulated in Transcription
  misc_feature: MA Experiment 20001560 PARAMETER Experiment Name: At_Drought_Soil_Dry_P Parameter: Age (day) Value: 28
  misc_feature: MA Experiment 20001560 PARAMETER Experiment Name: At_Drought_Soil_Dry_P Parameter: Organism Value: A. thaliana
  misc_feature: MA Experiment 20001560 PARAMETER Experiment Name: At_Drought_Soil_Dry_P Parameter: Plant Line Value: WS
  misc_feature: MA Experiment 20001560 PARAMETER Experiment Name: At_Drought_Soil_Dry_P Parameter: Post Timepoint (hr) Value: None
  misc_feature: MA Experiment 20001560 PARAMETER Experiment Name: At_Drought_Soil_Dry_P Parameter: Post-Treatment Value: None
  misc_feature: MA Experiment 20001560 PARAMETER Experiment Name: At_Drought_Soil_Dry_P Parameter: Timepoint (day) Value: 14
  misc_feature: MA Experiment 20001560 PARAMETER Experiment Name: At_Drought_Soil_Dry_P Parameter: Treatment Value: Drought vs. No Drought
gatcttcattattttagatttgaccgtttagaaaagtaagaaccagaccgtaccgaaccaaaacgaaccagagccagacgactccttaacggcggctaagctatctgtaaaccgaccgaaccacacagccacaggcacacaaatcaaaccttctagaaatcaaagagagacatttattctctaaattcattttcctattttgcccctacgaatatttttcttcttcgtctctctctctcagctcttgaagtctttggtctgttggcgaattttcaagcagctttctaattctgaactgaaaatttcgtctttggaactttatattctctcatctgaaactgaaggagaaggaagatgacgactatggagagtttgattgggttagttaataggatacagagagcatgtaccgtactcggtgactatggtggtggaactggaagtaacgctttcaattctctctgggaagctcttccaaccgtcgccgtcgtcggtggtcagagttctgggaaatcttcggttcttgagagtatagttgggagagattttcttcctagaggatctggtatcgttacgagacggcctttagtgttgcagcttcataagactgatgatggaacagaggagtatgcagagttccttcatcttcccaagaagcaattcacagattttgctttggttcgcagggagattcaggatgagactgatagaatcacagggaaaaacaaacagatatctccagttcctattcacctcagtatctactctccaaatgttgtgaatttgacactcattgatttgcccggtttaactaaagtggctgttgagggacagccggaaaccattgctgaggatatcgaatccatggttcgcacatatgttgataagcccaattgtatcatattggctatatctcctgccaaccaagacattgccacatcagatgcaattaagctcgcaaaagatgtcgatccaacaggtgagaggacatttggtgttcttaccaagttagacttgatggacaaaggaactaatgcgttagaagttcttgaaggaagatcttacaggctgcaacatccttaggttgggatagtgaaccgttcacaagcagatattaataagaatgtcgatatgatgcttgcaagacgcaaggaacgagaatattttgataccagtcctgactatggtcacttagccagcaaaatgggttcagaatatctggcaaaactgctctctaagcacttggagtctgttatcaggacccgtattccaagtatactatccttaataaacaaaagcattgaagaacttgaaagagagttagaccgaatgggtcggcctgtcgcagttgatgctggggctcaactatacactatattggagatgtgccgtgcattcgataagatattcaaggaacatcttgatggcgggcgtcctggaggtgaccgtatctatggagtctttgacaaccaacttccagctgcacttaaaaagcttccttttgatcgccatctttctctacaaagcgtgaagaaaatcgtgtccgaggcagatggttatcaacctcacttgattgcaccagaacagggttatcgccgtctaatcgaaggggcactgggttactttagaggtccagctgaagcttctgtggatgctgttcactatgtcttgaaagagcttgtgaggaaatcaatatcagaaactgaggagctaaagcgtttcccttcactgcaagtcgagcttgctgcagcagccaacagctccttggagaaattcagggaagaaagcaagaagtcggttattcgacttgttgacatggaatctgcgtatctaacagctgagttcttccggaaacttcctcaagaaatagaaagaccagtaaccaacagcaaaaaccaaaccgcttctccttcgtctgcaacattagaccagtatggagacggacatttcagaaggatagcatcaaatgtatctgcgtatgttaatatggtttcggacacacttcgtaacaccattccaaaagcttgtgtgtactgtcaggttagacaagccaagctcgcattgctcaattacttctactctcagatcagcaagagagaggggaaacagttgggacagttactagatgaagatccggcattgatggaccggagactagagtgcgcgaagaggctagagttatacaagaaagcaagagatgaaattgatgctgttgcttgggtaagatgataaaacctaaaagtgtgtttctggtgatggttttagagaactataaattcgtctgttgtttaagttcgttgactatgtctttgtatgtatgtatatgatcatcagaccctattgagagagacttgagacgttttgtaataaacttatcattactatttaaaaacgccatagcgtgt

SEQ ID NO: 49847 - protein, 365 aa, Arabidopsis thaliana
  peptide (1)..(365): Ceres Seq. ID no. 14302973
  misc_feature (1)..(255): Pfam Name: Dynamin central region Pfam Description: Dynamin central region
  misc_feature (1)..(234): Homolog of NCBI NO: 32172431 NR Description: Dynamin-1
  misc_feature (1)..(365): Homolog of NCBI NO: 34911188 NR Description: putative dynamin-like protein
  misc_feature (1)..(363): Homolog of NCBI NO: 19569772 NR Description: dynamin-like protein C [Arabidopsis thaliana]
  misc_feature (1)..(363): Homolog of NCBI NO: 6651403 NR Description: dynamin-like protein 5 [Arabidopsis thaliana]
  misc_feature (1)..(363): Homolog of NCBI NO: 21537304 NR Description: dynamin, putative [Arabidopsis thaliana]
  misc_feature (1)..(363): Homolog of NCBI NO: 15223914 NR Description: dynamin -related [Arabidopsis thaliana]
  misc_feature (1)..(365): Homolog of NCBI NO: 7484944 NR Description: probable phragmoplastin At2g44590
  misc_feature (1)..(365): Homolog of NCBI NO: 30689768 NR Description: phragmoplastin -related [Arabidopsis thaliana]
  misc_feature (1)..(365): Homolog of NCBI NO: 37536976 NR Description: putative phragmoplastin [Oryza sativa (japonica
  misc_feature (1)..(365): Homolog of NCBI NO: 6651401 NR Description: dynamin-like protein 4 [Arabidopsis thaliana]
MMLARRKEREYFDTSPDYGHLASKMGSEYLAKLLSKHLESVIRTRIPSILSLINKSIEELERELDRMGRPVAVDAGAQLYTILEMCRAFDKIFKEHLDGGRPGGDRIYGVFDNQLPAALKKLPFDRHLSLQSVKKIVSEADGYQPHLIAPEQGYRRLIEGALGYFRGPAEASVDAVHYVLKELVRKSISETEELKRFPSLQVELAAAANSSLEKFREESKKSVIRLVDMESAYLTAEFFRKLPQEIERPVTNSKNQTASPSSATLDQYGDGHFRRIASNVSAYVNMVSDTLRNTIPKACVYCQVRQAKLALLNYFYSQISKREGKQLGQLLDEDPALMDRRLECAKRLELYKKARDEIDAVAWVR

SEQ ID NO: 49848 - protein, 364 aa, Arabidopsis thaliana
  peptide (1)..(364): Ceres Seq. ID no. 14302974
  misc_feature (1)..(254): Pfam Name: Dynamin central region Pfam Description: Dynamin central region
  misc_feature (1)..(233): Homolog of NCBI NO: 32172431 NR Description: Dynamin-1
  misc_feature (1)..(364): Homolog of NCBI NO: 34911188 NR Description: putative dynamin-like protein
  misc_feature (1)..(362): Homolog of NCBI NO: 19569772 NR Description: dynamin-like protein C [Arabidopsis thaliana]
  misc_feature (1)..(362): Homolog of NCBI NO: 6651403 NR Description: dynamin-like protein 5 [Arabidopsis thaliana]
  misc_feature (1)..(362): Homolog of NCBI NO: 21537304 NR Description: dynamin, putative [Arabidopsis thaliana]
  misc_feature (1)..(362): Homolog of NCBI NO: 15223914 NR Description: dynamin -related [Arabidopsis thaliana]
  misc_feature (1)..(364): Homolog of NCBI NO: 7484944 NR Description: probable phragmoplastin At2g44590
  misc_feature (1)..(364): Homolog of NCBI NO: 30689768 NR Description: phragmoplastin -related [Arabidopsis thaliana]
  misc_feature (1)..(364): Homolog of NCBI NO: 37536976 NR Description: putative phragmoplastin [Oryza sativa (japonica
  misc_feature (1)..(364): Homolog of NCBI NO: 6651401 NR Description: dynamin-like protein 4 [Arabidopsis thaliana]
MLARRKEREYFDTSPDYGHLASKMGSEYLAKLLSKHLESVIRTRIPSILSLINKSIEELERELDRMGRPVAVDAGAQLYTILEMCRAFDKIFKEHLDGGRPGGDRIYGVFDNQLPAALKKLPFDRHLSLQSVKKIVSEADGYQPHLIAPEQGYRRLIEGALGYFRGPAEASVDAVHYVLKELVRKSISETEELKRFPSLQVELAAAANSSLEKFREESKKSVIRLVDMESAYLTAEFFRKLPQEIERPVTNSKNQTASPSSATLDQYGDGHFRRIASNVSAYVNMVSDTLRNTIPKACVYCQVRQAKLALLNYFYSQISKREGKQLGQLLDEDPALMDRRLECAKRLELYKKARDEIDAVAWVR

SEQ ID NO: 49849 - protein, 341 aa, Arabidopsis thaliana
  peptide (1)..(341): Ceres Seq. ID no. 14302975
  misc_feature (1)..(231): Pfam Name: Dynamin central region Pfam Description: Dynamin central region
  misc_feature (1)..(210): Homolog of NCBI NO: 32172431 NR Description: Dynamin-1
  misc_feature (1)..(341): Homolog of NCBI NO: 34911188 NR Description: putative dynamin-like protein
  misc_feature (1)..(339): Homolog of NCBI NO: 19569772 NR Description: dynamin-like protein C [Arabidopsis thaliana]
  misc_feature (1)..(339): Homolog of NCBI NO: 6651403 NR Description: dynamin-like protein 5 [Arabidopsis thaliana]
  misc_feature (1)..(339): Homolog of NCBI NO: 21537304 NR Description: dynamin, putative [Arabidopsis thaliana]
  misc_feature (1)..(339): Homolog of NCBI NO: 15223914 NR Description: dynamin -related [Arabidopsis thaliana]
  misc_feature (1)..(341): Homolog of NCBI NO: 7484944 NR Description: probable phragmoplastin At2g44590
  misc_feature (1)..(341): Homolog of NCBI NO: 30689768 NR Description: phragmoplastin -related [Arabidopsis thaliana]
  misc_feature (1)..(341): Homolog of NCBI NO: 37536976 NR Description: putative phragmoplastin [Oryza sativa (japonica
  misc_feature (1)..(341): Homolog of NCBI NO: 6651401 NR Description: dynamin-like protein 4 [Arabidopsis thaliana]
MGSEYLAKLLSKHLESVIRTRIPSILSLINKSIEELERELDRMGRPVAVDAGAQLYTILEMCRAFDKIFKEHLDGGRPGGDRIYGVFDNQLPAALKKLPFDRHLSLQSVKKIVSEADGYQPHLIAPEQGYRRLIEGALGYFRGPAEASVDAVHYVLKELVRKSISETEELKRFPSLQVELAAAANSSLEKFREESKKSVIRLVDMESAYLTAEFFRKLPQEIERPVTNSKNQTASPSSATLDQYGDGHFRRIASNVSAYVNMVSDTLRNTIPKACVYCQVRQAKLALLNYFYSQISKREGKQLGQLLDEDPALMDRRLECAKRLELYKKARDEIDAVAWVR

SEQ ID NO: 49850 - DNA, 881 bp, Arabidopsis thaliana
  misc_feature (1)..(881): Ceres Seq. ID no. 14307605
  misc_feature: MA Experiment ID: 20000166 Result: Down-regulated in Transcription
  misc_feature: MA Experiment 20000166 PARAMETER Experiment Name: At_100uM_ABA_P Parameter: Age (day) Value: 14
  misc_feature: MA Experiment 20000166 PARAMETER Experiment Name: At_100uM_ABA_P Parameter: Organism Value: A. thaliana
  misc_feature: MA Experiment 20000166 PARAMETER Experiment Name: At_100uM_ABA_P Parameter: Plant Line Value: WS
  misc_feature: MA Experiment 20000166 PARAMETER Experiment Name: At_100uM_ABA_P Parameter: Timepoint (hr) Value: 1
  misc_feature: MA Experiment 20000166 PARAMETER Experiment Name: At_100uM_ABA_P Parameter: Tissue Value: Aerial
  misc_feature: MA Experiment 20000166 PARAMETER Experiment Name: At_100uM_ABA_P Parameter: Treatment Value: 100uM ABA vs. No Treatment
  misc_feature: MA Experiment ID: 20000173 Result: Down-regulated in Transcription
  misc_feature: MA Experiment 20000173 PARAMETER Experiment Name: At_42deg_Heat_P Parameter: Age (day) Value: 14
  misc_feature: MA Experiment 20000173 PARAMETER Experiment Name: At_42deg_Heat_P Parameter: Organism Value: A. thaliana
  misc_feature: MA Experiment 20000173 PARAMETER Experiment Name: At_42deg_Heat_P Parameter: Plant Line Value: WS
  misc_feature: MA Experiment 20000173 PARAMETER Experiment Name: At_42deg_Heat_P Parameter: Temperature (deg C) Value: 42 vs. 22
  misc_feature: MA Experiment 20000173 PARAMETER Experiment Name: At_42deg_Heat_P Parameter: Timepoint (hr) Value: 6
  misc_feature: MA Experiment 20000173 PARAMETER Experiment Name: At_42deg_Heat_P Parameter: Tissue Value: Aerial
  misc_feature: MA Experiment ID: 20000180 Result: Up-regulated in Transcription
  misc_feature: MA Experiment 20000180 PARAMETER Experiment Name: At_Germinating_Seeds_P Parameter: Age (hr) Value: 24 vs. 0
  misc_feature: MA Experiment 20000180 PARAMETER Experiment Name: At_Germinating_Seeds_P Parameter: Tissue Value: Germinating Seeds
  misc_feature: MA Experiment ID: 20000184 Result: Down-regulated in Transcription
  misc_feature: MA Experiment 20000184 PARAMETER Experiment Name: At_Shoots__P Parameter: Age (day) Value: 7
  misc_feature: MA Experiment 20000184 PARAMETER Experiment Name: At_Shoots__P Parameter: Tissue Value: Shoots vs. Whole Plant
  misc_feature: MA Experiment ID: 20000185 Result: Down-regulated in Transcription
  misc_feature: MA Experiment 20000185 PARAMETER Experiment Name: At_Roots__P Parameter: Age (day) Value: 7 vs. 21
  misc_feature: MA Experiment 20000185 PARAMETER Experiment Name: At_Roots__P Parameter: Organism Value: A. thaliana
  misc_feature: MA Experiment 20000185 PARAMETER Experiment Name: At_Roots__P Parameter: Tissue Value: Roots vs. Whole Plant
  misc_feature: MA Experiment ID: 20000234 Result: Down-regulated in Transcription
  misc_feature: MA Experiment 20000234 PARAMETER Experiment Name: At_Siliques_P Parameter: Age (day) Value: 21
  misc_feature: MA Experiment 20000234 PARAMETER Experiment Name: At_Siliques_P Parameter: Organism Value: A. thaliana
  misc_feature: MA Experiment 20000234 PARAMETER Experiment Name: At_Siliques_P Parameter: Plant Line Value: WS
  misc_feature: MA Experiment 20000234 PARAMETER Experiment Name: At_Siliques_P Parameter: Tissue Value: Less Than 5mm Siliques vs. Whole Plant
  misc_feature: MA Experiment ID: 20000265 Result: Down-regulated in Transcription
  misc_feature: MA Experiment 20000265 PARAMETER Experiment Name: At_Open_Flower_P Parameter: Age (day) Value: 21
  misc_feature: MA Experiment 20000265 PARAMETER Experiment Name: At_Open_Flower_P Parameter: Plant Line Value: WS
  misc_feature: MA Experiment 20000265 PARAMETER Experiment Name: At_Open_Flower_P Parameter: Tissue Value: Closed Flower vs. Whole Plant
  misc_feature: MA Experiment ID: 20000268 Result: Down-regulated in Transcription
  misc_feature: MA Experiment 20000268 PARAMETER Experiment Name: At_100mM_NaCl__P Parameter: Age (day) Value: 14
  misc_feature: MA Experiment 20000268 PARAMETER Experiment Name: At_100mM_NaCl__P Parameter: Organism Value: A. thaliana
  misc_feature: MA Experiment 20000268 PARAMETER Experiment Name: At_100mM_NaCl__P Parameter: Plant Line Value: WS
  misc_feature: MA Experiment 20000268 PARAMETER Experiment Name: At_100mM_NaCl__P Parameter: Timepoint (hr) Value: 6
  misc_feature: MA Experiment 20000268 PARAMETER Experiment Name: At_100mM_NaCl__P Parameter: Tissue Value: Whole Plant
  misc_feature: MA Experiment 20000268 PARAMETER Experiment Name: At_100mM_NaCl__P Parameter: Treatment Value: 100mM NaCl vs. No Treatment
  misc_feature: MA Experiment ID: 20000308 Result: Down-regulated in Transcription
  misc_feature: MA Experiment 20000308 PARAMETER Experiment Name: At_100mM_NaCl__P Parameter: Age (day) Value: 17
  misc_feature: MA Experiment 20000308 PARAMETER Experiment Name: At_100mM_NaCl__P Parameter: Organism Value: A. thaliana
  misc_feature: MA Experiment 20000308 PARAMETER Experiment Name: At_100mM_NaCl__P Parameter: Plant Line Value: WS
  misc_feature: MA Experiment 20000308 PARAMETER Experiment Name: At_100mM_NaCl__P Parameter: Timepoint (hr) Value: 72
  misc_feature: MA Experiment 20000308 PARAMETER Experiment Name: At_100mM_NaCl__P Parameter: Tissue Value: Whole Plant
  misc_feature: MA Experiment 20000308 PARAMETER Experiment Name: At_100mM_NaCl__P Parameter: Treatment Value: 100mM NaCl vs. No Treatment
  misc_feature: MA Experiment ID: 20000437 Result: Down-regulated in Transcription
  misc_feature: MA Experiment 20000437 PARAMETER Experiment Name: At_Drought_P Parameter: Age (day) Value: 8
  misc_feature: MA Experiment 20000437 PARAMETER Experiment Name: At_Drought_P Parameter: Organism Value: A. thaliana
  misc_feature: MA Experiment 20000437 PARAMETER Experiment Name: At_Drought_P Parameter: Plant Line Value: WS
  misc_feature: MA Experiment 20000437 PARAMETER Experiment Name: At_Drought_P Parameter: Timepoint (hr) Value: 24
  misc_feature: MA Experiment 20000437 PARAMETER Experiment Name: At_Drought_P Parameter: Tissue Value: Whole Plant
  misc_feature: MA Experiment 20000437 PARAMETER Experiment Name: At_Drought_P Parameter: Treatment Value: Drought vs. No Drought
  misc_feature: MA Experiment ID: 20000438 Result: Down-regulated in Transcription
  misc_feature: MA Experiment 20000438 PARAMETER Experiment Name: At_Shoots__P Parameter: Age (day) Value: 14
  misc_feature: MA Experiment 20000438 PARAMETER Experiment Name: At_Shoots__P Parameter: Tissue Value: Shoots vs. Whole Plant
  misc_feature: MA Experiment ID: 20000439 Result: Down-regulated in Transcription
  misc_feature: MA Experiment 20000439 PARAMETER Experiment Name: At_Roots__P Parameter: Age (day) Value: 14 vs. 21
  misc_feature: MA Experiment 20000439 PARAMETER Experiment Name: At_Roots__P Parameter: Organism Value: A. thaliana
  misc_feature: MA Experiment 20000439 PARAMETER Experiment Name: At_Roots__P Parameter: Tissue Value: Roots vs. Whole Plant
  misc_feature: MA Experiment ID: 20000455 Result: Down-regulated in Transcription
  misc_feature: MA Experiment 20000455 PARAMETER Experiment Name: At_100uM_ABA_P Parameter: Age (day) Value: 16
  misc_feature: MA Experiment 20000455 PARAMETER Experiment Name: At_100uM_ABA_P Parameter: Organism Value: A. thaliana
  misc_feature: MA Experiment 20000455 PARAMETER Experiment Name: At_100uM_ABA_P Parameter: Plant Line Value: WS
  misc_feature: MA Experiment 20000455 PARAMETER Experiment Name: At_100uM_ABA_P Parameter: Timepoint (hr) Value: 48
  misc_feature: MA Experiment 20000455 PARAMETER Experiment Name: At_100uM_ABA_P Parameter: Tissue Value: Aerial
  misc_feature: MA Experiment 20000455 PARAMETER Experiment Name: At_100uM_ABA_P Parameter: Treatment Value: 100uM ABA vs. No Treatment
  misc_feature: MA Experiment ID: 20000575 Result: Down-regulated in Transcription
  misc_feature: MA Experiment 20000575 PARAMETER Experiment Name: At_100uM_ABA_Mutants__P Parameter: Organism Value: A. thaliana
  misc_feature: MA Experiment 20000575 PARAMETER Experiment Name: At_100uM_ABA_Mutants__P Parameter: Plant Line Value: CS22
  misc_feature: MA Experiment 20000575 PARAMETER Experiment Name: At_100uM_ABA_Mutants__P Parameter: Timepoint (hr) Value: 6
  misc_feature: MA Experiment 20000575 PARAMETER Experiment Name: At_100uM_ABA_Mutants__P Parameter: Tissue Value: Whole Plant
  misc_feature: MA Experiment 20000575 PARAMETER Experiment Name: At_100uM_ABA_Mutants__P Parameter: Treatment Value: 1uM ABA vs. No Treatment
  misc_feature: MA Experiment ID: 20000576 Result: Down-regulated in Transcription
  misc_feature: MA Experiment 20000576 PARAMETER Experiment Name: At_100uM_ABA_Mutants__P Parameter: Organism Value: A. thaliana
  misc_feature: MA Experiment 20000576 PARAMETER Experiment Name: At_100uM_ABA_Mutants__P Parameter: Plant Line Value: CS23
  misc_feature: MA Experiment 20000576 PARAMETER Experiment Name: At_100uM_ABA_Mutants__P Parameter: Timepoint (hr) Value: 6
  misc_feature: MA Experiment 20000576 PARAMETER Experiment Name: At_100uM_ABA_Mutants__P Parameter: Tissue Value: Whole Plant
  misc_feature: MA Experiment 20000576 PARAMETER Experiment Name: At_100uM_ABA_Mutants__P Parameter: Treatment Value: 1uM ABA vs. No Treatment
  misc_feature: MA Experiment ID: 20000794 Result: Up-regulated in Transcription
  misc_feature: MA Experiment 20000794 PARAMETER Experiment Name: At_Petals_P Parameter: Age (day) Value: 23-25 days
  misc_feature: MA Experiment 20000794 PARAMETER Experiment Name: At_Petals_P Parameter: Plant Line Value: WS
  misc_feature: MA Experiment 20000794 PARAMETER Experiment Name: At_Petals_P Parameter: Tissue Value: Petals vs. Whole plant
  misc_feature: MA Experiment ID: 20001247 Result: Up-regulated in Transcription
  misc_feature: MA Experiment 20001247 PARAMETER Experiment Name: At_Far-red-induction_P Parameter: Age (day) Value: 7
  misc_feature: MA Experiment 20001247 PARAMETER Experiment Name: At_Far-red-induction_P Parameter: Light Value: Far-red vs. White
  misc_feature: MA Experiment 20001247 PARAMETER Experiment Name: At_Far-red-induction_P Parameter: Organism Value: A. thaliana
  misc_feature: MA Experiment 20001247 PARAMETER Experiment Name: At_Far-red-induction_P Parameter: Plant Line Value: Columbia
  misc_feature: MA Experiment 20001247 PARAMETER Experiment Name: At_Far-red-induction_P Parameter: Timepoint (hr) Value: 1
  misc_feature: MA Experiment 20001247 PARAMETER Experiment Name: At_Far-red-induction_P Parameter: Tissue Value: Whole Plant
  misc_feature: MA Experiment ID: 20001248 Result: Up-regulated in Transcription
  misc_feature: MA Experiment 20001248 PARAMETER Experiment Name: At_Far-red-induction_P Parameter: Age (day) Value: 7
  misc_feature: MA Experiment 20001248 PARAMETER Experiment Name: At_Far-red-induction_P Parameter: Light Value: Far-red vs. White
  misc_feature: MA Experiment 20001248 PARAMETER Experiment Name: At_Far-red-induction_P Parameter: Organism Value: A. thaliana
  misc_feature: MA Experiment 20001248 PARAMETER Experiment Name: At_Far-red-induction_P Parameter: Plant Line Value: Columbia
  misc_feature: MA Experiment 20001248 PARAMETER Experiment Name: At_Far-red-induction_P Parameter: Timepoint (hr) Value: 4
  misc_feature: MA Experiment 20001248 PARAMETER Experiment Name: At_Far-red-induction_P Parameter: Tissue Value: Whole Plant
  misc_feature: MA Experiment ID: 20001450 Result: Up-regulated in Transcription
  misc_feature: MA Experiment 20001450 PARAMETER Experiment Name: At_Far-red-induction_P Parameter: Age (day) Value: 7
  misc_feature: MA Experiment 20001450 PARAMETER Experiment Name: At_Far-red-induction_P Parameter: Light Value: Far-red vs. White
  misc_feature: MA Experiment 20001450 PARAMETER Experiment Name: At_Far-red-induction_P Parameter: Organism Value: A. thaliana
  misc_feature: MA Experiment 20001450 PARAMETER Experiment Name: At_Far-red-induction_P Parameter: Plant Line Value: Columbia
  misc_feature: MA Experiment 20001450 PARAMETER Experiment Name: At_Far-red-induction_P Parameter: Timepoint (hr) Value: 8
  misc_feature: MA Experiment 20001450 PARAMETER Experiment Name: At_Far-red-induction_P Parameter: Tissue Value: Whole Plant
  misc_feature: MA Experiment ID: 20001451 Result: Up-regulated in Transcription
  misc_feature: MA Experiment 20001451 PARAMETER Experiment Name: At_Far-red-induction_P Parameter: Age (day) Value: 7
  misc_feature: MA Experiment 20001451 PARAMETER Experiment Name: At_Far-red-induction_P Parameter: Light Value: Far-red vs. White
  misc_feature: MA Experiment 20001451 PARAMETER Experiment Name: At_Far-red-induction_P Parameter: Organism Value: A. thaliana
  misc_feature: MA Experiment 20001451 PARAMETER Experiment Name: At_Far-red-induction_P Parameter: Plant Line Value: Columbia
  misc_feature: MA Experiment 20001451 PARAMETER Experiment Name: At_Far-red-induction_P Parameter: Timepoint (hr) Value: 24
  misc_feature: MA Experiment 20001451 PARAMETER Experiment Name: At_Far-red-induction_P Parameter: Tissue Value: Whole Plant
  misc_feature: MA Experiment ID: 20001555 Result: Down-regulated in Transcription
  misc_feature: MA Experiment 20001555 PARAMETER Experiment Name: At_Drought_Soil_Dry_P Parameter: Age (day) Value: 24
  misc_feature: MA Experiment 20001555 PARAMETER Experiment Name: At_Drought_Soil_Dry_P Parameter: Organism Value: A. thaliana
  misc_feature: MA Experiment 20001555 PARAMETER Experiment Name: At_Drought_Soil_Dry_P Parameter: Plant Line Value: WS
  misc_feature: MA Experiment 20001555 PARAMETER Experiment Name: At_Drought_Soil_Dry_P Parameter: Post Timepoint (hr) Value: None
  misc_feature: MA Experiment 20001555 PARAMETER Experiment Name: At_Drought_Soil_Dry_P Parameter: Post-Treatment Value: None
  misc_feature: MA Experiment 20001555 PARAMETER Experiment Name: At_Drought_Soil_Dry_P Parameter: Timepoint (day) Value: 10
  misc_feature: MA Experiment 20001555 PARAMETER Experiment Name: At_Drought_Soil_Dry_P Parameter: Treatment Value: Drought vs. No Drought
  misc_feature: MA Experiment ID: 20001556 Result: Down-regulated in Transcription
  misc_feature: MA Experiment 20001556 PARAMETER Experiment Name: At_Drought_Soil_Dry_P Parameter: Age (day) Value: 26
  misc_feature: MA Experiment 20001556 PARAMETER Experiment Name: At_Drought_Soil_Dry_P Parameter: Organism Value: A. thaliana
  misc_feature: MA Experiment 20001556 PARAMETER Experiment Name: At_Drought_Soil_Dry_P Parameter: Plant Line Value: WS
  misc_feature: MA Experiment 20001556 PARAMETER Experiment Name: At_Drought_Soil_Dry_P Parameter: Post Timepoint (hr) Value: None
  misc_feature: MA Experiment 20001556 PARAMETER Experiment Name: At_Drought_Soil_Dry_P Parameter: Post-Treatment Value: None
  misc_feature: MA Experiment 20001556 PARAMETER Experiment Name: At_Drought_Soil_Dry_P Parameter: Timepoint (day) Value: 12
  misc_feature: MA Experiment 20001556 PARAMETER Experiment Name: At_Drought_Soil_Dry_P Parameter: Treatment Value: Drought vs. No Drought
  misc_feature: MA Experiment ID: 20001557 Result: Down-regulated in Transcription
  misc_feature: MA Experiment 20001557 PARAMETER Experiment Name: At_Drought_Soil_Dry_P Parameter: Age (day) Value: 27
  misc_feature: MA Experiment 20001557 PARAMETER Experiment Name: At_Drought_Soil_Dry_P Parameter: Organism Value: A. thaliana
  misc_feature: MA Experiment 20001557 PARAMETER Experiment Name: At_Drought_Soil_Dry_P Parameter: Plant Line Value: WS
  misc_feature: MA Experiment 20001557 PARAMETER Experiment Name: At_Drought_Soil_Dry_P Parameter: Post Timepoint (hr) Value: 3
  misc_feature: MA Experiment 20001557 PARAMETER Experiment Name: At_Drought_Soil_Dry_P Parameter: Post-Treatment Value: Re-Water vs. No Drought
  misc_feature: MA Experiment 20001557 PARAMETER Experiment Name: At_Drought_Soil_Dry_P Parameter: Timepoint (day) Value: 13
  misc_feature: MA Experiment 20001557 PARAMETER Experiment Name: At_Drought_Soil_Dry_P Parameter: Treatment Value: Drought vs. No Drought
  misc_feature: MA Experiment ID: 20001558 Result: Down-regulated in Transcription
  misc_feature: MA Experiment 20001558 PARAMETER Experiment Name: At_Drought_Soil_Dry_P Parameter: Age (day) Value: 27
  misc_feature: MA Experiment 20001558 PARAMETER Experiment Name: At_Drought_Soil_Dry_P Parameter: Organism Value: A. thaliana
  misc_feature: MA Experiment 20001558 PARAMETER Experiment Name: At_Drought_Soil_Dry_P Parameter: Plant Line Value: WS
  misc_feature: MA Experiment 20001558 PARAMETER Experiment Name: At_Drought_Soil_Dry_P Parameter: Post Timepoint (hr) Value: 6
  misc_feature: MA Experiment 20001558 PARAMETER Experiment Name: At_Drought_Soil_Dry_P Parameter: Post-Treatment Value: Re-Water vs. No Drought
  misc_feature: MA Experiment 20001558 PARAMETER Experiment Name: At_Drought_Soil_Dry_P Parameter: Timepoint (day) Value: 13
  misc_feature: MA Experiment 20001558 PARAMETER Experiment Name: At_Drought_Soil_Dry_P Parameter: Treatment Value: Drought vs. No Drought
  misc_feature: MA Experiment ID: 20001559 Result: Down-regulated in Transcription
  misc_feature: MA Experiment 20001559 PARAMETER Experiment Name: At_Drought_Soil_Dry_P Parameter: Age (day) Value: 28
  misc_feature: MA Experiment 20001559 PARAMETER Experiment Name: At_Drought_Soil_Dry_P Parameter: Organism Value: A. thaliana
  misc_feature: MA Experiment 20001559 PARAMETER Experiment Name: At_Drought_Soil_Dry_P Parameter: Plant Line Value: WS
  misc_feature: MA Experiment 20001559 PARAMETER Experiment Name: At_Drought_Soil_Dry_P Parameter: Post Timepoint (hr) Value: 29
  misc_feature: MA Experiment 20001559 PARAMETER Experiment Name: At_Drought_Soil_Dry_P Parameter: Post-Treatment Value: Re-Water vs. No Drought
  misc_feature: MA Experiment 20001559 PARAMETER Experiment Name: At_Drought_Soil_Dry_P Parameter: Timepoint (day) Value: 14
  misc_feature: MA Experiment 20001559 PARAMETER Experiment Name: At_Drought_Soil_Dry_P Parameter: Treatment Value: Drought vs. No Drought
  misc_feature: MA Experiment ID: 20001560 Result: Down-regulated in Transcription
  misc_feature: MA Experiment 20001560 PARAMETER Experiment Name: At_Drought_Soil_Dry_P Parameter: Age (day) Value: 28
  misc_feature: MA Experiment 20001560 PARAMETER Experiment Name: At_Drought_Soil_Dry_P Parameter: Organism Value: A. thaliana
  misc_feature: MA Experiment 20001560 PARAMETER Experiment Name: At_Drought_Soil_Dry_P Parameter: Plant Line Value: WS
  misc_feature: MA Experiment 20001560 PARAMETER Experiment Name: At_Drought_Soil_Dry_P Parameter: Post Timepoint (hr) Value: None
  misc_feature: MA Experiment 20001560 PARAMETER Experiment Name: At_Drought_Soil_Dry_P Parameter: Post-Treatment Value: None
  misc_feature: MA Experiment 20001560 PARAMETER Experiment Name: At_Drought_Soil_Dry_P Parameter: Timepoint (day) Value: 14
  misc_feature: MA Experiment 20001560 PARAMETER Experiment Name: At_Drought_Soil_Dry_P Parameter: Treatment Value: Drought vs. No Drought
  misc_feature: MA Experiment ID: 20001904 Result: Down-regulated in Transcription
  misc_feature: MA Experiment 20001904 PARAMETER Experiment Name: At_Drought_Reproduction_P Parameter: Age (day) Value: 37
  misc_feature: MA Experiment 20001904 PARAMETER Experiment Name: At_Drought_Reproduction_P Parameter: Organism Value: A. thaliana
  misc_feature: MA Experiment 20001904 PARAMETER Experiment Name: At_Drought_Reproduction_P Parameter: Plant Line Value: WS
  misc_feature: MA Experiment 20001904 PARAMETER Experiment Name: At_Drought_Reproduction_P Parameter: Timepoint (day) Value: 7
  misc_feature: MA Experiment 20001904 PARAMETER Experiment Name: At_Drought_Reproduction_P Parameter: Tissue Value: Rosettes
  misc_feature: MA Experiment 20001904 PARAMETER Experiment Name: At_Drought_Reproduction_P Parameter: Treatment Value: Drought vs. No Drought
  misc_feature: MA Experiment ID: 20001905 Result: Down-regulated in Transcription
  misc_feature: MA Experiment 20001905 PARAMETER Experiment Name: At_Drought_Reproduction_P Parameter: Age (day) Value: 40
  misc_feature: MA Experiment 20001905 PARAMETER Experiment Name: At_Drought_Reproduction_P Parameter: Organism Value: A. thaliana
  misc_feature: MA Experiment 20001905 PARAMETER Experiment Name: At_Drought_Reproduction_P Parameter: Plant Line Value: WS
  misc_feature: MA Experiment 20001905 PARAMETER Experiment Name: At_Drought_Reproduction_P Parameter: Timepoint (day) Value: 10
  misc_feature: MA Experiment 20001905 PARAMETER Experiment Name: At_Drought_Reproduction_P Parameter: Tissue Value: Rosettes
  misc_feature: MA Experiment 20001905 PARAMETER Experiment Name: At_Drought_Reproduction_P Parameter: Treatment Value: Drought vs. No Drought
  misc_feature: MA Experiment ID: 20001910 Result: Up-regulated in Transcription
  misc_feature: MA Experiment 20001910 PARAMETER Experiment Name: At_Drought_Reproduction_P Parameter: Age (day) Value: 37
  misc_feature: MA Experiment 20001910 PARAMETER Experiment Name: At_Drought_Reproduction_P Parameter: Organism Value: A. thaliana
  misc_feature: MA Experiment 20001910 PARAMETER Experiment Name: At_Drought_Reproduction_P Parameter: Plant Line Value: WS
  misc_feature: MA Experiment 20001910 PARAMETER Experiment Name: At_Drought_Reproduction_P Parameter: Timepoint (day) Value: 7
  misc_feature: MA Experiment 20001910 PARAMETER Experiment Name: At_Drought_Reproduction_P Parameter: Tissue Value: Flowers
  misc_feature: MA Experiment 20001910 PARAMETER Experiment Name: At_Drought_Reproduction_P Parameter: Treatment Value: Drought vs. No Drought
  misc_feature: MA Experiment ID: 20001911 Result: Up-regulated in Transcription
  misc_feature: MA Experiment 20001911 PARAMETER Experiment Name: At_Drought_Reproduction_P Parameter: Age (day) Value: 40
  misc_feature: MA Experiment 20001911 PARAMETER Experiment Name: At_Drought_Reproduction_P Parameter: Organism Value: A. thaliana
  misc_feature: MA Experiment 20001911 PARAMETER Experiment Name: At_Drought_Reproduction_P Parameter: Plant Line Value: WS
  misc_feature: MA Experiment 20001911 PARAMETER Experiment Name: At_Drought_Reproduction_P Parameter: Timepoint (day) Value: 10
  misc_feature: MA Experiment 20001911 PARAMETER Experiment Name: At_Drought_Reproduction_P Parameter: Tissue Value: Flowers
  misc_feature: MA Experiment 20001911 PARAMETER Experiment Name: At_Drought_Reproduction_P Parameter: Treatment Value: Drought vs. No Drought
gacgattttcaattaactctcttcttttttttttttttggtttttcatttaagtctattcaatcatggaaaccggtttaaacatcttaaagctatcgctatgcgtcagcctagtcgtggttggatcatatgctcaggctcccgcaccatggaatccatctaatgggtttcgtccggggacatgtgaccactacgagtgtcccacctataaattggtagaggccggatacggctttgagatccgcatgtacgacgctgccctatggatatctactagtcctatcccctccctatccatgactcaagccaccaaaaccggtttccgacgattaaataggtacatagaaggagataacaagagcaacgtgaagatgaacatgacagctccggtgatcgcacaagcaacgcctggaagatcagtctacacggtctcactctacctcccgaagaagaaccaacagaacccacctcaggccgatgatctccacgtgcggtctacgaaaccaacctacgtagccgtgagacagatcggtggctacgtgtcgaacaatgtagccaaggaagaagctgcggctctgatggaaagcctccgggattctaactggattttgcccatcgagaagagcaaaggaaagtcgccggcgtatttactcgctgtttataacccgccgtctcataccacggctagggtgattaatgagatcatggttccgtttaacatgtaatgatcatgttaatgacgccctcacgatttgattgttacgtagcaattggattagaagaggtggtttagaaccgatactgtaacagcagcttgcagcttctggtttaaccggtataaattgtatctctggttaagtggtgattaatattgttatttgt

SEQ ID NO: 49851 - protein, 219 aa, Arabidopsis thaliana
  peptide (1)..(219): Ceres Seq. ID no. 14307606
  misc_feature (42)..(218): Pfam Name: SOUL heme-binding protein Pfam Description: SOUL heme-binding protein
  misc_feature (57)..(202): Homolog of NCBI NO: 15778345 NR Description: C6ORF34B [Homo sapiens]
  misc_feature (28)..(202): Homolog of NCBI NO: 7657603 NR Description: heme binding protein 2
  misc_feature (46)..(213): Homolog of NCBI NO: 28278449 NR Description: Similar to heme binding protein 2 [Danio rerio]
  misc_feature (44)..(213): Homolog of NCBI NO: 34904402 NR Description: unnamed protein product [Oryza sativa (japonica
  misc_feature (1)..(219): Homolog of NCBI NO: 21593898 NR Description: SOUL-like protein [Arabidopsis thaliana]
  misc_feature (1)..(219): Homolog of NCBI NO: 18411970 NR Description: expressed protein [Arabidopsis thaliana]
  misc_feature (37)..(218): Homolog of NCBI NO: 34903864 NR Description: unnamed protein product [Oryza sativa (japonica
  misc_feature (1)..(219): Homolog of NCBI NO: 15220033 NR Description: SOUL-related protein [Arabidopsis thaliana]
  misc_feature (103)..(219): Homolog of NCBI NO: 16323115 NR Description: At1g78460/F3F9_3 [Arabidopsis thaliana]
  misc_feature (1)..(219): Homolog of NCBI NO: 15218357 NR Description: expressed protein [Arabidopsis thaliana]
METGLNILKLSLCVSLVVVGSYAQAPAPWNPSNGFRPGTCDHYECPTYKLVEAGYGFEIRMYDAALWISTSPIPSLSMTQATKTGFRRLNRYIEGDNKSNVKMNMTAPVIAQATPGRSVYTVSLYLPKKNQQNPPQADDLHVRSTKPTYVAVRQIGGYVSNNVAKEEAAALMESLRDSNWILPIEKSKGKSPAYLLAVYNPPSHTTARVINEIMVPFNM

SEQ ID NO: 49852 - protein, 159 aa, Arabidopsis thaliana
  peptide (1)..(159): Ceres Seq. ID no. 14307607
  misc_feature (1)..(158): Pfam Name: SOUL heme-binding protein Pfam Description: SOUL heme-binding protein
  misc_feature (1)..(142): Homolog of NCBI NO: 15778345 NR Description: C6ORF34B [Homo sapiens]
  misc_feature (1)..(142): Homolog of NCBI NO: 7657603 NR Description: heme binding protein 2
  misc_feature (1)..(153): Homolog of NCBI NO: 28278449 NR Description: Similar to heme binding protein 2 [Danio rerio]
  misc_feature (1)..(153): Homolog of NCBI NO: 34904402 NR Description: unnamed protein product [Oryza sativa (japonica
  misc_feature (1)..(159): Homolog of NCBI NO: 21593898 NR Description: SOUL-like protein [Arabidopsis thaliana]
  misc_feature (1)..(159): Homolog of NCBI NO: 18411970 NR Description: expressed protein [Arabidopsis thaliana]
  misc_feature (1)..(158): Homolog of NCBI NO: 34903864 NR Description: unnamed protein product [Oryza sativa (japonica
  misc_feature (1)..(159): Homolog of NCBI NO: 15220033 NR Description: SOUL-related protein [Arabidopsis thaliana]
  misc_feature (43)..(159): Homolog of NCBI NO: 16323115 NR Description: At1g78460/F3F9_3 [Arabidopsis thaliana]
  misc_feature (1)..(159): Homolog of NCBI NO: 15218357 NR Description: expressed protein [Arabidopsis thaliana]
MYDAALWISTSPIPSLSMTQATKTGFRRLNRYIEGDNKSNVKMNMTAPVIAQATPGRSVYTVSLYLPKKNQQNPPQADDLHVRSTKPTYVAVRQIGGYVSNNVAKEEAAALMESLRDSNWILPIEKSKGKSPAYLLAVYNPPSHTTARVINEIMVPFNM

SEQ ID NO: 49853 - protein, 142 aa, Arabidopsis thaliana
  peptide (1)..(142): Ceres Seq. ID no. 14307608
  misc_feature (1)..(141): Pfam Name: SOUL heme-binding protein Pfam Description: SOUL heme-binding protein
  misc_feature (1)..(125): Homolog of NCBI NO: 15778345 NR Description: C6ORF34B [Homo sapiens]
  misc_feature (1)..(125): Homolog of NCBI NO: 7657603 NR Description: heme binding protein 2
  misc_feature (1)..(136): Homolog of NCBI NO: 28278449 NR Description: Similar to heme binding protein 2 [Danio rerio]
  misc_feature (1)..(136): Homolog of NCBI NO: 34904402 NR Description: unnamed protein product [Oryza sativa (japonica
  misc_feature (1)..(142): Homolog of NCBI NO: 21593898 NR Description: SOUL-like protein [Arabidopsis thaliana]
  misc_feature (1)..(142): Homolog of NCBI NO: 18411970 NR Description: expressed protein [Arabidopsis thaliana]
  misc_feature (1)..(141): Homolog of NCBI NO: 34903864 NR Description: unnamed protein product [Oryza sativa (japonica
  misc_feature (1)..(142): Homolog of NCBI NO: 15220033 NR Description: SOUL-related protein [Arabidopsis thaliana]
  misc_feature (26)..(142): Homolog of NCBI NO: 16323115 NR Description: At1g78460/F3F9_3 [Arabidopsis thaliana]
  misc_feature (1)..(142): Homolog of NCBI NO: 15218357 NR Description: expressed protein [Arabidopsis thaliana]
MTQATKTGFRRLNRYIEGDNKSNVKMNMTAPVIAQATPGRSVYTVSLYLPKKNQQNPPQADDLHVRSTKPTYVAVRQIGGYVSNNVAKEEAAALMESLRDSNWILPIEKSKGKSPAYLLAVYNPPSHTTARVINEIMVPFNM

SEQ ID NO: 49854 - DNA, 3311 bp, Arabidopsis thaliana
  misc_feature (1)..(3311): Ceres Seq. ID no. 12591089
  misc_feature: MA Experiment ID: 20000180 Result: Up-regulated in Transcription
  misc_feature: MA Experiment 20000180 PARAMETER Experiment Name: At_Germinating_Seeds_P Parameter: Age (hr) Value: 24 vs. 0
  misc_feature: MA Experiment 20000180 PARAMETER Experiment Name: At_Germinating_Seeds_P Parameter: Tissue Value: Germinating Seeds
  misc_feature: MA Experiment ID: 20000495 Result: Up-regulated in Transcription
  misc_feature: MA Experiment 20000495 PARAMETER Experiment Name: At_Guard_Cells_P Parameter: Harvest Date Value: 8/2/2002
  misc_feature: MA Experiment 20000495 PARAMETER Experiment Name: At_Guard_Cells_P Parameter: Organism Value: A. thaliana
  misc_feature: MA Experiment 20000495 PARAMETER Experiment Name: At_Guard_Cells_P Parameter: Tissue Value: Guard Cells vs. Leaves
  misc_feature: MA Experiment ID: 20000794 Result: Up-regulated in Transcription
  misc_feature: MA Experiment 20000794 PARAMETER Experiment Name: At_Petals_P Parameter: Age (day) Value: 23-25 days
  misc_feature: MA Experiment 20000794 PARAMETER Experiment Name: At_Petals_P Parameter: Plant Line Value: WS
  misc_feature: MA Experiment 20000794 PARAMETER Experiment Name: At_Petals_P Parameter: Tissue Value: Petals vs. Whole plant
  misc_feature: MA Experiment ID: 20001905 Result: Up-regulated in Transcription
  misc_feature: MA Experiment 20001905 PARAMETER Experiment Name: At_Drought_Reproduction_P Parameter: Age (day) Value: 40
  misc_feature: MA Experiment 20001905 PARAMETER Experiment Name: At_Drought_Reproduction_P Parameter: Organism Value: A. thaliana
  misc_feature: MA Experiment 20001905 PARAMETER Experiment Name: At_Drought_Reproduction_P Parameter: Plant Line Value: WS
  misc_feature: MA Experiment 20001905 PARAMETER Experiment Name: At_Drought_Reproduction_P Parameter: Timepoint (day) Value: 10
  misc_feature: MA Experiment 20001905 PARAMETER Experiment Name: At_Drought_Reproduction_P Parameter: Tissue Value: Rosettes
  misc_feature: MA Experiment 20001905 PARAMETER Experiment Name: At_Drought_Reproduction_P Parameter: Treatment Value: Drought vs. No Drought
ctaacgatttatcattttcgatgagacattgttttacagagatatttttgttgcaatgatatctctgtatcaaatattggccgagaagaagaagaagaagaaaaatgatcttaacatctttgcattttctgtttttgccatcatttgcttcaaattttatagtgtaaatgctatcaaattaccgcagcaagaagtcgatgctctgcagcaaatcgctaccacattgggctcgaaattctggaaattcgatgctgaaaattgtaagattgaaatggtggggttaactgaaactcctcctccaacagctaagcaagaaatagaatgtgaatgcagtcccactaacgacactgattgtcatgttgtcaaatttgcattcaaggaccataatcttccaggaactcttcctcaaatagtcaagcttccctaccttcgggagatagacttggcctacaactacatcaatgggaccttacctcgtgaatgggcttcttcaaatttaacttttatttctcttcttgtgaatcggttgtctggagaaattccgaaggagtttggaaactcttctctaacatacttggatctcgagtcaaatgcgttttctggaactattcctcaggagcttgggaacttagtccacttgaaaaaactgttgctttcctctaacaaattgaccggaactttgccagcttcactagctagactacagaatatgacagatttcaggattaacgatcttcaactcagtggaacgatacctagttacatacaaaattggaagcaactcgagagacttgaaatgattgcatctggtctcactggtccaatcccatcggtcatctcagttctgagcaatcttgttaatctgaggatcagtgatatacgtggaccagtccaaccattcccttcgttgaagaacgtgacaggtctaactaaaattatattgaagaactgtaacatttctggacaaattcctacttatctttcacatttgaaggagttggagacactggatttgagttttaacaagttggttgggggaattccgtcgcttgcacaagcagaaaatttacggcttataattttggctggaaatatgctcgagggagatgctccagatgaattactaagagatggaatcacagaagatctttcatataacaatctcaagtggcagagtcctgaaagtcgtgcttgtcgcccaaatatgaatctgaatctaaacttgtttcagagcacttcgacaaaaaaatcgagcaaatttctgccgtgtatcaaagatttcaaatgtcctcgatattctagctgcttgcatgtgaactgcggtggaagcgatatgtatgttaaggagaaaaaaacaaaagaattatatgaaggagatggaaatgttgaaggtggtgctgctaagtattttttgaagcctgacgctaattggggatttagcagcacaggggacttcatggacgataacaatttccaaaacactagattcaccatgtttgtcccggcatctaaccagtctgatctctacaaatcggcacgaattgctccagtatctctaacttacttccatgcctgcttggaaaatggaaattacactataaatctagacttcgctgagatacggttcaccaatgatgaaaactataaccggcttggaaggcgtctgtttgacatttacattcaggagaaattagtggcaaaggactttaacatcatggatgaagcaaagggagctcaaacacctataatcaaaccacttactgcctatgtgacaaaccactttttaaccatccggttgagttgggccggtaaaggaactaccaggattcccactagaggggtttatggtcctatcatatcggctatttccatagtttcagattccaagccgtgcgaacgtccgaaaactggaatgagccctggagcatatattgcaattggaattggagcaccatgtcttattatctttatactgggatttctgtggatatgtggctgcctcccaagatgtggtcgacaacgaaaagatccgtatgaagaagagttgccttctggaacttttacattgaggcaaatcaaattcgctacggatgacttcaatccaactaacaagattggagaaggtggtttcggtgctgtctttaagggtgtgttagcagatggaagagttgtagcagttaagcaactctcatctaaatcgagacaagggaaccgagaatttctaaacgagataggcgcaatttcttgtcttcaacatccaaatctcgtcaagcttcatggtttctgcgtcgagcgggctcagctattactggcgtacgaatacatggaaaataacagtttatctagcgcgttattcagtccaaagcataaacagataccaatggactggcctactaggtttaagatttgctgcgggatcgcaaagggtctcgcgtttctccatgaggaatcaccgttgaagtttgtacatagagacatcaaggccacaaatattttattggacaaggacttaactcccaagatatctgatttcggattggctaggcttgacgaagaggagaaaacacacatcagcaccaaagttgctgggactataggatatatggcaccagaatacgcactgtggggctacctaactttcaaagcagatgtctacagcttcggtgttttggttctagaaatcgtcgccggcataaccaacagtaatttcatgggggcaggagattccgtttgcctcttagaatttgctaacgagtgcgtagaatcggggcacttgatgcaagtagtggatgagaggttgaggcctgaagtggatagaaaagaagcagaggcggttataaaagtggctctcgtgtgctcgagcgcttctccaacagatcgtcctttaatgtcagaggtcgttgctatgctagaaggtctatatccagtgccagaatcaacaccaggagtaagcaggaacgcaggggatataaggtttaaggcatttaaagatttaaggagaggcatggagaacaatagtaagacgcagtgttctgttaaaagctatccgtcttcttcttcgacttcttctggggcaggacaagcagttcaagaaagaaagaaagaagagtcaaggccttgaagaggttttgaatccttccctctcttttttttttttttgtaaaatgtctgtctttagtaaaatgtttatgagtttattctgtgattagtcatttactgtaattccccatatctgtatttaggttctgttagttggggattgaatgttgtgaaaactcaaaactcaaatgatatataatcagtgatctttc

SEQ ID NO: 49855 - protein, 1021 aa, Arabidopsis thaliana
  peptide (1)..(1021): Ceres Seq. ID no. 12591090
  misc_feature (681)..(879): Pfam Name: Protein kinase domain Pfam Description: Protein kinase domain
  misc_feature (191)..(1006): Homolog of NCBI NO: 25405628 NR Description: hypothetical protein T3F20.25 [imported] -
  misc_feature (147)..(975): Homolog of NCBI NO: 15220545 NR Description: receptor-like serine/threonine kinase, putative
  misc_feature (147)..(975): Homolog of NCBI NO: 12321409 NR Description: receptor protein kinase, putative [Arabidopsis
  misc_feature (122)..(965): Homolog of NCBI NO: 9972372 NR Description: Putative receptor-like serine/threonine kinase -
  misc_feature (666)..(975): Homolog of NCBI NO: 25403088 NR Description: probable receptor-like serine/threonine kinase
  misc_feature (1)..(611): Homolog of NCBI NO: 25403088 NR Description: probable receptor-like serine/threonine kinase
  misc_feature (30)..(1006): Homolog of NCBI NO: 15220789 NR Description: receptor-like serine/threonine kinase, putative
  misc_feature (47)..(351): Homolog of NCBI NO: 25513647 NR Description: probable receptor-like serine/threonine kinase -
  misc_feature (459)..(965): Homolog of NCBI NO: 25513647 NR Description: probable receptor-like serine/threonine kinase -
  misc_feature (30)..(1002): Homolog of NCBI NO: 15220790 NR Description: receptor-like serine/threonine kinase, putative
MISLYQILAEKKKKKKNDLNIFAFSVFAIICFKFYSVNAIKLPQQEVDALQQIATTLGSKFWKFDAENCKIEMVGLTETPPPTAKQEIECECSPTNDTDCHVVKFAFKDHNLPGTLPQIVKLPYLREIDLAYNYINGTLPREWASSNLTFISLLVNRLSGEIPKEFGNSSLTYLDLESNAFSGTIPQELGNLVHLKKLLLSSNKLTGTLPASLARLQNMTDFRINDLQLSGTIPSYIQNWKQLERLEMIASGLTGPIPSVISVLSNLVNLRISDIRGPVQPFPSLKNVTGLTKIILKNCNISGQIPTYLSHLKELETLDLSFNKLVGGIPSLAQAENLRLIILAGNMLEGDAPDELLRDGITEDLSYNNLKWQSPESRACRPNMNLNLNLFQSTSTKKSSKFLPCIKDFKCPRYSSCLHVNCGGSDMYVKEKKTKELYEGDGNVEGGAAKYFLKPDANWGFSSTGDFMDDNNFQNTRFTMFVPASNQSDLYKSARIAPVSLTYFHACLENGNYTINLDFAEIRFTNDENYNRLGRRLFDIYIQEKLVAKDFNIMDEAKGAQTPIIKPLTAYVTNHFLTIRLSWAGKGTTRIPTRGVYGPIISAISIVSDSKPCERPKTGMSPGAYIAIGIGAPCLIIFILGFLWICGCLPRCGRQRKDPYEEELPSGTFTLRQIKFATDDFNPTNKIGEGGFGAVFKGVLADGRVVAVKQLSSKSRQGNREFLNEIGAISCLQHPNLVKLHGFCVERAQLLLAYEYMENNSLSSALFSPKHKQIPMDWPTRFKICCGIAKGLAFLHEESPLKFVHRDIKATNILLDKDLTPKISDFGLARLDEEEKTHISTKVAGTIGYMAPEYALWGYLTFKADVYSFGVLVLEIVAGITNSNFMGAGDSVCLLEFANECVESGHLMQVVDERLRPEVDRKEAEAVIKVALVCSSASPTDRPLMSEVVAMLEGLYPVPESTPGVSRNAGDIRFKAFKDLRRGMENNSKTQCSVKSYPSSSSTSSGAGQAVQERKKEESRP

SEQ ID NO: 49856 - protein, 949 aa, Arabidopsis thaliana
  peptide (1)..(949): Ceres Seq. ID no. 12591091
  misc_feature (609)..(807): Pfam Name: Protein kinase domain Pfam Description: Protein kinase domain
  misc_feature (119)..(934): Homolog of NCBI NO: 25405628 NR Description: hypothetical protein T3F20.25 [imported] -
  misc_feature (75)..(903): Homolog of NCBI NO: 15220545 NR Description: receptor-like serine/threonine kinase, putative
  misc_feature (75)..(903): Homolog of NCBI NO: 12321409 NR Description: receptor protein kinase, putative [Arabidopsis
  misc_feature (50)..(893): Homolog of NCBI NO: 9972372 NR Description: Putative receptor-like serine/threonine kinase -
  misc_feature (594)..(903): Homolog of NCBI NO: 25403088 NR Description: probable receptor-like serine/threonine kinase
  misc_feature (1)..(539): Homolog of NCBI NO: 25403088 NR Description: probable receptor-like serine/threonine kinase
  misc_feature (1)..(934): Homolog of NCBI NO: 15220789 NR Description: receptor-like serine/threonine kinase, putative
  misc_feature (1)..(279): Homolog of NCBI NO: 25513647 NR Description: probable receptor-like serine/threonine kinase -
  misc_feature (387)..(893): Homolog of NCBI NO: 25513647 NR Description: probable receptor-like serine/threonine kinase -
  misc_feature (1)..(930): Homolog of NCBI NO: 15220790 NR Description: receptor-like serine/threonine kinase, putative
MVGLTETPPPTAKQEIECECSPTNDTDCHVVKFAFKDHNLPGTLPQIVKLPYLREIDLAYNYINGTLPREWASSNLTFISLLVNRLSGEIPKEFGNSSLTYLDLESNAFSGTIPQELGNLVHLKKLLLSSNKLTGTLPASLARLQNMTDFRINDLQLSGTIPSYIQNWKQLERLEMIASGLTGPIPSVISVLSNLVNLRISDIRGPVQPFPSLKNVTGLTKIILKNCNISGQIPTYLSHLKELETLDLSFNKLVGGIPSLAQAENLRLIILAGNMLEGDAPDELLRDGITEDLSYNNLKWQSPESRACRPNMNLNLNLFQSTSTKKSSKFLPCIKDFKCPRYSSCLHVNCGGSDMYVKEKKTKELYEGDGNVEGGAAKYFLKPDANWGFSSTGDFMDDNNFQNTRFTMFVPASNQSDLYKSARIAPVSLTYFHACLENGNYTINLDFAEIRFTNDENYNRLGRRLFDIYIQEKLVAKDFNIMDEAKGAQTPIIKPLTAYVTNHFLTIRLSWAGKGTTRIPTRGVYGPIISAISIVSDSKPCERPKTGMSPGAYIAIGIGAPCLIIFILGFLWICGCLPRCGRQRKDPYEEELPSGTFTLRQIKFATDDFNPTNKIGEGGFGAVFKGVLADGRVVAVKQLSSKSRQGNREFLNEIGAISCLQHPNLVKLHGFCVERAQLLLAYEYMENNSLSSALFSPKHKQIPMDWPTRFKICCGIAKGLAFLHEESPLKFVHRDIKATNILLDKDLTPKISDFGLARLDEEEKTHISTKVAGTIGYMAPEYALWGYLTFKADVYSFGVLVLEIVAGITNSNFMGAGDSVCLLEFANECVESGHLMQVVDERLRPEVDRKEAEAVIKVALVCSSASPTDRPLMSEVVAMLEGLYPVPESTPGVSRNAGDIRFKAFKDLRRGMENNSKTQCSVKSYPSSSSTSSGAGQAVQERKKEESRP

SEQ ID NO: 49857 - protein, 803 aa, Arabidopsis thaliana
  peptide (1)..(803): Ceres Seq. ID no. 12591092
  misc_feature (463)..(661): Pfam Name: Protein kinase domain Pfam Description: Protein kinase domain
  misc_feature (1)..(788): Homolog of NCBI NO: 25405628 NR Description: hypothetical protein T3F20.25 [imported] -
  misc_feature (1)..(757): Homolog of NCBI NO: 15220545 NR Description: receptor-like serine/threonine kinase, putative
  misc_feature (1)..(757): Homolog of NCBI NO: 12321409 NR Description: receptor protein kinase, putative [Arabidopsis
  misc_feature (1)..(747): Homolog of NCBI NO: 9972372 NR Description: Putative receptor-like serine/threonine kinase -
  misc_feature (448)..(757): Homolog of NCBI NO: 25403088 NR Description: probable receptor-like serine/threonine kinase
  misc_feature (1)..(393): Homolog of NCBI NO: 25403088 NR Description: probable receptor-like serine/threonine kinase
  misc_feature (1)..(788): Homolog of NCBI NO: 15220789 NR Description: receptor-like serine/threonine kinase, putative
  misc_feature (1)..(133): Homolog of NCBI NO: 25513647 NR Description: probable receptor-like serine/threonine kinase -
  misc_feature (241)..(747): Homolog of NCBI NO: 25513647 NR Description: probable receptor-like serine/threonine kinase -
  misc_feature (1)..(784): Homolog of NCBI NO: 15220790 NR Description: receptor-like serine/threonine kinase, putative
MTDFRINDLQLSGTIPSYIQNWKQLERLEMIASGLTGPIPSVISVLSNLVNLRISDIRGPVQPFPSLKNVTGLTKIILKNCNISGQIPTYLSHLKELETLDLSFNKLVGGIPSLAQAENLRLIILAGNMLEGDAPDELLRDGITEDLSYNNLKWQSPESRACRPNMNLNLNLFQSTSTKKSSKFLPCIKDFKCPRYSSCLHVNCGGSDMYVKEKKTKELYEGDGNVEGGAAKYFLKPDANWGFSSTGDFMDDNNFQNTRFTMFVPASNQSDLYKSARIAPVSLTYFHACLENGNYTINLDFAEIRFTNDENYNRLGRRLFDIYIQEKLVAKDFNIMDEAKGAQTPIIKPLTAYVTNHFLTIRLSWAGKGTTRIPTRGVYGPIISAISIVSDSKPCERPKTGMSPGAYIAIGIGAPCLIIFILGFLWICGCLPRCGRQRKDPYEEELPSGTFTLRQIKFATDDFNPTNKIGEGGFGAVFKGVLADGRVVAVKQLSSKSRQGNREFLNEIGAISCLQHPNLVKLHGFCVERAQLLLAYEYMENNSLSSALFSPKHKQIPMDWPTRFKICCGIAKGLAFLHEESPLKFVHRDIKATNILLDKDLTPKISDFGLARLDEEEKTHISTKVAGTIGYMAPEYALWGYLTFKADVYSFGVLVLEIVAGITNSNFMGAGDSVCLLEFANECVESGHLMQVVDERLRPEVDRKEAEAVIKVALVCSSASPTDRPLMSEVVAMLEGLYPVPESTPGVSRNAGDIRFKAFKDLRRGMENNSKTQCSVKSYPSSSSTSSGAGQAVQERKKEESRP

SEQ ID NO: 49858 - DNA, 1454 bp, Arabidopsis thaliana
  misc_feature (1)..(1454): Ceres Seq. ID no. 13588706
  misc_feature: MA Experiment ID: 20000180 Result: Down-regulated in Transcription
  misc_feature: MA Experiment 20000180 PARAMETER Experiment Name: At_Germinating_Seeds_P Parameter: Age (hr) Value: 24 vs. 0
  misc_feature: MA Experiment 20000180 PARAMETER Experiment Name: At_Germinating_Seeds_P Parameter: Tissue Value: Germinating Seeds
  misc_feature: MA Experiment ID: 20000182 Result: Up-regulated in Transcription
  misc_feature: MA Experiment 20000182 PARAMETER Experiment Name: At_2mM_SA_P Parameter: Age (day) Value: 14
  misc_feature: MA Experiment 20000182 PARAMETER Experiment Name: At_2mM_SA_P Parameter: Organism Value: A. thaliana
  misc_feature: MA Experiment 20000182 PARAMETER Experiment Name: At_2mM_SA_P Parameter: Plant Line Value: WS
  misc_feature: MA Experiment 20000182 PARAMETER Experiment Name: At_2mM_SA_P Parameter: Timepoint (hr) Value: 6
  misc_feature: MA Experiment 20000182 PARAMETER Experiment Name: At_2mM_SA_P Parameter: Tissue Value: Aerial
  misc_feature: MA Experiment 20000182 PARAMETER Experiment Name: At_2mM_SA_P Parameter: Treatment Value: 2mM SA vs. No Treatment
  misc_feature: MA Experiment ID: 20000437 Result: Up-regulated in Transcription
  misc_feature: MA Experiment 20000437 PARAMETER Experiment Name: At_Drought_P Parameter: Age (day) Value: 8
  misc_feature: MA Experiment 20000437 PARAMETER Experiment Name: At_Drought_P Parameter: Organism Value: A. thaliana
  misc_feature: MA Experiment 20000437 PARAMETER Experiment Name: At_Drought_P Parameter: Plant Line Value: WS
  misc_feature: MA Experiment 20000437 PARAMETER Experiment Name: At_Drought_P Parameter: Timepoint (hr) Value: 24
  misc_feature: MA Experiment 20000437 PARAMETER Experiment Name: At_Drought_P Parameter: Tissue Value: Whole Plant
  misc_feature: MA Experiment 20000437 PARAMETER Experiment Name: At_Drought_P Parameter: Treatment Value: Drought vs. No Drought
  misc_feature: MA Experiment ID: 20000438 Result: Down-regulated in Transcription
  misc_feature: MA Experiment 20000438 PARAMETER Experiment Name: At_Shoots__P Parameter: Age (day) Value: 14
  misc_feature: MA Experiment 20000438 PARAMETER Experiment Name: At_Shoots__P Parameter: Tissue Value: Shoots vs. Whole Plant
  misc_feature: MA Experiment ID: 20000456 Result: Up-regulated in Transcription
  misc_feature: MA Experiment 20000456 PARAMETER Experiment Name: At_100uM_BA_P Parameter: Age (day) Value: 14
  misc_feature: MA Experiment 20000456 PARAMETER Experiment Name: At_100uM_BA_P Parameter: Organism Value: A. thaliana
  misc_feature: MA Experiment 20000456 PARAMETER Experiment Name: At_100uM_BA_P Parameter: Plant Line Value: WS
  misc_feature: MA Experiment 20000456 PARAMETER Experiment Name: At_100uM_BA_P Parameter: Timepoint (hr) Value: 6
  misc_feature: MA Experiment 20000456 PARAMETER Experiment Name: At_100uM_BA_P Parameter: Tissue Value: Aerial
  misc_feature: MA Experiment 20000456 PARAMETER Experiment Name: At_100uM_BA_P Parameter: Treatment Value: 100uM BA vs. No Treatment
  misc_feature: MA Experiment ID: 20000709 Result: Up-regulated in Transcription
  misc_feature: MA Experiment 20000709 PARAMETER Experiment Name: At_15mM_NH4NO3_L-to-H_P Parameter: Age (hr) Value: 14
  misc_feature: MA Experiment 20000709 PARAMETER Experiment Name: At_15mM_NH4NO3_L-to-H_P Parameter: Organism Value: A. thaliana
  misc_feature: MA Experiment 20000709 PARAMETER Experiment Name: At_15mM_NH4NO3_L-to-H_P Parameter: Plant Line Value: WS
  misc_feature: MA Experiment 20000709 PARAMETER Experiment Name: At_15mM_NH4NO3_L-to-H_P Parameter: Timepoint (hr) Value: 4
  misc_feature: MA Experiment 20000709 PARAMETER Experiment Name: At_15mM_NH4NO3_L-to-H_P Parameter: Tissue Value: Aerial
  misc_feature: MA Experiment 20000709 PARAMETER Experiment Name: At_15mM_NH4NO3_L-to-H_P Parameter: Treatment Value: 15mM NH4NO3 vs. 30mM Mannitol
  misc_feature: MA Experiment ID: 20001557 Result: Up-regulated in Transcription
  misc_feature: MA Experiment 20001557 PARAMETER Experiment Name: At_Drought_Soil_Dry_P Parameter: Age (day) Value: 27
  misc_feature: MA Experiment 20001557 PARAMETER Experiment Name: At_Drought_Soil_Dry_P Parameter: Organism Value: A. thaliana
  misc_feature: MA Experiment 20001557 PARAMETER Experiment Name: At_Drought_Soil_Dry_P Parameter: Plant Line Value: WS
  misc_feature: MA Experiment 20001557 PARAMETER Experiment Name: At_Drought_Soil_Dry_P Parameter: Post Timepoint (hr) Value: 3
  misc_feature: MA Experiment 20001557 PARAMETER Experiment Name: At_Drought_Soil_Dry_P Parameter: Post-Treatment Value: Re-Water vs. No Drought
  misc_feature: MA Experiment 20001557 PARAMETER Experiment Name: At_Drought_Soil_Dry_P Parameter: Timepoint (day) Value: 13
  misc_feature: MA Experiment 20001557 PARAMETER Experiment Name: At_Drought_Soil_Dry_P Parameter: Treatment Value: Drought vs. No Drought
  misc_feature: MA Experiment ID: 20001560 Result: Up-regulated in Transcription
  misc_feature: MA Experiment 20001560 PARAMETER Experiment Name: At_Drought_Soil_Dry_P Parameter: Age (day) Value: 28
  misc_feature: MA Experiment 20001560 PARAMETER Experiment Name: At_Drought_Soil_Dry_P Parameter: Organism Value: A. thaliana
  misc_feature: MA Experiment 20001560 PARAMETER Experiment Name: At_Drought_Soil_Dry_P Parameter: Plant Line Value: WS
  misc_feature: MA Experiment 20001560 PARAMETER Experiment Name: At_Drought_Soil_Dry_P Parameter: Post Timepoint (hr) Value: None
  misc_feature: MA Experiment 20001560 PARAMETER Experiment Name: At_Drought_Soil_Dry_P Parameter: Post-Treatment Value: None
  misc_feature: MA Experiment 20001560 PARAMETER Experiment Name: At_Drought_Soil_Dry_P Parameter: Timepoint (day) Value: 14
  misc_feature: MA Experiment 20001560 PARAMETER Experiment Name: At_Drought_Soil_Dry_P Parameter: Treatment Value: Drought vs. No Drought
  misc_feature: MA Experiment ID: 20001904 Result: Up-regulated in Transcription
  misc_feature: MA Experiment 20001904 PARAMETER Experiment Name: At_Drought_Reproduction_P Parameter: Age (day) Value: 37
  misc_feature: MA Experiment 20001904 PARAMETER Experiment Name: At_Drought_Reproduction_P Parameter: Organism Value: A. thaliana
  misc_feature: MA Experiment 20001904 PARAMETER Experiment Name: At_Drought_Reproduction_P Parameter: Plant Line Value: WS
  misc_feature: MA Experiment 20001904 PARAMETER Experiment Name: At_Drought_Reproduction_P Parameter: Timepoint (day) Value: 7
  misc_feature: MA Experiment 20001904 PARAMETER Experiment Name: At_Drought_Reproduction_P Parameter: Tissue Value: Rosettes
  misc_feature: MA Experiment 20001904 PARAMETER Experiment Name: At_Drought_Reproduction_P Parameter: Treatment Value: Drought vs. No Drought
  misc_feature: MA Experiment ID: 20001905 Result: Up-regulated in Transcription
  misc_feature: MA Experiment 20001905 PARAMETER Experiment Name: At_Drought_Reproduction_P Parameter: Age (day) Value: 40
  misc_feature: MA Experiment 20001905 PARAMETER Experiment Name: At_Drought_Reproduction_P Parameter: Organism Value: A. thaliana
  misc_feature: MA Experiment 20001905 PARAMETER Experiment Name: At_Drought_Reproduction_P Parameter: Plant Line Value: WS
  misc_feature: MA Experiment 20001905 PARAMETER Experiment Name: At_Drought_Reproduction_P Parameter: Timepoint (day) Value: 10
  misc_feature: MA Experiment 20001905 PARAMETER Experiment Name: At_Drought_Reproduction_P Parameter: Tissue Value: Rosettes
  misc_feature: MA Experiment 20001905 PARAMETER Experiment Name: At_Drought_Reproduction_P Parameter: Treatment Value: Drought vs. No Drought
gactaacaattagcaacaaaataaaagcacacgaattttcaaatctttctcttctctcgctctctcgaattcttctctctgttcctcgtagatcccctctgtttccgttttcgtcttttcgaattccgaagatctcaaatgggtgaggatgcaatctcaggtaatctcaagaatctaacgatcgacacaagagattcagaaactcttgtggtatgtttcggtgaaatgttgattgattttgttcctacggtgggaggtgtttcattggctgaagcaccagctttcaagaaagctcctggaggagctcctgctaatgtagctgttggtgtctctagacttggtggctcctctgctttcattggaaaggttggtgatgatgagtttggaagaatgttagctgatattctaaggctgaacaatgttgacaactctgggatgagattcgaccataatgcacggactgctttggcctttgttacgctaagaggtgatggagagagggagtttttgttcttcaggcatccgagtgctgatatgcttcttttggaatctgagcttgacaagaacctcatccaaaaggccaagatctttcactacggatctatcagtttgattgaggaaccttgccgttctactcagcttgtagctatgaaaatcgctaaggctgcagggagtcttttatcttatgacccgaatttgagattgccgttgtggccatcagaagaagctgctaggaaagagataatgagtatctggaatttagctgatgttataaagattagcgaagacgagataacattcctgaccggtggtgatgatccttatgatgatgatgtggtgttgcaaaagctctttcatcccaatcttaagcttcttgttgtttcagaaggacctaatggctgtagatactacactcaggagtttaaaggtagagttggtggagtaaaagtgaagccagttgatacaaccggtgcaggagatgcattcgtgagcgggttattgaacagcttagcttctgatcttactcttctcaaggatgagaagaaactaagagaggcgcttctatttgcaaacgcatgtggagccattacagtaacagagagaggagcgataccggcgatgccaagcatggatgctgttcaagatcttctttcttctactcgctcctaaaatgcttcaaaagtctcttttgagtgtatcaattcattaccttttacagtgtttttgtttttttaaatatttttccccaatttgtaggaactcaagaatgttgtgtgtgtttttttagtttgttgttgatctcccggagttttagtattggggtggtttggttttactattatcaagttaggttttctacaaagaacaaattcatgctttgtaaaaactacttgccgttttatgtaacgagaacgacacacactctttaacgcaaaaccattaattgtttagtt

SEQ ID NO: 49859 - protein, 343 aa, Arabidopsis thaliana
  peptide (1)..(343): Ceres Seq. ID no. 13588707
  misc_feature (21)..(331): Pfam Name: pfkB family carbohydrate kinase Pfam Description: pfkB family carbohydrate kinase
  misc_feature (23)..(338): Homolog of NCBI NO: 15224669 NR Description: fructokinase, putative [Arabidopsis thaliana]
  misc_feature (13)..(338): Homolog of NCBI NO: 1915974 NR Description: fructokinase [Lycopersicon esculentum]
  misc_feature (13)..(338): Homolog of NCBI NO: 33329198 NR Description: putative fructokinase
  misc_feature (13)..(338): Homolog of NCBI NO: 33329200 NR Description: putative fructokinase 2
  misc_feature (20)..(343): Homolog of NCBI NO: 7434223 NR Description: fructokinase (EC 2.7.1.4) - beet
  misc_feature (23)..(340): Homolog of NCBI NO: 15234986 NR Description: pfkB type carbohydrate kinase protein family
  misc_feature (9)..(338): Homolog of NCBI NO: 22330456 NR Description: pfkB type carbohydrate kinase protein family
  misc_feature (18)..(338): Homolog of NCBI NO: 23476263 NR Description: fructokinase [Lycopersicon esculentum]
  misc_feature (1)..(339): Homolog of NCBI NO: 7434220 NR Description: fructokinase (EC 2.7.1.4) 1 - tomato
  misc_feature (1)..(343): Homolog of NCBI NO: 15242193 NR Description: fructokinase, putative [Arabidopsis thaliana]
MGEDAISGNLKNLTIDTRDSETLVVCFGEMLIDFVPTVGGVSLAEAPAFKKAPGGAPANVAVGVSRLGGSSAFIGKVGDDEFGRMLADILRLNNVDNSGMRFDHNARTALAFVTLRGDGEREFLFFRHPSADMLLLESELDKNLIQKAKIFHYGSISLIEEPCRSTQLVAMKIAKAAGSLLSYDPNLRLPLWPSEEAARKEIMSIWNLADVIKISEDEITFLTGGDDPYDDDVVLQKLFHPNLKLLVVSEGPNGCRYYTQEFKGRVGGVKVKPVDTTGAGDAFVSGLLNSLASDLTLLKDEKKLREALLFANACGAITVTERGAIPAMPSMDAVQDLLSSTRS

SEQ ID NO: 49860 - protein, 314 aa, Arabidopsis thaliana
  peptide (1)..(314): Ceres Seq. ID no. 13588708
  misc_feature (1)..(302): Pfam Name: pfkB family carbohydrate kinase Pfam Description: pfkB family carbohydrate kinase
  misc_feature (1)..(309): Homolog of NCBI NO: 15224669 NR Description: fructokinase, putative [Arabidopsis thaliana]
  misc_feature (1)..(309): Homolog of NCBI NO: 1915974 NR Description: fructokinase [Lycopersicon esculentum]
  misc_feature (1)..(309): Homolog of NCBI NO: 33329198 NR Description: putative fructokinase
  misc_feature (1)..(309): Homolog of NCBI NO: 33329200 NR Description: putative fructokinase 2
  misc_feature (1)..(314): Homolog of NCBI NO: 7434223 NR Description: fructokinase (EC 2.7.1.4) - beet
  misc_feature (1)..(311): Homolog of NCBI NO: 15234986 NR Description: pfkB type carbohydrate kinase protein family
  misc_feature (1)..(309): Homolog of NCBI NO: 22330456 NR Description: pfkB type carbohydrate kinase protein family
  misc_feature (1)..(309): Homolog of NCBI NO: 23476263 NR Description: fructokinase [Lycopersicon esculentum]
  misc_feature (1)..(310): Homolog of NCBI NO: 7434220 NR Description: fructokinase (EC 2.7.1.4) 1 - tomato
  misc_feature (1)..(314): Homolog of NCBI NO: 15242193 NR Description: fructokinase, putative [Arabidopsis thaliana]
MLIDFVPTVGGVSLAEAPAFKKAPGGAPANVAVGVSRLGGSSAFIGKVGDDEFGRMLADILRLNNVDNSGMRFDHNARTALAFVTLRGDGEREFLFFRHPSADMLLLESELDKNLIQKAKIFHYGSISLIEEPCRSTQLVAMKIAKAAGSLLSYDPNLRLPLWPSEEAARKEIMSIWNLADVIKISEDEITFLTGGDDPYDDDVVLQKLFHPNLKLLVVSEGPNGCRYYTQEFKGRVGGVKVKPVDTTGAGDAFVSGLLNSLASDLTLLKDEKKLREALLFANACGAITVTERGAIPAMPSMDAVQDLLSSTRS

SEQ ID NO: 49861 - protein, 259 aa, Arabidopsis thaliana
  peptide (1)..(259): Ceres Seq. ID no. 13588709
  misc_feature (1)..(247): Pfam Name: pfkB family carbohydrate kinase Pfam Description: pfkB family carbohydrate kinase
  misc_feature (1)..(254): Homolog of NCBI NO: 15224669 NR Description: fructokinase, putative [Arabidopsis thaliana]
  misc_feature (1)..(254): Homolog of NCBI NO: 1915974 NR Description: fructokinase [Lycopersicon esculentum]
  misc_feature (1)..(254): Homolog of NCBI NO: 33329198 NR Description: putative fructokinase
  misc_feature (1)..(254): Homolog of NCBI NO: 33329200 NR Description: putative fructokinase 2
  misc_feature (1)..(259): Homolog of NCBI NO: 7434223 NR Description: fructokinase (EC 2.7.1.4) - beet
  misc_feature (1)..(256): Homolog of NCBI NO: 15234986 NR Description: pfkB type carbohydrate kinase protein family
  misc_feature (1)..(254): Homolog of NCBI NO: 22330456 NR Description: pfkB type carbohydrate kinase protein family
  misc_feature (1)..(254): Homolog of NCBI NO: 23476263 NR Description: fructokinase [Lycopersicon esculentum]
  misc_feature (1)..(255): Homolog of NCBI NO: 7434220 NR Description: fructokinase (EC 2.7.1.4) 1 - tomato
  misc_feature (1)..(259): Homolog of NCBI NO: 15242193 NR Description: fructokinase, putative [Arabidopsis thaliana]
MLADILRLNNVDNSGMRFDHNARTALAFVTLRGDGEREFLFFRHPSADMLLLESELDKNLIQKAKIFHYGSISLIEEPCRSTQLVAMKIAKAAGSLLSYDPNLRLPLWPSEEAARKEIMSIWNLADVIKISEDEITFLTGGDDPYDDDVVLQKLFHPNLKLLVVSEGPNGCRYYTQEFKGRVGGVKVKPVDTTGAGDAFVSGLLNSLASDLTLLKDEKKLREALLFANACGAITVTERGAIPAMPSMDAVQDLLSSTRS

SEQ ID NO: 49862 - DNA, 1620 bp, Arabidopsis thaliana; identical to SEQ ID NO: 42382
  misc_feature (1)..(1620): Ceres Seq. ID no. 13592581
  misc_feature: MA Experiment ID: 20000173 Result: Down-regulated in Transcription
  misc_feature: MA Experiment 20000173 PARAMETER Experiment Name: At_42deg_Heat_P Parameter: Age (day) Value: 14
  misc_feature: MA Experiment 20000173 PARAMETER Experiment Name: At_42deg_Heat_P Parameter: Organism Value: A. thaliana
  misc_feature: MA Experiment 20000173 PARAMETER Experiment Name: At_42deg_Heat_P Parameter: Plant Line Value: WS
  misc_feature: MA Experiment 20000173 PARAMETER Experiment Name: At_42deg_Heat_P Parameter: Temperature (deg C) Value: 42 vs. 22
  misc_feature: MA Experiment 20000173 PARAMETER Experiment Name: At_42deg_Heat_P Parameter: Timepoint (hr) Value: 6
  misc_feature: MA Experiment 20000173 PARAMETER Experiment Name: At_42deg_Heat_P Parameter: Tissue Value: Aerial
  misc_feature: MA Experiment ID: 20000180 Result: Up-regulated in Transcription
  misc_feature: MA Experiment 20000180 PARAMETER Experiment Name: At_Germinating_Seeds_P Parameter: Age (hr) Value: 24 vs. 0
  misc_feature: MA Experiment 20000180 PARAMETER Experiment Name: At_Germinating_Seeds_P Parameter: Tissue Value: Germinating Seeds
  misc_feature: MA Experiment ID: 20000185 Result: Down-regulated in Transcription
  misc_feature: MA Experiment 20000185 PARAMETER Experiment Name: At_Roots__P Parameter: Age (day) Value: 7 vs. 21
  misc_feature: MA Experiment 20000185 PARAMETER Experiment Name: At_Roots__P Parameter: Organism Value: A. thaliana
  misc_feature: MA Experiment 20000185 PARAMETER Experiment Name: At_Roots__P Parameter: Tissue Value: Roots vs. Whole Plant
  misc_feature: MA Experiment ID: 20000436 Result: Down-regulated in Transcription
  misc_feature: MA Experiment 20000436 PARAMETER Experiment Name: At_Drought_P Parameter: Age (day) Value: 7
  misc_feature: MA Experiment 20000436 PARAMETER Experiment Name: At_Drought_P Parameter: Organism Value: A. thaliana
  misc_feature: MA Experiment 20000436 PARAMETER Experiment Name: At_Drought_P Parameter: Plant Line Value: WS
  misc_feature: MA Experiment 20000436 PARAMETER Experiment Name: At_Drought_P Parameter: Timepoint (hr) Value: 12
  misc_feature: MA Experiment 20000436 PARAMETER Experiment Name: At_Drought_P Parameter: Tissue Value: Whole Plant
  misc_feature: MA Experiment 20000436 PARAMETER Experiment Name: At_Drought_P Parameter: Treatment Value: Drought vs. No Drought
  misc_feature: MA Experiment ID: 20000437 Result: Down-regulated in Transcription
  misc_feature: MA Experiment 20000437 PARAMETER Experiment Name: At_Drought_P Parameter: Age (day) Value: 8
  misc_feature: MA Experiment 20000437 PARAMETER Experiment Name: At_Drought_P Parameter: Organism Value: A. thaliana
  misc_feature: MA Experiment 20000437 PARAMETER Experiment Name: At_Drought_P Parameter: Plant Line Value: WS
  misc_feature: MA Experiment 20000437 PARAMETER Experiment Name: At_Drought_P Parameter: Timepoint (hr) Value: 24
  misc_feature: MA Experiment 20000437 PARAMETER Experiment Name: At_Drought_P Parameter: Tissue Value: Whole Plant
  misc_feature: MA Experiment 20000437 PARAMETER Experiment Name: At_Drought_P Parameter: Treatment Value: Drought vs. No Drought
  misc_feature: MA Experiment ID: 20000439 Result: Down-regulated in Transcription
  misc_feature: MA Experiment 20000439 PARAMETER Experiment Name: At_Roots__P Parameter: Age (day) Value: 14 vs. 21
  misc_feature: MA Experiment 20000439 PARAMETER Experiment Name: At_Roots__P Parameter: Organism Value: A. thaliana
  misc_feature: MA Experiment 20000439 PARAMETER Experiment Name: At_Roots__P Parameter: Tissue Value: Roots vs. Whole Plant
  misc_feature: MA Experiment ID: 20001451 Result: Up-regulated in Transcription
  misc_feature: MA Experiment 20001451 PARAMETER Experiment Name: At_Far-red-induction_P Parameter: Age (day) Value: 7
  misc_feature: MA Experiment 20001451 PARAMETER Experiment Name: At_Far-red-induction_P Parameter: Light Value: Far-red vs. White
  misc_feature: MA Experiment 20001451 PARAMETER Experiment Name: At_Far-red-induction_P Parameter: Organism Value: A. thaliana
  misc_feature: MA Experiment 20001451 PARAMETER Experiment Name: At_Far-red-induction_P Parameter: Plant Line Value: Columbia
  misc_feature: MA Experiment 20001451 PARAMETER Experiment Name: At_Far-red-induction_P Parameter: Timepoint (hr) Value: 24
  misc_feature: MA Experiment 20001451 PARAMETER Experiment Name: At_Far-red-induction_P Parameter: Tissue Value: Whole Plant
  misc_feature: MA Experiment ID: 20001555 Result: Down-regulated in Transcription
  misc_feature: MA Experiment 20001555 PARAMETER Experiment Name: At_Drought_Soil_Dry_P Parameter: Age (day) Value: 24
  misc_feature: MA Experiment 20001555 PARAMETER Experiment Name: At_Drought_Soil_Dry_P Parameter: Organism Value: A. thaliana
  misc_feature: MA Experiment 20001555 PARAMETER Experiment Name: At_Drought_Soil_Dry_P Parameter: Plant Line Value: WS
  misc_feature: MA Experiment 20001555 PARAMETER Experiment Name: At_Drought_Soil_Dry_P Parameter: Post Timepoint (hr) Value: None
  misc_feature: MA Experiment 20001555 PARAMETER Experiment Name: At_Drought_Soil_Dry_P Parameter: Post-Treatment Value: None
  misc_feature: MA Experiment 20001555 PARAMETER Experiment Name: At_Drought_Soil_Dry_P Parameter: Timepoint (day) Value: 10
  misc_feature: MA Experiment 20001555 PARAMETER Experiment Name: At_Drought_Soil_Dry_P Parameter: Treatment Value: Drought vs. No Drought
  misc_feature: MA Experiment ID: 20001556 Result: Down-regulated in Transcription
  misc_feature: MA Experiment 20001556 PARAMETER Experiment Name: At_Drought_Soil_Dry_P Parameter: Age (day) Value: 26
  misc_feature: MA Experiment 20001556 PARAMETER Experiment Name: At_Drought_Soil_Dry_P Parameter: Organism Value: A. thaliana
  misc_feature: MA Experiment 20001556 PARAMETER Experiment Name: At_Drought_Soil_Dry_P Parameter: Plant Line Value: WS
  misc_feature: MA Experiment 20001556 PARAMETER Experiment Name: At_Drought_Soil_Dry_P Parameter: Post Timepoint (hr) Value: None
  misc_feature: MA Experiment 20001556 PARAMETER Experiment Name: At_Drought_Soil_Dry_P Parameter: Post-Treatment Value: None
  misc_feature: MA Experiment 20001556 PARAMETER Experiment Name: At_Drought_Soil_Dry_P Parameter: Timepoint (day) Value: 12
  misc_feature: MA Experiment 20001556 PARAMETER Experiment Name: At_Drought_Soil_Dry_P Parameter: Treatment Value: Drought vs. No Drought
  misc_feature: MA Experiment ID: 20001557 Result: Down-regulated in Transcription
  misc_feature: MA Experiment 20001557 PARAMETER Experiment Name: At_Drought_Soil_Dry_P Parameter: Age (day) Value: 27
  misc_feature: MA Experiment 20001557 PARAMETER Experiment Name: At_Drought_Soil_Dry_P Parameter: Organism Value: A. thaliana
  misc_feature: MA Experiment 20001557 PARAMETER Experiment Name: At_Drought_Soil_Dry_P Parameter: Plant Line Value: WS
  misc_feature: MA Experiment 20001557 PARAMETER Experiment Name: At_Drought_Soil_Dry_P Parameter: Post Timepoint (hr) Value: 3
  misc_feature: MA Experiment 20001557 PARAMETER Experiment Name: At_Drought_Soil_Dry_P Parameter: Post-Treatment Value: Re-Water vs. No Drought
  misc_feature: MA Experiment 20001557 PARAMETER Experiment Name: At_Drought_Soil_Dry_P Parameter: Timepoint (day) Value: 13
  misc_feature: MA Experiment 20001557 PARAMETER Experiment Name: At_Drought_Soil_Dry_P Parameter: Treatment Value: Drought vs. No Drought
  misc_feature: MA Experiment ID: 20001559 Result: Down-regulated in Transcription
  misc_feature: MA Experiment 20001559 PARAMETER Experiment Name: At_Drought_Soil_Dry_P Parameter: Age (day) Value: 28
  misc_feature: MA Experiment 20001559 PARAMETER Experiment Name: At_Drought_Soil_Dry_P Parameter: Organism Value: A. thaliana
  misc_feature: MA Experiment 20001559 PARAMETER Experiment Name: At_Drought_Soil_Dry_P Parameter: Plant Line Value: WS
  misc_feature: MA Experiment 20001559 PARAMETER Experiment Name: At_Drought_Soil_Dry_P Parameter: Post Timepoint (hr) Value: 29
  misc_feature: MA Experiment 20001559 PARAMETER Experiment Name: At_Drought_Soil_Dry_P Parameter: Post-Treatment Value: Re-Water vs. No Drought
  misc_feature: MA Experiment 20001559 PARAMETER Experiment Name: At_Drought_Soil_Dry_P Parameter: Timepoint (day) Value: 14
  misc_feature: MA Experiment 20001559 PARAMETER Experiment Name: At_Drought_Soil_Dry_P Parameter: Treatment Value: Drought vs. No Drought
  misc_feature: MA Experiment ID: 20001904 Result: Down-regulated in Transcription
  misc_feature: MA Experiment 20001904 PARAMETER Experiment Name: At_Drought_Reproduction_P Parameter: Age (day) Value: 37
  misc_feature: MA Experiment 20001904 PARAMETER Experiment Name: At_Drought_Reproduction_P Parameter: Organism Value: A. thaliana
  misc_feature: MA Experiment 20001904 PARAMETER Experiment Name: At_Drought_Reproduction_P Parameter: Plant Line Value: WS
  misc_feature: MA Experiment 20001904 PARAMETER Experiment Name: At_Drought_Reproduction_P Parameter: Timepoint (day) Value: 7
  misc_feature: MA Experiment 20001904 PARAMETER Experiment Name: At_Drought_Reproduction_P Parameter: Tissue Value: Rosettes
  misc_feature: MA Experiment 20001904 PARAMETER Experiment Name: At_Drought_Reproduction_P Parameter: Treatment Value: Drought vs. No Drought
  misc_feature: MA Experiment ID: 20001905 Result: Down-regulated in Transcription
  misc_feature: MA Experiment 20001905 PARAMETER Experiment Name: At_Drought_Reproduction_P Parameter: Age (day) Value: 40
  misc_feature: MA Experiment 20001905 PARAMETER Experiment Name: At_Drought_Reproduction_P Parameter: Organism Value: A. thaliana
  misc_feature: MA Experiment 20001905 PARAMETER Experiment Name: At_Drought_Reproduction_P Parameter: Plant Line Value: WS
  misc_feature: MA Experiment 20001905 PARAMETER Experiment Name: At_Drought_Reproduction_P Parameter: Timepoint (day) Value: 10
  misc_feature: MA Experiment 20001905 PARAMETER Experiment Name: At_Drought_Reproduction_P Parameter: Tissue Value: Rosettes
  misc_feature: MA Experiment 20001905 PARAMETER Experiment Name: At_Drought_Reproduction_P Parameter: Treatment Value: Drought vs. No Drought
  misc_feature: MA Experiment ID: 20001906 Result: Down-regulated in Transcription
  misc_feature: MA Experiment 20001906 PARAMETER Experiment Name: At_Drought_Reproduction_P Parameter: Age (day) Value: 35
  misc_feature: MA Experiment 20001906 PARAMETER Experiment Name: At_Drought_Reproduction_P Parameter: Organism Value: A. thaliana
  misc_feature: MA Experiment 20001906 PARAMETER Experiment Name: At_Drought_Reproduction_P Parameter: Plant Line Value: WS
  misc_feature: MA Experiment 20001906 PARAMETER Experiment Name: At_Drought_Reproduction_P Parameter: Timepoint (day) Value: 5
  misc_feature: MA Experiment 20001906 PARAMETER Experiment Name: At_Drought_Reproduction_P Parameter: Tissue Value: Siliques
  misc_feature: MA Experiment 20001906 PARAMETER Experiment Name: At_Drought_Reproduction_P Parameter: Treatment Value: Drought vs. No Drought

SEQ ID NO: 49863 - protein, 472 aa, Arabidopsis thaliana; identical to SEQ ID NO: 42383
  peptide (1)..(472): Ceres Seq. ID no. 15221122
  misc_feature (231)..(254): Pfam Name: Zinc finger, C2H2 type Pfam Description: Zinc finger, C2H2 type
  misc_feature (231)..(254): Pfam Name: Zinc finger, C2H2 type Pfam Description: Zinc finger, C2H2 type
  misc_feature (232)..(471): Homolog of NCBI NO: 15222333 NR Description: expressed protein [Arabidopsis thaliana]
  misc_feature (232)..(471): Homolog of NCBI NO: 15220992 NR Description: reverse transcriptase-related [Arabidopsis
  misc_feature (177)..(469): Homolog of NCBI NO: 38345520 NR Description: OSJNBa0039K24.23 [Oryza sativa (japonica
  misc_feature (232)..(471): Homolog of NCBI NO: 9802582 NR Description: T2E6.3 [Arabidopsis thaliana]
  misc_feature (177)..(469): Homolog of NCBI NO: 5777616 NR Description: CAA30374.1 protein [Oryza sativa]
  misc_feature (232)..(471): Homolog of NCBI NO: 15222333 NR Description: expressed protein [Arabidopsis thaliana]
  misc_feature (177)..(469): Homolog of NCBI NO: 38345520 NR Description: OSJNBa0039K24.23 [Oryza sativa (japonica
  misc_feature (177)..(469): Homolog of NCBI NO: 5777616 NR Description: CAA30374.1 protein [Oryza sativa]
  misc_feature (1)..(472): Homolog of NCBI NO: 15239695 NR Description: expressed protein [Arabidopsis thaliana]
  misc_feature (158)..(472): Homolog of NCBI NO: 18416951 NR Description: expressed protein [Arabidopsis thaliana]
  misc_feature (1)..(136): Homolog of NCBI NO: 18416951 NR Description: expressed protein [Arabidopsis thaliana]
  misc_feature (21)..(471): Homolog of NCBI NO: 34910152 NR Description: B1070A12.19 [Oryza sativa (japonica
  misc_feature (231)..(472): Homolog of NCBI NO: 15220394 NR Description: hypothetical protein [Arabidopsis thaliana]
  misc_feature (232)..(471): Homolog of NCBI NO: 9802582 NR Description: T2E6.3 [Arabidopsis thaliana]
  misc_feature (232)..(471): Homolog of NCBI NO: 15220992 NR Description: reverse transcriptase-related [Arabidopsis
  misc_feature (231)..(472): Homolog of NCBI NO: 15220394 NR Description: hypothetical protein [Arabidopsis thaliana]
  misc_feature (21)..(471): Homolog of NCBI NO: 34910152 NR Description: B1070A12.19 [Oryza sativa (japonica
  misc_feature (1)..(136): Homolog of NCBI NO: 18416951 NR Description: expressed protein [Arabidopsis thaliana]
  misc_feature (158)..(472): Homolog of NCBI NO: 18416951 NR Description: expressed protein [Arabidopsis thaliana]
  misc_feature (1)..(472): Homolog of NCBI NO: 15239695 NR Description: expressed protein [Arabidopsis thaliana]

SEQ ID NO: 49864 - protein, 335 aa, Arabidopsis thaliana; identical to SEQ ID NO: 42384
  peptide (1)..(335): Ceres Seq. ID no. 15221123
  misc_feature (94)..(117): Pfam Name: Zinc finger, C2H2 type Pfam Description: Zinc finger, C2H2 type
  misc_feature (94)..(117): Pfam Name: Zinc finger, C2H2 type Pfam Description: Zinc finger, C2H2 type
  misc_feature (94)..(308): Homolog of NCBI NO: 6554199 NR Description: T23J18.16 [Arabidopsis thaliana]
  misc_feature (95)..(334): Homolog of NCBI NO: 15222333 NR Description: expressed protein [Arabidopsis thaliana]
  misc_feature (95)..(334): Homolog of NCBI NO: 15220992 NR Description: reverse transcriptase-related [Arabidopsis
  misc_feature (40)..(332): Homolog of NCBI NO: 38345520 NR Description: OSJNBa0039K24.23 [Oryza sativa (japonica
  misc_feature (95)..(334): Homolog of NCBI NO: 9802582 NR Description: T2E6.3 [Arabidopsis thaliana]
  misc_feature (94)..(308): Homolog of NCBI NO: 6554199 NR Description: T23J18.16 [Arabidopsis thaliana]
  misc_feature (95)..(334): Homolog of NCBI NO: 15220992 NR Description: reverse transcriptase-related [Arabidopsis
  misc_feature (95)..(334): Homolog of NCBI NO: 9802582 NR Description: T2E6.3 [Arabidopsis thaliana]
  misc_feature (1)..(335): Homolog of NCBI NO: 15239695 NR Description: expressed protein [Arabidopsis thaliana]
  misc_feature (21)..(335): Homolog of NCBI NO: 18416951 NR Description: expressed protein [Arabidopsis thaliana]
  misc_feature (1)..(334): Homolog of NCBI NO: 34910152 NR Description: B1070A12.19 [Oryza sativa (japonica
  misc_feature (94)..(335): Homolog of NCBI NO: 15220394 NR Description: hypothetical protein [Arabidopsis thaliana]
  misc_feature (40)..(332): Homolog of NCBI NO: 5777616 NR Description: CAA30374.1 protein [Oryza sativa]
  misc_feature (40)..(332): Homolog of NCBI NO: 38345520 NR Description: OSJNBa0039K24.23 [Oryza sativa (japonica
  misc_feature (95)..(334): Homolog of NCBI NO: 15222333 NR Description: expressed protein [Arabidopsis thaliana]
  misc_feature (40)..(332): Homolog of NCBI NO: 5777616 NR Description: CAA30374.1 protein [Oryza sativa]
  misc_feature (94)..(335): Homolog of NCBI NO: 15220394 NR Description: hypothetical protein [Arabidopsis thaliana]
  misc_feature (1)..(334): Homolog of NCBI NO: 34910152 NR Description: B1070A12.19 [Oryza sativa (japonica
  misc_feature (21)..(335): Homolog of NCBI NO: 18416951 NR Description: expressed protein [Arabidopsis thaliana]
  misc_feature (1)..(335): Homolog of NCBI NO: 15239695 NR Description: expressed protein [Arabidopsis thaliana]

SEQ ID NO: 49865 - protein, 309 aa, Arabidopsis thaliana; identical to SEQ ID NO: 42385
  peptide (1)..(309): Ceres Seq. ID no. 15221124
  misc_feature (68)..(91): Pfam Name: Zinc finger, C2H2 type Pfam Description: Zinc finger, C2H2 type
  misc_feature (68)..(91): Pfam Name: Zinc finger, C2H2 type Pfam Description: Zinc finger, C2H2 type
  misc_feature (68)..(282): Homolog of NCBI NO: 6554199 NR Description: T23J18.16 [Arabidopsis thaliana]
  misc_feature (69)..(308): Homolog of NCBI NO: 15222333 NR Description: expressed protein [Arabidopsis thaliana]
  misc_feature (69)..(308): Homolog of NCBI NO: 15220992 NR Description: reverse transcriptase-related [Arabidopsis
  misc_feature (14)..(306): Homolog of NCBI NO: 38345520 NR Description: OSJNBa0039K24.23 [Oryza sativa (japonica
  misc_feature (69)..(308): Homolog of NCBI NO: 9802582 NR Description: T2E6.3 [Arabidopsis thaliana]
  misc_feature (68)..(282): Homolog of NCBI NO: 6554199 NR Description: T23J18.16 [Arabidopsis thaliana]
  misc_feature (69)..(308): Homolog of NCBI NO: 15220992 NR Description: reverse transcriptase-related [Arabidopsis
  misc_feature (69)..(308): Homolog of NCBI NO: 9802582 NR Description: T2E6.3 [Arabidopsis thaliana]
  misc_feature (1)..(309): Homolog of NCBI NO: 15239695 NR Description: expressed protein [Arabidopsis thaliana]
  misc_feature (1)..(309): Homolog of NCBI NO: 18416951 NR Description: expressed protein [Arabidopsis thaliana]
  misc_feature (1)..(308): Homolog of NCBI NO: 34910152 NR Description: B1070A12.19 [Oryza sativa (japonica
  misc_feature (68)..(309): Homolog of NCBI NO: 15220394 NR Description: hypothetical protein [Arabidopsis thaliana]
  misc_feature (14)..(306): Homolog of NCBI NO: 5777616 NR Description: CAA30374.1 protein [Oryza sativa]
  misc_feature (14)..(306): Homolog of NCBI NO: 38345520 NR Description: OSJNBa0039K24.23 [Oryza sativa (japonica
  misc_feature (69)..(308): Homolog of NCBI NO: 15222333 NR Description: expressed protein [Arabidopsis thaliana]
  misc_feature (14)..(306): Homolog of NCBI NO: 5777616 NR Description: CAA30374.1 protein [Oryza sativa]
  misc_feature (68)..(309): Homolog of NCBI NO: 15220394 NR Description: hypothetical protein [Arabidopsis thaliana]
  misc_feature (1)..(308): Homolog of NCBI NO: 34910152 NR Description: B1070A12.19 [Oryza sativa (japonica
  misc_feature (1)..(309): Homolog of NCBI NO: 18416951 NR Description: expressed protein [Arabidopsis thaliana]
  misc_feature (1)..(309): Homolog of NCBI NO: 15239695 NR Description: expressed protein [Arabidopsis thaliana]

SEQ ID NO: 49866 - DNA, 2254 bp, Arabidopsis thaliana; identical to SEQ ID NO: 45016
  misc_feature (1)..(2254): Ceres Seq. ID no. 13591474
  misc_feature: MA Experiment ID: 20000171 Result: Down-regulated in Transcription
  misc_feature: MA Experiment 20000171 PARAMETER Experiment Name: At_42deg_Heat_P Parameter: Age (day) Value: 14
  misc_feature: MA Experiment 20000171 PARAMETER Experiment Name: At_42deg_Heat_P Parameter: Organism Value: A. thaliana
  misc_feature: MA Experiment 20000171 PARAMETER Experiment Name: At_42deg_Heat_P Parameter: Plant Line Value: WS
  misc_feature: MA Experiment 20000171 PARAMETER Experiment Name: At_42deg_Heat_P Parameter: Temperature (deg C) Value: 42 vs. 22
  misc_feature: MA Experiment 20000171 PARAMETER Experiment Name: At_42deg_Heat_P Parameter: Timepoint (hr) Value: 1
  misc_feature: MA Experiment 20000171 PARAMETER Experiment Name: At_42deg_Heat_P Parameter: Tissue Value: Aerial
  misc_feature: MA Experiment ID: 20000184 Result: Up-regulated in Transcription
  misc_feature: MA Experiment 20000184 PARAMETER Experiment Name: At_Shoots__P Parameter: Age (day) Value: 7
  misc_feature: MA Experiment 20000184 PARAMETER Experiment Name: At_Shoots__P Parameter: Tissue Value: Shoots vs. Whole Plant
  misc_feature: MA Experiment ID: 20000185 Result: Down-regulated in Transcription
  misc_feature: MA Experiment 20000185 PARAMETER Experiment Name: At_Roots__P Parameter: Age (day) Value: 7 vs. 21
  misc_feature: MA Experiment 20000185 PARAMETER Experiment Name: At_Roots__P Parameter: Organism Value: A. thaliana
  misc_feature: MA Experiment 20000185 PARAMETER Experiment Name: At_Roots__P Parameter: Tissue Value: Roots vs. Whole Plant
  misc_feature: MA Experiment ID: 20000437 Result: Down-regulated in Transcription
  misc_feature: MA Experiment 20000437 PARAMETER Experiment Name: At_Drought_P Parameter: Age (day) Value: 8
  misc_feature: MA Experiment 20000437 PARAMETER Experiment Name: At_Drought_P Parameter: Organism Value: A. thaliana
  misc_feature: MA Experiment 20000437 PARAMETER Experiment Name: At_Drought_P Parameter: Plant Line Value: WS
  misc_feature: MA Experiment 20000437 PARAMETER Experiment Name: At_Drought_P Parameter: Timepoint (hr) Value: 24
  misc_feature: MA Experiment 20000437 PARAMETER Experiment Name: At_Drought_P Parameter: Tissue Value: Whole Plant
  misc_feature: MA Experiment 20000437 PARAMETER Experiment Name: At_Drought_P Parameter: Treatment Value: Drought vs. No Drought
  misc_feature: MA Experiment ID: 20001905 Result: Down-regulated in Transcription
  misc_feature: MA Experiment 20001905 PARAMETER Experiment Name: At_Drought_Reproduction_P Parameter: Age (day) Value: 40
  misc_feature: MA Experiment 20001905 PARAMETER Experiment Name: At_Drought_Reproduction_P Parameter: Organism Value: A. thaliana
  misc_feature: MA Experiment 20001905 PARAMETER Experiment Name: At_Drought_Reproduction_P Parameter: Plant Line Value: WS
  misc_feature: MA Experiment 20001905 PARAMETER Experiment Name: At_Drought_Reproduction_P Parameter: Timepoint (day) Value: 10
  misc_feature: MA Experiment 20001905 PARAMETER Experiment Name: At_Drought_Reproduction_P Parameter: Tissue Value: Rosettes
  misc_feature: MA Experiment 20001905 PARAMETER Experiment Name: At_Drought_Reproduction_P Parameter: Treatment Value: Drought vs. No Drought

SEQ ID NO: 49867 - protein, 587 aa, Arabidopsis thaliana; identical to SEQ ID NO: 45017
  peptide (1)..(587): Ceres Seq. ID no. 13591475
  misc_feature (195)..(490): Pfam Name: GRAS family transcription factor Pfam Description: GRAS family transcription factor
  misc_feature (195)..(490): Pfam Name: GRAS family transcription factor Pfam Description: GRAS family transcription factor
  misc_feature (26)..(110): Homolog of NCBI NO: 2339980 NR Description: RGA2 protein [Arabidopsis thaliana]
  misc_feature (134)..(584): Homolog of NCBI NO: 2339980 NR Description: RGA2 protein [Arabidopsis thaliana]
  misc_feature (26)..(110): Homolog of NCBI NO: 2569938 NR Description: GAI [Arabidopsis thaliana]
  misc_feature (134)..(584): Homolog of NCBI NO: 2569938 NR Description: GAI [Arabidopsis thaliana]
  misc_feature (1)..(110): Homolog of NCBI NO: 15223951 NR Description: gibberellin response modulator (GAI/RGA2)
  misc_feature (26)..(110): Homolog of NCBI NO: 2339980 NR Description: RGA2 protein [Arabidopsis thaliana]
  misc_feature (26)..(110): Homolog of NCBI NO: 2569938 NR Description: GAI [Arabidopsis thaliana]
  misc_feature (1)..(110): Homolog of NCBI NO: 15223951 NR Description: gibberellin response modulator (GAI/RGA2)
  misc_feature (1)..(587): Homolog of NCBI NO: 15226311 NR Description: gibberellin response modulator (RGA1)
  misc_feature (1)..(587): Homolog of NCBI NO: 15529230 NR Description: At2g01570/F2I9.19 [Arabidopsis thaliana]
  misc_feature (1)..(587): Homolog of NCBI NO: 2339978 NR Description: RGA1 protein [Arabidopsis thaliana]
  misc_feature (1)..(587): Homolog of NCBI NO: 2569940 NR Description: GRS protein [Arabidopsis thaliana]
  misc_feature (134)..(584): Homolog of NCBI NO: 15223951 NR Description: gibberellin response modulator (GAI/RGA2)
  misc_feature (134)..(584): Homolog of NCBI NO: 2569938 NR Description: GAI [Arabidopsis thaliana]
  misc_feature (134)..(584): Homolog of NCBI NO: 2339980 NR Description: RGA2 protein [Arabidopsis thaliana]
  misc_feature (134)..(584): Homolog of NCBI NO: 15223951 NR Description: gibberellin response modulator (GAI/RGA2)
  misc_feature (1)..(587): Homolog of NCBI NO: 2569940 NR Description: GRS protein [Arabidopsis thaliana]
  misc_feature (1)..(587): Homolog of NCBI NO: 2339978 NR Description: RGA1 protein [Arabidopsis thaliana]
  misc_feature (1)..(587): Homolog of NCBI NO: 15529230 NR Description: At2g01570/F2I9.19 [Arabidopsis thaliana]
  misc_feature (1)..(587): Homolog of NCBI NO: 15226311 NR Description: gibberellin response modulator (RGA1)

SEQ ID NO: 49868 - protein, 559 aa, Arabidopsis thaliana; identical to SEQ ID NO: 45018
  peptide (1)..(559): Ceres Seq. ID no. 13591476
  misc_feature (167)..(462): Pfam Name: GRAS family transcription factor Pfam Description: GRAS family transcription factor
  misc_feature (167)..(462): Pfam Name: GRAS family transcription factor Pfam Description: GRAS family transcription factor
  misc_feature (1)..(82): Homolog of NCBI NO: 2339980 NR Description: RGA2 protein [Arabidopsis thaliana]
  misc_feature (106)..(556): Homolog of NCBI NO: 2339980 NR Description: RGA2 protein [Arabidopsis thaliana]
  misc_feature (1)..(82): Homolog of NCBI NO: 2569938 NR Description: GAI [Arabidopsis thaliana]
  misc_feature (106)..(556): Homolog of NCBI NO: 2569938 NR Description: GAI [Arabidopsis thaliana]
  misc_feature (1)..(82): Homolog of NCBI NO: 15223951 NR Description: gibberellin response modulator (GAI/RGA2)
  misc_feature (1)..(82): Homolog of NCBI NO: 2339980 NR Description: RGA2 protein [Arabidopsis thaliana]
  misc_feature (1)..(82): Homolog of NCBI NO: 2569938 NR Description: GAI [Arabidopsis thaliana]
  misc_feature (1)..(82): Homolog of NCBI NO: 15223951 NR Description: gibberellin response modulator (GAI/RGA2)
  misc_feature (1)..(559): Homolog of NCBI NO: 15226311 NR Description: gibberellin response modulator (RGA1)
  misc_feature (1)..(559): Homolog of NCBI NO: 15529230 NR Description: At2g01570/F2I9.19 [Arabidopsis thaliana]
  misc_feature (1)..(559): Homolog of NCBI NO: 2339978 NR Description: RGA1 protein [Arabidopsis thaliana]
  misc_feature (1)..(559): Homolog of NCBI NO: 2569940 NR Description: GRS protein [Arabidopsis thaliana]
  misc_feature (106)..(556): Homolog of NCBI NO: 15223951 NR Description: gibberellin response modulator (GAI/RGA2)
  misc_feature (106)..(556): Homolog of NCBI NO: 2569938 NR Description: GAI [Arabidopsis thaliana]
  misc_feature (106)..(556): Homolog of NCBI NO: 2339980 NR Description: RGA2 protein [Arabidopsis thaliana]
  misc_feature (106)..(556): Homolog of NCBI NO: 15223951 NR Description: gibberellin response modulator (GAI/RGA2)
  misc_feature (1)..(559): Homolog of NCBI NO: 2569940 NR Description: GRS protein [Arabidopsis thaliana]
  misc_feature (1)..(559): Homolog of NCBI NO: 2339978 NR Description: RGA1 protein [Arabidopsis thaliana]
  misc_feature (1)..(559): Homolog of NCBI NO: 15529230 NR Description: At2g01570/F2I9.19 [Arabidopsis thaliana]
  misc_feature (1)..(559): Homolog of NCBI NO: 15226311 NR Description: gibberellin response modulator (RGA1)

SEQ ID NO: 49869 - protein, 558 aa, Arabidopsis thaliana; identical to SEQ ID NO: 45019
  peptide (1)..(558): Ceres Seq. ID no. 13591477
  misc_feature (166)..(461): Pfam Name: GRAS family transcription factor Pfam Description: GRAS family transcription factor
  misc_feature (166)..(461): Pfam Name: GRAS family transcription factor Pfam Description: GRAS family transcription factor
  misc_feature (1)..(81): Homolog of NCBI NO: 2339980 NR Description: RGA2 protein [Arabidopsis thaliana]
  misc_feature (105)..(555): Homolog of NCBI NO: 2339980 NR Description: RGA2 protein [Arabidopsis thaliana]
  misc_feature (1)..(81): Homolog of NCBI NO: 2569938 NR Description: GAI [Arabidopsis thaliana]
  misc_feature (105)..(555): Homolog of NCBI NO: 2569938 NR Description: GAI [Arabidopsis thaliana]
  misc_feature (1)..(81): Homolog of NCBI NO: 15223951 NR Description: gibberellin response modulator (GAI/RGA2)
  misc_feature (1)..(81): Homolog of NCBI NO: 2339980 NR Description: RGA2 protein [Arabidopsis thaliana]
  misc_feature (1)..(81): Homolog of NCBI NO: 2569938 NR Description: GAI [Arabidopsis thaliana]
  misc_feature (1)..(81): Homolog of NCBI NO: 15223951 NR Description: gibberellin response modulator (GAI/RGA2)
  misc_feature (1)..(558): Homolog of NCBI NO: 15226311 NR Description: gibberellin response modulator (RGA1)
  misc_feature (1)..(558): Homolog of NCBI NO: 15529230 NR Description: At2g01570/F2I9.19 [Arabidopsis thaliana]
  misc_feature (1)..(558): Homolog of NCBI NO: 2339978 NR Description: RGA1 protein [Arabidopsis thaliana]
  misc_feature (1)..(558): Homolog of NCBI NO: 2569940 NR Description: GRS protein [Arabidopsis thaliana]
  misc_feature (105)..(555): Homolog of NCBI NO: 15223951 NR Description: gibberellin response modulator (GAI/RGA2)
  misc_feature (105)..(555): Homolog of NCBI NO: 2569938 NR Description: GAI [Arabidopsis thaliana]
  misc_feature (105)..(555): Homolog of NCBI NO: 2339980 NR Description: RGA2 protein [Arabidopsis thaliana]
  misc_feature (105)..(555): Homolog of NCBI NO: 15223951 NR Description: gibberellin response modulator (GAI/RGA2)
  misc_feature (1)..(558): Homolog of NCBI NO: 2569940 NR Description: GRS protein [Arabidopsis thaliana]
  misc_feature (1)..(558): Homolog of NCBI NO: 2339978 NR Description: RGA1 protein [Arabidopsis thaliana]
  misc_feature (1)..(558): Homolog of NCBI NO: 15529230 NR Description: At2g01570/F2I9.19 [Arabidopsis thaliana]
  misc_feature (1)..(558): Homolog of NCBI NO: 15226311 NR Description: gibberellin response modulator (RGA1)

SEQ ID NO: 49870 - DNA, 1452 bp, Arabidopsis thaliana
  misc_feature (1)..(1452): Ceres Seq. ID no. 14304315
  misc_feature: MA Experiment ID: 20000265 Result: Up-regulated in Transcription
  misc_feature: MA Experiment 20000265 PARAMETER Experiment Name: At_Open_Flower_P Parameter: Age (day) Value: 21
  misc_feature: MA Experiment 20000265 PARAMETER Experiment Name: At_Open_Flower_P Parameter: Plant Line Value: WS
  misc_feature: MA Experiment 20000265 PARAMETER Experiment Name: At_Open_Flower_P Parameter: Tissue Value: Closed Flower vs. Whole Plant
gaacaatcttctgtttctttggaagcaactaactacaaaggacatcttcacgactacaaagacacatacccttctgtcttaaggacgagaccagaagcttcttctatcggctttgtaatggtctacaaaggataagaaaaaaccaaatccaaactaaagctatgcattttccacttgtttcggcttggaacaagagaaggagaagcaaatcatatgatacggatccatgtacgttccttttctccatcatcttcgccagatggcataaaagggtctacagaacagcagaatgctggcaaatcgaagatcaggcttctcagccaaggaagcgaagattcgggtcatcagtttataccctcaaggagatggaggaggccacaagttctttcagtgatgagaatctcctcggtaaaggaggctttggccgagtttaccaaggcactttaaaaacaggagaggttgttgcaatcaagaagatggatttacctacgtttaaaaaggctgacggagaaagagaatttcgtgtggaggtggatatcttgagcagactcgaccacccaaatctggtctctttgatcggctattgtgcagatgggaaacaccggttcctagtatatgaatatatgcaaaatggaaacctgcaagatcatttgaatggaatcaaagaagcaaaaataagctggccaataaggctcagaattgcactaggagcagcaaaaggactcgcgtatctccattcaagttcttctgttgggattccaattgttcacagagacttcaaatccaccaacgttctactagactccaattataatgcaaagatatccgactttggactagcaaagttgatgccagaaggaaaggatacttgtgtcacagcaagagttctaggaacatttggctatttcgacccagaatatacatcgacaggtaaacttactctacaaagcgacatttatgcatttggggttgtgctgctagaactacttactggacgcagagcagttgacttaactcagggcccaaatgaacagaacctggtgctacaggttaggaatatactgaatgatagaaagaaattgcgtaaggttatagatgtcgagctgcctcggaattcatacagcatggaagctataaccatgtttgctgatctagcatcacgatgcatccgtatagagagtaaagagcgaccttcagtgatggattgtgttaaggaactgcaactaattatctacacaaactcgaagggtggtttgggtgggacgattcctacattcagaaggctctagacactgaattcttcgaaacaagtaaaatggattactgtcatttttcctaaaatgagaggtcactgataaaaaaacacttgataaatataaacaaacaatactaattatgaattaccggataatttcaattcaacttccagctaggaaactttgatcaagcgat

SEQ ID NO: 49871 - protein, 375 aa, Arabidopsis thaliana
  peptide (1)..(375): Ceres Seq. ID no. 14304316
  misc_feature (57)..(356): Homolog of NCBI NO: 34907210 NR Description: putative serine/threonine kinase PBS1 protein
  misc_feature (61)..(353): Homolog of NCBI NO: 15238886 NR Description: protein kinase family [Arabidopsis thaliana]
  misc_feature (60)..(356): Homolog of NCBI NO: 15217992 NR Description: protein kinase -related [Arabidopsis thaliana]
  misc_feature (60)..(356): Homolog of NCBI NO: 8778594 NR Description: F5M15.3 [Arabidopsis thaliana]
  misc_feature (47)..(362): Homolog of NCBI NO: 28392990 NR Description: putative protein kinase [Arabidopsis thaliana]
  misc_feature (47)..(362): Homolog of NCBI NO: 15232294 NR Description: protein kinase family [Arabidopsis thaliana]
  misc_feature (47)..(362): Homolog of NCBI NO: 11994140 NR Description: receptor protein kinase-like protein [Arabidopsis
  misc_feature (69)..(375): Homolog of NCBI NO: 15221649 NR Description: protein kinase family [Arabidopsis thaliana]
  misc_feature (69)..(375): Homolog of NCBI NO: 25287587 NR Description: protein T23E23.18 [imported] - Arabidopsis
  misc_feature (1)..(375): Homolog of NCBI NO: 30102706 NR Description: At1g24030 [Arabidopsis thaliana]
MHFPLVSAWNKRRRSKSYDTDPCTFLFSIIFARWHKRVYRTAECWQIEDQASQPRKRRFGSSVYTLKEMEEATSSFSDENLLGKGGFGRVYQGTLKTGEVVAIKKMDLPTFKKADGEREFRVEVDILSRLDHPNLVSLIGYCADGKHRFLVYEYMQNGNLQDHLNGIKEAKISWPIRLRIALGAAKGLAYLHSSSSVGIPIVHRDFKSTNVLLDSNYNAKISDFGLAKLMPEGKDTCVTARVLGTFGYFDPEYTSTGKLTLQSDIYAFGVVLLELLTGRRAVDLTQGPNEQNLVLQVRNILNDRKKLRKVIDVELPRNSYSMEAITMFADLASRCIRIESKERPSVMDCVKELQLIIYTNSKGGLGGTIPTFRRL

SEQ ID NO: 49872 - protein, 307 aa, Arabidopsis thaliana
  peptide (1)..(307): Ceres Seq. ID no. 14304317
  misc_feature (1)..(288): Homolog of NCBI NO: 34907210 NR Description: putative serine/threonine kinase PBS1 protein
  misc_feature (1)..(285): Homolog of NCBI NO: 15238886 NR Description: protein kinase family [Arabidopsis thaliana]
  misc_feature (1)..(288): Homolog of NCBI NO: 15217992 NR Description: protein kinase -related [Arabidopsis thaliana]
  misc_feature (1)..(288): Homolog of NCBI NO: 8778594 NR Description: F5M15.3 [Arabidopsis thaliana]
  misc_feature (1)..(294): Homolog of NCBI NO: 28392990 NR Description: putative protein kinase [Arabidopsis thaliana]
  misc_feature (1)..(294): Homolog of NCBI NO: 15232294 NR Description: protein kinase family [Arabidopsis thaliana]
  misc_feature (1)..(294): Homolog of NCBI NO: 11994140 NR Description: receptor protein kinase-like protein [Arabidopsis
  misc_feature (1)..(307): Homolog of NCBI NO: 15221649 NR Description: protein kinase family [Arabidopsis thaliana]
  misc_feature (1)..(307): Homolog of NCBI NO: 25287587 NR Description: protein T23E23.18 [imported] - Arabidopsis
  misc_feature (1)..(307): Homolog of NCBI NO: 30102706 NR Description: At1g24030 [Arabidopsis thaliana]
MEEATSSFSDENLLGKGGFGRVYQGTLKTGEVVAIKKMDLPTFKKADGEREFRVEVDILSRLDHPNLVSLIGYCADGKHRFLVYEYMQNGNLQDHLNGIKEAKISWPIRLRIALGAAKGLAYLHSSSSVGIPIVHRDFKSTNVLLDSNYNAKISDFGLAKLMPEGKDTCVTARVLGTFGYFDPEYTSTGKLTLQSDIYAFGVVLLELLTGRRAVDLTQGPNEQNLVLQVRNILNDRKKLRKVIDVELPRNSYSMEAITMFADLASRCIRIESKERPSVMDCVKELQLIIYTNSKGGLGGTIPTFRRL

SEQ ID NO: 49873 - protein, 270 aa, Arabidopsis thaliana
  peptide (1)..(270): Ceres Seq. ID no. 14304318
  misc_feature (1)..(251): Homolog of NCBI NO: 34907210 NR Description: putative serine/threonine kinase PBS1 protein
  misc_feature (1)..(248): Homolog of NCBI NO: 15238886 NR Description: protein kinase family [Arabidopsis thaliana]
  misc_feature (1)..(251): Homolog of NCBI NO: 15217992 NR Description: protein kinase -related [Arabidopsis thaliana]
  misc_feature (1)..(251): Homolog of NCBI NO: 8778594 NR Description: F5M15.3 [Arabidopsis thaliana]
  misc_feature (1)..(257): Homolog of NCBI NO: 28392990 NR Description: putative protein kinase [Arabidopsis thaliana]
  misc_feature (1)..(257): Homolog of NCBI NO: 15232294 NR Description: protein kinase family [Arabidopsis thaliana]
  misc_feature (1)..(257): Homolog of NCBI NO: 11994140 NR Description: receptor protein kinase-like protein [Arabidopsis
  misc_feature (1)..(270): Homolog of NCBI NO: 15221649 NR Description: protein kinase family [Arabidopsis thaliana]
  misc_feature (1)..(270): Homolog of NCBI NO: 25287587 NR Description: protein T23E23.18 [imported] - Arabidopsis
  misc_feature (1)..(270): Homolog of NCBI NO: 30102706 NR Description: At1g24030 [Arabidopsis thaliana]
MDLPTFKKADGEREFRVEVDILSRLDHPNLVSLIGYCADGKHRFLVYEYMQNGNLQDHLNGIKEAKISWPIRLRIALGAAKGLAYLHSSSSVGIPIVHRDFKSTNVLLDSNYNAKISDFGLAKLMPEGKDTCVTARVLGTFGYFDPEYTSTGKLTLQSDIYAFGVVLLELLTGRRAVDLTQGPNEQNLVLQVRNILNDRKKLRKVIDVELPRNSYSMEAITMFADLASRCIRIESKERPSVMDCVKELQLIIYTNSKGGLGGTIPTFRRL

SEQ ID NO: 49874 - DNA, 1492 bp, Arabidopsis thaliana
  misc_feature (1)..(1492): Ceres Seq. ID no. 13648263
  misc_feature: MA Experiment ID: 20000169 Result: Up-regulated in Transcription
  misc_feature: MA Experiment 20000169 PARAMETER Experiment Name: At_100uM_ABA_P Parameter: Age (day) Value: 14
  misc_feature: MA Experiment 20000169 PARAMETER Experiment Name: At_100uM_ABA_P Parameter: Organism Value: A. thaliana
  misc_feature: MA Experiment 20000169 PARAMETER Experiment Name: At_100uM_ABA_P Parameter: Plant Line Value: WS
  misc_feature: MA Experiment 20000169 PARAMETER Experiment Name: At_100uM_ABA_P Parameter: Timepoint (hr) Value: 6
  misc_feature: MA Experiment 20000169 PARAMETER Experiment Name: At_100uM_ABA_P Parameter: Tissue Value: Aerial
  misc_feature: MA Experiment 20000169 PARAMETER Experiment Name: At_100uM_ABA_P Parameter: Treatment Value: 100uM ABA vs. No Treatment
  misc_feature: MA Experiment ID: 20000182 Result: Up-regulated in Transcription
  misc_feature: MA Experiment 20000182 PARAMETER Experiment Name: At_2mM_SA_P Parameter: Age (day) Value: 14
  misc_feature: MA Experiment 20000182 PARAMETER Experiment Name: At_2mM_SA_P Parameter: Organism Value: A. thaliana
  misc_feature: MA Experiment 20000182 PARAMETER Experiment Name: At_2mM_SA_P Parameter: Plant Line Value: WS
  misc_feature: MA Experiment 20000182 PARAMETER Experiment Name: At_2mM_SA_P Parameter: Timepoint (hr) Value: 6
  misc_feature: MA Experiment 20000182 PARAMETER Experiment Name: At_2mM_SA_P Parameter: Tissue Value: Aerial
  misc_feature: MA Experiment 20000182 PARAMETER Experiment Name: At_2mM_SA_P Parameter: Treatment Value: 2mM SA vs. No Treatment
  misc_feature: MA Experiment ID: 20000184 Result: Up-regulated in Transcription
  misc_feature: MA Experiment 20000184 PARAMETER Experiment Name: At_Shoots__P Parameter: Age (day) Value: 7
  misc_feature: MA Experiment 20000184 PARAMETER Experiment Name: At_Shoots__P Parameter: Tissue Value: Shoots vs. Whole Plant
  misc_feature: MA Experiment ID: 20000308 Result: Up-regulated in Transcription
  misc_feature: MA Experiment 20000308 PARAMETER Experiment Name: At_100mM_NaCl__P Parameter: Age (day) Value: 17
  misc_feature: MA Experiment 20000308 PARAMETER Experiment Name: At_100mM_NaCl__P Parameter: Organism Value: A. thaliana
  misc_feature: MA Experiment 20000308 PARAMETER Experiment Name: At_100mM_NaCl__P Parameter: Plant Line Value: WS
  misc_feature: MA Experiment 20000308 PARAMETER Experiment Name: At_100mM_NaCl__P Parameter: Timepoint (hr) Value: 72
  misc_feature: MA Experiment 20000308 PARAMETER Experiment Name: At_100mM_NaCl__P Parameter: Tissue Value: Whole Plant
  misc_feature: MA Experiment 20000308 PARAMETER Experiment Name: At_100mM_NaCl__P Parameter: Treatment Value: 100mM NaCl vs. No Treatment
  misc_feature: MA Experiment ID: 20000436 Result: Up-regulated in Transcription
  misc_feature: MA Experiment 20000436 PARAMETER Experiment Name: At_Drought_P Parameter: Age (day) Value: 7
  misc_feature: MA Experiment 20000436 PARAMETER Experiment Name: At_Drought_P Parameter: Organism Value: A. thaliana
  misc_feature: MA Experiment 20000436 PARAMETER Experiment Name: At_Drought_P Parameter: Plant Line Value: WS
  misc_feature: MA Experiment 20000436 PARAMETER Experiment Name: At_Drought_P Parameter: Timepoint (hr) Value: 12
  misc_feature: MA Experiment 20000436 PARAMETER Experiment Name: At_Drought_P Parameter: Tissue Value: Whole Plant
  misc_feature: MA Experiment 20000436 PARAMETER Experiment Name: At_Drought_P Parameter: Treatment Value: Drought vs. No Drought
  misc_feature: MA Experiment ID: 20000437 Result: Up-regulated in Transcription
  misc_feature: MA Experiment 20000437 PARAMETER Experiment Name: At_Drought_P Parameter: Age (day) Value: 8
  misc_feature: MA Experiment 20000437 PARAMETER Experiment Name: At_Drought_P Parameter: Organism Value: A. thaliana
  misc_feature: MA Experiment 20000437 PARAMETER Experiment Name: At_Drought_P Parameter: Plant Line Value: WS
  misc_feature: MA Experiment 20000437 PARAMETER Experiment Name: At_Drought_P Parameter: Timepoint (hr) Value: 24
  misc_feature: MA Experiment 20000437 PARAMETER Experiment Name: At_Drought_P Parameter: Tissue Value: Whole Plant
  misc_feature: MA Experiment 20000437 PARAMETER Experiment Name: At_Drought_P Parameter: Treatment Value: Drought vs. No Drought
  misc_feature: MA Experiment ID: 20000451 Result: Up-regulated in Transcription
  misc_feature: MA Experiment 20000451 PARAMETER Experiment Name: At_CS6879_Shoots-Roots_P Parameter: Age (day) Value: 14
  misc_feature: MA Experiment 20000451 PARAMETER Experiment Name: At_CS6879_Shoots-Roots_P Parameter: Organism Value: A. thaliana
  misc_feature: MA Experiment 20000451 PARAMETER Experiment Name: At_CS6879_Shoots-Roots_P Parameter: Plant Line Value: CS6879 vs. WS
  misc_feature: MA Experiment 20000451 PARAMETER Experiment Name: At_CS6879_Shoots-Roots_P Parameter: Tissue Value: Roots
  misc_feature: MA Experiment ID: 20000453 Result: Up-regulated in Transcription
  misc_feature: MA Experiment 20000453 PARAMETER Experiment Name: At_100uM_ABA_P Parameter: Age (day) Value: 15
  misc_feature: MA Experiment 20000453 PARAMETER Experiment Name: At_100uM_ABA_P Parameter: Organism Value: A. thaliana
  misc_feature: MA Experiment 20000453 PARAMETER Experiment Name: At_100uM_ABA_P Parameter: Plant Line Value: WS
  misc_feature: MA Experiment 20000453 PARAMETER Experiment Name: At_100uM_ABA_P Parameter: Timepoint (hr) Value: 24
  misc_feature: MA Experiment 20000453 PARAMETER Experiment Name: At_100uM_ABA_P Parameter: Tissue Value: Aerial
  misc_feature: MA Experiment 20000453 PARAMETER Experiment Name: At_100uM_ABA_P Parameter: Treatment Value: 100uM ABA vs. No Treatment
  misc_feature: MA Experiment ID: 20000506 Result: Up-regulated in Transcription
  misc_feature: MA Experiment 20000506 PARAMETER Experiment Name: At_Wounding_P Parameter: Organism Value: A. thaliana
  misc_feature: MA Experiment 20000506 PARAMETER Experiment Name: At_Wounding_P Parameter: Plant Line Value: WS
  misc_feature: MA Experiment 20000506 PARAMETER Experiment Name: At_Wounding_P Parameter: Timepoint (hr) Value: 6
  misc_feature: MA Experiment 20000506 PARAMETER Experiment Name: At_Wounding_P Parameter: Tissue Value: Aerial
  misc_feature: MA Experiment 20000506 PARAMETER Experiment Name: At_Wounding_P Parameter: Treatment Value: Wounding vs. No Wounding
  misc_feature: MA Experiment ID: 20000527 Result: Down-regulated in Transcription
  misc_feature: MA Experiment 20000527 PARAMETER Experiment Name: At_10percent_PEG_P Parameter: Age (day) Value: 20
  misc_feature: MA Experiment 20000527 PARAMETER Experiment Name: At_10percent_PEG_P Parameter: Organism Value: A. thaliana
  misc_feature: MA Experiment 20000527 PARAMETER Experiment Name: At_10percent_PEG_P Parameter: Plant Line Value: WS
  misc_feature: MA Experiment 20000527 PARAMETER Experiment Name: At_10percent_PEG_P Parameter: Timepoint (day) Value: 20
  misc_feature: MA Experiment 20000527 PARAMETER Experiment Name: At_10percent_PEG_P Parameter: Tissue Value: Whole Plant
  misc_feature: MA Experiment 20000527 PARAMETER Experiment Name: At_10percent_PEG_P Parameter: Treatment Value: 10percent PEG vs. No Treatment
  misc_feature: MA Experiment ID: 20000709 Result: Up-regulated in Transcription
  misc_feature: MA Experiment 20000709 PARAMETER Experiment Name: At_15mM_NH4NO3_L-to-H_P Parameter: Age (hr) Value: 14
  misc_feature: MA Experiment 20000709 PARAMETER Experiment Name: At_15mM_NH4NO3_L-to-H_P Parameter: Organism Value: A. thaliana
  misc_feature: MA Experiment 20000709 PARAMETER Experiment Name: At_15mM_NH4NO3_L-to-H_P Parameter: Plant Line Value: WS
  misc_feature: MA Experiment 20000709 PARAMETER Experiment Name: At_15mM_NH4NO3_L-to-H_P Parameter: Timepoint (hr) Value: 4
  misc_feature: MA Experiment 20000709 PARAMETER Experiment Name: At_15mM_NH4NO3_L-to-H_P Parameter: Tissue Value: Aerial
  misc_feature: MA Experiment 20000709 PARAMETER Experiment Name: At_15mM_NH4NO3_L-to-H_P Parameter: Treatment Value: 15mM NH4NO3 vs. 30mM Mannitol
  misc_feature: MA Experiment ID: 20000794 Result: Down-regulated in Transcription
  misc_feature: MA Experiment 20000794 PARAMETER Experiment Name: At_Petals_P Parameter: Age (day) Value: 23-25 days
  misc_feature: MA Experiment 20000794 PARAMETER Experiment Name: At_Petals_P Parameter: Plant Line Value: WS
  misc_feature: MA Experiment 20000794 PARAMETER Experiment Name: At_Petals_P Parameter: Tissue Value: Petals vs. Whole plant
  misc_feature: MA Experiment ID: 20001450 Result: Down-regulated in Transcription
  misc_feature: MA Experiment 20001450 PARAMETER Experiment Name: At_Far-red-induction_P Parameter: Age (day) Value: 7
  misc_feature: MA Experiment 20001450 PARAMETER Experiment Name: At_Far-red-induction_P Parameter: Light Value: Far-red vs. White
  misc_feature: MA Experiment 20001450 PARAMETER Experiment Name: At_Far-red-induction_P Parameter: Organism Value: A. thaliana
  misc_feature: MA Experiment 20001450 PARAMETER Experiment Name: At_Far-red-induction_P Parameter: Plant Line Value: Columbia
  misc_feature: MA Experiment 20001450 PARAMETER Experiment Name: At_Far-red-induction_P Parameter: Timepoint (hr) Value: 8
  misc_feature: MA Experiment 20001450 PARAMETER Experiment Name: At_Far-red-induction_P Parameter: Tissue Value: Whole Plant
  misc_feature: MA Experiment ID: 20001451 Result: Down-regulated in Transcription
  misc_feature: MA Experiment 20001451 PARAMETER Experiment Name: At_Far-red-induction_P Parameter: Age (day) Value: 7
  misc_feature: MA Experiment 20001451 PARAMETER Experiment Name: At_Far-red-induction_P Parameter: Light Value: Far-red vs. White
  misc_feature: MA Experiment 20001451 PARAMETER Experiment Name: At_Far-red-induction_P Parameter: Organism Value: A. thaliana
  misc_feature: MA Experiment 20001451 PARAMETER Experiment Name: At_Far-red-induction_P Parameter: Plant Line Value: Columbia
  misc_feature: MA Experiment 20001451 PARAMETER Experiment Name: At_Far-red-induction_P Parameter: Timepoint (hr) Value: 24
  misc_feature: MA Experiment 20001451 PARAMETER Experiment Name: At_Far-red-induction_P Parameter: Tissue Value: Whole Plant
  misc_feature: MA Experiment ID: 20001556 Result: Up-regulated in Transcription
  misc_feature: MA Experiment 20001556 PARAMETER Experiment Name: At_Drought_Soil_Dry_P Parameter: Age (day) Value: 26
  misc_feature: MA Experiment 20001556 PARAMETER Experiment Name: At_Drought_Soil_Dry_P Parameter: Organism Value: A. thaliana
  misc_feature: MA Experiment 20001556 PARAMETER Experiment Name: At_Drought_Soil_Dry_P Parameter: Plant Line Value: WS
  misc_feature: MA Experiment 20001556 PARAMETER Experiment Name: At_Drought_Soil_Dry_P Parameter: Post Timepoint (hr) Value: None
  misc_feature: MA Experiment 20001556 PARAMETER Experiment Name: At_Drought_Soil_Dry_P Parameter: Post-Treatment Value: None
  misc_feature: MA Experiment 20001556 PARAMETER Experiment Name: At_Drought_Soil_Dry_P Parameter: Timepoint (day) Value: 12
  misc_feature: MA Experiment 20001556 PARAMETER Experiment Name: At_Drought_Soil_Dry_P Parameter: Treatment Value: Drought vs. No Drought
  misc_feature: MA Experiment ID: 20001557 Result: Up-regulated in Transcription
  misc_feature: MA Experiment 20001557 PARAMETER Experiment Name: At_Drought_Soil_Dry_P Parameter: Age (day) Value: 27
  misc_feature: MA Experiment 20001557 PARAMETER Experiment Name: At_Drought_Soil_Dry_P Parameter: Organism Value: A. thaliana
  misc_feature: MA Experiment 20001557 PARAMETER Experiment Name: At_Drought_Soil_Dry_P Parameter: Plant Line Value: WS
  misc_feature: MA Experiment 20001557 PARAMETER Experiment Name: At_Drought_Soil_Dry_P Parameter: Post Timepoint (hr) Value: 3
  misc_feature: MA Experiment 20001557 PARAMETER Experiment Name: At_Drought_Soil_Dry_P Parameter: Post-Treatment Value: Re-Water vs. No Drought
  misc_feature: MA Experiment 20001557 PARAMETER Experiment Name: At_Drought_Soil_Dry_P Parameter: Timepoint (day) Value: 13
  misc_feature: MA Experiment 20001557 PARAMETER Experiment Name: At_Drought_Soil_Dry_P Parameter: Treatment Value: Drought vs. No Drought
  misc_feature: MA Experiment ID: 20001558 Result: Up-regulated in Transcription
  misc_feature: MA Experiment 20001558 PARAMETER Experiment Name: At_Drought_Soil_Dry_P Parameter: Age (day) Value: 27
  misc_feature: MA Experiment 20001558 PARAMETER Experiment Name: At_Drought_Soil_Dry_P Parameter: Organism Value: A. thaliana
  misc_feature: MA Experiment 20001558 PARAMETER Experiment Name: At_Drought_Soil_Dry_P Parameter: Plant Line Value: WS
  misc_feature: MA Experiment 20001558 PARAMETER Experiment Name: At_Drought_Soil_Dry_P Parameter: Post Timepoint (hr) Value: 6
  misc_feature: MA Experiment 20001558 PARAMETER Experiment Name: At_Drought_Soil_Dry_P Parameter: Post-Treatment Value: Re-Water vs. No Drought
  misc_feature: MA Experiment 20001558 PARAMETER Experiment Name: At_Drought_Soil_Dry_P Parameter: Timepoint (day) Value: 13
  misc_feature: MA Experiment 20001558 PARAMETER Experiment Name: At_Drought_Soil_Dry_P Parameter: Treatment Value: Drought vs. No Drought
  misc_feature: MA Experiment ID: 20001560 Result: Up-regulated in Transcription
  misc_feature: MA Experiment 20001560 PARAMETER Experiment Name: At_Drought_Soil_Dry_P Parameter: Age (day) Value: 28
  misc_feature: MA Experiment 20001560 PARAMETER Experiment Name: At_Drought_Soil_Dry_P Parameter: Organism Value: A. thaliana
  misc_feature: MA Experiment 20001560 PARAMETER Experiment Name: At_Drought_Soil_Dry_P Parameter: Plant Line Value: WS
  misc_feature: MA Experiment 20001560 PARAMETER Experiment Name: At_Drought_Soil_Dry_P Parameter: Post Timepoint (hr) Value: None
  misc_feature: MA Experiment 20001560 PARAMETER Experiment Name: At_Drought_Soil_Dry_P Parameter: Post-Treatment Value: None
  misc_feature: MA Experiment 20001560 PARAMETER Experiment Name: At_Drought_Soil_Dry_P Parameter: Timepoint (day) Value: 14
  misc_feature: MA Experiment 20001560 PARAMETER Experiment Name: At_Drought_Soil_Dry_P Parameter: Treatment Value: Drought vs. No Drought
  misc_feature: MA Experiment ID: 20001905 Result: Up-regulated in Transcription
  misc_feature: MA Experiment 20001905 PARAMETER Experiment Name: At_Drought_Reproduction_P Parameter: Age (day) Value: 40
  misc_feature: MA Experiment 20001905 PARAMETER Experiment Name: At_Drought_Reproduction_P Parameter: Organism Value: A. thaliana
  misc_feature: MA Experiment 20001905 PARAMETER Experiment Name: At_Drought_Reproduction_P Parameter: Plant Line Value: WS
  misc_feature: MA Experiment 20001905 PARAMETER Experiment Name: At_Drought_Reproduction_P Parameter: Timepoint (day) Value: 10
  misc_feature: MA Experiment 20001905 PARAMETER Experiment Name: At_Drought_Reproduction_P Parameter: Tissue Value: Rosettes
  misc_feature: MA Experiment 20001905 PARAMETER Experiment Name: At_Drought_Reproduction_P Parameter: Treatment Value: Drought vs. No Drought
  misc_feature: MA Experiment ID: 20001906 Result: Up-regulated in Transcription
  misc_feature: MA Experiment 20001906 PARAMETER Experiment Name: At_Drought_Reproduction_P Parameter: Age (day) Value: 35
  misc_feature: MA Experiment 20001906 PARAMETER Experiment Name: At_Drought_Reproduction_P Parameter: Organism Value: A. thaliana
  misc_feature: MA Experiment 20001906 PARAMETER Experiment Name: At_Drought_Reproduction_P Parameter: Plant Line Value: WS
  misc_feature: MA Experiment 20001906 PARAMETER Experiment Name: At_Drought_Reproduction_P Parameter: Timepoint (day) Value: 5
  misc_feature: MA Experiment 20001906 PARAMETER Experiment Name: At_Drought_Reproduction_P Parameter: Tissue Value: Siliques
  misc_feature: MA Experiment 20001906 PARAMETER Experiment Name: At_Drought_Reproduction_P Parameter: Treatment Value: Drought vs. No Drought
  misc_feature: MA Experiment ID: 20001910 Result: Up-regulated in Transcription
  misc_feature: MA Experiment 20001910 PARAMETER Experiment Name: At_Drought_Reproduction_P Parameter: Age (day) Value: 37
  misc_feature: MA Experiment 20001910 PARAMETER Experiment Name: At_Drought_Reproduction_P Parameter: Organism Value: A. thaliana
  misc_feature: MA Experiment 20001910 PARAMETER Experiment Name: At_Drought_Reproduction_P Parameter: Plant Line Value: WS
  misc_feature: MA Experiment 20001910 PARAMETER Experiment Name: At_Drought_Reproduction_P Parameter: Timepoint (day) Value: 7
  misc_feature: MA Experiment 20001910 PARAMETER Experiment Name: At_Drought_Reproduction_P Parameter: Tissue Value: Flowers
  misc_feature: MA Experiment 20001910 PARAMETER Experiment Name: At_Drought_Reproduction_P Parameter: Treatment Value: Drought vs. No Drought
  misc_feature: MA Experiment ID: 20001911 Result: Up-regulated in Transcription
  misc_feature: MA Experiment 20001911 PARAMETER Experiment Name: At_Drought_Reproduction_P Parameter: Age (day) Value: 40
  misc_feature: MA Experiment 20001911 PARAMETER Experiment Name: At_Drought_Reproduction_P Parameter: Organism Value: A. thaliana
  misc_feature: MA Experiment 20001911 PARAMETER Experiment Name: At_Drought_Reproduction_P Parameter: Plant Line Value: WS
  misc_feature: MA Experiment 20001911 PARAMETER Experiment Name: At_Drought_Reproduction_P Parameter: Timepoint (day) Value: 10
  misc_feature: MA Experiment 20001911 PARAMETER Experiment Name: At_Drought_Reproduction_P Parameter: Tissue Value: Flowers
  misc_feature: MA Experiment 20001911 PARAMETER Experiment Name: At_Drought_Reproduction_P Parameter: Treatment Value: Drought vs. No Drought
gacaaagagaattctctcatttcttcttcttcgctcagctccgacaacgaagggtgaagaatctcgctccctcagtttcgcattgccatcgattttcttagaggctaccatggtcgaacagactcagcaccccacgattcttcagaaggcttctggccaactcttgagctcgagtgtttctcaggacattcggggttatgcttcggattccaaaaggcctgctacataccagaaacatgcagcttacggaaactactccaatgctgcatttcaatatcctcttgcggctgcatctcagattgcaactactacttctcctgtgtttgtccaagctncaggagagaagggatttactaactttgctattgatttcatgatgggtgggtgtttctgctgctgtgtcaaagactgctgctgctcccattgagcgtgtcaagcttttgattcaaaaccaggatgagatgcttaaggctggaaggcttactgagccatacaagggtattcgtgactgtttcggcaggacaattagggatgaaggtattggttcgttgtggagaggaaacaccgctaatgttatccgttacttccccactcaggccttgaactttgcattcaaagattacttcaagaggcttttcaacttcaagaaagacaaggatggctactggaagtggtttgctggtaacttggcatctggaggtgctgctggtgcctcttcccttctctttgtgtactctcttgactatgcacgtacccgtcttgccaatgactccaagtctgccaagaagggaggaggtgaaaggcagttcaatggtcttgttgatgtctacaagaagaccctcaagtcagatggtattgctggactttaccgtggtttcaacatctcgtgtgctggtatcattgtctaccgtggtctctactttggactgtacgactctatgaagcctgtcctcctcactggagacctgcaggacagtttcttcgctagttttgctcttggatggctcatcaccaatggtgcgggtcttgcatcgtacccgattgacacggttagaagaagaatgatgatgacatcaggtgaagcggtgaagtacaagagctcatttgatgcgttctcccagatcgtgaagaaggaaggagccaagtctctgttcaagggtgcgggtgccaacatccggagtgtcgttgcaggtgctggtgtgctttctgggtgcgacaagctgcagttaatcgtcttcggcaagaagtatggatctggaggtgcctaagtaccaccaaatcccgcagtcattaagcttcggcttttgtttttttctccaatttttttgcagtttcagatttcttttataaaaaagatgttgatgaaatcatttccccataaaattagagaggagcaaggggaaatattatctgttcgacgataaggtttttgttatatggaataaattttgtatgggagggaaaaaaaaaaaaaaaaaaaactcgagggggg

SEQ ID NO: 49875 - protein, 268 aa, Arabidopsis thaliana
  peptide (1)..(268): Ceres Seq. ID no. 13648264
  misc_feature (1)..(267): Homolog of NCBI NO: 113461 NR Description: ADP,ATP carrier protein, mitochondrial precursor
  misc_feature (1)..(268): Homolog of NCBI NO: 100424 NR Description: ADP,ATP carrier protein precursor - potato
  misc_feature (1)..(268): Homolog of NCBI NO: 1890116 NR Description: ADP/ATP translocator [Lycopersicon esculentum]
  misc_feature (1)..(268): Homolog of NCBI NO: 113457 NR Description: ADP,ATP carrier protein, mitochondrial precursor
  misc_feature (1)..(268): Homolog of NCBI NO: 3334115 NR Description: ADP,ATP carrier protein 1, mitochondrial (ADP/ATP translocase 1) (Adenine nucleotide translocator 1) (ANT
  misc_feature (1)..(268): Homolog of NCBI NO: 99658 NR Description: ADP,ATP carrier protein - Arabidopsis thaliana
  misc_feature (1)..(268): Homolog of NCBI NO: 15231937 NR Description: mitochondrial ADP,ATP carrier protein 1
  misc_feature (1)..(268): Homolog of NCBI NO: 478810 NR Description: ADP,ATP carrier protein - Arabidopsis thaliana
  misc_feature (1)..(268): Homolog of NCBI NO: 15240640 NR Description: mitochondrial ADP,ATP carrier protein 2
  misc_feature (1)..(268): Homolog of NCBI NO: 444790 NR Description: nucleotide translocator
MLKAGRLTEPYKGIRDCFGRTIRDEGIGSLWRGNTANVIRYFPTQALNFAFKDYFKRLFNFKKDKDGYWKWFAGNLASGGAAGASSLLFVYSLDYARTRLANDSKSAKKGGGERQFNGLVDVYKKTLKSDGIAGLYRGFNISCAGIIVYRGLYFGLYDSMKPVLLTGDLQDSFFASFALGWLITNGAGLASYPIDTVRRRMMMTSGEAVKYKSSFDAFSQIVKKEGAKSLFKGAGANIRSVVAGAGVLSGCDKLQLIVFGKKYGSGGA

SEQ ID NO: 49876 - protein, 141 aa, Arabidopsis thaliana
  peptide (1)..(141): Ceres Seq. ID no. 13648265
  misc_feature (42)..(128): Homolog of NCBI NO: 113461 NR Description: ADP,ATP carrier protein, mitochondrial precursor
  misc_feature (37)..(128): Homolog of NCBI NO: 100424 NR Description: ADP,ATP carrier protein precursor - potato
  misc_feature (37)..(128): Homolog of NCBI NO: 1890116 NR Description: ADP/ATP translocator [Lycopersicon esculentum]
  misc_feature (37)..(128): Homolog of NCBI NO: 113457 NR Description: ADP,ATP carrier protein, mitochondrial precursor
  misc_feature (38)..(128): Homolog of NCBI NO: 3334115 NR Description: ADP,ATP carrier protein 1, mitochondrial (ADP/ATP translocase 1) (Adenine nucleotide translocator 1) (ANT
  misc_feature (40)..(128): Homolog of NCBI NO: 99658 NR Description: ADP,ATP carrier protein - Arabidopsis thaliana
  misc_feature (37)..(128): Homolog of NCBI NO: 15231937 NR Description: mitochondrial ADP,ATP carrier protein 1
  misc_feature (37)..(128): Homolog of NCBI NO: 478810 NR Description: ADP,ATP carrier protein - Arabidopsis thaliana
  misc_feature (37)..(128): Homolog of NCBI NO: 15240640 NR Description: mitochondrial ADP,ATP carrier protein 2
  misc_feature (19)..(128): Homolog of NCBI NO: 444790 NR Description: nucleotide translocator
  misc_feature (112)..(112): Xaa is any aa, unknown or other
TKRILSFLLLRSAPTTKGEESRSLSFALPSIFLEATMVEQTQHPTILQKASGQLLSSSVSQDIRGYASDSKRPATYQKHAAYGNYSNAAFQYPLAAASQIATTTSPVFVQAXGEKGFTNFAIDFMMGGCFCCCVKDCCCSH

SEQ ID NO: 49877 - DNA, 1880 bp, Arabidopsis thaliana; identical to SEQ ID NO: 45024
  misc_feature (1)..(1880): Ceres Seq. ID no. 12559206
  misc_feature: MA Experiment ID: 20000169 Result: Up-regulated in Transcription
  misc_feature: MA Experiment 20000169 PARAMETER Experiment Name: At_100uM_ABA_P Parameter: Age (day) Value: 14
  misc_feature: MA Experiment 20000169 PARAMETER Experiment Name: At_100uM_ABA_P Parameter: Organism Value: A. thaliana
  misc_feature: MA Experiment 20000169 PARAMETER Experiment Name: At_100uM_ABA_P Parameter: Plant Line Value: WS
  misc_feature: MA Experiment 20000169 PARAMETER Experiment Name: At_100uM_ABA_P Parameter: Timepoint (hr) Value: 6
  misc_feature: MA Experiment 20000169 PARAMETER Experiment Name: At_100uM_ABA_P Parameter: Tissue Value: Aerial
  misc_feature: MA Experiment 20000169 PARAMETER Experiment Name: At_100uM_ABA_P Parameter: Treatment Value: 100uM ABA vs. No Treatment
  misc_feature: MA Experiment ID: 20000171 Result: Down-regulated in Transcription
  misc_feature: MA Experiment 20000171 PARAMETER Experiment Name: At_42deg_Heat_P Parameter: Age (day) Value: 14
  misc_feature: MA Experiment 20000171 PARAMETER Experiment Name: At_42deg_Heat_P Parameter: Organism Value: A. thaliana
  misc_feature: MA Experiment 20000171 PARAMETER Experiment Name: At_42deg_Heat_P Parameter: Plant Line Value: WS
  misc_feature: MA Experiment 20000171 PARAMETER Experiment Name: At_42deg_Heat_P Parameter: Temperature (deg C) Value: 42 vs. 22
  misc_feature: MA Experiment 20000171 PARAMETER Experiment Name: At_42deg_Heat_P Parameter: Timepoint (hr) Value: 1
  misc_feature: MA Experiment 20000171 PARAMETER Experiment Name: At_42deg_Heat_P Parameter: Tissue Value: Aerial
  misc_feature: MA Experiment ID: 20000173 Result: Down-regulated in Transcription
  misc_feature: MA Experiment 20000173 PARAMETER Experiment Name: At_42deg_Heat_P Parameter: Age (day) Value: 14
  misc_feature: MA Experiment 20000173 PARAMETER Experiment Name: At_42deg_Heat_P Parameter: Organism Value: A. thaliana
  misc_feature: MA Experiment 20000173 PARAMETER Experiment Name: At_42deg_Heat_P Parameter: Plant Line Value: WS
  misc_feature: MA Experiment 20000173 PARAMETER Experiment Name: At_42deg_Heat_P Parameter: Temperature (deg C) Value: 42 vs. 22
  misc_feature: MA Experiment 20000173 PARAMETER Experiment Name: At_42deg_Heat_P Parameter: Timepoint (hr) Value: 6
  misc_feature: MA Experiment 20000173 PARAMETER Experiment Name: At_42deg_Heat_P Parameter: Tissue Value: Aerial
  misc_feature: MA Experiment ID: 20000213 Result: Up-regulated in Transcription
  misc_feature: MA Experiment 20000213 PARAMETER Experiment Name: At_4deg_Cold_P Parameter: Timepoint (hr) Value: 2
  misc_feature: MA Experiment ID: 20000227 Result: Down-regulated in Transcription
  misc_feature: MA Experiment 20000227 PARAMETER Experiment Name: At_Root-Tips-vs-Tops_P Parameter: Tissue Value: Root Tips vs. Root Tops
  misc_feature: MA Experiment ID: 20000265 Result: Down-regulated in Transcription
  misc_feature: MA Experiment 20000265 PARAMETER Experiment Name: At_Open_Flower_P Parameter: Age (day) Value: 21
  misc_feature: MA Experiment 20000265 PARAMETER Experiment Name: At_Open_Flower_P Parameter: Plant Line Value: WS
  misc_feature: MA Experiment 20000265 PARAMETER Experiment Name: At_Open_Flower_P Parameter: Tissue Value: Closed Flower vs. Whole Plant
  misc_feature: MA Experiment ID: 20000495 Result: Down-regulated in Transcription
  misc_feature: MA Experiment 20000495 PARAMETER Experiment Name: At_Guard_Cells_P Parameter: Harvest Date Value: 8/2/2002
  misc_feature: MA Experiment 20000495 PARAMETER Experiment Name: At_Guard_Cells_P Parameter: Organism Value: A. thaliana
  misc_feature: MA Experiment 20000495 PARAMETER Experiment Name: At_Guard_Cells_P Parameter: Tissue Value: Guard Cells vs. Leaves
  misc_feature: MA Experiment ID: 20000573 Result: Down-regulated in Transcription
  misc_feature: MA Experiment 20000573 PARAMETER Experiment Name: At_100uM_ABA_Mutants__P Parameter: Organism Value: A. thaliana
  misc_feature: MA Experiment 20000573 PARAMETER Experiment Name: At_100uM_ABA_Mutants__P Parameter: Plant Line Value: CS22 vs. Ler wt
  misc_feature: MA Experiment 20000573 PARAMETER Experiment Name: At_100uM_ABA_Mutants__P Parameter: Timepoint (hr) Value: N/A
  misc_feature: MA Experiment 20000573 PARAMETER Experiment Name: At_100uM_ABA_Mutants__P Parameter: Tissue Value: Whole Plant
  misc_feature: MA Experiment 20000573 PARAMETER Experiment Name: At_100uM_ABA_Mutants__P Parameter: Treatment Value: None
  misc_feature: MA Experiment ID: 20000574 Result: Down-regulated in Transcription
  misc_feature: MA Experiment 20000574 PARAMETER Experiment Name: At_100uM_ABA_Mutants__P Parameter: Organism Value: A. thaliana
  misc_feature: MA Experiment 20000574 PARAMETER Experiment Name: At_100uM_ABA_Mutants__P Parameter: Plant Line Value: CS23 vs. Ler wt
  misc_feature: MA Experiment 20000574 PARAMETER Experiment Name: At_100uM_ABA_Mutants__P Parameter: Timepoint (hr) Value: N/A
  misc_feature: MA Experiment 20000574 PARAMETER Experiment Name: At_100uM_ABA_Mutants__P Parameter: Tissue Value: Whole Plant
  misc_feature: MA Experiment 20000574 PARAMETER Experiment Name: At_100uM_ABA_Mutants__P Parameter: Treatment Value: None
  misc_feature: MA Experiment ID: 20001247 Result: Up-regulated in Transcription
  misc_feature: MA Experiment 20001247 PARAMETER Experiment Name: At_Far-red-induction_P Parameter: Age (day) Value: 7
  misc_feature: MA Experiment 20001247 PARAMETER Experiment Name: At_Far-red-induction_P Parameter: Light Value: Far-red vs. White
  misc_feature: MA Experiment 20001247 PARAMETER Experiment Name: At_Far-red-induction_P Parameter: Organism Value: A. thaliana
  misc_feature: MA Experiment 20001247 PARAMETER Experiment Name: At_Far-red-induction_P Parameter: Plant Line Value: Columbia
  misc_feature: MA Experiment 20001247 PARAMETER Experiment Name: At_Far-red-induction_P Parameter: Timepoint (hr) Value: 1
  misc_feature: MA Experiment 20001247 PARAMETER Experiment Name: At_Far-red-induction_P Parameter: Tissue Value: Whole Plant
  misc_feature: MA Experiment ID: 20001248 Result: Down-regulated in Transcription
  misc_feature: MA Experiment 20001248 PARAMETER Experiment Name: At_Far-red-induction_P Parameter: Age (day) Value: 7
  misc_feature: MA Experiment 20001248 PARAMETER Experiment Name: At_Far-red-induction_P Parameter: Light Value: Far-red vs. White
  misc_feature: MA Experiment 20001248 PARAMETER Experiment Name: At_Far-red-induction_P Parameter: Organism Value: A. thaliana
  misc_feature: MA Experiment 20001248 PARAMETER Experiment Name: At_Far-red-induction_P Parameter: Plant Line Value: Columbia
  misc_feature: MA Experiment 20001248 PARAMETER Experiment Name: At_Far-red-induction_P Parameter: Timepoint (hr) Value: 4
  misc_feature: MA Experiment 20001248 PARAMETER Experiment Name: At_Far-red-induction_P Parameter: Tissue Value: Whole Plant
  misc_feature: MA Experiment ID: 20001556 Result: Down-regulated in Transcription
  misc_feature: MA Experiment 20001556 PARAMETER Experiment Name: At_Drought_Soil_Dry_P Parameter: Age (day) Value: 26
  misc_feature: MA Experiment 20001556 PARAMETER Experiment Name: At_Drought_Soil_Dry_P Parameter: Organism Value: A. thaliana
  misc_feature: MA Experiment 20001556 PARAMETER Experiment Name: At_Drought_Soil_Dry_P Parameter: Plant Line Value: WS
  misc_feature: MA Experiment 20001556 PARAMETER Experiment Name: At_Drought_Soil_Dry_P Parameter: Post Timepoint (hr) Value: None
  misc_feature: MA Experiment 20001556 PARAMETER Experiment Name: At_Drought_Soil_Dry_P Parameter: Post-Treatment Value: None
  misc_feature: MA Experiment 20001556 PARAMETER Experiment Name: At_Drought_Soil_Dry_P Parameter: Timepoint (day) Value: 12
  misc_feature: MA Experiment 20001556 PARAMETER Experiment Name: At_Drought_Soil_Dry_P Parameter: Treatment Value: Drought vs. No Drought
  misc_feature: MA Experiment ID: 20001557 Result: Up-regulated in Transcription
  misc_feature: MA Experiment 20001557 PARAMETER Experiment Name: At_Drought_Soil_Dry_P Parameter: Age (day) Value: 27
  misc_feature: MA Experiment 20001557 PARAMETER Experiment Name: At_Drought_Soil_Dry_P Parameter: Organism Value: A. thaliana
  misc_feature: MA Experiment 20001557 PARAMETER Experiment Name: At_Drought_Soil_Dry_P Parameter: Plant Line Value: WS
  misc_feature: MA Experiment 20001557 PARAMETER Experiment Name: At_Drought_Soil_Dry_P Parameter: Post Timepoint (hr) Value: 3
  misc_feature: MA Experiment 20001557 PARAMETER Experiment Name: At_Drought_Soil_Dry_P Parameter: Post-Treatment Value: Re-Water vs. No Drought
  misc_feature: MA Experiment 20001557 PARAMETER Experiment Name: At_Drought_Soil_Dry_P Parameter: Timepoint (day) Value: 13
  misc_feature: MA Experiment 20001557 PARAMETER Experiment Name: At_Drought_Soil_Dry_P Parameter: Treatment Value: Drought vs. No Drought
  misc_feature: MA Experiment ID: 20001558 Result: Up-regulated in Transcription
  misc_feature: MA Experiment 20001558 PARAMETER Experiment Name: At_Drought_Soil_Dry_P Parameter: Age (day) Value: 27
  misc_feature: MA Experiment 20001558 PARAMETER Experiment Name: At_Drought_Soil_Dry_P Parameter: Organism Value: A. thaliana
  misc_feature: MA Experiment 20001558 PARAMETER Experiment Name: At_Drought_Soil_Dry_P Parameter: Plant Line Value: WS
  misc_feature: MA Experiment 20001558 PARAMETER Experiment Name: At_Drought_Soil_Dry_P Parameter: Post Timepoint (hr) Value: 6
  misc_feature: MA Experiment 20001558 PARAMETER Experiment Name: At_Drought_Soil_Dry_P Parameter: Post-Treatment Value: Re-Water vs. No Drought
  misc_feature: MA Experiment 20001558 PARAMETER Experiment Name: At_Drought_Soil_Dry_P Parameter: Timepoint (day) Value: 13
  misc_feature: MA Experiment 20001558 PARAMETER Experiment Name: At_Drought_Soil_Dry_P Parameter: Treatment Value: Drought vs. No Drought
  misc_feature: MA Experiment ID: 20001560 Result: Up-regulated in Transcription
  misc_feature: MA Experiment 20001560 PARAMETER Experiment Name: At_Drought_Soil_Dry_P Parameter: Age (day) Value: 28
  misc_feature: MA Experiment 20001560 PARAMETER Experiment Name: At_Drought_Soil_Dry_P Parameter: Organism Value: A. thaliana
  misc_feature: MA Experiment 20001560 PARAMETER Experiment Name: At_Drought_Soil_Dry_P Parameter: Plant Line Value: WS
  misc_feature: MA Experiment 20001560 PARAMETER Experiment Name: At_Drought_Soil_Dry_P Parameter: Post Timepoint (hr) Value: None
  misc_feature: MA Experiment 20001560 PARAMETER Experiment Name: At_Drought_Soil_Dry_P Parameter: Post-Treatment Value: None
  misc_feature: MA Experiment 20001560 PARAMETER Experiment Name: At_Drought_Soil_Dry_P Parameter: Timepoint (day) Value: 14
  misc_feature: MA Experiment 20001560 PARAMETER Experiment Name: At_Drought_Soil_Dry_P Parameter: Treatment Value: Drought vs. No Drought
  misc_feature: MA Experiment ID: 20001906 Result: Down-regulated in Transcription
  misc_feature: MA Experiment 20001906 PARAMETER Experiment Name: At_Drought_Reproduction_P Parameter: Age (day) Value: 35
  misc_feature: MA Experiment 20001906 PARAMETER Experiment Name: At_Drought_Reproduction_P Parameter: Organism Value: A. thaliana
  misc_feature: MA Experiment 20001906 PARAMETER Experiment Name: At_Drought_Reproduction_P Parameter: Plant Line Value: WS
  misc_feature: MA Experiment 20001906 PARAMETER Experiment Name: At_Drought_Reproduction_P Parameter: Timepoint (day) Value: 5
  misc_feature: MA Experiment 20001906 PARAMETER Experiment Name: At_Drought_Reproduction_P Parameter: Tissue Value: Siliques
  misc_feature: MA Experiment 20001906 PARAMETER Experiment Name: At_Drought_Reproduction_P Parameter: Treatment Value: Drought vs. No Drought
  misc_feature: MA Experiment ID: 20001911 Result: Down-regulated in Transcription
  misc_feature: MA Experiment 20001911 PARAMETER Experiment Name: At_Drought_Reproduction_P Parameter: Age (day) Value: 40
  misc_feature: MA Experiment 20001911 PARAMETER Experiment Name: At_Drought_Reproduction_P Parameter: Organism Value: A. thaliana
  misc_feature: MA Experiment 20001911 PARAMETER Experiment Name: At_Drought_Reproduction_P Parameter: Plant Line Value: WS
  misc_feature: MA Experiment 20001911 PARAMETER Experiment Name: At_Drought_Reproduction_P Parameter: Timepoint (day) Value: 10
  misc_feature: MA Experiment 20001911 PARAMETER Experiment Name: At_Drought_Reproduction_P Parameter: Tissue Value: Flowers
  misc_feature: MA Experiment 20001911 PARAMETER Experiment Name: At_Drought_Reproduction_P Parameter: Treatment Value: Drought vs. No Drought

SEQ ID NO: 49878 - protein, 528 aa, Arabidopsis thaliana; identical to SEQ ID NO: 45025
  peptide (1)..(528): Ceres Seq. ID no. 12559207
  misc_feature (360)..(503): Pfam Name: Chalcone and stilbene synthases, C-terminal domain Pfam Description: Chalcone and stilbene synthases, C-terminal
  misc_feature (360)..(503): Pfam Name: Chalcone and stilbene synthases, C-terminal domain Pfam Description: Chalcone and stilbene synthases, C-terminal
  misc_feature (22)..(526): Homolog of NCBI NO: 15219676 NR Description: putative beta-ketoacyl-CoA synthase; protein id:
  misc_feature (27)..(527): Homolog of NCBI NO: 11066477 NR Description: fatty acid elongase 1-like protein [Limnanthes
  misc_feature (34)..(526): Homolog of NCBI NO: 15239981 NR Description: beta-ketoacyl-CoA synthase
  misc_feature (34)..(526): Homolog of NCBI NO: 14334714 NR Description: putative beta-ketoacyl-CoA synthase [Arabidopsis
  misc_feature (32)..(526): Homolog of NCBI NO: 15225767 NR Description: putative beta-ketoacyl-CoA synthase; protein id:
  misc_feature (22)..(526): Homolog of NCBI NO: 15219676 NR Description: putative beta-ketoacyl-CoA synthase; protein id:
  misc_feature (34)..(526): Homolog of NCBI NO: 15239981 NR Description: beta-ketoacyl-CoA synthase
  misc_feature (32)..(526): Homolog of NCBI NO: 15225767 NR Description: putative beta-ketoacyl-CoA synthase; protein id:
  misc_feature (1)..(528): Homolog of NCBI NO: 22329274 NR Description: fatty acid elongase 3-ketoacyl-CoA synthase 1
  misc_feature (9)..(528): Homolog of NCBI NO: 4091810 NR Description: fatty acid elongase 3-ketoacyl-CoA synthase 1
  misc_feature (9)..(525): Homolog of NCBI NO: 3551960 NR Description: senescence-associated protein 15 [Hemerocallis
  misc_feature (22)..(526): Homolog of NCBI NO: 29417540 NR Description: beta-ketoacyl-CoA-synthase [Marchantia polymorpha]
  misc_feature (36)..(526): Homolog of NCBI NO: 9714501 NR Description: putative fatty acid elongase [Zea mays]
  misc_feature (34)..(526): Homolog of NCBI NO: 14334714 NR Description: putative beta-ketoacyl-CoA synthase [Arabidopsis
  misc_feature (27)..(527): Homolog of NCBI NO: 11066477 NR Description: fatty acid elongase 1-like protein [Limnanthes
  misc_feature (36)..(526): Homolog of NCBI NO: 9714501 NR Description: putative fatty acid elongase [Zea mays]
  misc_feature (22)..(526): Homolog of NCBI NO: 29417540 NR Description: beta-ketoacyl-CoA-synthase [Marchantia polymorpha]
  misc_feature (9)..(525): Homolog of NCBI NO: 3551960 NR Description: senescence-associated protein 15 [Hemerocallis
  misc_feature (9)..(528): Homolog of NCBI NO: 4091810 NR Description: fatty acid elongase 3-ketoacyl-CoA synthase 1
  misc_feature (1)..(528): Homolog of NCBI NO: 22329274 NR Description: fatty acid elongase 3-ketoacyl-CoA synthase 1

SEQ ID NO: 49879 - protein, 520 aa, Arabidopsis thaliana; identical to SEQ ID NO: 45026
  peptide (1)..(520): Ceres Seq. ID no. 12559208
  misc_feature (352)..(495): Pfam Name: Chalcone and stilbene synthases, C-terminal domain Pfam Description: Chalcone and stilbene synthases, C-terminal
  misc_feature (352)..(495): Pfam Name: Chalcone and stilbene synthases, C-terminal domain Pfam Description: Chalcone and stilbene synthases, C-terminal
  misc_feature (14)..(518): Homolog of NCBI NO: 15219676 NR Description: putative beta-ketoacyl-CoA synthase; protein id:
  misc_feature (19)..(519): Homolog of NCBI NO: 11066477 NR Description: fatty acid elongase 1-like protein [Limnanthes
  misc_feature (26)..(518): Homolog of NCBI NO: 15239981 NR Description: beta-ketoacyl-CoA synthase
  misc_feature (26)..(518): Homolog of NCBI NO: 14334714 NR Description: putative beta-ketoacyl-CoA synthase [Arabidopsis
  misc_feature (24)..(518): Homolog of NCBI NO: 15225767 NR Description: putative beta-ketoacyl-CoA synthase; protein id:
  misc_feature (14)..(518): Homolog of NCBI NO: 15219676 NR Description: putative beta-ketoacyl-CoA synthase; protein id:
  misc_feature (26)..(518): Homolog of NCBI NO: 15239981 NR Description: beta-ketoacyl-CoA synthase
  misc_feature (24)..(518): Homolog of NCBI NO: 15225767 NR Description: putative beta-ketoacyl-CoA synthase; protein id:
  misc_feature (1)..(520): Homolog of NCBI NO: 22329274 NR Description: fatty acid elongase 3-ketoacyl-CoA synthase 1
  misc_feature (1)..(520): Homolog of NCBI NO: 4091810 NR Description: fatty acid elongase 3-ketoacyl-CoA synthase 1
  misc_feature (1)..(517): Homolog of NCBI NO: 3551960 NR Description: senescence-associated protein 15 [Hemerocallis
  misc_feature (14)..(518): Homolog of NCBI NO: 29417540 NR Description: beta-ketoacyl-CoA-synthase [Marchantia polymorpha]
  misc_feature (28)..(518): Homolog of NCBI NO: 9714501 NR Description: putative fatty acid elongase [Zea mays]
  misc_feature (26)..(518): Homolog of NCBI NO: 14334714 NR Description: putative beta-ketoacyl-CoA synthase [Arabidopsis
  misc_feature (19)..(519): Homolog of NCBI NO: 11066477 NR Description: fatty acid elongase 1-like protein [Limnanthes
  misc_feature (28)..(518): Homolog of NCBI NO: 9714501 NR Description: putative fatty acid elongase [Zea mays]
  misc_feature (14)..(518): Homolog of NCBI NO: 29417540 NR Description: beta-ketoacyl-CoA-synthase [Marchantia polymorpha]
  misc_feature (1)..(517): Homolog of NCBI NO: 3551960 NR Description: senescence-associated protein 15 [Hemerocallis
  misc_feature (1)..(520): Homolog of NCBI NO: 4091810 NR Description: fatty acid elongase 3-ketoacyl-CoA synthase 1
  misc_feature (1)..(520): Homolog of NCBI NO: 22329274 NR Description: fatty acid elongase 3-ketoacyl-CoA synthase 1

SEQ ID NO: 49880 - protein, 511 aa, Arabidopsis thaliana; identical to SEQ ID NO: 45027
  peptide (1)..(511): Ceres Seq. ID no. 12559209
  misc_feature (343)..(486): Pfam Name: Chalcone and stilbene synthases, C-terminal domain Pfam Description: Chalcone and stilbene synthases, C-terminal
  misc_feature (343)..(486): Pfam Name: Chalcone and stilbene synthases, C-terminal domain Pfam Description: Chalcone and stilbene synthases, C-terminal
  misc_feature (5)..(509): Homolog of NCBI NO: 15219676 NR Description: putative beta-ketoacyl-CoA synthase; protein id:
  misc_feature (10)..(510): Homolog of NCBI NO: 11066477 NR Description: fatty acid elongase 1-like protein [Limnanthes
  misc_feature (17)..(509): Homolog of NCBI NO: 15239981 NR Description: beta-ketoacyl-CoA synthase
  misc_feature (17)..(509): Homolog of NCBI NO: 14334714 NR Description: putative beta-ketoacyl-CoA synthase [Arabidopsis
  misc_feature (15)..(509): Homolog of NCBI NO: 15225767 NR Description: putative beta-ketoacyl-CoA synthase; protein id:
  misc_feature (5)..(509): Homolog of NCBI NO: 15219676 NR Description: putative beta-ketoacyl-CoA synthase; protein id:
  misc_feature (17)..(509): Homolog of NCBI NO: 15239981 NR Description: beta-ketoacyl-CoA synthase
  misc_feature (15)..(509): Homolog of NCBI NO: 15225767 NR Description: putative beta-ketoacyl-CoA synthase; protein id:
  misc_feature (1)..(511): Homolog of NCBI NO: 22329274 NR Description: fatty acid elongase 3-ketoacyl-CoA synthase 1
  misc_feature (1)..(511): Homolog of NCBI NO: 4091810 NR Description: fatty acid elongase 3-ketoacyl-CoA synthase 1
  misc_feature (1)..(508): Homolog of NCBI NO: 3551960 NR Description: senescence-associated protein 15 [Hemerocallis
  misc_feature (5)..(509): Homolog of NCBI NO: 29417540 NR Description: beta-ketoacyl-CoA-synthase [Marchantia polymorpha]
  misc_feature (19)..(509): Homolog of NCBI NO: 9714501 NR Description: putative fatty acid elongase [Zea mays]
  misc_feature (17)..(509): Homolog of NCBI NO: 14334714 NR Description: putative beta-ketoacyl-CoA synthase [Arabidopsis
  misc_feature (10)..(510): Homolog of NCBI NO: 11066477 NR Description: fatty acid elongase 1-like protein [Limnanthes
  misc_feature (19)..(509): Homolog of NCBI NO: 9714501 NR Description: putative fatty acid elongase [Zea mays]
  misc_feature (5)..(509): Homolog of NCBI NO: 29417540 NR Description: beta-ketoacyl-CoA-synthase [Marchantia polymorpha]
  misc_feature (1)..(508): Homolog of NCBI NO: 3551960 NR Description: senescence-associated protein 15 [Hemerocallis
  misc_feature (1)..(511): Homolog of NCBI NO: 4091810 NR Description: fatty acid elongase 3-ketoacyl-CoA synthase 1
  misc_feature (1)..(511): Homolog of NCBI NO: 22329274 NR Description: fatty acid elongase 3-ketoacyl-CoA synthase 1

SEQ ID NO: 49881 - DNA, 838 bp, Arabidopsis thaliana
  misc_feature (1)..(838): Ceres Seq. ID no. 13592589
  misc_feature: MA Experiment ID: 20000355 Result: Up-regulated in Transcription
  misc_feature: MA Experiment 20000355 PARAMETER Experiment Name: At_Siliques_Sub_P Parameter: Age (day) Value: 21
  misc_feature: MA Experiment 20000355 PARAMETER Experiment Name: At_Siliques_Sub_P Parameter: Organism Value: A. thaliana
  misc_feature: MA Experiment 20000355 PARAMETER Experiment Name: At_Siliques_Sub_P Parameter: Plant Line Value: WS
  misc_feature: MA Experiment 20000355 PARAMETER Experiment Name: At_Siliques_Sub_P Parameter: Tissue Value: Less Than 5mm Siliques vs. Whole Plant
  misc_feature: MA Experiment ID: 20000440 Result: Up-regulated in Transcription
  misc_feature: MA Experiment 20000440 PARAMETER Experiment Name: At_Closed-Flower__Sub_P Parameter: Tissue Value: Closed Flower vs. Whole Plant
  misc_feature: MA Experiment ID: 20001807 Result: Up-regulated in Transcription
  misc_feature: MA Experiment 20001807 PARAMETER Experiment Name: At_50mM_NH4NO3_L-to-H_Sub_P Parameter: Timepoint (hr) Value: 6
  misc_feature: MA Experiment 20001807 PARAMETER Experiment Name: At_50mM_NH4NO3_L-to-H_Sub_P Parameter: Tissue Value: Leaf
  misc_feature: MA Experiment 20001807 PARAMETER Experiment Name: At_50mM_NH4NO3_L-to-H_Sub_P Parameter: Treatment Value: 50mM NH4NO3 vs 100mM Mannitol
attcctctgcggcgtctctctctcttccttatcatcatcatcttcactctaaacttcacagagagccattcaagcagaagaagagctctctgatccttctctgccattttcattattatcctttcttctgtttcagagttttctattcttctcaatcttatctcgcttcgaagtggatcaatatgtcaatgacggaagaaaccaagacgacgaagctcgaatcggcgggagattcgtccgatgtagacaacgggaactgtagtagcagtggaagtggaggtgatacgaagaagacatgcgttgattgtggaacaagcaggactcctctttggcgtggtggacctgctggccctaaatcattgtgcaatgcgtgtgggatcaaaagcagaaagaagagacaagcagctcttggaattagacaagatgatattaaaatcaagagcaaaagtaataacaatcttggtcttgagagccgaaatgtcaagaccggaaaaggcgaaccagttaatgttaagattgcaaaatgtgaaccgggaaatgtcaagattgccaaaggtgaaccaggaaatgtcaagaacaaaatcaagagagatcctgagaattccagtagcagcaataataacaagaagaacgtgaaaagggttggtagatttttggattttgggtttaaggtaccggcgatgaagagatcggctgtggagaagaagaggctatggaggaaacttggggaagaggaacgagccgcagtacttctcatggctctttcttgtggttgagattttgtctcttaaccctttttttttgatgtgtcgtaatggttgagtgaaagagattaggg

SEQ ID NO: 49882 - protein, 257 aa, Arabidopsis thaliana
  peptide (1)..(257): Ceres Seq. ID no. 13592590
  misc_feature (67)..(257): Homolog of NCBI NO: 15241967 NR Description: GATA zinc finger protein [Arabidopsis thaliana]
  misc_feature (77)..(164): Homolog of NCBI NO: 34897256 NR Description: putative zinc finger protein
  misc_feature (91)..(150): Homolog of NCBI NO: 15239847 NR Description: GATA zinc finger protein [Arabidopsis thaliana]
  misc_feature (72)..(164): Homolog of NCBI NO: 21536761 NR Description: unknown [Arabidopsis thaliana]
  misc_feature (72)..(164): Homolog of NCBI NO: 7549639 NR Description: hypothetical protein [Arabidopsis thaliana]
  misc_feature (66)..(164): Homolog of NCBI NO: 18397703 NR Description: GATA zinc finger protein [Arabidopsis thaliana]
  misc_feature (61)..(212): Homolog of NCBI NO: 22328703 NR Description: GATA zinc finger protein -related [Arabidopsis
  misc_feature (64)..(256): Homolog of NCBI NO: 15228899 NR Description: GATA zinc finger protein [Arabidopsis thaliana]
  misc_feature (118)..(257): Homolog of NCBI NO: 22328703 NR Description: GATA zinc finger protein -related [Arabidopsis
  misc_feature (61)..(257): Homolog of NCBI NO: 26453042 NR Description: unknown protein [Arabidopsis thaliana]
SSAASLSLPYHHHLHSKLHREPFKQKKSSLILLCHFHYYPFFCFRVFYSSQSYLASKWINMSMTEETKTTKLESAGDSSDVDNGNCSSSGSGGDTKKTCVDCGTSRTPLWRGGPAGPKSLCNACGIKSRKKRQAALGIRQDDIKIKSKSNNNLGLESRNVKTGKGEPVNVKIAKCEPGNVKIAKGEPGNVKNKIKRDPENSSSSNNNKKNVKRVGRFLDFGFKVPAMKRSAVEKKRLWRKLGEEERAAVLLMALSCG

SEQ ID NO: 49883 - protein, 197 aa, Arabidopsis thaliana
  peptide (1)..(197): Ceres Seq. ID no. 13592591
  misc_feature (7)..(197): Homolog of NCBI NO: 15241967 NR Description: GATA zinc finger protein [Arabidopsis thaliana]
  misc_feature (17)..(104): Homolog of NCBI NO: 34897256 NR Description: putative zinc finger protein
  misc_feature (31)..(90): Homolog of NCBI NO: 15239847 NR Description: GATA zinc finger protein [Arabidopsis thaliana]
  misc_feature (12)..(104): Homolog of NCBI NO: 21536761 NR Description: unknown [Arabidopsis thaliana]
  misc_feature (12)..(104): Homolog of NCBI NO: 7549639 NR Description: hypothetical protein [Arabidopsis thaliana]
  misc_feature (6)..(104): Homolog of NCBI NO: 18397703 NR Description: GATA zinc finger protein [Arabidopsis thaliana]
  misc_feature (1)..(152): Homolog of NCBI NO: 22328703 NR Description: GATA zinc finger protein -related [Arabidopsis
  misc_feature (4)..(196): Homolog of NCBI NO: 15228899 NR Description: GATA zinc finger protein [Arabidopsis thaliana]
  misc_feature (58)..(197): Homolog of NCBI NO: 22328703 NR Description: GATA zinc finger protein -related [Arabidopsis
  misc_feature (1)..(197): Homolog of NCBI NO: 26453042 NR Description: unknown protein [Arabidopsis thaliana]
MSMTEETKTTKLESAGDSSDVDNGNCSSSGSGGDTKKTCVDCGTSRTPLWRGGPAGPKSLCNACGIKSRKKRQAALGIRQDDIKIKSKSNNNLGLESRNVKTGKGEPVNVKIAKCEPGNVKIAKGEPGNVKNKIKRDPENSSSSNNNKKNVKRVGRFLDFGFKVPAMKRSAVEKKRLWRKLGEEERAAVLLMALSCG

SEQ ID NO: 49884 - protein, 195 aa, Arabidopsis thaliana
  peptide (1)..(195): Ceres Seq. ID no. 13592592
  misc_feature (5)..(195): Homolog of NCBI NO: 15241967 NR Description: GATA zinc finger protein [Arabidopsis thaliana]
  misc_feature (15)..(102): Homolog of NCBI NO: 34897256 NR Description: putative zinc finger protein
  misc_feature (29)..(88): Homolog of NCBI NO: 15239847 NR Description: GATA zinc finger protein [Arabidopsis thaliana]
  misc_feature (10)..(102): Homolog of NCBI NO: 21536761 NR Description: unknown [Arabidopsis thaliana]
  misc_feature (10)..(102): Homolog of NCBI NO: 7549639 NR Description: hypothetical protein [Arabidopsis thaliana]
  misc_feature (4)..(102): Homolog of NCBI NO: 18397703 NR Description: GATA zinc finger protein [Arabidopsis thaliana]
  misc_feature (1)..(150): Homolog of NCBI NO: 22328703 NR Description: GATA zinc finger protein -related [Arabidopsis
  misc_feature (2)..(194): Homolog of NCBI NO: 15228899 NR Description: GATA zinc finger protein [Arabidopsis thaliana]
  misc_feature (56)..(195): Homolog of NCBI NO: 22328703 NR Description: GATA zinc finger protein -related [Arabidopsis
  misc_feature (1)..(195): Homolog of NCBI NO: 26453042 NR Description: unknown protein [Arabidopsis thaliana]
MTEETKTTKLESAGDSSDVDNGNCSSSGSGGDTKKTCVDCGTSRTPLWRGGPAGPKSLCNACGIKSRKKRQAALGIRQDDIKIKSKSNNNLGLESRNVKTGKGEPVNVKIAKCEPGNVKIAKGEPGNVKNKIKRDPENSSSSNNNKKNVKRVGRFLDFGFKVPAMKRSAVEKKRLWRKLGEEERAAVLLMALSCG

SEQ ID NO: 49885 - DNA, 690 bp, Arabidopsis thaliana
  misc_feature (1)..(690): Ceres Seq. ID no. 13592346
  misc_feature: MA Experiment ID: 20000306 Result: Up-regulated in Transcription
  misc_feature: MA Experiment 20000306 PARAMETER Experiment Name: At_Germinating_Seeds_Sub_P Parameter: Age (hr) Value: 6 vs. 0
  misc_feature: MA Experiment 20000306 PARAMETER Experiment Name: At_Germinating_Seeds_Sub_P Parameter: Organism Value: A. thaliana
  misc_feature: MA Experiment 20000306 PARAMETER Experiment Name: At_Germinating_Seeds_Sub_P Parameter: Plant Line Value: WS
  misc_feature: MA Experiment 20000306 PARAMETER Experiment Name: At_Germinating_Seeds_Sub_P Parameter: Tissue Value: Germinating Seeds
  misc_feature: MA Experiment ID: 20000307 Result: Up-regulated in Transcription
  misc_feature: MA Experiment 20000307 PARAMETER Experiment Name: At_Germinating_Seeds_Sub_P Parameter: Age (hr) Value: 24 vs. 0
  misc_feature: MA Experiment 20000307 PARAMETER Experiment Name: At_Germinating_Seeds_Sub_P Parameter: Organism Value: A. thaliana
  misc_feature: MA Experiment 20000307 PARAMETER Experiment Name: At_Germinating_Seeds_Sub_P Parameter: Plant Line Value: WS
  misc_feature: MA Experiment 20000307 PARAMETER Experiment Name: At_Germinating_Seeds_Sub_P Parameter: Tissue Value: Germinating Seeds
  misc_feature: MA Experiment ID: 20000328 Result: Down-regulated in Transcription
  misc_feature: MA Experiment 20000328 PARAMETER Experiment Name: At_42deg_Heat_Sub_P Parameter: Age (day) Value: 14
  misc_feature: MA Experiment 20000328 PARAMETER Experiment Name: At_42deg_Heat_Sub_P Parameter: Organism Value: A. thaliana
  misc_feature: MA Experiment 20000328 PARAMETER Experiment Name: At_42deg_Heat_Sub_P Parameter: Plant Line Value: WS
  misc_feature: MA Experiment 20000328 PARAMETER Experiment Name: At_42deg_Heat_Sub_P Parameter: Temperature (deg C) Value: 42 vs. 22
  misc_feature: MA Experiment 20000328 PARAMETER Experiment Name: At_42deg_Heat_Sub_P Parameter: Timepoint (hr) Value: 6
  misc_feature: MA Experiment 20000328 PARAMETER Experiment Name: At_42deg_Heat_Sub_P Parameter: Tissue Value: Aerial
  misc_feature: MA Experiment ID: 20000440 Result: Up-regulated in Transcription
  misc_feature: MA Experiment 20000440 PARAMETER Experiment Name: At_Closed-Flower__Sub_P Parameter: Tissue Value: Closed Flower vs. Whole Plant
gataccaatcaaacacgacagtctcaacaatcaaaagcttcaaatttttcattgtcaagaattctcaaaatggctagaacaaagcaaacagctagaaaatccaccggaggaaaagctcctagaaagcaactggcgacgaaagcagcaaggaaatcagctccagccaccggaggagtgaagaagccacacagattccgtccaggaacagtagcgttacgtgaaatcagaaagtatcaaaaaagcacagagcttttgatccgtaagcttcctttccagagattggttcgtgagatagctcaagatttcaagacggatcttaggtttcagagtagtgcagtcgcagctcttcaagaagcagctgaagcttatttggttggattgtttgaagatactaatctttgtgctattcatgctaagagggttacgattatgcctaaggatattcaacttgcgaggaggattagaggtgagagggcttaagatttgaagaagatgaagaagaaaaacaatggtctagtgtagatttgcttgtttgctctcataagatttgtagattcatgttttagatttggttttgagttttcttagtcttttgttctgaagtgtcttccagatgttcgatgaaatgcccaaatgaaaatttaatctacttttgctactttctaagaacagtcttcagtttaacttatt

SEQ ID NO: 49886 - protein, 159 aa, Arabidopsis thaliana
  peptide (1)..(159): Ceres Seq. ID no. 15221093
  misc_feature (40)..(158): Pfam Name: Core histone H2A/H2B/H3/H4 Pfam Description: Core histone H2A/H2B/H3/H4
  misc_feature (15)..(159): Homolog of NCBI NO: 34876396 NR Description: similar to H3 histone family, member I [Rattus
  misc_feature (24)..(159): Homolog of NCBI NO: 122070 NR Description: Histone H3
  misc_feature (17)..(159): Homolog of NCBI NO: 34876364 NR Description: similar to CG31613-PA [Rattus norvegicus]
  misc_feature (25)..(159): Homolog of NCBI NO: 122083 NR Description: Histone H3
  misc_feature (25)..(159): Homolog of NCBI NO: 70753 NR Description: histone H3 - garden pea (tentative sequence)
  misc_feature (18)..(159): Homolog of NCBI NO: 30061401 NR Description: histone 2, H3ca1 [Mus musculus]
  misc_feature (24)..(159): Homolog of NCBI NO: 166384 NR Description: histone H3 (H3-1.1)
  misc_feature (24)..(159): Homolog of NCBI NO: 1362108 NR Description: histone H3 homolog - common tobacco
  misc_feature (24)..(159): Homolog of NCBI NO: 122087 NR Description: Histone H3
  misc_feature (24)..(159): Homolog of NCBI NO: 15232146 NR Description: histone H3 [Arabidopsis thaliana]
DTNQTRQSQQSKASNFSLSRILKMARTKQTARKSTGGKAPRKQLATKAARKSAPATGGVKKPHRFRPGTVALREIRKYQKSTELLIRKLPFQRLVREIAQDFKTDLRFQSSAVAALQEAAEAYLVGLFEDTNLCAIHAKRVTIMPKDIQLARRIRGERA

SEQ ID NO: 49887 - protein, 136 aa, Arabidopsis thaliana; identical to SEQ ID NO: 8709
  peptide (1)..(136): Ceres Seq. ID no. 15221094
  misc_feature (17)..(135): Pfam Name: Core histone H2A/H2B/H3/H4 Pfam Description: Core histone H2A/H2B/H3/H4
  misc_feature (1)..(136): Homolog of NCBI NO: 34876396 NR Description: similar to H3 histone family, member I [Rattus
  misc_feature (1)..(136): Homolog of NCBI NO: 122070 NR Description: Histone H3
  misc_feature (1)..(136): Homolog of NCBI NO: 34876364 NR Description: similar to CG31613-PA [Rattus norvegicus]
  misc_feature (2)..(136): Homolog of NCBI NO: 122083 NR Description: Histone H3
  misc_feature (2)..(136): Homolog of NCBI NO: 70753 NR Description: histone H3 - garden pea (tentative sequence)
  misc_feature (1)..(136): Homolog of NCBI NO: 30061401 NR Description: histone 2, H3ca1 [Mus musculus]
  misc_feature (1)..(136): Homolog of NCBI NO: 166384 NR Description: histone H3 (H3-1.1)
  misc_feature (1)..(136): Homolog of NCBI NO: 1362108 NR Description: histone H3 homolog - common tobacco
  misc_feature (1)..(136): Homolog of NCBI NO: 122087 NR Description: Histone H3
  misc_feature (1)..(136): Homolog of NCBI NO: 15232146 NR Description: histone H3 [Arabidopsis thaliana]

SEQ ID NO: 49888 - DNA, 1118 bp, Arabidopsis thaliana
  misc_feature (1)..(1118): Ceres Seq. ID no. 13588838
  misc_feature: MA Experiment ID: 20001905 Result: Down-regulated in Transcription
  misc_feature: MA Experiment 20001905 PARAMETER Experiment Name: At_Drought_Reproduction_P Parameter: Age (day) Value: 40
  misc_feature: MA Experiment 20001905 PARAMETER Experiment Name: At_Drought_Reproduction_P Parameter: Organism Value: A. thaliana
  misc_feature: MA Experiment 20001905 PARAMETER Experiment Name: At_Drought_Reproduction_P Parameter: Plant Line Value: WS
  misc_feature: MA Experiment 20001905 PARAMETER Experiment Name: At_Drought_Reproduction_P Parameter: Timepoint (day) Value: 10
  misc_feature: MA Experiment 20001905 PARAMETER Experiment Name: At_Drought_Reproduction_P Parameter: Tissue Value: Rosettes
  misc_feature: MA Experiment 20001905 PARAMETER Experiment Name: At_Drought_Reproduction_P Parameter: Treatment Value: Drought vs. No Drought
gtttggtttttggatcagtatacagagattcaatgagctgttttggctgttgccgtgaagatgatttgcctggagctaatgattatggaggtcacaatatgaccaaacaatctggaggaaatgatggaaggcgcaacggctctgaaactgcacaaaaaggtgctcagagtgtgaaagtgcagcctatagaagtagctgctattctcgctgatgaactgattgaagcaacgaatgattttggaactaattctcttatcggtgaaggctcgtatgcgagagtgtatcacggggtgttaaagaatggtcagcgtgcagccattaaaaagttagattctaacaaacagcctaatgaagagtttctagcacaggtttccatggtttcgaggttgaagcatgttaactttgttgagctgcttggttactctgttgatgggaattcgaggatacttgtctttgagtttgcccaaaatggatctcttcatgatattcttcacgggagaaaaggtgtgaagggagcaaagcctggtccactcttgtcgtggcatcaacgagtgaagattgctgttggagcagcaagagggcttgagtatttacatgaaaaggcaaatccacatgtcatccaccgtgacataaaatccagcaatgttctaatctttgataacgatgtagccaagatagctgactttgatctctcaaatcaagctcctgatatggcagcacgccttcattcaactcgtgttcttggaacctttggttaccatgcccctgaatatgcaatgactgggcaattgagtgccaagagtgacgtatacagtttcggagttgtactgctcgagcttcttacaggtcgaaagcctgttgatcatacattgcctcgaggccagcaaagtctagtcacatgggctacaccaaagctaagcgaagacaaggttaagcagtgtgttgattcaagactgggaggagattaccctccaaaagctgttgctaagttagctgctgttgctgcattgtgtgtacaatacgaagctgatttcagaccaaacatgagtattgtcgtgaaggctctgcaaccattgttgaatgctcggaccggacctgcaggagaaggagcaccttag

SEQ ID NO: 49889 - protein, 371 aa, Arabidopsis thaliana
  peptide (1)..(371): Ceres Seq. ID no. 13588839
  misc_feature (11)..(362): Homolog of NCBI NO: 34894710 NR Description: Putative Pto kinase interactor 1
  misc_feature (11)..(365): Homolog of NCBI NO: 15451196 NR Description: similar to Pto kinase interactor 1 gb|AAC61805.1
  misc_feature (11)..(365): Homolog of NCBI NO: 15221111 NR Description: serine/threonine protein kinase, putative
  misc_feature (11)..(353): Homolog of NCBI NO: 1586940 NR Description: Ser/Thr kinase
  misc_feature (11)..(365): Homolog of NCBI NO: 22331138 NR Description: serine/threonine protein kinase, putative
  misc_feature (11)..(359): Homolog of NCBI NO: 3668069 NR Description: Pto kinase interactor 1 [Lycopersicon esculentum]
  misc_feature (328)..(369): Homolog of NCBI NO: 30690586 NR Description: serine/threonine protein kinase, putative
  misc_feature (11)..(330): Homolog of NCBI NO: 30690586 NR Description: serine/threonine protein kinase, putative
  misc_feature (11)..(369): Homolog of NCBI NO: 15226492 NR Description: serine/threonine protein kinase, putative
  misc_feature (11)..(371): Homolog of NCBI NO: 15228711 NR Description: serine/threonine protein kinase, putative
LVFGSVYRDSMSCFGCCREDDLPGANDYGGHNMTKQSGGNDGRRNGSETAQKGAQSVKVQPIEVAAILADELIEATNDFGTNSLIGEGSYARVYHGVLKNGQRAAIKKLDSNKQPNEEFLAQVSMVSRLKHVNFVELLGYSVDGNSRILVFEFAQNGSLHDILHGRKGVKGAKPGPLLSWHQRVKIAVGAARGLEYLHEKANPHVIHRDIKSSNVLIFDNDVAKIADFDLSNQAPDMAARLHSTRVLGTFGYHAPEYAMTGQLSAKSDVYSFGVVLLELLTGRKPVDHTLPRGQQSLVTWATPKLSEDKVKQCVDSRLGGDYPPKAVAKLAAVAALCVQYEADFRPNMSIVVKALQPLLNARTGPAGEGAP

SEQ ID NO: 49890 - protein, 361 aa, Arabidopsis thaliana
  peptide (1)..(361): Ceres Seq. ID no. 13588840
  misc_feature (1)..(352): Homolog of NCBI NO: 34894710 NR Description: Putative Pto kinase interactor 1
  misc_feature (1)..(355): Homolog of NCBI NO: 15451196 NR Description: similar to Pto kinase interactor 1 gb|AAC61805.1
  misc_feature (1)..(355): Homolog of NCBI NO: 15221111 NR Description: serine/threonine protein kinase, putative
  misc_feature (1)..(343): Homolog of NCBI NO: 1586940 NR Description: Ser/Thr kinase
  misc_feature (1)..(355): Homolog of NCBI NO: 22331138 NR Description: serine/threonine protein kinase, putative
  misc_feature (1)..(349): Homolog of NCBI NO: 3668069 NR Description: Pto kinase interactor 1 [Lycopersicon esculentum]
  misc_feature (318)..(359): Homolog of NCBI NO: 30690586 NR Description: serine/threonine protein kinase, putative
  misc_feature (1)..(320): Homolog of NCBI NO: 30690586 NR Description: serine/threonine protein kinase, putative
  misc_feature (1)..(359): Homolog of NCBI NO: 15226492 NR Description: serine/threonine protein kinase, putative
  misc_feature (1)..(361): Homolog of NCBI NO: 15228711 NR Description: serine/threonine protein kinase, putative
MSCFGCCREDDLPGANDYGGHNMTKQSGGNDGRRNGSETAQKGAQSVKVQPIEVAAILADELIEATNDFGTNSLIGEGSYARVYHGVLKNGQRAAIKKLDSNKQPNEEFLAQVSMVSRLKHVNFVELLGYSVDGNSRILVFEFAQNGSLHDILHGRKGVKGAKPGPLLSWHQRVKIAVGAARGLEYLHEKANPHVIHRDIKSSNVLIFDNDVAKIADFDLSNQAPDMAARLHSTRVLGTFGYHAPEYAMTGQLSAKSDVYSFGVVLLELLTGRKPVDHTLPRGQQSLVTWATPKLSEDKVKQCVDSRLGGDYPPKAVAKLAAVAALCVQYEADFRPNMSIVVKALQPLLNARTGPAGEGAP

SEQ ID NO: 49891 - protein, 339 aa, Arabidopsis thaliana
  peptide (1)..(339): Ceres Seq. ID no. 13588841
  misc_feature (1)..(330): Homolog of NCBI NO: 34894710 NR Description: Putative Pto kinase interactor 1
  misc_feature (1)..(333): Homolog of NCBI NO: 15451196 NR Description: similar to Pto kinase interactor 1 gb|AAC61805.1
  misc_feature (1)..(333): Homolog of NCBI NO: 15221111 NR Description: serine/threonine protein kinase, putative
  misc_feature (1)..(321): Homolog of NCBI NO: 1586940 NR Description: Ser/Thr kinase
  misc_feature (1)..(333): Homolog of NCBI NO: 22331138 NR Description: serine/threonine protein kinase, putative
  misc_feature (1)..(327): Homolog of NCBI NO: 3668069 NR Description: Pto kinase interactor 1 [Lycopersicon esculentum]
  misc_feature (296)..(337): Homolog of NCBI NO: 30690586 NR Description: serine/threonine protein kinase, putative
  misc_feature (1)..(298): Homolog of NCBI NO: 30690586 NR Description: serine/threonine protein kinase, putative
  misc_feature (1)..(337): Homolog of NCBI NO: 15226492 NR Description: serine/threonine protein kinase, putative
  misc_feature (1)..(339): Homolog of NCBI NO: 15228711 NR Description: serine/threonine protein kinase, putative
MTKQSGGNDGRRNGSETAQKGAQSVKVQPIEVAAILADELIEATNDFGTNSLIGEGSYARVYHGVLKNGQRAAIKKLDSNKQPNEEFLAQVSMVSRLKHVNFVELLGYSVDGNSRILVFEFAQNGSLHDILHGRKGVKGAKPGPLLSWHQRVKIAVGAARGLEYLHEKANPHVIHRDIKSSNVLIFDNDVAKIADFDLSNQAPDMAARLHSTRVLGTFGYHAPEYAMTGQLSAKSDVYSFGVVLLELLTGRKPVDHTLPRGQQSLVTWATPKLSEDKVKQCVDSRLGGDYPPKAVAKLAAVAALCVQYEADFRPNMSIVVKALQPLLNARTGPAGEGAP

SEQ ID NO: 49892 - DNA, 2851 bp, Arabidopsis thaliana; identical to SEQ ID NO: 46663
  misc_feature (1)..(2851): Ceres Seq. ID no. 12639101
  misc_feature: MA Experiment ID: 20000173 Result: Down-regulated in Transcription
  misc_feature: MA Experiment 20000173 PARAMETER Experiment Name: At_42deg_Heat_P Parameter: Age (day) Value: 14
  misc_feature: MA Experiment 20000173 PARAMETER Experiment Name: At_42deg_Heat_P Parameter: Organism Value: A. thaliana
  misc_feature: MA Experiment 20000173 PARAMETER Experiment Name: At_42deg_Heat_P Parameter: Plant Line Value: WS
  misc_feature: MA Experiment 20000173 PARAMETER Experiment Name: At_42deg_Heat_P Parameter: Temperature (deg C) Value: 42 vs. 22
  misc_feature: MA Experiment 20000173 PARAMETER Experiment Name: At_42deg_Heat_P Parameter: Timepoint (hr) Value: 6
  misc_feature: MA Experiment 20000173 PARAMETER Experiment Name: At_42deg_Heat_P Parameter: Tissue Value: Aerial
  misc_feature: MA Experiment ID: 20000180 Result: Down-regulated in Transcription
  misc_feature: MA Experiment 20000180 PARAMETER Experiment Name: At_Germinating_Seeds_P Parameter: Age (hr) Value: 24 vs. 0
  misc_feature: MA Experiment 20000180 PARAMETER Experiment Name: At_Germinating_Seeds_P Parameter: Tissue Value: Germinating Seeds
  misc_feature: MA Experiment ID: 20000184 Result: Down-regulated in Transcription
  misc_feature: MA Experiment 20000184 PARAMETER Experiment Name: At_Shoots__P Parameter: Age (day) Value: 7
  misc_feature: MA Experiment 20000184 PARAMETER Experiment Name: At_Shoots__P Parameter: Tissue Value: Shoots vs. Whole Plant

SEQ ID NO: 49893 - protein, 495 aa, Arabidopsis thaliana; identical to SEQ ID NO: 46664
  peptide (1)..(495): Ceres Seq. ID no. 12639102
  misc_feature (255)..(288): Pfam Name: TPR Domain Pfam Description: TPR Domain
  misc_feature (255)..(288): Pfam Name: TPR Domain Pfam Description: TPR Domain
  misc_feature (30)..(350): Homolog of NCBI NO: 34783387 NR Description: GTF3C3 protein [Homo sapiens]
  misc_feature (30)..(350): Homolog of NCBI NO: 18481637 NR Description: transcription factor IIIC102 short isoform [Homo
  misc_feature (365)..(487): Homolog of NCBI NO: 6321484 NR Description: transcription factor tau (TFIIIC) subunit 131;
  misc_feature (46)..(222): Homolog of NCBI NO: 7511370 NR Description: hypothetical protein ZK856.9 - Caenorhabditis
  misc_feature (46)..(222): Homolog of NCBI NO: 17566944 NR Description: TPR domain containing protein (119.0 kD)
  misc_feature (30)..(350): Homolog of NCBI NO: 34783387 NR Description: GTF3C3 protein [Homo sapiens]
  misc_feature (365)..(487): Homolog of NCBI NO: 6321484 NR Description: transcription factor tau (TFIIIC) subunit 131;
  misc_feature (46)..(222): Homolog of NCBI NO: 17566944 NR Description: TPR domain containing protein (119.0 kD)
  misc_feature (30)..(451): Homolog of NCBI NO: 6912398 NR Description: general transcription factor IIIC, polypeptide 3,
  misc_feature (30)..(451): Homolog of NCBI NO: 28175202 NR Description: similar to general transcription factor IIIC,
  misc_feature (130)..(451): Homolog of NCBI NO: 34875864 NR Description: similar to general transcription factor IIIC,
  misc_feature (171)..(451): Homolog of NCBI NO: 11360230 NR Description: hypothetical protein DKFZp761E129.1 - human
  misc_feature (366)..(491): Homolog of NCBI NO: 24654335 NR Description: CG8950-PA [Drosophila melanogaster]
  misc_feature (46)..(222): Homolog of NCBI NO: 7511370 NR Description: hypothetical protein ZK856.9 - Caenorhabditis
  misc_feature (30)..(350): Homolog of NCBI NO: 18481637 NR Description: transcription factor IIIC102 short isoform [Homo
  misc_feature (366)..(491): Homolog of NCBI NO: 24654335 NR Description: CG8950-PA [Drosophila melanogaster]
  misc_feature (171)..(451): Homolog of NCBI NO: 11360230 NR Description: hypothetical protein DKFZp761E129.1 - human
  misc_feature (130)..(451): Homolog of NCBI NO: 34875864 NR Description: similar to general transcription factor IIIC,
  misc_feature (30)..(451): Homolog of NCBI NO: 28175202 NR Description: similar to general transcription factor IIIC,
  misc_feature (30)..(451): Homolog of NCBI NO: 6912398 NR Description: general transcription factor IIIC, polypeptide 3,

SEQ ID NO: 49894 - protein, 469 aa, Arabidopsis thaliana; identical to SEQ ID NO: 46665
  peptide (1)..(469): Ceres Seq. ID no. 12639103
  misc_feature (229)..(262): Pfam Name: TPR Domain Pfam Description: TPR Domain
  misc_feature (229)..(262): Pfam Name: TPR Domain Pfam Description: TPR Domain
  misc_feature (4)..(324): Homolog of NCBI NO: 34783387 NR Description: GTF3C3 protein [Homo sapiens]
  misc_feature (4)..(324): Homolog of NCBI NO: 18481637 NR Description: transcription factor IIIC102 short isoform [Homo
  misc_feature (339)..(461): Homolog of NCBI NO: 6321484 NR Description: transcription factor tau (TFIIIC) subunit 131;
  misc_feature (20)..(196): Homolog of NCBI NO: 7511370 NR Description: hypothetical protein ZK856.9 - Caenorhabditis
  misc_feature (20)..(196): Homolog of NCBI NO: 17566944 NR Description: TPR domain containing protein (119.0 kD)
  misc_feature (4)..(324): Homolog of NCBI NO: 34783387 NR Description: GTF3C3 protein [Homo sapiens]
  misc_feature (339)..(461): Homolog of NCBI NO: 6321484 NR Description: transcription factor tau (TFIIIC) subunit 131;
  misc_feature (20)..(196): Homolog of NCBI NO: 17566944 NR Description: TPR domain containing protein (119.0 kD)
  misc_feature (4)..(425): Homolog of NCBI NO: 6912398 NR Description: general transcription factor IIIC, polypeptide 3,
  misc_feature (4)..(425): Homolog of NCBI NO: 28175202 NR Description: similar to general transcription factor IIIC,
  misc_feature (104)..(425): Homolog of NCBI NO: 34875864 NR Description: similar to general transcription factor IIIC,
  misc_feature (145)..(425): Homolog of NCBI NO: 11360230 NR Description: hypothetical protein DKFZp761E129.1 - human
  misc_feature (340)..(465): Homolog of NCBI NO: 24654335 NR Description: CG8950-PA [Drosophila melanogaster]
  misc_feature (20)..(196): Homolog of NCBI NO: 7511370 NR Description: hypothetical protein ZK856.9 - Caenorhabditis
  misc_feature (4)..(324): Homolog of NCBI NO: 18481637 NR Description: transcription factor IIIC102 short isoform [Homo
  misc_feature (340)..(465): Homolog of NCBI NO: 24654335 NR Description: CG8950-PA [Drosophila melanogaster]
  misc_feature (145)..(425): Homolog of NCBI NO: 11360230 NR Description: hypothetical protein DKFZp761E129.1 - human
  misc_feature (104)..(425): Homolog of NCBI NO: 34875864 NR Description: similar to general transcription factor IIIC,
  misc_feature (4)..(425): Homolog of NCBI NO: 28175202 NR Description: similar to general transcription factor IIIC,
  misc_feature (4)..(425): Homolog of NCBI NO: 6912398 NR Description: general transcription factor IIIC, polypeptide 3,

SEQ ID NO: 49895 - protein, 385 aa, Arabidopsis thaliana; identical to SEQ ID NO: 46666
  peptide (1)..(385): Ceres Seq. ID no. 12639104
  misc_feature (222)..(385): Homolog of NCBI NO: 19075424 NR Description: RNA polymerase III Transcriptioon factor (TF)IIIC
  misc_feature (184)..(382): Homolog of NCBI NO: 7511370 NR Description: hypothetical protein ZK856.9 - Caenorhabditis
  misc_feature (184)..(382): Homolog of NCBI NO: 17566944 NR Description: TPR domain containing protein (119.0 kD)
  misc_feature (170)..(383): Homolog of NCBI NO: 24654335 NR Description: CG8950-PA [Drosophila melanogaster]
  misc_feature (103)..(384): Homolog of NCBI NO: 10440070 NR Description: unnamed protein product [Homo sapiens]
  misc_feature (103)..(384): Homolog of NCBI NO: 16359058 NR Description: Similar to general transcription factor IIIC,
  misc_feature (103)..(384): Homolog of NCBI NO: 11360230 NR Description: hypothetical protein DKFZp761E129.1 - human
  misc_feature (166)..(383): Homolog of NCBI NO: 34875864 NR Description: similar to general transcription factor IIIC,
  misc_feature (103)..(384): Homolog of NCBI NO: 28175202 NR Description: similar to general transcription factor IIIC,
  misc_feature (103)..(384): Homolog of NCBI NO: 6912398 NR Description: general transcription factor IIIC, polypeptide 3,
  misc_feature (222)..(385): Homolog of NCBI NO: 19075424 NR Description: RNA polymerase III Transcriptioon factor (TF)IIIC
  misc_feature (184)..(382): Homolog of NCBI NO: 7511370 NR Description: hypothetical protein ZK856.9 - Caenorhabditis
  misc_feature (184)..(382): Homolog of NCBI NO: 17566944 NR Description: TPR domain containing protein (119.0 kD)
  misc_feature (170)..(383): Homolog of NCBI NO: 24654335 NR Description: CG8950-PA [Drosophila melanogaster]
  misc_feature (103)..(384): Homolog of NCBI NO: 10440070 NR Description: unnamed protein product [Homo sapiens]
  misc_feature (103)..(384): Homolog of NCBI NO: 16359058 NR Description: Similar to general transcription factor IIIC,
  misc_feature (103)..(384): Homolog of NCBI NO: 11360230 NR Description: hypothetical protein DKFZp761E129.1 - human
  misc_feature (166)..(383): Homolog of NCBI NO: 34875864 NR Description: similar to general transcription factor IIIC,
  misc_feature (103)..(384): Homolog of NCBI NO: 28175202 NR Description: similar to general transcription factor IIIC,
  misc_feature (103)..(384): Homolog of NCBI NO: 6912398 NR Description: general transcription factor IIIC, polypeptide 3,

SEQ ID NO: 49896 - DNA, 2948 bp, Arabidopsis thaliana; identical to SEQ ID NO: 47703
  misc_feature (1)..(2948): Ceres Seq. ID no. 12591727
  misc_feature: MA Experiment ID: 20000439 Result: Up-regulated in Transcription
  misc_feature: MA Experiment 20000439 PARAMETER Experiment Name: At_Roots__P Parameter: Age (day) Value: 14 vs. 21
  misc_feature: MA Experiment 20000439 PARAMETER Experiment Name: At_Roots__P Parameter: Organism Value: A. thaliana
  misc_feature: MA Experiment 20000439 PARAMETER Experiment Name: At_Roots__P Parameter: Tissue Value: Roots vs. Whole Plant

SEQ ID NO: 49897 - protein, 809 aa, Arabidopsis thaliana; identical to SEQ ID NO: 47704
  peptide (1)..(809): Ceres Seq. ID no. 12591728
  misc_feature (296)..(373): Pfam Name: RNA recognition motif. (a.k.a. RRM, RBD, or RNP domain) Pfam Description: RNA recognition motif. (a.k.a. RRM, RBD, or RNP
  misc_feature (296)..(373): Pfam Name: RNA recognition motif. (a.k.a. RRM, RBD, or RNP domain) Pfam Description: RNA recognition motif. (a.k.a. RRM, RBD, or RNP
  misc_feature (108)..(567): Homolog of NCBI NO: 29371361 NR Description: putative RNA-binding protein
  misc_feature (108)..(568): Homolog of NCBI NO: 18411454 NR Description: RRM-containing protein
  misc_feature (296)..(463): Homolog of NCBI NO: 7485542 NR Description: hypothetical protein F16B22.20 - Arabidopsis
  misc_feature (196)..(506): Homolog of NCBI NO: 34393486 NR Description: putative RRM RNA binding protein NSAP1
  misc_feature (145)..(473): Homolog of NCBI NO: 34901412 NR Description: OSJNBa0075N02.12 [Oryza sativa (japonica
  misc_feature (108)..(567): Homolog of NCBI NO: 29371361 NR Description: putative RNA-binding protein
  misc_feature (296)..(463): Homolog of NCBI NO: 7485542 NR Description: hypothetical protein F16B22.20 - Arabidopsis
  misc_feature (145)..(473): Homolog of NCBI NO: 34901412 NR Description: OSJNBa0075N02.12 [Oryza sativa (japonica
  misc_feature (46)..(809): Homolog of NCBI NO: 38345947 NR Description: OSJNBb0103I08.18 [Oryza sativa (japonica
  misc_feature (583)..(809): Homolog of NCBI NO: 7485543 NR Description: hypothetical protein At2g44720 [imported] -
  misc_feature (94)..(369): Homolog of NCBI NO: 7485542 NR Description: hypothetical protein F16B22.20 - Arabidopsis
  misc_feature (327)..(809): Homolog of NCBI NO: 22655529 NR Description: water-stress protein [Zea mays]
  misc_feature (145)..(473): Homolog of NCBI NO: 34395354 NR Description: water-stress protein-like protein
  misc_feature (196)..(506): Homolog of NCBI NO: 34393486 NR Description: putative RRM RNA binding protein NSAP1
  misc_feature (108)..(568): Homolog of NCBI NO: 18411454 NR Description: RRM-containing protein
  misc_feature (145)..(473): Homolog of NCBI NO: 34395354 NR Description: water-stress protein-like protein
  misc_feature (327)..(809): Homolog of NCBI NO: 22655529 NR Description: water-stress protein [Zea mays]
  misc_feature (94)..(369): Homolog of NCBI NO: 7485542 NR Description: hypothetical protein F16B22.20 - Arabidopsis
  misc_feature (583)..(809): Homolog of NCBI NO: 7485543 NR Description: hypothetical protein At2g44720 [imported] -
  misc_feature (46)..(809): Homolog of NCBI NO: 38345947 NR Description: OSJNBb0103I08.18 [Oryza sativa (japonica

SEQ ID NO: 49898 - protein, 531 aa, Arabidopsis thaliana; identical to SEQ ID NO: 47705
  peptide (1)..(531): Ceres Seq. ID no. 12591729
  misc_feature (18)..(95): Pfam Name: RNA recognition motif. (a.k.a. RRM, RBD, or RNP domain) Pfam Description: RNA recognition motif. (a.k.a. RRM, RBD, or RNP
  misc_feature (18)..(95): Pfam Name: RNA recognition motif. (a.k.a. RRM, RBD, or RNP domain) Pfam Description: RNA recognition motif. (a.k.a. RRM, RBD, or RNP
  misc_feature (1)..(289): Homolog of NCBI NO: 29371361 NR Description: putative RNA-binding protein
  misc_feature (1)..(290): Homolog of NCBI NO: 18411454 NR Description: RRM-containing protein
  misc_feature (18)..(185): Homolog of NCBI NO: 7485542 NR Description: hypothetical protein F16B22.20 - Arabidopsis
  misc_feature (1)..(228): Homolog of NCBI NO: 34393486 NR Description: putative RRM RNA binding protein NSAP1
  misc_feature (1)..(195): Homolog of NCBI NO: 34901412 NR Description: OSJNBa0075N02.12 [Oryza sativa (japonica
  misc_feature (1)..(289): Homolog of NCBI NO: 29371361 NR Description: putative RNA-binding protein
  misc_feature (18)..(185): Homolog of NCBI NO: 7485542 NR Description: hypothetical protein F16B22.20 - Arabidopsis
  misc_feature (1)..(195): Homolog of NCBI NO: 34901412 NR Description: OSJNBa0075N02.12 [Oryza sativa (japonica
  misc_feature (1)..(531): Homolog of NCBI NO: 38345947 NR Description: OSJNBb0103I08.18 [Oryza sativa (japonica
  misc_feature (305)..(531): Homolog of NCBI NO: 7485543 NR Description: hypothetical protein At2g44720 [imported] -
  misc_feature (1)..(91): Homolog of NCBI NO: 7485542 NR Description: hypothetical protein F16B22.20 - Arabidopsis
  misc_feature (49)..(531): Homolog of NCBI NO: 22655529 NR Description: water-stress protein [Zea mays]
  misc_feature (1)..(195): Homolog of NCBI NO: 34395354 NR Description: water-stress protein-like protein
  misc_feature (1)..(228): Homolog of NCBI NO: 34393486 NR Description: putative RRM RNA binding protein NSAP1
  misc_feature (1)..(290): Homolog of NCBI NO: 18411454 NR Description: RRM-containing protein
  misc_feature (1)..(195): Homolog of NCBI NO: 34395354 NR Description: water-stress protein-like protein
  misc_feature (49)..(531): Homolog of NCBI NO: 22655529 NR Description: water-stress protein [Zea mays]
  misc_feature (1)..(91): Homolog of NCBI NO: 7485542 NR Description: hypothetical protein F16B22.20 - Arabidopsis
  misc_feature (305)..(531): Homolog of NCBI NO: 7485543 NR Description: hypothetical protein At2g44720 [imported] -
  misc_feature (1)..(531): Homolog of NCBI NO: 38345947 NR Description: OSJNBb0103I08.18 [Oryza sativa (japonica

SEQ ID NO: 49899 - protein, 488 aa, Arabidopsis thaliana; identical to SEQ ID NO: 47706
  peptide (1)..(488): Ceres Seq. ID no. 12591730
  misc_feature (1)..(52): Pfam Name: RNA recognition motif. (a.k.a. RRM, RBD, or RNP domain) Pfam Description: RNA recognition motif. (a.k.a. RRM, RBD, or RNP
  misc_feature (1)..(52): Pfam Name: RNA recognition motif. (a.k.a. RRM, RBD, or RNP domain) Pfam Description: RNA recognition motif. (a.k.a. RRM, RBD, or RNP
  misc_feature (1)..(246): Homolog of NCBI NO: 29371361 NR Description: putative RNA-binding protein
  misc_feature (1)..(247): Homolog of NCBI NO: 18411454 NR Description: RRM-containing protein
  misc_feature (1)..(142): Homolog of NCBI NO: 7485542 NR Description: hypothetical protein F16B22.20 - Arabidopsis
  misc_feature (1)..(185): Homolog of NCBI NO: 34393486 NR Description: putative RRM RNA binding protein NSAP1
  misc_feature (1)..(152): Homolog of NCBI NO: 34901412 NR Description: OSJNBa0075N02.12 [Oryza sativa (japonica
  misc_feature (1)..(246): Homolog of NCBI NO: 29371361 NR Description: putative RNA-binding protein
  misc_feature (1)..(142): Homolog of NCBI NO: 7485542 NR Description: hypothetical protein F16B22.20 - Arabidopsis
  misc_feature (1)..(152): Homolog of NCBI NO: 34901412 NR Description: OSJNBa0075N02.12 [Oryza sativa (japonica
  misc_feature (1)..(488): Homolog of NCBI NO: 38345947 NR Description: OSJNBb0103I08.18 [Oryza sativa (japonica
  misc_feature (262)..(488): Homolog of NCBI NO: 7485543 NR Description: hypothetical protein At2g44720 [imported] -
  misc_feature (1)..(48): Homolog of NCBI NO: 7485542 NR Description: hypothetical protein F16B22.20 - Arabidopsis
  misc_feature (6)..(488): Homolog of NCBI NO: 22655529 NR Description: water-stress protein [Zea mays]
  misc_feature (1)..(152): Homolog of NCBI NO: 34395354 NR Description: water-stress protein-like protein
  misc_feature (1)..(185): Homolog of NCBI NO: 34393486 NR Description: putative RRM RNA binding protein NSAP1
  misc_feature (1)..(247): Homolog of NCBI NO: 18411454 NR Description: RRM-containing protein
  misc_feature (1)..(152): Homolog of NCBI NO: 34395354 NR Description: water-stress protein-like protein
  misc_feature (6)..(488): Homolog of NCBI NO: 22655529 NR Description: water-stress protein [Zea mays]
  misc_feature (1)..(48): Homolog of NCBI NO: 7485542 NR Description: hypothetical protein F16B22.20 - Arabidopsis
  misc_feature (262)..(488): Homolog of NCBI NO: 7485543 NR Description: hypothetical protein At2g44720 [imported] -
  misc_feature (1)..(488): Homolog of NCBI NO: 38345947 NR Description: OSJNBb0103I08.18 [Oryza sativa (japonica

SEQ ID NO: 49900 - DNA, 1328 bp, Arabidopsis thaliana
  misc_feature (1)..(1328): Ceres Seq. ID no. 13592347
  misc_feature: MA Experiment ID: 20000286 Result: Down-regulated in Transcription
  misc_feature: MA Experiment 20000286 PARAMETER Experiment Name: At_Open_Flower_P Parameter: Age (day) Value: 21
  misc_feature: MA Experiment 20000286 PARAMETER Experiment Name: At_Open_Flower_P Parameter: Plant Line Value: WS
  misc_feature: MA Experiment 20000286 PARAMETER Experiment Name: At_Open_Flower_P Parameter: Tissue Value: Half Open vs. Whole Plant
  misc_feature: MA Experiment ID: 20000496 Result: Up-regulated in Transcription
  misc_feature: MA Experiment 20000496 PARAMETER Experiment Name: At_Guard_Cells_P Parameter: Harvest Date Value: 7/19/2002
  misc_feature: MA Experiment 20000496 PARAMETER Experiment Name: At_Guard_Cells_P Parameter: Organism Value: Canola
  misc_feature: MA Experiment 20000496 PARAMETER Experiment Name: At_Guard_Cells_P Parameter: Tissue Value: Guard Cells vs. Leaves
  misc_feature: MA Experiment ID: 20001247 Result: Down-regulated in Transcription
  misc_feature: MA Experiment 20001247 PARAMETER Experiment Name: At_Far-red-induction_P Parameter: Age (day) Value: 7
  misc_feature: MA Experiment 20001247 PARAMETER Experiment Name: At_Far-red-induction_P Parameter: Light Value: Far-red vs. White
  misc_feature: MA Experiment 20001247 PARAMETER Experiment Name: At_Far-red-induction_P Parameter: Organism Value: A. thaliana
  misc_feature: MA Experiment 20001247 PARAMETER Experiment Name: At_Far-red-induction_P Parameter: Plant Line Value: Columbia
  misc_feature: MA Experiment 20001247 PARAMETER Experiment Name: At_Far-red-induction_P Parameter: Timepoint (hr) Value: 1
  misc_feature: MA Experiment 20001247 PARAMETER Experiment Name: At_Far-red-induction_P Parameter: Tissue Value: Whole Plant
ggaagagcacataatgatgaccaaaaattctatcgaattcgatccttacatcgagcgtaaagctttcgacgaaacaaaacaaggtgtgaaaggcctcgtcgacgctaaaatcactgaagttcctcgtatcttccaccaccgtcaagatatcttaaccaacaagaaaccttctgcttcagtatcagacctagagatccctatcatcgactttgcaagcgtccacgcggacacagcctcacgtgaagccatcgtagagaaagtcaaatatgcggtggagaattggggattcttccaggttatcaatcatagtattcctttaaacgttcttgaagagattaaagatggggttcgtaggtttcacgaggaagatcctgaggtcaagaaatcattcttctcgcgtgatgccggcaacaaaaaatttgtatacaacagtaacttcgatctatacagttcttcgccgtctgttaattggagagattctttctcttgttacatagctccagatcctccagctcctgaggagatccctgagacttgcagggatgctatgtttgaatactcaaagcatgtgttgagtttcggtggtttactatttgagcttctctcagaagcacttggtttgaaatctcagacccttgagagcatggattgcgtgaagactttgcttatgatctgccattattacccaccttgtccacaacctgacctaacgttagggataacgaaacactcagataactccttcctcacgcttcttctccaagacaacattggtggtcttcaaattcttcatcaagactcttgggttgatgtctctcctatccatggagctcttgtcgtcaacattggagattttttgcagctgataacgaacgataagtttgtaagtgtggagcatagagtgcttgcaaatagacaaggaccaaggatttcagtagctagctttttcagctcaagtatgcgtccaaattccagagtttacggaccgatgaaagagcttgtgtctgaagaaaaccctccaaaatacagagacataaccataaaagagtattcaaaaatattttttgagaaaggtctcgatggaacgtcgcatctctcgaatatcaggatatgaaaaacgaaaacgacagaaatttcttaatgagtttctttgcatcaattatactgtttgtttatgtctcttcaataatcaaaccaatgcatgtaccaaatataagaaataattgtgtgtgtcgttgtgtgtaaactatgtatatctgtatattcgttgagctactgtgtatttaaatcttatcacttgtaaaatgttatcaagtgatattgaccgc

SEQ ID NO: 49901 - protein, 370 aa, Arabidopsis thaliana
  peptide (1)..(370): Ceres Seq. ID no. 13592348
  misc_feature (219)..(318): Pfam Name: 2OG-Fe(II) oxygenase superfamily Pfam Description: 2OG-Fe(II) oxygenase superfamily
  misc_feature (13)..(370): Homolog of NCBI NO: 13878119 NR Description: putative oxidoreductase [Arabidopsis thaliana]
  misc_feature (7)..(370): Homolog of NCBI NO: 15221544 NR Description: 2-oxoglutarate-dependent dioxygenase, putative
  misc_feature (20)..(370): Homolog of NCBI NO: 30679748 NR Description: 2-oxoglutarate-dependent dioxygenase, putative
  misc_feature (6)..(370): Homolog of NCBI NO: 14596165 NR Description: 1-aminocyclopropane-1-carboxylate oxidase
  misc_feature (6)..(370): Homolog of NCBI NO: 15239870 NR Description: 2-oxoglutarate-dependent dioxygenase, putative
  misc_feature (6)..(370): Homolog of NCBI NO: 15239868 NR Description: 2-oxoglutarate-dependent dioxygenase, putative
  misc_feature (38)..(370): Homolog of NCBI NO: 15219718 NR Description: 2-oxoglutarate-dependent dioxygenase, putative
  misc_feature (12)..(370): Homolog of NCBI NO: 15219715 NR Description: 2-oxoglutarate-dependent dioxygenase, putative
  misc_feature (6)..(370): Homolog of NCBI NO: 15238458 NR Description: 2-oxoglutarate-dependent dioxygenase, putative
  misc_feature (5)..(370): Homolog of NCBI NO: 15238459 NR Description: oxidoreductase, 2OG-Fe(II) oxygenase family
EEHIMMTKNSIEFDPYIERKAFDETKQGVKGLVDAKITEVPRIFHHRQDILTNKKPSASVSDLEIPIIDFASVHADTASREAIVEKVKYAVENWGFFQVINHSIPLNVLEEIKDGVRRFHEEDPEVKKSFFSRDAGNKKFVYNSNFDLYSSSPSVNWRDSFSCYIAPDPPAPEEIPETCRDAMFEYSKHVLSFGGLLFELLSEALGLKSQTLESMDCVKTLLMICHYYPPCPQPDLTLGITKHSDNSFLTLLLQDNIGGLQILHQDSWVDVSPIHGALVVNIGDFLQLITNDKFVSVEHRVLANRQGPRISVASFFSSSMRPNSRVYGPMKELVSEENPPKYRDITIKEYSKIFFEKGLDGTSHLSNIRI

SEQ ID NO: 49902 - protein, 366 aa, Arabidopsis thaliana
  peptide (1)..(366): Ceres Seq. ID no. 13592349
  misc_feature (215)..(314): Pfam Name: 2OG-Fe(II) oxygenase superfamily Pfam Description: 2OG-Fe(II) oxygenase superfamily
  misc_feature (9)..(366): Homolog of NCBI NO: 13878119 NR Description: putative oxidoreductase [Arabidopsis thaliana]
  misc_feature (3)..(366): Homolog of NCBI NO: 15221544 NR Description: 2-oxoglutarate-dependent dioxygenase, putative
  misc_feature (16)..(366): Homolog of NCBI NO: 30679748 NR Description: 2-oxoglutarate-dependent dioxygenase, putative
  misc_feature (2)..(366): Homolog of NCBI NO: 14596165 NR Description: 1-aminocyclopropane-1-carboxylate oxidase
  misc_feature (2)..(366): Homolog of NCBI NO: 15239870 NR Description: 2-oxoglutarate-dependent dioxygenase, putative
  misc_feature (2)..(366): Homolog of NCBI NO: 15239868 NR Description: 2-oxoglutarate-dependent dioxygenase, putative
  misc_feature (34)..(366): Homolog of NCBI NO: 15219718 NR Description: 2-oxoglutarate-dependent dioxygenase, putative
  misc_feature (8)..(366): Homolog of NCBI NO: 15219715 NR Description: 2-oxoglutarate-dependent dioxygenase, putative
  misc_feature (2)..(366): Homolog of NCBI NO: 15238458 NR Description: 2-oxoglutarate-dependent dioxygenase, putative
  misc_feature (1)..(366): Homolog of NCBI NO: 15238459 NR Description: oxidoreductase, 2OG-Fe(II) oxygenase family
MMTKNSIEFDPYIERKAFDETKQGVKGLVDAKITEVPRIFHHRQDILTNKKPSASVSDLEIPIIDFASVHADTASREAIVEKVKYAVENWGFFQVINHSIPLNVLEEIKDGVRRFHEEDPEVKKSFFSRDAGNKKFVYNSNFDLYSSSPSVNWRDSFSCYIAPDPPAPEEIPETCRDAMFEYSKHVLSFGGLLFELLSEALGLKSQTLESMDCVKTLLMICHYYPPCPQPDLTLGITKHSDNSFLTLLLQDNIGGLQILHQDSWVDVSPIHGALVVNIGDFLQLITNDKFVSVEHRVLANRQGPRISVASFFSSSMRPNSRVYGPMKELVSEENPPKYRDITIKEYSKIFFEKGLDGTSHLSNIRI

SEQ ID NO: 49903 - protein, 365 aa, Arabidopsis thaliana
  peptide (1)..(365): Ceres Seq. ID no. 13592350
  misc_feature (214)..(313): Pfam Name: 2OG-Fe(II) oxygenase superfamily Pfam Description: 2OG-Fe(II) oxygenase superfamily
  misc_feature (8)..(365): Homolog of NCBI NO: 13878119 NR Description: putative oxidoreductase [Arabidopsis thaliana]
  misc_feature (2)..(365): Homolog of NCBI NO: 15221544 NR Description: 2-oxoglutarate-dependent dioxygenase, putative
  misc_feature (15)..(365): Homolog of NCBI NO: 30679748 NR Description: 2-oxoglutarate-dependent dioxygenase, putative
  misc_feature (1)..(365): Homolog of NCBI NO: 14596165 NR Description: 1-aminocyclopropane-1-carboxylate oxidase
  misc_feature (1)..(365): Homolog of NCBI NO: 15239870 NR Description: 2-oxoglutarate-dependent dioxygenase, putative
  misc_feature (1)..(365): Homolog of NCBI NO: 15239868 NR Description: 2-oxoglutarate-dependent dioxygenase, putative
  misc_feature (33)..(365): Homolog of NCBI NO: 15219718 NR Description: 2-oxoglutarate-dependent dioxygenase, putative
  misc_feature (7)..(365): Homolog of NCBI NO: 15219715 NR Description: 2-oxoglutarate-dependent dioxygenase, putative
  misc_feature (1)..(365): Homolog of NCBI NO: 15238458 NR Description: 2-oxoglutarate-dependent dioxygenase, putative
  misc_feature (1)..(365): Homolog of NCBI NO: 15238459 NR Description: oxidoreductase, 2OG-Fe(II) oxygenase family
MTKNSIEFDPYIERKAFDETKQGVKGLVDAKITEVPRIFHHRQDILTNKKPSASVSDLEIPIIDFASVHADTASREAIVEKVKYAVENWGFFQVINHSIPLNVLEEIKDGVRRFHEEDPEVKKSFFSRDAGNKKFVYNSNFDLYSSSPSVNWRDSFSCYIAPDPPAPEEIPETCRDAMFEYSKHVLSFGGLLFELLSEALGLKSQTLESMDCVKTLLMICHYYPPCPQPDLTLGITKHSDNSFLTLLLQDNIGGLQILHQDSWVDVSPIHGALVVNIGDFLQLITNDKFVSVEHRVLANRQGPRISVASFFSSSMRPNSRVYGPMKELVSEENPPKYRDITIKEYSKIFFEKGLDGTSHLSNIRI

SEQ ID NO: 49904 - DNA, 1370 bp, Arabidopsis thaliana; identical to SEQ ID NO: 49014
  misc_feature (1)..(1370): Ceres Seq. ID no. 13592099
  misc_feature: MA Experiment ID: 20000327 Result: Down-regulated in Transcription
  misc_feature: MA Experiment 20000327 PARAMETER Experiment Name: At_42deg_Heat_Sub_P Parameter: Age (day) Value: 14
  misc_feature: MA Experiment 20000327 PARAMETER Experiment Name: At_42deg_Heat_Sub_P Parameter: Organism Value: A. thaliana
  misc_feature: MA Experiment 20000327 PARAMETER Experiment Name: At_42deg_Heat_Sub_P Parameter: Plant Line Value: WS
  misc_feature: MA Experiment 20000327 PARAMETER Experiment Name: At_42deg_Heat_Sub_P Parameter: Temperature (deg C) Value: 42 vs. 22
  misc_feature: MA Experiment 20000327 PARAMETER Experiment Name: At_42deg_Heat_Sub_P Parameter: Timepoint (hr) Value: 1
  misc_feature: MA Experiment 20000327 PARAMETER Experiment Name: At_42deg_Heat_Sub_P Parameter: Tissue Value: Aerial
  misc_feature: MA Experiment ID: 20000328 Result: Down-regulated in Transcription
  misc_feature: MA Experiment 20000328 PARAMETER Experiment Name: At_42deg_Heat_Sub_P Parameter: Age (day) Value: 14
  misc_feature: MA Experiment 20000328 PARAMETER Experiment Name: At_42deg_Heat_Sub_P Parameter: Organism Value: A. thaliana
  misc_feature: MA Experiment 20000328 PARAMETER Experiment Name: At_42deg_Heat_Sub_P Parameter: Plant Line Value: WS
  misc_feature: MA Experiment 20000328 PARAMETER Experiment Name: At_42deg_Heat_Sub_P Parameter: Temperature (deg C) Value: 42 vs. 22
  misc_feature: MA Experiment 20000328 PARAMETER Experiment Name: At_42deg_Heat_Sub_P Parameter: Timepoint (hr) Value: 6
  misc_feature: MA Experiment 20000328 PARAMETER Experiment Name: At_42deg_Heat_Sub_P Parameter: Tissue Value: Aerial

SEQ ID NO: 49905 - protein, 312 aa, Arabidopsis thaliana; identical to SEQ ID NO: 49015
  peptide (1)..(312): Ceres Seq. ID no. 13592100
  misc_feature (47)..(108): Pfam Name: ZF-HD protein dimerisation region Pfam Description: ZF-HD protein dimerisation region
  misc_feature (47)..(108): Pfam Name: ZF-HD protein dimerisation region Pfam Description: ZF-HD protein dimerisation region
  misc_feature (16)..(250): Homolog of NCBI NO: 15226993 NR Description: expressed protein [Arabidopsis thaliana]
  misc_feature (13)..(266): Homolog of NCBI NO: 15223757 NR Description: expressed protein [Arabidopsis thaliana]
  misc_feature (6)..(262): Homolog of NCBI NO: 5091602 NR Description: 10A19I.6 [Oryza sativa]
  misc_feature (50)..(250): Homolog of NCBI NO: 15222382 NR Description: hypothetical protein [Arabidopsis thaliana]
  misc_feature (13)..(178): Homolog of NCBI NO: 15242243 NR Description: expressed protein [Arabidopsis thaliana]
  misc_feature (16)..(250): Homolog of NCBI NO: 15226993 NR Description: expressed protein [Arabidopsis thaliana]
  misc_feature (6)..(262): Homolog of NCBI NO: 5091602 NR Description: 10A19I.6 [Oryza sativa]
  misc_feature (13)..(178): Homolog of NCBI NO: 15242243 NR Description: expressed protein [Arabidopsis thaliana]
  misc_feature (1)..(312): Homolog of NCBI NO: 15228530 NR Description: expressed protein [Arabidopsis thaliana]
  misc_feature (10)..(311): Homolog of NCBI NO: 18421904 NR Description: expressed protein [Arabidopsis thaliana]
  misc_feature (10)..(311): Homolog of NCBI NO: 21592512 NR Description: unknown [Arabidopsis thaliana]
  misc_feature (10)..(312): Homolog of NCBI NO: 13277220 NR Description: ZF-HD homeobox protein [Flaveria bidentis]
  misc_feature (74)..(312): Homolog of NCBI NO: 13277222 NR Description: ZF-HD homeobox protein [Flaveria bidentis]
  misc_feature (50)..(250): Homolog of NCBI NO: 15222382 NR Description: hypothetical protein [Arabidopsis thaliana]
  misc_feature (13)..(266): Homolog of NCBI NO: 15223757 NR Description: expressed protein [Arabidopsis thaliana]
  misc_feature (74)..(312): Homolog of NCBI NO: 13277222 NR Description: ZF-HD homeobox protein [Flaveria bidentis]
  misc_feature (10)..(312): Homolog of NCBI NO: 13277220 NR Description: ZF-HD homeobox protein [Flaveria bidentis]
  misc_feature (10)..(311): Homolog of NCBI NO: 21592512 NR Description: unknown [Arabidopsis thaliana]
  misc_feature (10)..(311): Homolog of NCBI NO: 18421904 NR Description: expressed protein [Arabidopsis thaliana]
  misc_feature (1)..(312): Homolog of NCBI NO: 15228530 NR Description: expressed protein [Arabidopsis thaliana]

SEQ ID NO: 49906 - protein, 306 aa, Arabidopsis thaliana; identical to SEQ ID NO: 49016
  peptide (1)..(306): Ceres Seq. ID no. 13592101
  misc_feature (41)..(102): Pfam Name: ZF-HD protein dimerisation region Pfam Description: ZF-HD protein dimerisation region
  misc_feature (41)..(102): Pfam Name: ZF-HD protein dimerisation region Pfam Description: ZF-HD protein dimerisation region
  misc_feature (10)..(244): Homolog of NCBI NO: 15226993 NR Description: expressed protein [Arabidopsis thaliana]
  misc_feature (7)..(260): Homolog of NCBI NO: 15223757 NR Description: expressed protein [Arabidopsis thaliana]
  misc_feature (1)..(256): Homolog of NCBI NO: 5091602 NR Description: 10A19I.6 [Oryza sativa]
  misc_feature (44)..(244): Homolog of NCBI NO: 15222382 NR Description: hypothetical protein [Arabidopsis thaliana]
  misc_feature (7)..(172): Homolog of NCBI NO: 15242243 NR Description: expressed protein [Arabidopsis thaliana]
  misc_feature (10)..(244): Homolog of NCBI NO: 15226993 NR Description: expressed protein [Arabidopsis thaliana]
  misc_feature (1)..(256): Homolog of NCBI NO: 5091602 NR Description: 10A19I.6 [Oryza sativa]
  misc_feature (7)..(172): Homolog of NCBI NO: 15242243 NR Description: expressed protein [Arabidopsis thaliana]
  misc_feature (1)..(306): Homolog of NCBI NO: 15228530 NR Description: expressed protein [Arabidopsis thaliana]
  misc_feature (4)..(305): Homolog of NCBI NO: 18421904 NR Description: expressed protein [Arabidopsis thaliana]
  misc_feature (4)..(305): Homolog of NCBI NO: 21592512 NR Description: unknown [Arabidopsis thaliana]
  misc_feature (4)..(306): Homolog of NCBI NO: 13277220 NR Description: ZF-HD homeobox protein [Flaveria bidentis]
  misc_feature (68)..(306): Homolog of NCBI NO: 13277222 NR Description: ZF-HD homeobox protein [Flaveria bidentis]
  misc_feature (44)..(244): Homolog of NCBI NO: 15222382 NR Description: hypothetical protein [Arabidopsis thaliana]
  misc_feature (7)..(260): Homolog of NCBI NO: 15223757 NR Description: expressed protein [Arabidopsis thaliana]
  misc_feature (68)..(306): Homolog of NCBI NO: 13277222 NR Description: ZF-HD homeobox protein [Flaveria bidentis]
  misc_feature (4)..(306): Homolog of NCBI NO: 13277220 NR Description: ZF-HD homeobox protein [Flaveria bidentis]
  misc_feature (4)..(305): Homolog of NCBI NO: 21592512 NR Description: unknown [Arabidopsis thaliana]
  misc_feature (4)..(305): Homolog of NCBI NO: 18421904 NR Description: expressed protein [Arabidopsis thaliana]
  misc_feature (1)..(306): Homolog of NCBI NO: 15228530 NR Description: expressed protein [Arabidopsis thaliana]

SEQ ID NO: 49907 - protein, 304 aa, Arabidopsis thaliana; identical to SEQ ID NO: 49017
  peptide (1)..(304): Ceres Seq. ID no. 13592102
  misc_feature (39)..(100): Pfam Name: ZF-HD protein dimerisation region Pfam Description: ZF-HD protein dimerisation region
  misc_feature (39)..(100): Pfam Name: ZF-HD protein dimerisation region Pfam Description: ZF-HD protein dimerisation region
  misc_feature (8)..(242): Homolog of NCBI NO: 15226993 NR Description: expressed protein [Arabidopsis thaliana]
  misc_feature (5)..(258): Homolog of NCBI NO: 15223757 NR Description: expressed protein [Arabidopsis thaliana]
  misc_feature (1)..(254): Homolog of NCBI NO: 5091602 NR Description: 10A19I.6 [Oryza sativa]
  misc_feature (42)..(242): Homolog of NCBI NO: 15222382 NR Description: hypothetical protein [Arabidopsis thaliana]
  misc_feature (5)..(170): Homolog of NCBI NO: 15242243 NR Description: expressed protein [Arabidopsis thaliana]
  misc_feature (8)..(242): Homolog of NCBI NO: 15226993 NR Description: expressed protein [Arabidopsis thaliana]
  misc_feature (1)..(254): Homolog of NCBI NO: 5091602 NR Description: 10A19I.6 [Oryza sativa]
  misc_feature (5)..(170): Homolog of NCBI NO: 15242243 NR Description: expressed protein [Arabidopsis thaliana]
  misc_feature (1)..(304): Homolog of NCBI NO: 15228530 NR Description: expressed protein [Arabidopsis thaliana]
  misc_feature (2)..(303): Homolog of NCBI NO: 18421904 NR Description: expressed protein [Arabidopsis thaliana]
  misc_feature (2)..(303): Homolog of NCBI NO: 21592512 NR Description: unknown [Arabidopsis thaliana]
  misc_feature (2)..(304): Homolog of NCBI NO: 13277220 NR Description: ZF-HD homeobox protein [Flaveria bidentis]
  misc_feature (66)..(304): Homolog of NCBI NO: 13277222 NR Description: ZF-HD homeobox protein [Flaveria bidentis]
  misc_feature (42)..(242): Homolog of NCBI NO: 15222382 NR Description: hypothetical protein [Arabidopsis thaliana]
  misc_feature (5)..(258): Homolog of NCBI NO: 15223757 NR Description: expressed protein [Arabidopsis thaliana]
  misc_feature (66)..(304): Homolog of NCBI NO: 13277222 NR Description: ZF-HD homeobox protein [Flaveria bidentis]
  misc_feature (2)..(304): Homolog of NCBI NO: 13277220 NR Description: ZF-HD homeobox protein [Flaveria bidentis]
  misc_feature (2)..(303): Homolog of NCBI NO: 21592512 NR Description: unknown [Arabidopsis thaliana]
  misc_feature (2)..(303): Homolog of NCBI NO: 18421904 NR Description: expressed protein [Arabidopsis thaliana]
  misc_feature (1)..(304): Homolog of NCBI NO: 15228530 NR Description: expressed protein [Arabidopsis thaliana]

SEQ ID NO: 49908 - DNA, 1109 bp, Arabidopsis thaliana
  misc_feature (1)..(1109): Ceres Seq. ID no. 13588070
  misc_feature: MA Experiment ID: 20000185 Result: Up-regulated in Transcription
  misc_feature: MA Experiment 20000185 PARAMETER Experiment Name: At_Roots__P Parameter: Age (day) Value: 7 vs. 21
  misc_feature: MA Experiment 20000185 PARAMETER Experiment Name: At_Roots__P Parameter: Organism Value: A. thaliana
  misc_feature: MA Experiment 20000185 PARAMETER Experiment Name: At_Roots__P Parameter: Tissue Value: Roots vs. Whole Plant
  misc_feature: MA Experiment ID: 20000227 Result: Down-regulated in Transcription
  misc_feature: MA Experiment 20000227 PARAMETER Experiment Name: At_Root-Tips-vs-Tops_P Parameter: Tissue Value: Root Tips vs. Root Tops
  misc_feature: MA Experiment ID: 20000235 Result: Up-regulated in Transcription
  misc_feature: MA Experiment 20000235 PARAMETER Experiment Name: At_Siliques_P Parameter: Age (day) Value: 21
  misc_feature: MA Experiment 20000235 PARAMETER Experiment Name: At_Siliques_P Parameter: Organism Value: A. thaliana
  misc_feature: MA Experiment 20000235 PARAMETER Experiment Name: At_Siliques_P Parameter: Plant Line Value: WS
  misc_feature: MA Experiment 20000235 PARAMETER Experiment Name: At_Siliques_P Parameter: Tissue Value: 5-10mm Siliques vs. Whole Plant
  misc_feature: MA Experiment ID: 20000264 Result: Up-regulated in Transcription
  misc_feature: MA Experiment 20000264 PARAMETER Experiment Name: At_Open_Flower_P Parameter: Age (day) Value: 21
  misc_feature: MA Experiment 20000264 PARAMETER Experiment Name: At_Open_Flower_P Parameter: Plant Line Value: WS
  misc_feature: MA Experiment 20000264 PARAMETER Experiment Name: At_Open_Flower_P Parameter: Tissue Value: Open Flower vs. Whole Plant
  misc_feature: MA Experiment ID: 20000265 Result: Up-regulated in Transcription
  misc_feature: MA Experiment 20000265 PARAMETER Experiment Name: At_Open_Flower_P Parameter: Age (day) Value: 21
  misc_feature: MA Experiment 20000265 PARAMETER Experiment Name: At_Open_Flower_P Parameter: Plant Line Value: WS
  misc_feature: MA Experiment 20000265 PARAMETER Experiment Name: At_Open_Flower_P Parameter: Tissue Value: Closed Flower vs. Whole Plant
  misc_feature: MA Experiment ID: 20000286 Result: Up-regulated in Transcription
  misc_feature: MA Experiment 20000286 PARAMETER Experiment Name: At_Open_Flower_P Parameter: Age (day) Value: 21
  misc_feature: MA Experiment 20000286 PARAMETER Experiment Name: At_Open_Flower_P Parameter: Plant Line Value: WS
  misc_feature: MA Experiment 20000286 PARAMETER Experiment Name: At_Open_Flower_P Parameter: Tissue Value: Half Open vs. Whole Plant
  misc_feature: MA Experiment ID: 20000437 Result: Up-regulated in Transcription
  misc_feature: MA Experiment 20000437 PARAMETER Experiment Name: At_Drought_P Parameter: Age (day) Value: 8
  misc_feature: MA Experiment 20000437 PARAMETER Experiment Name: At_Drought_P Parameter: Organism Value: A. thaliana
  misc_feature: MA Experiment 20000437 PARAMETER Experiment Name: At_Drought_P Parameter: Plant Line Value: WS
  misc_feature: MA Experiment 20000437 PARAMETER Experiment Name: At_Drought_P Parameter: Timepoint (hr) Value: 24
  misc_feature: MA Experiment 20000437 PARAMETER Experiment Name: At_Drought_P Parameter: Tissue Value: Whole Plant
  misc_feature: MA Experiment 20000437 PARAMETER Experiment Name: At_Drought_P Parameter: Treatment Value: Drought vs. No Drought
  misc_feature: MA Experiment ID: 20000439 Result: Up-regulated in Transcription
  misc_feature: MA Experiment 20000439 PARAMETER Experiment Name: At_Roots__P Parameter: Age (day) Value: 14 vs. 21
  misc_feature: MA Experiment 20000439 PARAMETER Experiment Name: At_Roots__P Parameter: Organism Value: A. thaliana
  misc_feature: MA Experiment 20000439 PARAMETER Experiment Name: At_Roots__P Parameter: Tissue Value: Roots vs. Whole Plant
  misc_feature: MA Experiment ID: 20000495 Result: Up-regulated in Transcription
  misc_feature: MA Experiment 20000495 PARAMETER Experiment Name: At_Guard_Cells_P Parameter: Harvest Date Value: 8/2/2002
  misc_feature: MA Experiment 20000495 PARAMETER Experiment Name: At_Guard_Cells_P Parameter: Organism Value: A. thaliana
  misc_feature: MA Experiment 20000495 PARAMETER Experiment Name: At_Guard_Cells_P Parameter: Tissue Value: Guard Cells vs. Leaves
  misc_feature: MA Experiment ID: 20000496 Result: Up-regulated in Transcription
  misc_feature: MA Experiment 20000496 PARAMETER Experiment Name: At_Guard_Cells_P Parameter: Harvest Date Value: 7/19/2002
  misc_feature: MA Experiment 20000496 PARAMETER Experiment Name: At_Guard_Cells_P Parameter: Organism Value: Canola
  misc_feature: MA Experiment 20000496 PARAMETER Experiment Name: At_Guard_Cells_P Parameter: Tissue Value: Guard Cells vs. Leaves
  misc_feature: MA Experiment ID: 20000794 Result: Up-regulated in Transcription
  misc_feature: MA Experiment 20000794 PARAMETER Experiment Name: At_Petals_P Parameter: Age (day) Value: 23-25 days
  misc_feature: MA Experiment 20000794 PARAMETER Experiment Name: At_Petals_P Parameter: Plant Line Value: WS
  misc_feature: MA Experiment 20000794 PARAMETER Experiment Name: At_Petals_P Parameter: Tissue Value: Petals vs. Whole plant
  misc_feature: MA Experiment ID: 20001911 Result: Up-regulated in Transcription
  misc_feature: MA Experiment 20001911 PARAMETER Experiment Name: At_Drought_Reproduction_P Parameter: Age (day) Value: 40
  misc_feature: MA Experiment 20001911 PARAMETER Experiment Name: At_Drought_Reproduction_P Parameter: Organism Value: A. thaliana
  misc_feature: MA Experiment 20001911 PARAMETER Experiment Name: At_Drought_Reproduction_P Parameter: Plant Line Value: WS
  misc_feature: MA Experiment 20001911 PARAMETER Experiment Name: At_Drought_Reproduction_P Parameter: Timepoint (day) Value: 10
  misc_feature: MA Experiment 20001911 PARAMETER Experiment Name: At_Drought_Reproduction_P Parameter: Tissue Value: Flowers
  misc_feature: MA Experiment 20001911 PARAMETER Experiment Name: At_Drought_Reproduction_P Parameter: Treatment Value: Drought vs. No Drought
actttcattttattcgtcgtcagtttcatcttgttgcttcggagcgagcgagaattatcgtcggagaatttatcgtctctctctctgaaaattctgatcggtgaagaatcgtcggatcgaaagtttcataagctttccatcaactagcagtatctgccaatatcacagacagataattcgtaatgggagacgtatatttcaaccatttcgctcagcaactgcagatgtctgaccaagagaagggtgaaatgtcaagacattcacaccctcattcaatcaatgaagaatctgagtcgtcaactctggaaagggtagcagcagagtcattaacaaacaaagtccttgatagaggactaatggagtatggatgtccacattacagaagaaggtgttgcattagagctccttgctgtaatgagatctttggttgccatcactgtcattatgaggcgaagaacaacataaatgtagatcagaagcagaggcatgatattcctcgccaccaagttgaacaggttatttgtttactttgtggtactgaacaagaggtgggccaaatttgtatccactgtggagtgtgcatggggaagtacttctgtaaagtctgcaagctctacgatgatgatacgtctaaaaaacagtaccactgcgatgggtgtggaatttgcagaatcggaggacgtgaaaatttctttcactgttacaagtgtggctgttgttattcaatcctcctcaagaacggtcacccttgtgtcgaaggagcaatgcatcacgactgccccatttgctttgagtttctgtttgaatcacggaacgatgtgacggttttaccatgtggacacacaattcatcagaagtgcttggaggaaatgagagatcattaccaatatgcgtgcccactttgctcaaaatctgtatgcgacatgtcaaaagtgtgggagaagtttgacatggagattgcggctacaccaatgccagaaccataccagaacagaatggttcagattctctgcaacgactgtgggaagaaagcagaggtacagtaccatgtggtggctcagaaatgcccaaactgcaaatcatacaacactcgccaaaccagaggctga

SEQ ID NO: 49909 - protein, 308 aa, Arabidopsis thaliana
  peptide (1)..(308): Ceres Seq. ID no. 13588071
  misc_feature (63)..(146): Pfam Name: CHY zinc finger Pfam Description: CHY zinc finger
  misc_feature (37)..(305): Homolog of NCBI NO: 11358168 NR Description: hypothetical protein T20O10.70 - Arabidopsis
  misc_feature (45)..(305): Homolog of NCBI NO: 30102616 NR Description: At3g62970 [Arabidopsis thaliana]
  misc_feature (37)..(305): Homolog of NCBI NO: 30695702 NR Description: expressed protein [Arabidopsis thaliana]
  misc_feature (1)..(202): Homolog of NCBI NO: 15239467 NR Description: hypothetical protein [Arabidopsis thaliana]
  misc_feature (47)..(304): Homolog of NCBI NO: 15238890 NR Description: expressed protein [Arabidopsis thaliana]
  misc_feature (54)..(308): Homolog of NCBI NO: 21593716 NR Description: PGPD14 protein [Arabidopsis thaliana]
  misc_feature (53)..(308): Homolog of NCBI NO: 15237169 NR Description: PGPD14 protein [Arabidopsis thaliana]
  misc_feature (60)..(308): Homolog of NCBI NO: 37535002 NR Description: putative PGPD14 protein (pollen germination
  misc_feature (46)..(308): Homolog of NCBI NO: 4105798 NR Description: PGPD14 [Petunia x hybrida]
  misc_feature (12)..(305): Homolog of NCBI NO: 34910658 NR Description: putative PGPD14 protein (pollen germination
MGDVYFNHFAQQLQMSDQEKGEMSRHSHPHSINEESESSTLERVAAESLTNKVLDRGLMEYGCPHYRRRCCIRAPCCNEIFGCHHCHYEAKNNINVDQKQRHDIPRHQVEQVICLLCGTEQEVGQICIHCGVCMGKYFCKVCKLYDDDTSKKQYHCDGCGICRIGGRENFFHCYKCGCCYSILLKNGHPCVEGAMHHDCPICFEFLFESRNDVTVLPCGHTIHQKCLEEMRDHYQYACPLCSKSVCDMSKVWEKFDMEIAATPMPEPYQNRMVQILCNDCGKKAEVQYHVVAQKCPNCKSYNTRQTRG

SEQ ID NO: 49910 - protein, 294 aa, Arabidopsis thaliana
  peptide (1)..(294): Ceres Seq. ID no. 13588072
  misc_feature (49)..(132): Pfam Name: CHY zinc finger Pfam Description: CHY zinc finger
  misc_feature (23)..(291): Homolog of NCBI NO: 11358168 NR Description: hypothetical protein T20O10.70 - Arabidopsis
  misc_feature (31)..(291): Homolog of NCBI NO: 30102616 NR Description: At3g62970 [Arabidopsis thaliana]
  misc_feature (23)..(291): Homolog of NCBI NO: 30695702 NR Description: expressed protein [Arabidopsis thaliana]
  misc_feature (1)..(188): Homolog of NCBI NO: 15239467 NR Description: hypothetical protein [Arabidopsis thaliana]
  misc_feature (33)..(290): Homolog of NCBI NO: 15238890 NR Description: expressed protein [Arabidopsis thaliana]
  misc_feature (40)..(294): Homolog of NCBI NO: 21593716 NR Description: PGPD14 protein [Arabidopsis thaliana]
  misc_feature (39)..(294): Homolog of NCBI NO: 15237169 NR Description: PGPD14 protein [Arabidopsis thaliana]
  misc_feature (46)..(294): Homolog of NCBI NO: 37535002 NR Description: putative PGPD14 protein (pollen germination
  misc_feature (32)..(294): Homolog of NCBI NO: 4105798 NR Description: PGPD14 [Petunia x hybrida]
  misc_feature (1)..(291): Homolog of NCBI NO: 34910658 NR Description: putative PGPD14 protein (pollen germination
MSDQEKGEMSRHSHPHSINEESESSTLERVAAESLTNKVLDRGLMEYGCPHYRRRCCIRAPCCNEIFGCHHCHYEAKNNINVDQKQRHDIPRHQVEQVICLLCGTEQEVGQICIHCGVCMGKYFCKVCKLYDDDTSKKQYHCDGCGICRIGGRENFFHCYKCGCCYSILLKNGHPCVEGAMHHDCPICFEFLFESRNDVTVLPCGHTIHQKCLEEMRDHYQYACPLCSKSVCDMSKVWEKFDMEIAATPMPEPYQNRMVQILCNDCGKKAEVQYHVVAQKCPNCKSYNTRQTRG

SEQ ID NO: 49911 - protein, 286 aa, Arabidopsis thaliana
  peptide (1)..(286): Ceres Seq. ID no. 13588073
  misc_feature (41)..(124): Pfam Name: CHY zinc finger Pfam Description: CHY zinc finger
  misc_feature (15)..(283): Homolog of NCBI NO: 11358168 NR Description: hypothetical protein T20O10.70 - Arabidopsis
  misc_feature (23)..(283): Homolog of NCBI NO: 30102616 NR Description: At3g62970 [Arabidopsis thaliana]
  misc_feature (15)..(283): Homolog of NCBI NO: 30695702 NR Description: expressed protein [Arabidopsis thaliana]
  misc_feature (1)..(180): Homolog of NCBI NO: 15239467 NR Description: hypothetical protein [Arabidopsis thaliana]
  misc_feature (25)..(282): Homolog of NCBI NO: 15238890 NR Description: expressed protein [Arabidopsis thaliana]
  misc_feature (32)..(286): Homolog of NCBI NO: 21593716 NR Description: PGPD14 protein [Arabidopsis thaliana]
  misc_feature (31)..(286): Homolog of NCBI NO: 15237169 NR Description: PGPD14 protein [Arabidopsis thaliana]
  misc_feature (38)..(286): Homolog of NCBI NO: 37535002 NR Description: putative PGPD14 protein (pollen germination
  misc_feature (24)..(286): Homolog of NCBI NO: 4105798 NR Description: PGPD14 [Petunia x hybrida]
  misc_feature (1)..(283): Homolog of NCBI NO: 34910658 NR Description: putative PGPD14 protein (pollen germination
MSRHSHPHSINEESESSTLERVAAESLTNKVLDRGLMEYGCPHYRRRCCIRAPCCNEIFGCHHCHYEAKNNINVDQKQRHDIPRHQVEQVICLLCGTEQEVGQICIHCGVCMGKYFCKVCKLYDDDTSKKQYHCDGCGICRIGGRENFFHCYKCGCCYSILLKNGHPCVEGAMHHDCPICFEFLFESRNDVTVLPCGHTIHQKCLEEMRDHYQYACPLCSKSVCDMSKVWEKFDMEIAATPMPEPYQNRMVQILCNDCGKKAEVQYHVVAQKCPNCKSYNTRQTRG

SEQ ID NO: 49912 - DNA, 1388 bp, Arabidopsis thaliana
  misc_feature (1)..(1388): Ceres Seq. ID no. 15178744
  misc_feature: MA Experiment ID: 20000171 Result: Down-regulated in Transcription
  misc_feature: MA Experiment 20000171 PARAMETER Experiment Name: At_42deg_Heat_P Parameter: Age (day) Value: 14
  misc_feature: MA Experiment 20000171 PARAMETER Experiment Name: At_42deg_Heat_P Parameter: Organism Value: A. thaliana
  misc_feature: MA Experiment 20000171 PARAMETER Experiment Name: At_42deg_Heat_P Parameter: Plant Line Value: WS
  misc_feature: MA Experiment 20000171 PARAMETER Experiment Name: At_42deg_Heat_P Parameter: Temperature (deg C) Value: 42 vs. 22
  misc_feature: MA Experiment 20000171 PARAMETER Experiment Name: At_42deg_Heat_P Parameter: Timepoint (hr) Value: 1
  misc_feature: MA Experiment 20000171 PARAMETER Experiment Name: At_42deg_Heat_P Parameter: Tissue Value: Aerial
  misc_feature: MA Experiment ID: 20000173 Result: Down-regulated in Transcription
  misc_feature: MA Experiment 20000173 PARAMETER Experiment Name: At_42deg_Heat_P Parameter: Age (day) Value: 14
  misc_feature: MA Experiment 20000173 PARAMETER Experiment Name: At_42deg_Heat_P Parameter: Organism Value: A. thaliana
  misc_feature: MA Experiment 20000173 PARAMETER Experiment Name: At_42deg_Heat_P Parameter: Plant Line Value: WS
  misc_feature: MA Experiment 20000173 PARAMETER Experiment Name: At_42deg_Heat_P Parameter: Temperature (deg C) Value: 42 vs. 22
  misc_feature: MA Experiment 20000173 PARAMETER Experiment Name: At_42deg_Heat_P Parameter: Timepoint (hr) Value: 6
  misc_feature: MA Experiment 20000173 PARAMETER Experiment Name: At_42deg_Heat_P Parameter: Tissue Value: Aerial
  misc_feature: MA Experiment ID: 20000180 Result: Up-regulated in Transcription
  misc_feature: MA Experiment 20000180 PARAMETER Experiment Name: At_Germinating_Seeds_P Parameter: Age (hr) Value: 24 vs. 0
  misc_feature: MA Experiment 20000180 PARAMETER Experiment Name: At_Germinating_Seeds_P Parameter: Tissue Value: Germinating Seeds
  misc_feature: MA Experiment ID: 20000184 Result: Down-regulated in Transcription
  misc_feature: MA Experiment 20000184 PARAMETER Experiment Name: At_Shoots__P Parameter: Age (day) Value: 7
  misc_feature: MA Experiment 20000184 PARAMETER Experiment Name: At_Shoots__P Parameter: Tissue Value: Shoots vs. Whole Plant
  misc_feature: MA Experiment ID: 20000185 Result: Up-regulated in Transcription
  misc_feature: MA Experiment 20000185 PARAMETER Experiment Name: At_Roots__P Parameter: Age (day) Value: 7 vs. 21
  misc_feature: MA Experiment 20000185 PARAMETER Experiment Name: At_Roots__P Parameter: Organism Value: A. thaliana
  misc_feature: MA Experiment 20000185 PARAMETER Experiment Name: At_Roots__P Parameter: Tissue Value: Roots vs. Whole Plant
  misc_feature: MA Experiment ID: 20000234 Result: Up-regulated in Transcription
  misc_feature: MA Experiment 20000234 PARAMETER Experiment Name: At_Siliques_P Parameter: Age (day) Value: 21
  misc_feature: MA Experiment 20000234 PARAMETER Experiment Name: At_Siliques_P Parameter: Organism Value: A. thaliana
  misc_feature: MA Experiment 20000234 PARAMETER Experiment Name: At_Siliques_P Parameter: Plant Line Value: WS
  misc_feature: MA Experiment 20000234 PARAMETER Experiment Name: At_Siliques_P Parameter: Tissue Value: Less Than 5mm Siliques vs. Whole Plant
  misc_feature: MA Experiment ID: 20000235 Result: Up-regulated in Transcription
  misc_feature: MA Experiment 20000235 PARAMETER Experiment Name: At_Siliques_P Parameter: Age (day) Value: 21
  misc_feature: MA Experiment 20000235 PARAMETER Experiment Name: At_Siliques_P Parameter: Organism Value: A. thaliana
  misc_feature: MA Experiment 20000235 PARAMETER Experiment Name: At_Siliques_P Parameter: Plant Line Value: WS
  misc_feature: MA Experiment 20000235 PARAMETER Experiment Name: At_Siliques_P Parameter: Tissue Value: 5-10mm Siliques vs. Whole Plant
  misc_feature: MA Experiment ID: 20000264 Result: Up-regulated in Transcription
  misc_feature: MA Experiment 20000264 PARAMETER Experiment Name: At_Open_Flower_P Parameter: Age (day) Value: 21
  misc_feature: MA Experiment 20000264 PARAMETER Experiment Name: At_Open_Flower_P Parameter: Plant Line Value: WS
  misc_feature: MA Experiment 20000264 PARAMETER Experiment Name: At_Open_Flower_P Parameter: Tissue Value: Open Flower vs. Whole Plant
  misc_feature: MA Experiment ID: 20000265 Result: Up-regulated in Transcription
  misc_feature: MA Experiment 20000265 PARAMETER Experiment Name: At_Open_Flower_P Parameter: Age (day) Value: 21
  misc_feature: MA Experiment 20000265 PARAMETER Experiment Name: At_Open_Flower_P Parameter: Plant Line Value: WS
  misc_feature: MA Experiment 20000265 PARAMETER Experiment Name: At_Open_Flower_P Parameter: Tissue Value: Closed Flower vs. Whole Plant
  misc_feature: MA Experiment ID: 20000286 Result: Up-regulated in Transcription
  misc_feature: MA Experiment 20000286 PARAMETER Experiment Name: At_Open_Flower_P Parameter: Age (day) Value: 21
  misc_feature: MA Experiment 20000286 PARAMETER Experiment Name: At_Open_Flower_P Parameter: Plant Line Value: WS
  misc_feature: MA Experiment 20000286 PARAMETER Experiment Name: At_Open_Flower_P Parameter: Tissue Value: Half Open vs. Whole Plant
  misc_feature: MA Experiment ID: 20000439 Result: Up-regulated in Transcription
  misc_feature: MA Experiment 20000439 PARAMETER Experiment Name: At_Roots__P Parameter: Age (day) Value: 14 vs. 21
  misc_feature: MA Experiment 20000439 PARAMETER Experiment Name: At_Roots__P Parameter: Organism Value: A. thaliana
  misc_feature: MA Experiment 20000439 PARAMETER Experiment Name: At_Roots__P Parameter: Tissue Value: Roots vs. Whole Plant
  misc_feature: MA Experiment ID: 20000794 Result: Up-regulated in Transcription
  misc_feature: MA Experiment 20000794 PARAMETER Experiment Name: At_Petals_P Parameter: Age (day) Value: 23-25 days
  misc_feature: MA Experiment 20000794 PARAMETER Experiment Name: At_Petals_P Parameter: Plant Line Value: WS
  misc_feature: MA Experiment 20000794 PARAMETER Experiment Name: At_Petals_P Parameter: Tissue Value: Petals vs. Whole plant
  misc_feature: MA Experiment ID: 20001757 Result: Down-regulated in Transcription
  misc_feature: MA Experiment 20001757 PARAMETER Experiment Name: At_50mM_NH4NO3_L-to-H_P Parameter: Timepoint (hr) Value: 6
  misc_feature: MA Experiment 20001757 PARAMETER Experiment Name: At_50mM_NH4NO3_L-to-H_P Parameter: Tissue Value: Leaf
  misc_feature: MA Experiment 20001757 PARAMETER Experiment Name: At_50mM_NH4NO3_L-to-H_P Parameter: Treatment Value: 50mM NH4NO3 vs 100mM Mannitol
gtcccccccccccccccccgagtttgttttttctactaatttgctgaagaaagagttaatctttggttggtttaagattcttcaaagaagcaatcataacgcaattgattatatccccaaaagaaaaggtttttaaactccaaaaatgcagactccaaaatcaaggccaggatcattggagctgccacaaaagaagtctcctttaccagctcccaaagttgttaggagactcaaaccaagcggagcagaatccgatccaaaaaccaagacaatatcgaaaactcaaatcccgaaagtagtagctgatcgtcgctctgcaagaatccctctcaatgagattcagaagaagcggacgggaaggataccggaactggaatctacgatatctcagcttcaagaagagcttaagaaggcaaaagaagagctaaacagatcagaagcattgaaaagagaagctcaagaagaagctgaagatgccaagcatcagttaatggatatcaatgcctcggaagattcaagaattgaggagctgcgtaaactctcgcaggagcgagacaagacatggcagtctgaacttgaagctatgcagagacaacacggaatggattctaccgctctgtcttctgccattaacgaagttcagaaactgaaatcgaagctctttgagtccgagtctgagttagagcagtctaagtatgaggtaaggtctttagagaaactcgtcagacagctcgaggaagaaagagtaaacagtagagactcttcatcatcaatggaagtggaagagctgaaagaagcaatgaatctttcaaggcaagagataacacaattgaaatctgcagttgaagcagcagagacaaggtatcaagaagagtatatacagagcacattgcagataagaagcgcatacgaacaaacagaggcggttaaatcaagatattcacagagagaagcagagttaacggaagaattgaacagaaccaaagatgaaatcgaaggtttgcgcaaagagttaatggagaaggtgaaagaagacgaatctacgggcgatttgaagaagctagaatcggatttgatggaagtgagagggagtttaatggataaagagatggagttgcagattctaaggagtgcaatggagaagaaagtggaaaccgcaaacacggaagccatggaagctgagcttaaaagagtgaagattcaatgtgagcaatggaggaaagctgctgagacggcagcttctatactgaacaatgatgaggaaagaacagattctattgagactagcaaaatgttgaaaaagtttggtgtgttactcaagaaaaaccataagtaataataatactgattctttttacttgatttaataaaaatggcattattgttgt

SEQ ID NO: 49913 - protein, 396 aa, Arabidopsis thaliana
  peptide (1)..(396): Ceres Seq. ID no. 15178745
  misc_feature (11)..(369): Pfam Name: Myosin tail Pfam Description: Myosin tail
  misc_feature (75)..(380): Homolog of NCBI NO: 34860755 NR Description: similar to hypothetical protein [Rattus
  misc_feature (65)..(392): Homolog of NCBI NO: 34908020 NR Description: P0460C04.20 [Oryza sativa (japonica
  misc_feature (7)..(396): Homolog of NCBI NO: 30697347 NR Description: expressed protein [Arabidopsis thaliana]
  misc_feature (1)..(396): Homolog of NCBI NO: 8885572 NR Description: myosin heavy chain-like [Arabidopsis thaliana]
  misc_feature (1)..(396): Homolog of NCBI NO: 15228082 NR Description: myosin heavy chain -related [Arabidopsis
  misc_feature (1)..(383): Homolog of NCBI NO: 18076679 NR Description: P70 protein [Nicotiana tabacum]
  misc_feature (1)..(298): Homolog of NCBI NO: 15228082 NR Description: myosin heavy chain -related [Arabidopsis
  misc_feature (1)..(396): Homolog of NCBI NO: 11357801 NR Description: hypothetical protein F4P12.50 - Arabidopsis
  misc_feature (1)..(396): Homolog of NCBI NO: 17978993 NR Description: AT3g53350/F4P12_50 [Arabidopsis thaliana]
  misc_feature (1)..(396): Homolog of NCBI NO: 22331765 NR Description: expressed protein [Arabidopsis thaliana]
MQTPKSRPGSLELPQKKSPLPAPKVVRRLKPSGAESDPKTKTISKTQIPKVVADRRSARIPLNEIQKKRTGRIPELESTISQLQEELKKAKEELNRSEALKREAQEEAEDAKHQLMDINASEDSRIEELRKLSQERDKTWQSELEAMQRQHGMDSTALSSAINEVQKLKSKLFESESELEQSKYEVRSLEKLVRQLEEERVNSRDSSSSMEVEELKEAMNLSRQEITQLKSAVEAAETRYQEEYIQSTLQIRSAYEQTEAVKSRYSQREAELTEELNRTKDEIEGLRKELMEKVKEDESTGDLKKLESDLMEVRGSLMDKEMELQILRSAMEKKVETANTEAMEAELKRVKIQCEQWRKAAETAASILNNDEERTDSIETSKMLKKFGVLLKKNHK

SEQ ID NO: 49914 - protein, 281 aa, Arabidopsis thaliana
  peptide (1)..(281): Ceres Seq. ID no. 15178746
  misc_feature (1)..(254): Pfam Name: Myosin tail Pfam Description: Myosin tail
  misc_feature (1)..(265): Homolog of NCBI NO: 34860755 NR Description: similar to hypothetical protein [Rattus
  misc_feature (1)..(277): Homolog of NCBI NO: 34908020 NR Description: P0460C04.20 [Oryza sativa (japonica
  misc_feature (1)..(281): Homolog of NCBI NO: 30697347 NR Description: expressed protein [Arabidopsis thaliana]
  misc_feature (1)..(281): Homolog of NCBI NO: 8885572 NR Description: myosin heavy chain-like [Arabidopsis thaliana]
  misc_feature (1)..(281): Homolog of NCBI NO: 15228082 NR Description: myosin heavy chain -related [Arabidopsis
  misc_feature (1)..(268): Homolog of NCBI NO: 18076679 NR Description: P70 protein [Nicotiana tabacum]
  misc_feature (1)..(183): Homolog of NCBI NO: 15228082 NR Description: myosin heavy chain -related [Arabidopsis
  misc_feature (1)..(281): Homolog of NCBI NO: 11357801 NR Description: hypothetical protein F4P12.50 - Arabidopsis
  misc_feature (1)..(281): Homolog of NCBI NO: 17978993 NR Description: AT3g53350/F4P12_50 [Arabidopsis thaliana]
  misc_feature (1)..(281): Homolog of NCBI NO: 22331765 NR Description: expressed protein [Arabidopsis thaliana]
MDINASEDSRIEELRKLSQERDKTWQSELEAMQRQHGMDSTALSSAINEVQKLKSKLFESESELEQSKYEVRSLEKLVRQLEEERVNSRDSSSSMEVEELKEAMNLSRQEITQLKSAVEAAETRYQEEYIQSTLQIRSAYEQTEAVKSRYSQREAELTEELNRTKDEIEGLRKELMEKVKEDESTGDLKKLESDLMEVRGSLMDKEMELQILRSAMEKKVETANTEAMEAELKRVKIQCEQWRKAAETAASILNNDEERTDSIETSKMLKKFGVLLKKNHK

SEQ ID NO: 49915 - protein, 250 aa, Arabidopsis thaliana
  peptide (1)..(250): Ceres Seq. ID no. 15178747
  misc_feature (1)..(223): Pfam Name: Myosin tail Pfam Description: Myosin tail
  misc_feature (1)..(234): Homolog of NCBI NO: 34860755 NR Description: similar to hypothetical protein [Rattus
  misc_feature (1)..(246): Homolog of NCBI NO: 34908020 NR Description: P0460C04.20 [Oryza sativa (japonica
  misc_feature (1)..(250): Homolog of NCBI NO: 30697347 NR Description: expressed protein [Arabidopsis thaliana]
  misc_feature (1)..(250): Homolog of NCBI NO: 8885572 NR Description: myosin heavy chain-like [Arabidopsis thaliana]
  misc_feature (1)..(250): Homolog of NCBI NO: 15228082 NR Description: myosin heavy chain -related [Arabidopsis
  misc_feature (1)..(237): Homolog of NCBI NO: 18076679 NR Description: P70 protein [Nicotiana tabacum]
  misc_feature (1)..(152): Homolog of NCBI NO: 15228082 NR Description: myosin heavy chain -related [Arabidopsis
  misc_feature (1)..(250): Homolog of NCBI NO: 11357801 NR Description: hypothetical protein F4P12.50 - Arabidopsis
  misc_feature (1)..(250): Homolog of NCBI NO: 17978993 NR Description: AT3g53350/F4P12_50 [Arabidopsis thaliana]
  misc_feature (1)..(250): Homolog of NCBI NO: 22331765 NR Description: expressed protein [Arabidopsis thaliana]
MQRQHGMDSTALSSAINEVQKLKSKLFESESELEQSKYEVRSLEKLVRQLEEERVNSRDSSSSMEVEELKEAMNLSRQEITQLKSAVEAAETRYQEEYIQSTLQIRSAYEQTEAVKSRYSQREAELTEELNRTKDEIEGLRKELMEKVKEDESTGDLKKLESDLMEVRGSLMDKEMELQILRSAMEKKVETANTEAMEAELKRVKIQCEQWRKAAETAASILNNDEERTDSIETSKMLKKFGVLLKKNHK

SEQ ID NO: 49916 - DNA, 1220 bp, Arabidopsis thaliana
  misc_feature (1)..(1220): Ceres Seq. ID no. 13588846
  misc_feature: MA Experiment ID: 20000171 Result: Up-regulated in Transcription
  misc_feature: MA Experiment 20000171 PARAMETER Experiment Name: At_42deg_Heat_P Parameter: Age (day) Value: 14
  misc_feature: MA Experiment 20000171 PARAMETER Experiment Name: At_42deg_Heat_P Parameter: Organism Value: A. thaliana
  misc_feature: MA Experiment 20000171 PARAMETER Experiment Name: At_42deg_Heat_P Parameter: Plant Line Value: WS
  misc_feature: MA Experiment 20000171 PARAMETER Experiment Name: At_42deg_Heat_P Parameter: Temperature (deg C) Value: 42 vs. 22
  misc_feature: MA Experiment 20000171 PARAMETER Experiment Name: At_42deg_Heat_P Parameter: Timepoint (hr) Value: 1
  misc_feature: MA Experiment 20000171 PARAMETER Experiment Name: At_42deg_Heat_P Parameter: Tissue Value: Aerial
  misc_feature: MA Experiment ID: 20000182 Result: Up-regulated in Transcription
  misc_feature: MA Experiment 20000182 PARAMETER Experiment Name: At_2mM_SA_P Parameter: Age (day) Value: 14
  misc_feature: MA Experiment 20000182 PARAMETER Experiment Name: At_2mM_SA_P Parameter: Organism Value: A. thaliana
  misc_feature: MA Experiment 20000182 PARAMETER Experiment Name: At_2mM_SA_P Parameter: Plant Line Value: WS
  misc_feature: MA Experiment 20000182 PARAMETER Experiment Name: At_2mM_SA_P Parameter: Timepoint (hr) Value: 6
  misc_feature: MA Experiment 20000182 PARAMETER Experiment Name: At_2mM_SA_P Parameter: Tissue Value: Aerial
  misc_feature: MA Experiment 20000182 PARAMETER Experiment Name: At_2mM_SA_P Parameter: Treatment Value: 2mM SA vs. No Treatment
  misc_feature: MA Experiment ID: 20000184 Result: Down-regulated in Transcription
  misc_feature: MA Experiment 20000184 PARAMETER Experiment Name: At_Shoots__P Parameter: Age (day) Value: 7
  misc_feature: MA Experiment 20000184 PARAMETER Experiment Name: At_Shoots__P Parameter: Tissue Value: Shoots vs. Whole Plant
  misc_feature: MA Experiment ID: 20000234 Result: Down-regulated in Transcription
  misc_feature: MA Experiment 20000234 PARAMETER Experiment Name: At_Siliques_P Parameter: Age (day) Value: 21
  misc_feature: MA Experiment 20000234 PARAMETER Experiment Name: At_Siliques_P Parameter: Organism Value: A. thaliana
  misc_feature: MA Experiment 20000234 PARAMETER Experiment Name: At_Siliques_P Parameter: Plant Line Value: WS
  misc_feature: MA Experiment 20000234 PARAMETER Experiment Name: At_Siliques_P Parameter: Tissue Value: Less Than 5mm Siliques vs. Whole Plant
  misc_feature: MA Experiment ID: 20000235 Result: Down-regulated in Transcription
  misc_feature: MA Experiment 20000235 PARAMETER Experiment Name: At_Siliques_P Parameter: Age (day) Value: 21
  misc_feature: MA Experiment 20000235 PARAMETER Experiment Name: At_Siliques_P Parameter: Organism Value: A. thaliana
  misc_feature: MA Experiment 20000235 PARAMETER Experiment Name: At_Siliques_P Parameter: Plant Line Value: WS
  misc_feature: MA Experiment 20000235 PARAMETER Experiment Name: At_Siliques_P Parameter: Tissue Value: 5-10mm Siliques vs. Whole Plant
  misc_feature: MA Experiment ID: 20000438 Result: Down-regulated in Transcription
  misc_feature: MA Experiment 20000438 PARAMETER Experiment Name: At_Shoots__P Parameter: Age (day) Value: 14
  misc_feature: MA Experiment 20000438 PARAMETER Experiment Name: At_Shoots__P Parameter: Tissue Value: Shoots vs. Whole Plant
  misc_feature: MA Experiment ID: 20000495 Result: Down-regulated in Transcription
  misc_feature: MA Experiment 20000495 PARAMETER Experiment Name: At_Guard_Cells_P Parameter: Harvest Date Value: 8/2/2002
  misc_feature: MA Experiment 20000495 PARAMETER Experiment Name: At_Guard_Cells_P Parameter: Organism Value: A. thaliana
  misc_feature: MA Experiment 20000495 PARAMETER Experiment Name: At_Guard_Cells_P Parameter: Tissue Value: Guard Cells vs. Leaves
  misc_feature: MA Experiment ID: 20000527 Result: Down-regulated in Transcription
  misc_feature: MA Experiment 20000527 PARAMETER Experiment Name: At_10percent_PEG_P Parameter: Age (day) Value: 20
  misc_feature: MA Experiment 20000527 PARAMETER Experiment Name: At_10percent_PEG_P Parameter: Organism Value: A. thaliana
  misc_feature: MA Experiment 20000527 PARAMETER Experiment Name: At_10percent_PEG_P Parameter: Plant Line Value: WS
  misc_feature: MA Experiment 20000527 PARAMETER Experiment Name: At_10percent_PEG_P Parameter: Timepoint (day) Value: 20
  misc_feature: MA Experiment 20000527 PARAMETER Experiment Name: At_10percent_PEG_P Parameter: Tissue Value: Whole Plant
  misc_feature: MA Experiment 20000527 PARAMETER Experiment Name: At_10percent_PEG_P Parameter: Treatment Value: 10percent PEG vs. No Treatment
  misc_feature: MA Experiment ID: 20000573 Result: Down-regulated in Transcription
  misc_feature: MA Experiment 20000573 PARAMETER Experiment Name: At_100uM_ABA_Mutants__P Parameter: Organism Value: A. thaliana
  misc_feature: MA Experiment 20000573 PARAMETER Experiment Name: At_100uM_ABA_Mutants__P Parameter: Plant Line Value: CS22 vs. Ler wt
  misc_feature: MA Experiment 20000573 PARAMETER Experiment Name: At_100uM_ABA_Mutants__P Parameter: Timepoint (hr) Value: N/A
  misc_feature: MA Experiment 20000573 PARAMETER Experiment Name: At_100uM_ABA_Mutants__P Parameter: Tissue Value: Whole Plant
  misc_feature: MA Experiment 20000573 PARAMETER Experiment Name: At_100uM_ABA_Mutants__P Parameter: Treatment Value: None
  misc_feature: MA Experiment ID: 20001905 Result: Up-regulated in Transcription
  misc_feature: MA Experiment 20001905 PARAMETER Experiment Name: At_Drought_Reproduction_P Parameter: Age (day) Value: 40
  misc_feature: MA Experiment 20001905 PARAMETER Experiment Name: At_Drought_Reproduction_P Parameter: Organism Value: A. thaliana
  misc_feature: MA Experiment 20001905 PARAMETER Experiment Name: At_Drought_Reproduction_P Parameter: Plant Line Value: WS
  misc_feature: MA Experiment 20001905 PARAMETER Experiment Name: At_Drought_Reproduction_P Parameter: Timepoint (day) Value: 10
  misc_feature: MA Experiment 20001905 PARAMETER Experiment Name: At_Drought_Reproduction_P Parameter: Tissue Value: Rosettes
  misc_feature: MA Experiment 20001905 PARAMETER Experiment Name: At_Drought_Reproduction_P Parameter: Treatment Value: Drought vs. No Drought
aatcgatctcaaccgtccgatcatccatcttgccatcaccgttcaccaatcttcttcgtctcctctctctttctctctttttgctgtttctagctcctctctctctggatctcgccggcgaaccgtttctcttgggtgtaaacagtagcaatcaagctatagaatctcagatatcgctgaattagctgttggattttatccgccttttcttcgttatccggggctcgggtataaggtttcatcgtcttatttcatctgtaaatgggctgcttccactcaaaggcagcaaaagaatttcgaggacacgaagaccctgttaagcttgcctctgagacagcttttagtgtgagtgaggttgaagcattatttgagctattcaagagcataagcagttcggttgttgatgatggtctgattaacaaggaggagtttcaacttgctttgttcaaaagccggaagagggagaatatatttgctaataggatatttgatatgtttgatgttaaacgaaaaggagtcatcgatttcggggactttgtaagatcactcaatgttttccaccccaatgcttctctagaagacaaaatagattttacgtttaggctttacgacatggactgcacgggttacattgaacgacaagaggtcaagcaaatgttgatcgcgcttctctgcgaatctgaaatgaaactggctgatgaaaccatagagataatactcgataagacatttgaagatgcagacgtgaatcaagatggaaaaattgataaattagagtggagtgatttcgtaaacaaaaatccatcattgcttaagatcatgactcttccatatctcagggatattacgacaacgtttccgagttttgtcttccattcggaggtcgatgagattgccacatgaagaaacaaactggtttaagaccgagtagattgccacgagttggaagaacaagtctgagctaatcggtgtaatcaacatctgtttgtaaacagtagtagagcatattctcttgaaattgtttgggttacttttttcttctcacaacagtttaaaattttgggtttttagcttacaaaaaaaaaaaaaagaagaagcgcgtaatcaccaatccttcacttcatatagttaggaaatgttaatgagtttgtacatattacatcatacgtttgttgtaattgttttttttcaagtaaaaaagtaaagatttgttacgtttc

SEQ ID NO: 49917 - protein, 213 aa, Arabidopsis thaliana
  peptide (1)..(213): Ceres Seq. ID no. 13588847
  misc_feature (152)..(180): Pfam Name: EF hand Pfam Description: EF hand
  misc_feature (54)..(213): Homolog of NCBI NO: 37536918 NR Description: putative calcineurin [Oryza sativa (japonica
  misc_feature (1)..(211): Homolog of NCBI NO: 15237928 NR Description: calcineurin B-like protein, putative [Arabidopsis
  misc_feature (3)..(210): Homolog of NCBI NO: 30687272 NR Description: calcineurin B-like protein 3 (CBL3) [Arabidopsis
  misc_feature (1)..(210): Homolog of NCBI NO: 21593228 NR Description: calcineurin B-like protein 2 [Arabidopsis
  misc_feature (1)..(210): Homolog of NCBI NO: 15241101 NR Description: calcineurin B-like protein 2 (gb|AAC26009.1)
  misc_feature (3)..(210): Homolog of NCBI NO: 15236778 NR Description: calcineurin B-like protein 3 (CBL3) [Arabidopsis
  misc_feature (13)..(210): Homolog of NCBI NO: 22137326 NR Description: calcineurin B [Pisum sativum]
  misc_feature (10)..(210): Homolog of NCBI NO: 16924116 NR Description: putative calcineurin B-like protein [Oryza sativa]
  misc_feature (1)..(213): Homolog of NCBI NO: 15238015 NR Description: calcineurin B-like protein 9 (CBL9) [Arabidopsis
  misc_feature (1)..(213): Homolog of NCBI NO: 18414931 NR Description: calcineurin B-like protein 1 (CBL1) [Arabidopsis
MGCFHSKAAKEFRGHEDPVKLASETAFSVSEVEALFELFKSISSSVVDDGLINKEEFQLALFKSRKRENIFANRIFDMFDVKRKGVIDFGDFVRSLNVFHPNASLEDKIDFTFRLYDMDCTGYIERQEVKQMLIALLCESEMKLADETIEIILDKTFEDADVNQDGKIDKLEWSDFVNKNPSLLKIMTLPYLRDITTTFPSFVFHSEVDEIAT

SEQ ID NO: 49918 - protein, 136 aa, Arabidopsis thaliana; identical to SEQ ID NO: 35421
  peptide (1)..(136): Ceres Seq. ID no. 13588848
  misc_feature (75)..(103): Pfam Name: EF hand Pfam Description: EF hand
  misc_feature (1)..(136): Homolog of NCBI NO: 37536918 NR Description: putative calcineurin [Oryza sativa (japonica
  misc_feature (1)..(134): Homolog of NCBI NO: 15237928 NR Description: calcineurin B-like protein, putative [Arabidopsis
  misc_feature (1)..(133): Homolog of NCBI NO: 30687272 NR Description: calcineurin B-like protein 3 (CBL3) [Arabidopsis
  misc_feature (1)..(133): Homolog of NCBI NO: 21593228 NR Description: calcineurin B-like protein 2 [Arabidopsis
  misc_feature (1)..(133): Homolog of NCBI NO: 15241101 NR Description: calcineurin B-like protein 2 (gb|AAC26009.1)
  misc_feature (1)..(133): Homolog of NCBI NO: 15236778 NR Description: calcineurin B-like protein 3 (CBL3) [Arabidopsis
  misc_feature (1)..(133): Homolog of NCBI NO: 22137326 NR Description: calcineurin B [Pisum sativum]
  misc_feature (1)..(133): Homolog of NCBI NO: 16924116 NR Description: putative calcineurin B-like protein [Oryza sativa]
  misc_feature (1)..(136): Homolog of NCBI NO: 15238015 NR Description: calcineurin B-like protein 9 (CBL9) [Arabidopsis
  misc_feature (1)..(136): Homolog of NCBI NO: 18414931 NR Description: calcineurin B-like protein 1 (CBL1) [Arabidopsis

SEQ ID NO: 49919 - DNA, 1196 bp, Arabidopsis thaliana
  misc_feature (1)..(1196): Ceres Seq. ID no. 13592355
  misc_feature: MA Experiment ID: 20000171 Result: Down-regulated in Transcription
  misc_feature: MA Experiment 20000171 PARAMETER Experiment Name: At_42deg_Heat_P Parameter: Age (day) Value: 14
  misc_feature: MA Experiment 20000171 PARAMETER Experiment Name: At_42deg_Heat_P Parameter: Organism Value: A. thaliana
  misc_feature: MA Experiment 20000171 PARAMETER Experiment Name: At_42deg_Heat_P Parameter: Plant Line Value: WS
  misc_feature: MA Experiment 20000171 PARAMETER Experiment Name: At_42deg_Heat_P Parameter: Temperature (deg C) Value: 42 vs. 22
  misc_feature: MA Experiment 20000171 PARAMETER Experiment Name: At_42deg_Heat_P Parameter: Timepoint (hr) Value: 1
  misc_feature: MA Experiment 20000171 PARAMETER Experiment Name: At_42deg_Heat_P Parameter: Tissue Value: Aerial
  misc_feature: MA Experiment ID: 20000173 Result: Down-regulated in Transcription
  misc_feature: MA Experiment 20000173 PARAMETER Experiment Name: At_42deg_Heat_P Parameter: Age (day) Value: 14
  misc_feature: MA Experiment 20000173 PARAMETER Experiment Name: At_42deg_Heat_P Parameter: Organism Value: A. thaliana
  misc_feature: MA Experiment 20000173 PARAMETER Experiment Name: At_42deg_Heat_P Parameter: Plant Line Value: WS
  misc_feature: MA Experiment 20000173 PARAMETER Experiment Name: At_42deg_Heat_P Parameter: Temperature (deg C) Value: 42 vs. 22
  misc_feature: MA Experiment 20000173 PARAMETER Experiment Name: At_42deg_Heat_P Parameter: Timepoint (hr) Value: 6
  misc_feature: MA Experiment 20000173 PARAMETER Experiment Name: At_42deg_Heat_P Parameter: Tissue Value: Aerial
  misc_feature: MA Experiment ID: 20000182 Result: Down-regulated in Transcription
  misc_feature: MA Experiment 20000182 PARAMETER Experiment Name: At_2mM_SA_P Parameter: Age (day) Value: 14
  misc_feature: MA Experiment 20000182 PARAMETER Experiment Name: At_2mM_SA_P Parameter: Organism Value: A. thaliana
  misc_feature: MA Experiment 20000182 PARAMETER Experiment Name: At_2mM_SA_P Parameter: Plant Line Value: WS
  misc_feature: MA Experiment 20000182 PARAMETER Experiment Name: At_2mM_SA_P Parameter: Timepoint (hr) Value: 6
  misc_feature: MA Experiment 20000182 PARAMETER Experiment Name: At_2mM_SA_P Parameter: Tissue Value: Aerial
  misc_feature: MA Experiment 20000182 PARAMETER Experiment Name: At_2mM_SA_P Parameter: Treatment Value: 2mM SA vs. No Treatment
  misc_feature: MA Experiment ID: 20000184 Result: Up-regulated in Transcription
  misc_feature: MA Experiment 20000184 PARAMETER Experiment Name: At_Shoots__P Parameter: Age (day) Value: 7
  misc_feature: MA Experiment 20000184 PARAMETER Experiment Name: At_Shoots__P Parameter: Tissue Value: Shoots vs. Whole Plant
  misc_feature: MA Experiment ID: 20000185 Result: Down-regulated in Transcription
  misc_feature: MA Experiment 20000185 PARAMETER Experiment Name: At_Roots__P Parameter: Age (day) Value: 7 vs. 21
  misc_feature: MA Experiment 20000185 PARAMETER Experiment Name: At_Roots__P Parameter: Organism Value: A. thaliana
  misc_feature: MA Experiment 20000185 PARAMETER Experiment Name: At_Roots__P Parameter: Tissue Value: Roots vs. Whole Plant
  misc_feature: MA Experiment ID: 20000436 Result: Down-regulated in Transcription
  misc_feature: MA Experiment 20000436 PARAMETER Experiment Name: At_Drought_P Parameter: Age (day) Value: 7
  misc_feature: MA Experiment 20000436 PARAMETER Experiment Name: At_Drought_P Parameter: Organism Value: A. thaliana
  misc_feature: MA Experiment 20000436 PARAMETER Experiment Name: At_Drought_P Parameter: Plant Line Value: WS
  misc_feature: MA Experiment 20000436 PARAMETER Experiment Name: At_Drought_P Parameter: Timepoint (hr) Value: 12
  misc_feature: MA Experiment 20000436 PARAMETER Experiment Name: At_Drought_P Parameter: Tissue Value: Whole Plant
  misc_feature: MA Experiment 20000436 PARAMETER Experiment Name: At_Drought_P Parameter: Treatment Value: Drought vs. No Drought
  misc_feature: MA Experiment ID: 20000437 Result: Down-regulated in Transcription
  misc_feature: MA Experiment 20000437 PARAMETER Experiment Name: At_Drought_P Parameter: Age (day) Value: 8
  misc_feature: MA Experiment 20000437 PARAMETER Experiment Name: At_Drought_P Parameter: Organism Value: A. thaliana
  misc_feature: MA Experiment 20000437 PARAMETER Experiment Name: At_Drought_P Parameter: Plant Line Value: WS
  misc_feature: MA Experiment 20000437 PARAMETER Experiment Name: At_Drought_P Parameter: Timepoint (hr) Value: 24
  misc_feature: MA Experiment 20000437 PARAMETER Experiment Name: At_Drought_P Parameter: Tissue Value: Whole Plant
  misc_feature: MA Experiment 20000437 PARAMETER Experiment Name: At_Drought_P Parameter: Treatment Value: Drought vs. No Drought
  misc_feature: MA Experiment ID: 20000439 Result: Down-regulated in Transcription
  misc_feature: MA Experiment 20000439 PARAMETER Experiment Name: At_Roots__P Parameter: Age (day) Value: 14 vs. 21
  misc_feature: MA Experiment 20000439 PARAMETER Experiment Name: At_Roots__P Parameter: Organism Value: A. thaliana
  misc_feature: MA Experiment 20000439 PARAMETER Experiment Name: At_Roots__P Parameter: Tissue Value: Roots vs. Whole Plant
  misc_feature: MA Experiment ID: 20000794 Result: Down-regulated in Transcription
  misc_feature: MA Experiment 20000794 PARAMETER Experiment Name: At_Petals_P Parameter: Age (day) Value: 23-25 days
  misc_feature: MA Experiment 20000794 PARAMETER Experiment Name: At_Petals_P Parameter: Plant Line Value: WS
  misc_feature: MA Experiment 20000794 PARAMETER Experiment Name: At_Petals_P Parameter: Tissue Value: Petals vs. Whole plant
  misc_feature: MA Experiment ID: 20001757 Result: Up-regulated in Transcription
  misc_feature: MA Experiment 20001757 PARAMETER Experiment Name: At_50mM_NH4NO3_L-to-H_P Parameter: Timepoint (hr) Value: 6
  misc_feature: MA Experiment 20001757 PARAMETER Experiment Name: At_50mM_NH4NO3_L-to-H_P Parameter: Tissue Value: Leaf
  misc_feature: MA Experiment 20001757 PARAMETER Experiment Name: At_50mM_NH4NO3_L-to-H_P Parameter: Treatment Value: 50mM NH4NO3 vs 100mM Mannitol
  misc_feature: MA Experiment ID: 20001905 Result: Down-regulated in Transcription
  misc_feature: MA Experiment 20001905 PARAMETER Experiment Name: At_Drought_Reproduction_P Parameter: Age (day) Value: 40
  misc_feature: MA Experiment 20001905 PARAMETER Experiment Name: At_Drought_Reproduction_P Parameter: Organism Value: A. thaliana
  misc_feature: MA Experiment 20001905 PARAMETER Experiment Name: At_Drought_Reproduction_P Parameter: Plant Line Value: WS
  misc_feature: MA Experiment 20001905 PARAMETER Experiment Name: At_Drought_Reproduction_P Parameter: Timepoint (day) Value: 10
  misc_feature: MA Experiment 20001905 PARAMETER Experiment Name: At_Drought_Reproduction_P Parameter: Tissue Value: Rosettes
  misc_feature: MA Experiment 20001905 PARAMETER Experiment Name: At_Drought_Reproduction_P Parameter: Treatment Value: Drought vs. No Drought
  misc_feature: MA Experiment ID: 20001906 Result: Down-regulated in Transcription
  misc_feature: MA Experiment 20001906 PARAMETER Experiment Name: At_Drought_Reproduction_P Parameter: Age (day) Value: 35
  misc_feature: MA Experiment 20001906 PARAMETER Experiment Name: At_Drought_Reproduction_P Parameter: Organism Value: A. thaliana
  misc_feature: MA Experiment 20001906 PARAMETER Experiment Name: At_Drought_Reproduction_P Parameter: Plant Line Value: WS
  misc_feature: MA Experiment 20001906 PARAMETER Experiment Name: At_Drought_Reproduction_P Parameter: Timepoint (day) Value: 5
  misc_feature: MA Experiment 20001906 PARAMETER Experiment Name: At_Drought_Reproduction_P Parameter: Tissue Value: Siliques
  misc_feature: MA Experiment 20001906 PARAMETER Experiment Name: At_Drought_Reproduction_P Parameter: Treatment Value: Drought vs. No Drought
  misc_feature: MA Experiment ID: 20001911 Result: Down-regulated in Transcription
  misc_feature: MA Experiment 20001911 PARAMETER Experiment Name: At_Drought_Reproduction_P Parameter: Age (day) Value: 40
  misc_feature: MA Experiment 20001911 PARAMETER Experiment Name: At_Drought_Reproduction_P Parameter: Organism Value: A. thaliana
  misc_feature: MA Experiment 20001911 PARAMETER Experiment Name: At_Drought_Reproduction_P Parameter: Plant Line Value: WS
  misc_feature: MA Experiment 20001911 PARAMETER Experiment Name: At_Drought_Reproduction_P Parameter: Timepoint (day) Value: 10
  misc_feature: MA Experiment 20001911 PARAMETER Experiment Name: At_Drought_Reproduction_P Parameter: Tissue Value: Flowers
  misc_feature: MA Experiment 20001911 PARAMETER Experiment Name: At_Drought_Reproduction_P Parameter: Treatment Value: Drought vs. No Drought
gtggataagcttctcactttcagttcaattggatagccggaaaggctctcctccaagtggcgtttatatggaggtgacaaatacgagcagcatcatgtggttcttcagggacaaaggtttcgatgatccgagtatcgacaagatgttgagaaaatgcaaacagttggaaaaggctcaaagcgatgtggcatcagaaaactgggactacctgagtaacattgttggtatccaagagagaaaactcccttacatcgtctcccgatgccccaaaatcctgactttacgcctcgatgagagactcatcccgatggtcgagtgcctctccagtcttggaaggaatcctcgggaagttgcttccgccattaccaaatttcctccaatactctctcatagcgtggaggagaaactctgtccccttcttgctttctttcaagcgttaggtgtgcctgagactcaacttggcaaaatgatactttttaacccaaggcttatcagctacagcatcgacaccaagctgacagtgatcgtcagctttcttgctagccttggccttgatcaagatgggatgattggcaaagttctggtgaagaacccatttcttatggggtacagtgttgataaaaggttacggcctaccactgaattcttgaaatcatccgttggcctgagtgaggatggcattaagtcggtggtcatgaatttcccacaacttttgtgcagagacgttaacaagattctcaaaccaaattatgattatttgaaggagtgtgggtttggagattcccagatagcaaccatggtcactggttatccccaaatcttgattaagagtgttaagaattcactacagcctaggatcagattcctcgtccaggtgatgggaagaggcatggatgaagtggcttcttatcctgaattctttcaccatggattgaagaagaaggtcgaatcgaggtttaaacttgtcaaaaagaacaacattgactgcagccttagagaaatgctggactgtaacacaaagaaattccatgagaagtttggcttttcggaggtaactgcaagctcctagcttttatatctctctctagttttttccttcatcaggctctctctgtaagctgttttcagcttgtgcaccaatttctagcacgagcttttccttgagtgattgtgatatcaatagagtgttttcttcc

SEQ ID NO: 49920 - protein, 355 aa, Arabidopsis thaliana
  peptide (1)..(355): Ceres Seq. ID no. 13592356
  misc_feature (32)..(344): Pfam Name: mTERF Pfam Description: mTERF
  misc_feature (17)..(307): Homolog of NCBI NO: 18414260 NR Description: expressed protein [Arabidopsis thaliana]
  misc_feature (116)..(355): Homolog of NCBI NO: 7487916 NR Description: hypothetical protein YUP8H12R.46 - Arabidopsis
  misc_feature (59)..(345): Homolog of NCBI NO: 15227089 NR Description: hypothetical protein [Arabidopsis thaliana]
  misc_feature (76)..(345): Homolog of NCBI NO: 18406426 NR Description: expressed protein [Arabidopsis thaliana]
  misc_feature (31)..(345): Homolog of NCBI NO: 34394417 NR Description: hypothetical protein [Oryza sativa (japonica
  misc_feature (116)..(355): Homolog of NCBI NO: 30699372 NR Description: expressed protein [Arabidopsis thaliana]
  misc_feature (116)..(355): Homolog of NCBI NO: 33589698 NR Description: At1g78930 [Arabidopsis thaliana]
  misc_feature (69)..(351): Homolog of NCBI NO: 15236230 NR Description: expressed protein [Arabidopsis thaliana]
  misc_feature (26)..(347): Homolog of NCBI NO: 34905080 NR Description: P0686C03.23 [Oryza sativa (japonica
  misc_feature (23)..(354): Homolog of NCBI NO: 15233700 NR Description: expressed protein [Arabidopsis thaliana]
WISFSLSVQLDSRKGSPPSGVYMEVTNTSSIMWFFRDKGFDDPSIDKMLRKCKQLEKAQSDVASENWDYLSNIVGIQERKLPYIVSRCPKILTLRLDERLIPMVECLSSLGRNPREVASAITKFPPILSHSVEEKLCPLLAFFQALGVPETQLGKMILFNPRLISYSIDTKLTVIVSFLASLGLDQDGMIGKVLVKNPFLMGYSVDKRLRPTTEFLKSSVGLSEDGIKSVVMNFPQLLCRDVNKILKPNYDYLKECGFGDSQIATMVTGYPQILIKSVKNSLQPRIRFLVQVMGRGMDEVASYPEFFHHGLKKKVESRFKLVKKNNIDCSLREMLDCNTKKFHEKFGFSEVTASS

SEQ ID NO: 49921 - protein, 333 aa, Arabidopsis thaliana
  peptide (1)..(333): Ceres Seq. ID no. 13592357
  misc_feature (10)..(322): Pfam Name: mTERF Pfam Description: mTERF
  misc_feature (1)..(285): Homolog of NCBI NO: 18414260 NR Description: expressed protein [Arabidopsis thaliana]
  misc_feature (94)..(333): Homolog of NCBI NO: 7487916 NR Description: hypothetical protein YUP8H12R.46 - Arabidopsis
  misc_feature (37)..(323): Homolog of NCBI NO: 15227089 NR Description: hypothetical protein [Arabidopsis thaliana]
  misc_feature (54)..(323): Homolog of NCBI NO: 18406426 NR Description: expressed protein [Arabidopsis thaliana]
  misc_feature (9)..(323): Homolog of NCBI NO: 34394417 NR Description: hypothetical protein [Oryza sativa (japonica
  misc_feature (94)..(333): Homolog of NCBI NO: 30699372 NR Description: expressed protein [Arabidopsis thaliana]
  misc_feature (94)..(333): Homolog of NCBI NO: 33589698 NR Description: At1g78930 [Arabidopsis thaliana]
  misc_feature (47)..(329): Homolog of NCBI NO: 15236230 NR Description: expressed protein [Arabidopsis thaliana]
  misc_feature (4)..(325): Homolog of NCBI NO: 34905080 NR Description: P0686C03.23 [Oryza sativa (japonica
  misc_feature (1)..(332): Homolog of NCBI NO: 15233700 NR Description: expressed protein [Arabidopsis thaliana]
MEVTNTSSIMWFFRDKGFDDPSIDKMLRKCKQLEKAQSDVASENWDYLSNIVGIQERKLPYIVSRCPKILTLRLDERLIPMVECLSSLGRNPREVASAITKFPPILSHSVEEKLCPLLAFFQALGVPETQLGKMILFNPRLISYSIDTKLTVIVSFLASLGLDQDGMIGKVLVKNPFLMGYSVDKRLRPTTEFLKSSVGLSEDGIKSVVMNFPQLLCRDVNKILKPNYDYLKECGFGDSQIATMVTGYPQILIKSVKNSLQPRIRFLVQVMGRGMDEVASYPEFFHHGLKKKVESRFKLVKKNNIDCSLREMLDCNTKKFHEKFGFSEVTASS

SEQ ID NO: 49922 - protein, 324 aa, Arabidopsis thaliana
  peptide (1)..(324): Ceres Seq. ID no. 13592358
  misc_feature (1)..(313): Pfam Name: mTERF Pfam Description: mTERF
  misc_feature (1)..(276): Homolog of NCBI NO: 18414260 NR Description: expressed protein [Arabidopsis thaliana]
  misc_feature (85)..(324): Homolog of NCBI NO: 7487916 NR Description: hypothetical protein YUP8H12R.46 - Arabidopsis
  misc_feature (28)..(314): Homolog of NCBI NO: 15227089 NR Description: hypothetical protein [Arabidopsis thaliana]
  misc_feature (45)..(314): Homolog of NCBI NO: 18406426 NR Description: expressed protein [Arabidopsis thaliana]
  misc_feature (1)..(314): Homolog of NCBI NO: 34394417 NR Description: hypothetical protein [Oryza sativa (japonica
  misc_feature (85)..(324): Homolog of NCBI NO: 30699372 NR Description: expressed protein [Arabidopsis thaliana]
  misc_feature (85)..(324): Homolog of NCBI NO: 33589698 NR Description: At1g78930 [Arabidopsis thaliana]
  misc_feature (38)..(320): Homolog of NCBI NO: 15236230 NR Description: expressed protein [Arabidopsis thaliana]
  misc_feature (1)..(316): Homolog of NCBI NO: 34905080 NR Description: P0686C03.23 [Oryza sativa (japonica
  misc_feature (1)..(323): Homolog of NCBI NO: 15233700 NR Description: expressed protein [Arabidopsis thaliana]
MWFFRDKGFDDPSIDKMLRKCKQLEKAQSDVASENWDYLSNIVGIQERKLPYIVSRCPKILTLRLDERLIPMVECLSSLGRNPREVASAITKFPPILSHSVEEKLCPLLAFFQALGVPETQLGKMILFNPRLISYSIDTKLTVIVSFLASLGLDQDGMIGKVLVKNPFLMGYSVDKRLRPTTEFLKSSVGLSEDGIKSVVMNFPQLLCRDVNKILKPNYDYLKECGFGDSQIATMVTGYPQILIKSVKNSLQPRIRFLVQVMGRGMDEVASYPEFFHHGLKKKVESRFKLVKKNNIDCSLREMLDCNTKKFHEKFGFSEVTASS

SEQ ID NO: 49923 - DNA, 839 bp, Arabidopsis thaliana
  misc_feature (1)..(839): Ceres Seq. ID no. 13648287
  misc_feature: MA Experiment ID: 20000180 Result: Up-regulated in Transcription
  misc_feature: MA Experiment 20000180 PARAMETER Experiment Name: At_Germinating_Seeds_P Parameter: Age (hr) Value: 24 vs. 0
  misc_feature: MA Experiment 20000180 PARAMETER Experiment Name: At_Germinating_Seeds_P Parameter: Tissue Value: Germinating Seeds
  misc_feature: MA Experiment ID: 20000185 Result: Down-regulated in Transcription
  misc_feature: MA Experiment 20000185 PARAMETER Experiment Name: At_Roots__P Parameter: Age (day) Value: 7 vs. 21
  misc_feature: MA Experiment 20000185 PARAMETER Experiment Name: At_Roots__P Parameter: Organism Value: A. thaliana
  misc_feature: MA Experiment 20000185 PARAMETER Experiment Name: At_Roots__P Parameter: Tissue Value: Roots vs. Whole Plant
  misc_feature: MA Experiment ID: 20000437 Result: Down-regulated in Transcription
  misc_feature: MA Experiment 20000437 PARAMETER Experiment Name: At_Drought_P Parameter: Age (day) Value: 8
  misc_feature: MA Experiment 20000437 PARAMETER Experiment Name: At_Drought_P Parameter: Organism Value: A. thaliana
  misc_feature: MA Experiment 20000437 PARAMETER Experiment Name: At_Drought_P Parameter: Plant Line Value: WS
  misc_feature: MA Experiment 20000437 PARAMETER Experiment Name: At_Drought_P Parameter: Timepoint (hr) Value: 24
  misc_feature: MA Experiment 20000437 PARAMETER Experiment Name: At_Drought_P Parameter: Tissue Value: Whole Plant
  misc_feature: MA Experiment 20000437 PARAMETER Experiment Name: At_Drought_P Parameter: Treatment Value: Drought vs. No Drought
  misc_feature: MA Experiment ID: 20000438 Result: Up-regulated in Transcription
  misc_feature: MA Experiment 20000438 PARAMETER Experiment Name: At_Shoots__P Parameter: Age (day) Value: 14
  misc_feature: MA Experiment 20000438 PARAMETER Experiment Name: At_Shoots__P Parameter: Tissue Value: Shoots vs. Whole Plant
  misc_feature: MA Experiment ID: 20000439 Result: Down-regulated in Transcription
  misc_feature: MA Experiment 20000439 PARAMETER Experiment Name: At_Roots__P Parameter: Age (day) Value: 14 vs. 21
  misc_feature: MA Experiment 20000439 PARAMETER Experiment Name: At_Roots__P Parameter: Organism Value: A. thaliana
  misc_feature: MA Experiment 20000439 PARAMETER Experiment Name: At_Roots__P Parameter: Tissue Value: Roots vs. Whole Plant
  misc_feature: MA Experiment ID: 20000495 Result: Down-regulated in Transcription
  misc_feature: MA Experiment 20000495 PARAMETER Experiment Name: At_Guard_Cells_P Parameter: Harvest Date Value: 8/2/2002
  misc_feature: MA Experiment 20000495 PARAMETER Experiment Name: At_Guard_Cells_P Parameter: Organism Value: A. thaliana
  misc_feature: MA Experiment 20000495 PARAMETER Experiment Name: At_Guard_Cells_P Parameter: Tissue Value: Guard Cells vs. Leaves
  misc_feature: MA Experiment ID: 20000496 Result: Down-regulated in Transcription
  misc_feature: MA Experiment 20000496 PARAMETER Experiment Name: At_Guard_Cells_P Parameter: Harvest Date Value: 7/19/2002
  misc_feature: MA Experiment 20000496 PARAMETER Experiment Name: At_Guard_Cells_P Parameter: Organism Value: Canola
  misc_feature: MA Experiment 20000496 PARAMETER Experiment Name: At_Guard_Cells_P Parameter: Tissue Value: Guard Cells vs. Leaves
  misc_feature: MA Experiment ID: 20000794 Result: Down-regulated in Transcription
  misc_feature: MA Experiment 20000794 PARAMETER Experiment Name: At_Petals_P Parameter: Age (day) Value: 23-25 days
  misc_feature: MA Experiment 20000794 PARAMETER Experiment Name: At_Petals_P Parameter: Plant Line Value: WS
  misc_feature: MA Experiment 20000794 PARAMETER Experiment Name: At_Petals_P Parameter: Tissue Value: Petals vs. Whole plant
  misc_feature: MA Experiment ID: 20001248 Result: Down-regulated in Transcription
  misc_feature: MA Experiment 20001248 PARAMETER Experiment Name: At_Far-red-induction_P Parameter: Age (day) Value: 7
  misc_feature: MA Experiment 20001248 PARAMETER Experiment Name: At_Far-red-induction_P Parameter: Light Value: Far-red vs. White
  misc_feature: MA Experiment 20001248 PARAMETER Experiment Name: At_Far-red-induction_P Parameter: Organism Value: A. thaliana
  misc_feature: MA Experiment 20001248 PARAMETER Experiment Name: At_Far-red-induction_P Parameter: Plant Line Value: Columbia
  misc_feature: MA Experiment 20001248 PARAMETER Experiment Name: At_Far-red-induction_P Parameter: Timepoint (hr) Value: 4
  misc_feature: MA Experiment 20001248 PARAMETER Experiment Name: At_Far-red-induction_P Parameter: Tissue Value: Whole Plant
  misc_feature: MA Experiment ID: 20001557 Result: Down-regulated in Transcription
  misc_feature: MA Experiment 20001557 PARAMETER Experiment Name: At_Drought_Soil_Dry_P Parameter: Age (day) Value: 27
  misc_feature: MA Experiment 20001557 PARAMETER Experiment Name: At_Drought_Soil_Dry_P Parameter: Organism Value: A. thaliana
  misc_feature: MA Experiment 20001557 PARAMETER Experiment Name: At_Drought_Soil_Dry_P Parameter: Plant Line Value: WS
  misc_feature: MA Experiment 20001557 PARAMETER Experiment Name: At_Drought_Soil_Dry_P Parameter: Post Timepoint (hr) Value: 3
  misc_feature: MA Experiment 20001557 PARAMETER Experiment Name: At_Drought_Soil_Dry_P Parameter: Post-Treatment Value: Re-Water vs. No Drought
  misc_feature: MA Experiment 20001557 PARAMETER Experiment Name: At_Drought_Soil_Dry_P Parameter: Timepoint (day) Value: 13
  misc_feature: MA Experiment 20001557 PARAMETER Experiment Name: At_Drought_Soil_Dry_P Parameter: Treatment Value: Drought vs. No Drought
  misc_feature: MA Experiment ID: 20001757 Result: Up-regulated in Transcription
  misc_feature: MA Experiment 20001757 PARAMETER Experiment Name: At_50mM_NH4NO3_L-to-H_P Parameter: Timepoint (hr) Value: 6
  misc_feature: MA Experiment 20001757 PARAMETER Experiment Name: At_50mM_NH4NO3_L-to-H_P Parameter: Tissue Value: Leaf
  misc_feature: MA Experiment 20001757 PARAMETER Experiment Name: At_50mM_NH4NO3_L-to-H_P Parameter: Treatment Value: 50mM NH4NO3 vs 100mM Mannitol
  misc_feature: MA Experiment ID: 20001905 Result: Down-regulated in Transcription
  misc_feature: MA Experiment 20001905 PARAMETER Experiment Name: At_Drought_Reproduction_P Parameter: Age (day) Value: 40
  misc_feature: MA Experiment 20001905 PARAMETER Experiment Name: At_Drought_Reproduction_P Parameter: Organism Value: A. thaliana
  misc_feature: MA Experiment 20001905 PARAMETER Experiment Name: At_Drought_Reproduction_P Parameter: Plant Line Value: WS
  misc_feature: MA Experiment 20001905 PARAMETER Experiment Name: At_Drought_Reproduction_P Parameter: Timepoint (day) Value: 10
  misc_feature: MA Experiment 20001905 PARAMETER Experiment Name: At_Drought_Reproduction_P Parameter: Tissue Value: Rosettes
  misc_feature: MA Experiment 20001905 PARAMETER Experiment Name: At_Drought_Reproduction_P Parameter: Treatment Value: Drought vs. No Drought
gagctcactagtcccccccccccgagaaacactctcttatcttcttcaacctctcgactagtaaaagccgcgaaaatcaaaatcctccaaaactatggctctgattttgccctgtacattttgtacttcgcttcagaagaagaattttccgattaatcggagatatattacgaatttccgtcgaggagctacgactgcgacgtgtgagttccggattcctgtagaagtttccactccatcagatagaggatcgttggttgttccttcgcacaaagtcactgttcacgatcgacaacgaggagtggttcacgaattcgaggttccagaggatcagtatatattgcattcagctgaatctcagaacattagtcttccgtttgcttgcaggcatggttgttgtactagttgtgctgtacgtgtaaaatctggagagctgaggcagcctcaagcattgggaatatcagcagaactgaagtcccaggggtatgcacttctttgtgtgggtttccccacatctgaccttgaagtagaaacacaagacgaggacgaggtctactggctacaatttggaagatactttgctcgtggaccaattgaaagagacgattacgctcttgaactcgccatgggagatgaatagaaaccaaaagaagcatgtaaactgtaaagtggcagactttctgtattagaggtgactagtgagttcaactttcttagtcctgaatatcgtggtgcatcatcgtaaatctcttactgaactcaacgatattccgattaaacttctcaacaattcaacatttcaaaaaaaaaaaaaaaaaaaactcgagggggggcccggt

SEQ ID NO: 49924 - protein, 181 aa, Arabidopsis thaliana
  peptide (1)..(181): Ceres Seq. ID no. 13648288
  misc_feature (65)..(141): Pfam Name: 2Fe-2S iron-sulfur cluster binding domain Pfam Description: 2Fe-2S iron-sulfur cluster binding domain
  misc_feature (60)..(165): Homolog of NCBI NO: 33861455 NR Description: ferredoxin, petF-like protein
  misc_feature (59)..(160): Homolog of NCBI NO: 33864459 NR Description: ferredoxin, PetF like protein
  misc_feature (76)..(168): Homolog of NCBI NO: 22299199 NR Description: ferredoxin [Thermosynechococcus elongatus BP-1]
  misc_feature (59)..(167): Homolog of NCBI NO: 37522751 NR Description: ferredoxin [Gloeobacter violaceus]
  misc_feature (58)..(167): Homolog of NCBI NO: 33865808 NR Description: Ferredoxin [Synechococcus sp. WH 8102]
  misc_feature (58)..(167): Homolog of NCBI NO: 16330840 NR Description: ferredoxin [Synechocystis sp. PCC 6803]
  misc_feature (58)..(168): Homolog of NCBI NO: 17230411 NR Description: ferredoxin [Nostoc sp. PCC 7120]
  misc_feature (58)..(168): Homolog of NCBI NO: 23127555 NR Description: hypothetical protein [Nostoc punctiforme]
  misc_feature (6)..(181): Homolog of NCBI NO: 13174248 NR Description: putative ferredoxin [Oryza sativa]
  misc_feature (1)..(181): Homolog of NCBI NO: 15223230 NR Description: ferredoxin family [Arabidopsis thaliana]
MALILPCTFCTSLQKKNFPINRRYITNFRRGATTATCEFRIPVEVSTPSDRGSLVVPSHKVTVHDRQRGVVHEFEVPEDQYILHSAESQNISLPFACRHGCCTSCAVRVKSGELRQPQALGISAELKSQGYALLCVGFPTSDLEVETQDEDEVYWLQFGRYFARGPIERDDYALELAMGDE

SEQ ID NO: 49925 - DNA, 2894 bp, Arabidopsis thaliana
  misc_feature (1)..(2894): Ceres Seq. ID no. 12591312
  misc_feature: MA Experiment ID: 20000315 Result: Down-regulated in Transcription
  misc_feature: MA Experiment 20000315 PARAMETER Experiment Name: At_14day_Shoots-Roots_Sub_P Parameter: Age (day) Value: 14
  misc_feature: MA Experiment 20000315 PARAMETER Experiment Name: At_14day_Shoots-Roots_Sub_P Parameter: Organism Value: A. thaliana
  misc_feature: MA Experiment 20000315 PARAMETER Experiment Name: At_14day_Shoots-Roots_Sub_P Parameter: Plant Line Value: WS
  misc_feature: MA Experiment 20000315 PARAMETER Experiment Name: At_14day_Shoots-Roots_Sub_P Parameter: Tissue Value: Shoots vs. Whole Plant
  misc_feature: MA Experiment ID: 20000327 Result: Down-regulated in Transcription
  misc_feature: MA Experiment 20000327 PARAMETER Experiment Name: At_42deg_Heat_Sub_P Parameter: Age (day) Value: 14
  misc_feature: MA Experiment 20000327 PARAMETER Experiment Name: At_42deg_Heat_Sub_P Parameter: Organism Value: A. thaliana
  misc_feature: MA Experiment 20000327 PARAMETER Experiment Name: At_42deg_Heat_Sub_P Parameter: Plant Line Value: WS
  misc_feature: MA Experiment 20000327 PARAMETER Experiment Name: At_42deg_Heat_Sub_P Parameter: Temperature (deg C) Value: 42 vs. 22
  misc_feature: MA Experiment 20000327 PARAMETER Experiment Name: At_42deg_Heat_Sub_P Parameter: Timepoint (hr) Value: 1
  misc_feature: MA Experiment 20000327 PARAMETER Experiment Name: At_42deg_Heat_Sub_P Parameter: Tissue Value: Aerial
  misc_feature: MA Experiment ID: 20000328 Result: Down-regulated in Transcription
  misc_feature: MA Experiment 20000328 PARAMETER Experiment Name: At_42deg_Heat_Sub_P Parameter: Age (day) Value: 14
  misc_feature: MA Experiment 20000328 PARAMETER Experiment Name: At_42deg_Heat_Sub_P Parameter: Organism Value: A. thaliana
  misc_feature: MA Experiment 20000328 PARAMETER Experiment Name: At_42deg_Heat_Sub_P Parameter: Plant Line Value: WS
  misc_feature: MA Experiment 20000328 PARAMETER Experiment Name: At_42deg_Heat_Sub_P Parameter: Temperature (deg C) Value: 42 vs. 22
  misc_feature: MA Experiment 20000328 PARAMETER Experiment Name: At_42deg_Heat_Sub_P Parameter: Timepoint (hr) Value: 6
  misc_feature: MA Experiment 20000328 PARAMETER Experiment Name: At_42deg_Heat_Sub_P Parameter: Tissue Value: Aerial
  misc_feature: MA Experiment ID: 20000347 Result: Up-regulated in Transcription
  misc_feature: MA Experiment 20000347 PARAMETER Experiment Name: At_2mM_SA_Sub_P Parameter: Age (day) Value: 14
  misc_feature: MA Experiment 20000347 PARAMETER Experiment Name: At_2mM_SA_Sub_P Parameter: Organism Value: A. thaliana
  misc_feature: MA Experiment 20000347 PARAMETER Experiment Name: At_2mM_SA_Sub_P Parameter: Plant Line Value: WS
  misc_feature: MA Experiment 20000347 PARAMETER Experiment Name: At_2mM_SA_Sub_P Parameter: Timepoint (hr) Value: 6
  misc_feature: MA Experiment 20000347 PARAMETER Experiment Name: At_2mM_SA_Sub_P Parameter: Tissue Value: Aerial
  misc_feature: MA Experiment 20000347 PARAMETER Experiment Name: At_2mM_SA_Sub_P Parameter: Treatment Value: 2mM SA vs. No Treatment
  misc_feature: MA Experiment ID: 20000355 Result: Down-regulated in Transcription
  misc_feature: MA Experiment 20000355 PARAMETER Experiment Name: At_Siliques_Sub_P Parameter: Age (day) Value: 21
  misc_feature: MA Experiment 20000355 PARAMETER Experiment Name: At_Siliques_Sub_P Parameter: Organism Value: A. thaliana
  misc_feature: MA Experiment 20000355 PARAMETER Experiment Name: At_Siliques_Sub_P Parameter: Plant Line Value: WS
  misc_feature: MA Experiment 20000355 PARAMETER Experiment Name: At_Siliques_Sub_P Parameter: Tissue Value: Less Than 5mm Siliques vs. Whole Plant
agtcttgatctctcgattattgcccaccaagtgatcgatcttttgtctcactgaactcggttacgcttgagatttgatctaacagctgaaagtttctgactttttgggtttttgatttcgattttcatggcgtatcatccggcttatactgagactatgtctatgggaggagggtcaagccatgggggcggccagcaatacgtgccgtttgctacgagtagtggctctttgagggtcgaattgttacatggtaacttagacatttgggttaaggaagctaaacatcttcctaatatggatggtttccataacagacttggtgggatgttgtctgggttaggtcggaagaaagtggaaggtgagaagtcttctaagatcactagtgatccttatgttactgtctctatctctggtgctgtgattggtagaacttttgttattagcaatagtgagaatcctgtgtggatgcagcattttgatgtaccggttgctcatagtgctgctgaagtacattttgttgtgaaagatagtgatattattggatcacagatcatgggagctgttggaatcccaacggagcagctgtgttcggggaataggatcgaagggctctttccgatacttaatagtagtgggaagccttgtaaacaaggtgctgtgttgggtttgtctattcaatacactccaatggaaagaatgagactttaccaaatgggtgttggttctggtaatgagtgtgtaggagttcccggtacatacttccctttgaggaaaggcggtagggttactctgtatcaggatgctcatgttgatgacggtactcttccgagtgtacatcttgatggtgggattcagtatagacatggaaagtgctgggaggatatggctgatgcaataaggcaggcaagaaggttgatttatatcacaggttggtcagttttccatccggttaggctggttcgtcgtaccaatgatcccaccgaaggtacattaggggagttgcttaaagtcaaatctcaagaaggtgttagagtgttggttttggtgtgggacgatccaacgtcaaggagtcttctgggattcaaaacacaaggagttatgaacacaagcgatgaggagactcgccgttttttcaagcattcgtcggtgcaagttctcctttgtcccagatctggagggaaaggtcacagcttcataaaaaaatctgaagttggaacaatctacacgcatcatcaaaaaactgtgattgtagacgctgaagcagctcagaaccgaagaaagatcgtagcatttgttggagggctagatttgtgcaacggacgatttgatactcccaagcatcctctcttcaggacattaaagacactccataaagatgacttccacaacccaaattttgtgactactgcggatgatggaccaagagaaccatggcatgatcttcacagcaagattgatggtccagctgcatatgatgtacttgctaatttcgaggaacgctggatgaaggcttcaaaacctcgcggaattgggaaactaaaatcttcttctgatgattctttgcttaggatagacagaattcctgacatcgtgggactttctgaagcttcttctgctaatgataatgatccagagtcttggcatgttcaggttttccgttccattgattcaagttcagtcaaagggtttccaaaggacccaaaggaagctactggaagaaatcttctatgtgggaagaatattctcatagatatgagcatacacgcagcttatgttaaggccatacgatctgctcagcacttcatttacattgagaaccaatattttcttggatcttcattcaactgggattcaaacaaggacttgggtgctaataatctaatcccgatggaaatcgcgcttaagattgctaacaaaattagagcaagggagaagtttgctgcttatattgtcattccaatgtggccagaaggtgctccaacaagtaaccctattcaaagaattctctactggcagcacaagacaatgcaaatgatgtatcaaaccatctacaaggcacttgtggaagttggtcttgatagccagtttgagccacaagactttttgaactttttctgtcttggaaccagagaagttcctgttggaacagttagcgtatataatagtcctcggaagccacctcagccaaacgcaaatgcaaatgctgcacaggtacaagctttgaagagtcgaagattcatgatatatgttcattccaaaggtatggtagtggatgatgagtttgtcttaattggttccgcgaatatcaaccagagatccttggaaggaactagagatactgaaatcgccatgggagggtatcagccacactattcatgggctatgaaaggttctcgtcctcatggtcagatctttgggtatagaatgtcgttatgggcagaacatctagggtttctagagcaaggtttcgaggaaccagagaacatggaatgcgtgagacgagtaaggcaattgagtgagctgaattggagacagtatgcagcagaggaagtcacagagatgtcaggtcatcttcttaagtatccagttcaagttgatagaacaggcaaagtgagttctcttcctggatgcgagacattcccagatctgggtggcaagatcataggatcgttccttgcactacaagaaaacctcaccatatgaaacttaccttgtaggcttgtagtgatcaacatttgttctttatttcttccacttcaagaaatctctctcagtgtgatctgattgaaagtgtgcctttagggtctagttgtgcttttcaaatttatgagctgtaaatctatttattacaaaatttcaattgatctatcaaagtgtgtgttttggatttttac

SEQ ID NO: 49926 - protein, 858 aa, Arabidopsis thaliana
  peptide (1)..(858): Ceres Seq. ID no. 12591313
  misc_feature (44)..(147): Pfam Name: C2 domain Pfam Description: C2 domain
  misc_feature (72)..(505): Homolog of NCBI NO: 30690492 NR Description: phospholipase D -related [Arabidopsis thaliana]
  misc_feature (93)..(673): Homolog of NCBI NO: 7488147 NR Description: probable phospholipase D (EC 3.1.4.4)
  misc_feature (37)..(64): Homolog of NCBI NO: 7486399 NR Description: hypothetical protein F4B14.60 - Arabidopsis
  misc_feature (458)..(857): Homolog of NCBI NO: 7486399 NR Description: hypothetical protein F4B14.60 - Arabidopsis
  misc_feature (72)..(485): Homolog of NCBI NO: 7486399 NR Description: hypothetical protein F4B14.60 - Arabidopsis
  misc_feature (37)..(64): Homolog of NCBI NO: 30690488 NR Description: phospholipase D -related [Arabidopsis thaliana]
  misc_feature (458)..(857): Homolog of NCBI NO: 30690488 NR Description: phospholipase D -related [Arabidopsis thaliana]
  misc_feature (72)..(505): Homolog of NCBI NO: 30690488 NR Description: phospholipase D -related [Arabidopsis thaliana]
  misc_feature (17)..(673): Homolog of NCBI NO: 20138867 NR Description: Phospholipase D beta 2 (AtPLDbeta2) (PLD beta 2)
  misc_feature (15)..(858): Homolog of NCBI NO: 37536230 NR Description: putative phospholipase [Oryza sativa (japonica
MAYHPAYTETMSMGGGSSHGGGQQYVPFATSSGSLRVELLHGNLDIWVKEAKHLPNMDGFHNRLGGMLSGLGRKKVEGEKSSKITSDPYVTVSISGAVIGRTFVISNSENPVWMQHFDVPVAHSAAEVHFVVKDSDIIGSQIMGAVGIPTEQLCSGNRIEGLFPILNSSGKPCKQGAVLGLSIQYTPMERMRLYQMGVGSGNECVGVPGTYFPLRKGGRVTLYQDAHVDDGTLPSVHLDGGIQYRHGKCWEDMADAIRQARRLIYITGWSVFHPVRLVRRTNDPTEGTLGELLKVKSQEGVRVLVLVWDDPTSRSLLGFKTQGVMNTSDEETRRFFKHSSVQVLLCPRSGGKGHSFIKKSEVGTIYTHHQKTVIVDAEAAQNRRKIVAFVGGLDLCNGRFDTPKHPLFRTLKTLHKDDFHNPNFVTTADDGPREPWHDLHSKIDGPAAYDVLANFEERWMKASKPRGIGKLKSSSDDSLLRIDRIPDIVGLSEASSANDNDPESWHVQVFRSIDSSSVKGFPKDPKEATGRNLLCGKNILIDMSIHAAYVKAIRSAQHFIYIENQYFLGSSFNWDSNKDLGANNLIPMEIALKIANKIRAREKFAAYIVIPMWPEGAPTSNPIQRILYWQHKTMQMMYQTIYKALVEVGLDSQFEPQDFLNFFCLGTREVPVGTVSVYNSPRKPPQPNANANAAQVQALKSRRFMIYVHSKGMVVDDEFVLIGSANINQRSLEGTRDTEIAMGGYQPHYSWAMKGSRPHGQIFGYRMSLWAEHLGFLEQGFEEPENMECVRRVRQLSELNWRQYAAEEVTEMSGHLLKYPVQVDRTGKVSSLPGCETFPDLGGKIIGSFLALQENLTI

SEQ ID NO: 49927 - protein, 848 aa, Arabidopsis thaliana
  peptide (1)..(848): Ceres Seq. ID no. 12591314
  misc_feature (34)..(137): Pfam Name: C2 domain Pfam Description: C2 domain
  misc_feature (62)..(495): Homolog of NCBI NO: 30690492 NR Description: phospholipase D -related [Arabidopsis thaliana]
  misc_feature (83)..(663): Homolog of NCBI NO: 7488147 NR Description: probable phospholipase D (EC 3.1.4.4)
  misc_feature (27)..(54): Homolog of NCBI NO: 7486399 NR Description: hypothetical protein F4B14.60 - Arabidopsis
  misc_feature (448)..(847): Homolog of NCBI NO: 7486399 NR Description: hypothetical protein F4B14.60 - Arabidopsis
  misc_feature (62)..(475): Homolog of NCBI NO: 7486399 NR Description: hypothetical protein F4B14.60 - Arabidopsis
  misc_feature (27)..(54): Homolog of NCBI NO: 30690488 NR Description: phospholipase D -related [Arabidopsis thaliana]
  misc_feature (448)..(847): Homolog of NCBI NO: 30690488 NR Description: phospholipase D -related [Arabidopsis thaliana]
  misc_feature (62)..(495): Homolog of NCBI NO: 30690488 NR Description: phospholipase D -related [Arabidopsis thaliana]
  misc_feature (7)..(663): Homolog of NCBI NO: 20138867 NR Description: Phospholipase D beta 2 (AtPLDbeta2) (PLD beta 2)
  misc_feature (5)..(848): Homolog of NCBI NO: 37536230 NR Description: putative phospholipase [Oryza sativa (japonica
MSMGGGSSHGGGQQYVPFATSSGSLRVELLHGNLDIWVKEAKHLPNMDGFHNRLGGMLSGLGRKKVEGEKSSKITSDPYVTVSISGAVIGRTFVISNSENPVWMQHFDVPVAHSAAEVHFVVKDSDIIGSQIMGAVGIPTEQLCSGNRIEGLFPILNSSGKPCKQGAVLGLSIQYTPMERMRLYQMGVGSGNECVGVPGTYFPLRKGGRVTLYQDAHVDDGTLPSVHLDGGIQYRHGKCWEDMADAIRQARRLIYITGWSVFHPVRLVRRTNDPTEGTLGELLKVKSQEGVRVLVLVWDDPTSRSLLGFKTQGVMNTSDEETRRFFKHSSVQVLLCPRSGGKGHSFIKKSEVGTIYTHHQKTVIVDAEAAQNRRKIVAFVGGLDLCNGRFDTPKHPLFRTLKTLHKDDFHNPNFVTTADDGPREPWHDLHSKIDGPAAYDVLANFEERWMKASKPRGIGKLKSSSDDSLLRIDRIPDIVGLSEASSANDNDPESWHVQVFRSIDSSSVKGFPKDPKEATGRNLLCGKNILIDMSIHAAYVKAIRSAQHFIYIENQYFLGSSFNWDSNKDLGANNLIPMEIALKIANKIRAREKFAAYIVIPMWPEGAPTSNPIQRILYWQHKTMQMMYQTIYKALVEVGLDSQFEPQDFLNFFCLGTREVPVGTVSVYNSPRKPPQPNANANAAQVQALKSRRFMIYVHSKGMVVDDEFVLIGSANINQRSLEGTRDTEIAMGGYQPHYSWAMKGSRPHGQIFGYRMSLWAEHLGFLEQGFEEPENMECVRRVRQLSELNWRQYAAEEVTEMSGHLLKYPVQVDRTGKVSSLPGCETFPDLGGKIIGSFLALQENLTI

SEQ ID NO: 49928 - protein, 846 aa, Arabidopsis thaliana
  peptide (1)..(846): Ceres Seq. ID no. 12591315
  misc_feature (32)..(135): Pfam Name: C2 domain Pfam Description: C2 domain
  misc_feature (60)..(493): Homolog of NCBI NO: 30690492 NR Description: phospholipase D -related [Arabidopsis thaliana]
  misc_feature (81)..(661): Homolog of NCBI NO: 7488147 NR Description: probable phospholipase D (EC 3.1.4.4)
  misc_feature (25)..(52): Homolog of NCBI NO: 7486399 NR Description: hypothetical protein F4B14.60 - Arabidopsis
  misc_feature (446)..(845): Homolog of NCBI NO: 7486399 NR Description: hypothetical protein F4B14.60 - Arabidopsis
  misc_feature (60)..(473): Homolog of NCBI NO: 7486399 NR Description: hypothetical protein F4B14.60 - Arabidopsis
  misc_feature (25)..(52): Homolog of NCBI NO: 30690488 NR Description: phospholipase D -related [Arabidopsis thaliana]
  misc_feature (446)..(845): Homolog of NCBI NO: 30690488 NR Description: phospholipase D -related [Arabidopsis thaliana]
  misc_feature (60)..(493): Homolog of NCBI NO: 30690488 NR Description: phospholipase D -related [Arabidopsis thaliana]
  misc_feature (5)..(661): Homolog of NCBI NO: 20138867 NR Description: Phospholipase D beta 2 (AtPLDbeta2) (PLD beta 2)
  misc_feature (3)..(846): Homolog of NCBI NO: 37536230 NR Description: putative phospholipase [Oryza sativa (japonica
MGGGSSHGGGQQYVPFATSSGSLRVELLHGNLDIWVKEAKHLPNMDGFHNRLGGMLSGLGRKKVEGEKSSKITSDPYVTVSISGAVIGRTFVISNSENPVWMQHFDVPVAHSAAEVHFVVKDSDIIGSQIMGAVGIPTEQLCSGNRIEGLFPILNSSGKPCKQGAVLGLSIQYTPMERMRLYQMGVGSGNECVGVPGTYFPLRKGGRVTLYQDAHVDDGTLPSVHLDGGIQYRHGKCWEDMADAIRQARRLIYITGWSVFHPVRLVRRTNDPTEGTLGELLKVKSQEGVRVLVLVWDDPTSRSLLGFKTQGVMNTSDEETRRFFKHSSVQVLLCPRSGGKGHSFIKKSEVGTIYTHHQKTVIVDAEAAQNRRKIVAFVGGLDLCNGRFDTPKHPLFRTLKTLHKDDFHNPNFVTTADDGPREPWHDLHSKIDGPAAYDVLANFEERWMKASKPRGIGKLKSSSDDSLLRIDRIPDIVGLSEASSANDNDPESWHVQVFRSIDSSSVKGFPKDPKEATGRNLLCGKNILIDMSIHAAYVKAIRSAQHFIYIENQYFLGSSFNWDSNKDLGANNLIPMEIALKIANKIRAREKFAAYIVIPMWPEGAPTSNPIQRILYWQHKTMQMMYQTIYKALVEVGLDSQFEPQDFLNFFCLGTREVPVGTVSVYNSPRKPPQPNANANAAQVQALKSRRFMIYVHSKGMVVDDEFVLIGSANINQRSLEGTRDTEIAMGGYQPHYSWAMKGSRPHGQIFGYRMSLWAEHLGFLEQGFEEPENMECVRRVRQLSELNWRQYAAEEVTEMSGHLLKYPVQVDRTGKVSSLPGCETFPDLGGKIIGSFLALQENLTI

SEQ ID NO: 49929 - DNA, 1754 bp, Arabidopsis thaliana; identical to SEQ ID NO: 47475
  misc_feature (1)..(1754): Ceres Seq. ID no. 13592310
  misc_feature: MA Experiment ID: 20000794 Result: Up-regulated in Transcription
  misc_feature: MA Experiment 20000794 PARAMETER Experiment Name: At_Petals_P Parameter: Age (day) Value: 23-25 days
  misc_feature: MA Experiment 20000794 PARAMETER Experiment Name: At_Petals_P Parameter: Plant Line Value: WS
  misc_feature: MA Experiment 20000794 PARAMETER Experiment Name: At_Petals_P Parameter: Tissue Value: Petals vs. Whole plant
  misc_feature: MA Experiment ID: 20001557 Result: Down-regulated in Transcription
  misc_feature: MA Experiment 20001557 PARAMETER Experiment Name: At_Drought_Soil_Dry_P Parameter: Age (day) Value: 27
  misc_feature: MA Experiment 20001557 PARAMETER Experiment Name: At_Drought_Soil_Dry_P Parameter: Organism Value: A. thaliana
  misc_feature: MA Experiment 20001557 PARAMETER Experiment Name: At_Drought_Soil_Dry_P Parameter: Plant Line Value: WS
  misc_feature: MA Experiment 20001557 PARAMETER Experiment Name: At_Drought_Soil_Dry_P Parameter: Post Timepoint (hr) Value: 3
  misc_feature: MA Experiment 20001557 PARAMETER Experiment Name: At_Drought_Soil_Dry_P Parameter: Post-Treatment Value: Re-Water vs. No Drought
  misc_feature: MA Experiment 20001557 PARAMETER Experiment Name: At_Drought_Soil_Dry_P Parameter: Timepoint (day) Value: 13
  misc_feature: MA Experiment 20001557 PARAMETER Experiment Name: At_Drought_Soil_Dry_P Parameter: Treatment Value: Drought vs. No Drought

SEQ ID NO: 49930 - protein, 446 aa, Arabidopsis thaliana; identical to SEQ ID NO: 47476
  peptide (1)..(446): Ceres Seq. ID no. 13592311
  misc_feature (11)..(264): Pfam Name: Protein kinase domain Pfam Description: Protein kinase domain
  misc_feature (11)..(264): Pfam Name: Protein kinase domain Pfam Description: Protein kinase domain
  misc_feature (3)..(437): Homolog of NCBI NO: 30688193 NR Description: NAF specific protein kinase family [Arabidopsis
  misc_feature (2)..(433): Homolog of NCBI NO: 7446372 NR Description: probable serine/threonine kinase (EC 2.7.1.-)
  misc_feature (1)..(433): Homolog of NCBI NO: 30683336 NR Description: CBL-interacting protein kinase 3 [Arabidopsis
  misc_feature (2)..(433): Homolog of NCBI NO: 7446371 NR Description: probable serine/threonine kinase (EC 2.7.1.-)
  misc_feature (7)..(435): Homolog of NCBI NO: 34393400 NR Description: putative CBL-interacting protein kinase 23
  misc_feature (3)..(437): Homolog of NCBI NO: 30688193 NR Description: NAF specific protein kinase family [Arabidopsis
  misc_feature (1)..(433): Homolog of NCBI NO: 30683336 NR Description: CBL-interacting protein kinase 3 [Arabidopsis
  misc_feature (7)..(435): Homolog of NCBI NO: 34393400 NR Description: putative CBL-interacting protein kinase 23
  misc_feature (1)..(446): Homolog of NCBI NO: 15238499 NR Description: CBL-interacting protein kinase 24 [Arabidopsis
  misc_feature (10)..(371): Homolog of NCBI NO: 7682805 NR Description: contains similarity to Pfam family PF00069
  misc_feature (5)..(442): Homolog of NCBI NO: 15233820 NR Description: CBL-interacting protein kinase 8 [Arabidopsis
  misc_feature (7)..(433): Homolog of NCBI NO: 25387051 NR Description: probable serine/threonine kinase
  misc_feature (7)..(433): Homolog of NCBI NO: 18397430 NR Description: CBL-interacting protein kinase 23 [Arabidopsis
  misc_feature (2)..(433): Homolog of NCBI NO: 7446371 NR Description: probable serine/threonine kinase (EC 2.7.1.-)
  misc_feature (2)..(433): Homolog of NCBI NO: 7446372 NR Description: probable serine/threonine kinase (EC 2.7.1.-)
  misc_feature (7)..(433): Homolog of NCBI NO: 18397430 NR Description: CBL-interacting protein kinase 23 [Arabidopsis
  misc_feature (7)..(433): Homolog of NCBI NO: 25387051 NR Description: probable serine/threonine kinase
  misc_feature (5)..(442): Homolog of NCBI NO: 15233820 NR Description: CBL-interacting protein kinase 8 [Arabidopsis
  misc_feature (10)..(371): Homolog of NCBI NO: 7682805 NR Description: contains similarity to Pfam family PF00069
  misc_feature (1)..(446): Homolog of NCBI NO: 15238499 NR Description: CBL-interacting protein kinase 24 [Arabidopsis

SEQ ID NO: 49931 - protein, 442 aa, Arabidopsis thaliana; identical to SEQ ID NO: 47477
  peptide (1)..(442): Ceres Seq. ID no. 13592312
  misc_feature (7)..(260): Pfam Name: Protein kinase domain Pfam Description: Protein kinase domain
  misc_feature (7)..(260): Pfam Name: Protein kinase domain Pfam Description: Protein kinase domain
  misc_feature (1)..(433): Homolog of NCBI NO: 30688193 NR Description: NAF specific protein kinase family [Arabidopsis
  misc_feature (1)..(429): Homolog of NCBI NO: 7446372 NR Description: probable serine/threonine kinase (EC 2.7.1.-)
  misc_feature (1)..(429): Homolog of NCBI NO: 30683336 NR Description: CBL-interacting protein kinase 3 [Arabidopsis
  misc_feature (1)..(429): Homolog of NCBI NO: 7446371 NR Description: probable serine/threonine kinase (EC 2.7.1.-)
  misc_feature (3)..(431): Homolog of NCBI NO: 34393400 NR Description: putative CBL-interacting protein kinase 23
  misc_feature (1)..(433): Homolog of NCBI NO: 30688193 NR Description: NAF specific protein kinase family [Arabidopsis
  misc_feature (1)..(429): Homolog of NCBI NO: 30683336 NR Description: CBL-interacting protein kinase 3 [Arabidopsis
  misc_feature (3)..(431): Homolog of NCBI NO: 34393400 NR Description: putative CBL-interacting protein kinase 23
  misc_feature (1)..(442): Homolog of NCBI NO: 15238499 NR Description: CBL-interacting protein kinase 24 [Arabidopsis
  misc_feature (6)..(367): Homolog of NCBI NO: 7682805 NR Description: contains similarity to Pfam family PF00069
  misc_feature (1)..(438): Homolog of NCBI NO: 15233820 NR Description: CBL-interacting protein kinase 8 [Arabidopsis
  misc_feature (3)..(429): Homolog of NCBI NO: 25387051 NR Description: probable serine/threonine kinase
  misc_feature (3)..(429): Homolog of NCBI NO: 18397430 NR Description: CBL-interacting protein kinase 23 [Arabidopsis
  misc_feature (1)..(429): Homolog of NCBI NO: 7446371 NR Description: probable serine/threonine kinase (EC 2.7.1.-)
  misc_feature (1)..(429): Homolog of NCBI NO: 7446372 NR Description: probable serine/threonine kinase (EC 2.7.1.-)
  misc_feature (3)..(429): Homolog of NCBI NO: 18397430 NR Description: CBL-interacting protein kinase 23 [Arabidopsis
  misc_feature (3)..(429): Homolog of NCBI NO: 25387051 NR Description: probable serine/threonine kinase
  misc_feature (1)..(438): Homolog of NCBI NO: 15233820 NR Description: CBL-interacting protein kinase 8 [Arabidopsis
  misc_feature (6)..(367): Homolog of NCBI NO: 7682805 NR Description: contains similarity to Pfam family PF00069
  misc_feature (1)..(442): Homolog of NCBI NO: 15238499 NR Description: CBL-interacting protein kinase 24 [Arabidopsis

SEQ ID NO: 49932 - protein, 405 aa, Arabidopsis thaliana; identical to SEQ ID NO: 47478
  peptide (1)..(405): Ceres Seq. ID no. 13592313
  misc_feature (1)..(223): Pfam Name: Protein kinase domain Pfam Description: Protein kinase domain
  misc_feature (1)..(223): Pfam Name: Protein kinase domain Pfam Description: Protein kinase domain
  misc_feature (1)..(396): Homolog of NCBI NO: 30688193 NR Description: NAF specific protein kinase family [Arabidopsis
  misc_feature (1)..(392): Homolog of NCBI NO: 7446372 NR Description: probable serine/threonine kinase (EC 2.7.1.-)
  misc_feature (1)..(392): Homolog of NCBI NO: 30683336 NR Description: CBL-interacting protein kinase 3 [Arabidopsis
  misc_feature (1)..(392): Homolog of NCBI NO: 7446371 NR Description: probable serine/threonine kinase (EC 2.7.1.-)
  misc_feature (1)..(394): Homolog of NCBI NO: 34393400 NR Description: putative CBL-interacting protein kinase 23
  misc_feature (1)..(396): Homolog of NCBI NO: 30688193 NR Description: NAF specific protein kinase family [Arabidopsis
  misc_feature (1)..(392): Homolog of NCBI NO: 30683336 NR Description: CBL-interacting protein kinase 3 [Arabidopsis
  misc_feature (1)..(394): Homolog of NCBI NO: 34393400 NR Description: putative CBL-interacting protein kinase 23
  misc_feature (1)..(405): Homolog of NCBI NO: 15238499 NR Description: CBL-interacting protein kinase 24 [Arabidopsis
  misc_feature (1)..(330): Homolog of NCBI NO: 7682805 NR Description: contains similarity to Pfam family PF00069
  misc_feature (1)..(401): Homolog of NCBI NO: 15233820 NR Description: CBL-interacting protein kinase 8 [Arabidopsis
  misc_feature (1)..(392): Homolog of NCBI NO: 25387051 NR Description: probable serine/threonine kinase
  misc_feature (1)..(392): Homolog of NCBI NO: 18397430 NR Description: CBL-interacting protein kinase 23 [Arabidopsis
  misc_feature (1)..(392): Homolog of NCBI NO: 7446371 NR Description: probable serine/threonine kinase (EC 2.7.1.-)
  misc_feature (1)..(392): Homolog of NCBI NO: 7446372 NR Description: probable serine/threonine kinase (EC 2.7.1.-)
  misc_feature (1)..(392): Homolog of NCBI NO: 18397430 NR Description: CBL-interacting protein kinase 23 [Arabidopsis
  misc_feature (1)..(392): Homolog of NCBI NO: 25387051 NR Description: probable serine/threonine kinase
  misc_feature (1)..(401): Homolog of NCBI NO: 15233820 NR Description: CBL-interacting protein kinase 8 [Arabidopsis
  misc_feature (1)..(330): Homolog of NCBI NO: 7682805 NR Description: contains similarity to Pfam family PF00069
  misc_feature (1)..(405): Homolog of NCBI NO: 15238499 NR Description: CBL-interacting protein kinase 24 [Arabidopsis

SEQ ID NO: 49933 - DNA, 642 bp, Arabidopsis thaliana
  misc_feature (1)..(642): Ceres Seq. ID no. 13588078
  misc_feature: MA Experiment ID: 20000184 Result: Up-regulated in Transcription
  misc_feature: MA Experiment 20000184 PARAMETER Experiment Name: At_Shoots__P Parameter: Age (day) Value: 7
  misc_feature: MA Experiment 20000184 PARAMETER Experiment Name: At_Shoots__P Parameter: Tissue Value: Shoots vs. Whole Plant
  misc_feature: MA Experiment ID: 20000438 Result: Up-regulated in Transcription
  misc_feature: MA Experiment 20000438 PARAMETER Experiment Name: At_Shoots__P Parameter: Age (day) Value: 14
  misc_feature: MA Experiment 20000438 PARAMETER Experiment Name: At_Shoots__P Parameter: Tissue Value: Shoots vs. Whole Plant
  misc_feature: MA Experiment ID: 20000460 Result: Down-regulated in Transcription
  misc_feature: MA Experiment 20000460 PARAMETER Experiment Name: At_10percent_PEG_P Parameter: Age (day) Value: 12
  misc_feature: MA Experiment 20000460 PARAMETER Experiment Name: At_10percent_PEG_P Parameter: Organism Value: A. thaliana
  misc_feature: MA Experiment 20000460 PARAMETER Experiment Name: At_10percent_PEG_P Parameter: Plant Line Value: WS
  misc_feature: MA Experiment 20000460 PARAMETER Experiment Name: At_10percent_PEG_P Parameter: Timepoint (day) Value: 12
  misc_feature: MA Experiment 20000460 PARAMETER Experiment Name: At_10percent_PEG_P Parameter: Tissue Value: Whole Plant
  misc_feature: MA Experiment 20000460 PARAMETER Experiment Name: At_10percent_PEG_P Parameter: Treatment Value: 10percent PEG vs. No Treatment
  misc_feature: MA Experiment ID: 20000527 Result: Down-regulated in Transcription
  misc_feature: MA Experiment 20000527 PARAMETER Experiment Name: At_10percent_PEG_P Parameter: Age (day) Value: 20
  misc_feature: MA Experiment 20000527 PARAMETER Experiment Name: At_10percent_PEG_P Parameter: Organism Value: A. thaliana
  misc_feature: MA Experiment 20000527 PARAMETER Experiment Name: At_10percent_PEG_P Parameter: Plant Line Value: WS
  misc_feature: MA Experiment 20000527 PARAMETER Experiment Name: At_10percent_PEG_P Parameter: Timepoint (day) Value: 20
  misc_feature: MA Experiment 20000527 PARAMETER Experiment Name: At_10percent_PEG_P Parameter: Tissue Value: Whole Plant
  misc_feature: MA Experiment 20000527 PARAMETER Experiment Name: At_10percent_PEG_P Parameter: Treatment Value: 10percent PEG vs. No Treatment
  misc_feature: MA Experiment ID: 20001450 Result: Up-regulated in Transcription
  misc_feature: MA Experiment 20001450 PARAMETER Experiment Name: At_Far-red-induction_P Parameter: Age (day) Value: 7
  misc_feature: MA Experiment 20001450 PARAMETER Experiment Name: At_Far-red-induction_P Parameter: Light Value: Far-red vs. White
  misc_feature: MA Experiment 20001450 PARAMETER Experiment Name: At_Far-red-induction_P Parameter: Organism Value: A. thaliana
  misc_feature: MA Experiment 20001450 PARAMETER Experiment Name: At_Far-red-induction_P Parameter: Plant Line Value: Columbia
  misc_feature: MA Experiment 20001450 PARAMETER Experiment Name: At_Far-red-induction_P Parameter: Timepoint (hr) Value: 8
  misc_feature: MA Experiment 20001450 PARAMETER Experiment Name: At_Far-red-induction_P Parameter: Tissue Value: Whole Plant
  misc_feature: MA Experiment ID: 20001451 Result: Up-regulated in Transcription
  misc_feature: MA Experiment 20001451 PARAMETER Experiment Name: At_Far-red-induction_P Parameter: Age (day) Value: 7
  misc_feature: MA Experiment 20001451 PARAMETER Experiment Name: At_Far-red-induction_P Parameter: Light Value: Far-red vs. White
  misc_feature: MA Experiment 20001451 PARAMETER Experiment Name: At_Far-red-induction_P Parameter: Organism Value: A. thaliana
  misc_feature: MA Experiment 20001451 PARAMETER Experiment Name: At_Far-red-induction_P Parameter: Plant Line Value: Columbia
  misc_feature: MA Experiment 20001451 PARAMETER Experiment Name: At_Far-red-induction_P Parameter: Timepoint (hr) Value: 24
  misc_feature: MA Experiment 20001451 PARAMETER Experiment Name: At_Far-red-induction_P Parameter: Tissue Value: Whole Plant
  misc_feature: MA Experiment ID: 20001556 Result: Down-regulated in Transcription
  misc_feature: MA Experiment 20001556 PARAMETER Experiment Name: At_Drought_Soil_Dry_P Parameter: Age (day) Value: 26
  misc_feature: MA Experiment 20001556 PARAMETER Experiment Name: At_Drought_Soil_Dry_P Parameter: Organism Value: A. thaliana
  misc_feature: MA Experiment 20001556 PARAMETER Experiment Name: At_Drought_Soil_Dry_P Parameter: Plant Line Value: WS
  misc_feature: MA Experiment 20001556 PARAMETER Experiment Name: At_Drought_Soil_Dry_P Parameter: Post Timepoint (hr) Value: None
  misc_feature: MA Experiment 20001556 PARAMETER Experiment Name: At_Drought_Soil_Dry_P Parameter: Post-Treatment Value: None
  misc_feature: MA Experiment 20001556 PARAMETER Experiment Name: At_Drought_Soil_Dry_P Parameter: Timepoint (day) Value: 12
  misc_feature: MA Experiment 20001556 PARAMETER Experiment Name: At_Drought_Soil_Dry_P Parameter: Treatment Value: Drought vs. No Drought
  misc_feature: MA Experiment ID: 20001557 Result: Down-regulated in Transcription
  misc_feature: MA Experiment 20001557 PARAMETER Experiment Name: At_Drought_Soil_Dry_P Parameter: Age (day) Value: 27
  misc_feature: MA Experiment 20001557 PARAMETER Experiment Name: At_Drought_Soil_Dry_P Parameter: Organism Value: A. thaliana
  misc_feature: MA Experiment 20001557 PARAMETER Experiment Name: At_Drought_Soil_Dry_P Parameter: Plant Line Value: WS
  misc_feature: MA Experiment 20001557 PARAMETER Experiment Name: At_Drought_Soil_Dry_P Parameter: Post Timepoint (hr) Value: 3
  misc_feature: MA Experiment 20001557 PARAMETER Experiment Name: At_Drought_Soil_Dry_P Parameter: Post-Treatment Value: Re-Water vs. No Drought
  misc_feature: MA Experiment 20001557 PARAMETER Experiment Name: At_Drought_Soil_Dry_P Parameter: Timepoint (day) Value: 13
  misc_feature: MA Experiment 20001557 PARAMETER Experiment Name: At_Drought_Soil_Dry_P Parameter: Treatment Value: Drought vs. No Drought
  misc_feature: MA Experiment ID: 20001558 Result: Down-regulated in Transcription
  misc_feature: MA Experiment 20001558 PARAMETER Experiment Name: At_Drought_Soil_Dry_P Parameter: Age (day) Value: 27
  misc_feature: MA Experiment 20001558 PARAMETER Experiment Name: At_Drought_Soil_Dry_P Parameter: Organism Value: A. thaliana
  misc_feature: MA Experiment 20001558 PARAMETER Experiment Name: At_Drought_Soil_Dry_P Parameter: Plant Line Value: WS
  misc_feature: MA Experiment 20001558 PARAMETER Experiment Name: At_Drought_Soil_Dry_P Parameter: Post Timepoint (hr) Value: 6
  misc_feature: MA Experiment 20001558 PARAMETER Experiment Name: At_Drought_Soil_Dry_P Parameter: Post-Treatment Value: Re-Water vs. No Drought
  misc_feature: MA Experiment 20001558 PARAMETER Experiment Name: At_Drought_Soil_Dry_P Parameter: Timepoint (day) Value: 13
  misc_feature: MA Experiment 20001558 PARAMETER Experiment Name: At_Drought_Soil_Dry_P Parameter: Treatment Value: Drought vs. No Drought
  misc_feature: MA Experiment ID: 20001905 Result: Down-regulated in Transcription
  misc_feature: MA Experiment 20001905 PARAMETER Experiment Name: At_Drought_Reproduction_P Parameter: Age (day) Value: 40
  misc_feature: MA Experiment 20001905 PARAMETER Experiment Name: At_Drought_Reproduction_P Parameter: Organism Value: A. thaliana
  misc_feature: MA Experiment 20001905 PARAMETER Experiment Name: At_Drought_Reproduction_P Parameter: Plant Line Value: WS
  misc_feature: MA Experiment 20001905 PARAMETER Experiment Name: At_Drought_Reproduction_P Parameter: Timepoint (day) Value: 10
  misc_feature: MA Experiment 20001905 PARAMETER Experiment Name: At_Drought_Reproduction_P Parameter: Tissue Value: Rosettes
  misc_feature: MA Experiment 20001905 PARAMETER Experiment Name: At_Drought_Reproduction_P Parameter: Treatment Value: Drought vs. No Drought
  misc_feature: MA Experiment ID: 20001911 Result: Down-regulated in Transcription
  misc_feature: MA Experiment 20001911 PARAMETER Experiment Name: At_Drought_Reproduction_P Parameter: Age (day) Value: 40
  misc_feature: MA Experiment 20001911 PARAMETER Experiment Name: At_Drought_Reproduction_P Parameter: Organism Value: A. thaliana
  misc_feature: MA Experiment 20001911 PARAMETER Experiment Name: At_Drought_Reproduction_P Parameter: Plant Line Value: WS
  misc_feature: MA Experiment 20001911 PARAMETER Experiment Name: At_Drought_Reproduction_P Parameter: Timepoint (day) Value: 10
  misc_feature: MA Experiment 20001911 PARAMETER Experiment Name: At_Drought_Reproduction_P Parameter: Tissue Value: Flowers
  misc_feature: MA Experiment 20001911 PARAMETER Experiment Name: At_Drought_Reproduction_P Parameter: Treatment Value: Drought vs. No Drought
gaattcctttcgcttaccagtctcttgtcttctcaggttgttagagatacatagatagaaatatgagctggaccggaggagattggctatgtggtgcgtgtcagcacgcaaacttcaagaaaagagaatcatgtcaaaaatgcggataccccaaatttggaggggttgatgtgtcaacgtacttgtacaacaggaccgaagttatggctggtgattggtattgtggtgcattgaattgtgggagccacaattacgcgagccgaacaagttgttaccgatgtggaatgatcaaagtcgagtatacggaacagtactatggagctcaaatggttgcttacgggaatgatggcgcagcttgtcctcccggatggaaaactggcgattgggtttgtcctagggtgggatgtggggttcataactacgcaagcagggcagaatgcttcaaatgcaagacaacaagagattatggtggcgtctaaatggacgagaaagagctaatgaagaatctcttgttttaattatacctttcaacaagtgtttctactttctaacatgcatgacgctttcttacgttgacttgaaatcaattgaaagtttagactcgtgcaaattaacgtaagtacaaatagttgcaaacaaaat

SEQ ID NO: 49934 - protein, 138 aa, Arabidopsis thaliana
  peptide (1)..(138): Ceres Seq. ID no. 13588079
  misc_feature (104)..(135): Pfam Name: Zn-finger in Ran binding protein and others Pfam Description: Zn-finger in Ran binding protein and others
  misc_feature (6)..(79): Homolog of NCBI NO: 15232662 NR Description: zinc finger protein -related [Arabidopsis
  misc_feature (29)..(135): Homolog of NCBI NO: 21595771 NR Description: putative zinc finger protein [Arabidopsis
  misc_feature (29)..(135): Homolog of NCBI NO: 15232662 NR Description: zinc finger protein -related [Arabidopsis
  misc_feature (29)..(136): Homolog of NCBI NO: 28849863 NR Description: zinc finger transcription factor ZFP30
  misc_feature (6)..(135): Homolog of NCBI NO: 34913970 NR Description: B1110C07.23 [Oryza sativa (japonica
  misc_feature (1)..(138): Homolog of NCBI NO: 5803246 NR Description: ESTs AU077984(C62969),D41648(S4289), correspond to a region of the predicted gene.~Similar to putative
  misc_feature (1)..(138): Homolog of NCBI NO: 5679336 NR Description: putative zinc finger protein [Oryza sativa]
  misc_feature (93)..(134): Homolog of NCBI NO: 15239445 NR Description: expressed protein [Arabidopsis thaliana]
  misc_feature (6)..(81): Homolog of NCBI NO: 15239445 NR Description: expressed protein [Arabidopsis thaliana]
  misc_feature (1)..(138): Homolog of NCBI NO: 15225776 NR Description: second messenger-dependent protein kinase
MSWTGGDWLCGACQHANFKKRESCQKCGYPKFGGVDVSTYLYNRTEVMAGDWYCGALNCGSHNYASRTSCYRCGMIKVEYTEQYYGAQMVAYGNDGAACPPGWKTGDWVCPRVGCGVHNYASRAECFKCKTTRDYGGV

SEQ ID NO: 49935 - protein, 91 aa, Arabidopsis thaliana
  peptide (1)..(91): Ceres Seq. ID no. 13588080
  misc_feature (57)..(88): Pfam Name: Zn-finger in Ran binding protein and others Pfam Description: Zn-finger in Ran binding protein and others
  misc_feature (1)..(32): Homolog of NCBI NO: 15232662 NR Description: zinc finger protein -related [Arabidopsis
  misc_feature (1)..(88): Homolog of NCBI NO: 21595771 NR Description: putative zinc finger protein [Arabidopsis
  misc_feature (1)..(88): Homolog of NCBI NO: 15232662 NR Description: zinc finger protein -related [Arabidopsis
  misc_feature (1)..(89): Homolog of NCBI NO: 28849863 NR Description: zinc finger transcription factor ZFP30
  misc_feature (1)..(88): Homolog of NCBI NO: 34913970 NR Description: B1110C07.23 [Oryza sativa (japonica
  misc_feature (1)..(91): Homolog of NCBI NO: 5803246 NR Description: ESTs AU077984(C62969),D41648(S4289), correspond to a region of the predicted gene.~Similar to putative
  misc_feature (1)..(91): Homolog of NCBI NO: 5679336 NR Description: putative zinc finger protein [Oryza sativa]
  misc_feature (46)..(87): Homolog of NCBI NO: 15239445 NR Description: expressed protein [Arabidopsis thaliana]
  misc_feature (1)..(34): Homolog of NCBI NO: 15239445 NR Description: expressed protein [Arabidopsis thaliana]
  misc_feature (1)..(91): Homolog of NCBI NO: 15225776 NR Description: second messenger-dependent protein kinase
MAGDWYCGALNCGSHNYASRTSCYRCGMIKVEYTEQYYGAQMVAYGNDGAACPPGWKTGDWVCPRVGCGVHNYASRAECFKCKTTRDYGGV

SEQ ID NO: 49936 - DNA, 993 bp, Arabidopsis thaliana; identical to SEQ ID NO: 35133
  misc_feature (1)..(993): Ceres Seq. ID no. 12602231
  misc_feature: MA Experiment ID: 108435 Result: Down-regulated in Transcription
  misc_feature: MA Experiment 108435 PARAMETER Experiment Name: At_stm_Mutants_cDNA_P Parameter: Plant Line Value: wt Landsburg vs stm
  misc_feature: MA Experiment 108435 PARAMETER Experiment Name: At_stm_Mutants_cDNA_P Parameter: Tissue Value: Shoot Apical Meristem Region
  misc_feature: MA Experiment ID: 108461 Result: Up-regulated in Transcription
  misc_feature: MA Experiment 108461 PARAMETER Experiment Name: At_Germinating_Seeds_cDNA_P Parameter: Age (day) Value: 1 vs. 0
  misc_feature: MA Experiment 108461 PARAMETER Experiment Name: At_Germinating_Seeds_cDNA_P Parameter: Tissue Value: Germinating Seeds
  misc_feature: MA Experiment ID: 108462 Result: Up-regulated in Transcription
  misc_feature: MA Experiment 108462 PARAMETER Experiment Name: At_Germinating_Seeds_cDNA_P Parameter: Age (day) Value: 2 vs. 0
  misc_feature: MA Experiment 108462 PARAMETER Experiment Name: At_Germinating_Seeds_cDNA_P Parameter: Tissue Value: Germinating Seeds
  misc_feature: MA Experiment ID: 108463 Result: Up-regulated in Transcription
  misc_feature: MA Experiment 108463 PARAMETER Experiment Name: At_Germinating_Seeds_cDNA_P Parameter: Age (day) Value: 3 vs. 0
  misc_feature: MA Experiment 108463 PARAMETER Experiment Name: At_Germinating_Seeds_cDNA_P Parameter: Tissue Value: Germinating Seeds
  misc_feature: MA Experiment ID: 108464 Result: Up-regulated in Transcription
  misc_feature: MA Experiment 108464 PARAMETER Experiment Name: At_Germinating_Seeds_cDNA_P Parameter: Age (day) Value: 4 vs. 0
  misc_feature: MA Experiment 108464 PARAMETER Experiment Name: At_Germinating_Seeds_cDNA_P Parameter: Tissue Value: Germinating Seeds
  misc_feature: MA Experiment ID: 108488 Result: Up-regulated in Transcription
  misc_feature: MA Experiment ID: 108489 Result: Down-regulated in Transcription
  misc_feature: MA Experiment ID: 108595 Result: Down-regulated in Transcription
  misc_feature: MA Experiment 108595 PARAMETER Experiment Name: At_Ler-pi_Ovule_cDNA_P Parameter: Plant Line Value: null
  misc_feature: MA Experiment ID: 20000087 Result: Down-regulated in Transcription
  misc_feature: MA Experiment 20000087 PARAMETER Experiment Name: At_100uM_ABA_Mutants_cDNA_P Parameter: Plant Line Value: WS
  misc_feature: MA Experiment 20000087 PARAMETER Experiment Name: At_100uM_ABA_Mutants_cDNA_P Parameter: Timepoint (hr) Value: 6
  misc_feature: MA Experiment 20000087 PARAMETER Experiment Name: At_100uM_ABA_Mutants_cDNA_P Parameter: Tissue Value: Aerial
  misc_feature: MA Experiment 20000087 PARAMETER Experiment Name: At_100uM_ABA_Mutants_cDNA_P Parameter: Treatment Value: 100uM ABA vs. No Treatment
  misc_feature: MA Experiment ID: 20000180 Result: Up-regulated in Transcription
  misc_feature: MA Experiment 20000180 PARAMETER Experiment Name: At_Germinating_Seeds_P Parameter: Age (hr) Value: 24 vs. 0
  misc_feature: MA Experiment 20000180 PARAMETER Experiment Name: At_Germinating_Seeds_P Parameter: Tissue Value: Germinating Seeds
  misc_feature: MA Experiment ID: 20000185 Result: Down-regulated in Transcription
  misc_feature: MA Experiment 20000185 PARAMETER Experiment Name: At_Roots__P Parameter: Age (day) Value: 7 vs. 21
  misc_feature: MA Experiment 20000185 PARAMETER Experiment Name: At_Roots__P Parameter: Organism Value: A. thaliana
  misc_feature: MA Experiment 20000185 PARAMETER Experiment Name: At_Roots__P Parameter: Tissue Value: Roots vs. Whole Plant
  misc_feature: MA Experiment ID: 20000227 Result: Down-regulated in Transcription
  misc_feature: MA Experiment 20000227 PARAMETER Experiment Name: At_Root-Tips-vs-Tops_P Parameter: Tissue Value: Root Tips vs. Root Tops
  misc_feature: MA Experiment ID: 20000234 Result: Down-regulated in Transcription
  misc_feature: MA Experiment 20000234 PARAMETER Experiment Name: At_Siliques_P Parameter: Age (day) Value: 21
  misc_feature: MA Experiment 20000234 PARAMETER Experiment Name: At_Siliques_P Parameter: Organism Value: A. thaliana
  misc_feature: MA Experiment 20000234 PARAMETER Experiment Name: At_Siliques_P Parameter: Plant Line Value: WS
  misc_feature: MA Experiment 20000234 PARAMETER Experiment Name: At_Siliques_P Parameter: Tissue Value: Less Than 5mm Siliques vs. Whole Plant
  misc_feature: MA Experiment ID: 20000264 Result: Down-regulated in Transcription
  misc_feature: MA Experiment 20000264 PARAMETER Experiment Name: At_Open_Flower_P Parameter: Age (day) Value: 21
  misc_feature: MA Experiment 20000264 PARAMETER Experiment Name: At_Open_Flower_P Parameter: Plant Line Value: WS
  misc_feature: MA Experiment 20000264 PARAMETER Experiment Name: At_Open_Flower_P Parameter: Tissue Value: Open Flower vs. Whole Plant
  misc_feature: MA Experiment ID: 20000265 Result: Down-regulated in Transcription
  misc_feature: MA Experiment 20000265 PARAMETER Experiment Name: At_Open_Flower_P Parameter: Age (day) Value: 21
  misc_feature: MA Experiment 20000265 PARAMETER Experiment Name: At_Open_Flower_P Parameter: Plant Line Value: WS
  misc_feature: MA Experiment 20000265 PARAMETER Experiment Name: At_Open_Flower_P Parameter: Tissue Value: Closed Flower vs. Whole Plant
  misc_feature: MA Experiment ID: 20000286 Result: Down-regulated in Transcription
  misc_feature: MA Experiment 20000286 PARAMETER Experiment Name: At_Open_Flower_P Parameter: Age (day) Value: 21
  misc_feature: MA Experiment 20000286 PARAMETER Experiment Name: At_Open_Flower_P Parameter: Plant Line Value: WS
  misc_feature: MA Experiment 20000286 PARAMETER Experiment Name: At_Open_Flower_P Parameter: Tissue Value: Half Open vs. Whole Plant
  misc_feature: MA Experiment ID: 20000439 Result: Down-regulated in Transcription
  misc_feature: MA Experiment 20000439 PARAMETER Experiment Name: At_Roots__P Parameter: Age (day) Value: 14 vs. 21
  misc_feature: MA Experiment 20000439 PARAMETER Experiment Name: At_Roots__P Parameter: Organism Value: A. thaliana
  misc_feature: MA Experiment 20000439 PARAMETER Experiment Name: At_Roots__P Parameter: Tissue Value: Roots vs. Whole Plant
  misc_feature: MA Experiment ID: 20000441 Result: Up-regulated in Transcription
  misc_feature: MA Experiment 20000441 PARAMETER Experiment Name: At_1uM_BR-BRZ__P Parameter: Tissue Value: Shoot Apices
  misc_feature: MA Experiment 20000441 PARAMETER Experiment Name: At_1uM_BR-BRZ__P Parameter: Treatment Value: 1uM BR vs. No Treatment
  misc_feature: MA Experiment ID: 20000443 Result: Up-regulated in Transcription
  misc_feature: MA Experiment 20000443 PARAMETER Experiment Name: At_1uM_BR-BRZ__P Parameter: Tissue Value: Shoot Apices
  misc_feature: MA Experiment 20000443 PARAMETER Experiment Name: At_1uM_BR-BRZ__P Parameter: Treatment Value: 1uM BRZ vs. No Treatment
  misc_feature: MA Experiment ID: 20000496 Result: Down-regulated in Transcription
  misc_feature: MA Experiment 20000496 PARAMETER Experiment Name: At_Guard_Cells_P Parameter: Harvest Date Value: 7/19/2002
  misc_feature: MA Experiment 20000496 PARAMETER Experiment Name: At_Guard_Cells_P Parameter: Organism Value: Canola
  misc_feature: MA Experiment 20000496 PARAMETER Experiment Name: At_Guard_Cells_P Parameter: Tissue Value: Guard Cells vs. Leaves
  misc_feature: MA Experiment ID: 20000794 Result: Down-regulated in Transcription
  misc_feature: MA Experiment 20000794 PARAMETER Experiment Name: At_Petals_P Parameter: Age (day) Value: 23-25 days
  misc_feature: MA Experiment 20000794 PARAMETER Experiment Name: At_Petals_P Parameter: Plant Line Value: WS
  misc_feature: MA Experiment 20000794 PARAMETER Experiment Name: At_Petals_P Parameter: Tissue Value: Petals vs. Whole plant
  misc_feature: MA Experiment ID: 20001451 Result: Down-regulated in Transcription
  misc_feature: MA Experiment 20001451 PARAMETER Experiment Name: At_Far-red-induction_P Parameter: Age (day) Value: 7
  misc_feature: MA Experiment 20001451 PARAMETER Experiment Name: At_Far-red-induction_P Parameter: Light Value: Far-red vs. White
  misc_feature: MA Experiment 20001451 PARAMETER Experiment Name: At_Far-red-induction_P Parameter: Organism Value: A. thaliana
  misc_feature: MA Experiment 20001451 PARAMETER Experiment Name: At_Far-red-induction_P Parameter: Plant Line Value: Columbia
  misc_feature: MA Experiment 20001451 PARAMETER Experiment Name: At_Far-red-induction_P Parameter: Timepoint (hr) Value: 24
  misc_feature: MA Experiment 20001451 PARAMETER Experiment Name: At_Far-red-induction_P Parameter: Tissue Value: Whole Plant
  misc_feature: MA Experiment ID: 20001557 Result: Down-regulated in Transcription
  misc_feature: MA Experiment 20001557 PARAMETER Experiment Name: At_Drought_Soil_Dry_P Parameter: Age (day) Value: 27
  misc_feature: MA Experiment 20001557 PARAMETER Experiment Name: At_Drought_Soil_Dry_P Parameter: Organism Value: A. thaliana
  misc_feature: MA Experiment 20001557 PARAMETER Experiment Name: At_Drought_Soil_Dry_P Parameter: Plant Line Value: WS
  misc_feature: MA Experiment 20001557 PARAMETER Experiment Name: At_Drought_Soil_Dry_P Parameter: Post Timepoint (hr) Value: 3
  misc_feature: MA Experiment 20001557 PARAMETER Experiment Name: At_Drought_Soil_Dry_P Parameter: Post-Treatment Value: Re-Water vs. No Drought
  misc_feature: MA Experiment 20001557 PARAMETER Experiment Name: At_Drought_Soil_Dry_P Parameter: Timepoint (day) Value: 13
  misc_feature: MA Experiment 20001557 PARAMETER Experiment Name: At_Drought_Soil_Dry_P Parameter: Treatment Value: Drought vs. No Drought
  misc_feature: MA Experiment ID: 20001558 Result: Down-regulated in Transcription
  misc_feature: MA Experiment 20001558 PARAMETER Experiment Name: At_Drought_Soil_Dry_P Parameter: Age (day) Value: 27
  misc_feature: MA Experiment 20001558 PARAMETER Experiment Name: At_Drought_Soil_Dry_P Parameter: Organism Value: A. thaliana
  misc_feature: MA Experiment 20001558 PARAMETER Experiment Name: At_Drought_Soil_Dry_P Parameter: Plant Line Value: WS
  misc_feature: MA Experiment 20001558 PARAMETER Experiment Name: At_Drought_Soil_Dry_P Parameter: Post Timepoint (hr) Value: 6
  misc_feature: MA Experiment 20001558 PARAMETER Experiment Name: At_Drought_Soil_Dry_P Parameter: Post-Treatment Value: Re-Water vs. No Drought
  misc_feature: MA Experiment 20001558 PARAMETER Experiment Name: At_Drought_Soil_Dry_P Parameter: Timepoint (day) Value: 13
  misc_feature: MA Experiment 20001558 PARAMETER Experiment Name: At_Drought_Soil_Dry_P Parameter: Treatment Value: Drought vs. No Drought
  misc_feature: MA Experiment ID: 20001757 Result: Up-regulated in Transcription
  misc_feature: MA Experiment 20001757 PARAMETER Experiment Name: At_50mM_NH4NO3_L-to-H_P Parameter: Timepoint (hr) Value: 6
  misc_feature: MA Experiment 20001757 PARAMETER Experiment Name: At_50mM_NH4NO3_L-to-H_P Parameter: Tissue Value: Leaf
  misc_feature: MA Experiment 20001757 PARAMETER Experiment Name: At_50mM_NH4NO3_L-to-H_P Parameter: Treatment Value: 50mM NH4NO3 vs 100mM Mannitol
  misc_feature: MA Experiment ID: 20001904 Result: Down-regulated in Transcription
  misc_feature: MA Experiment 20001904 PARAMETER Experiment Name: At_Drought_Reproduction_P Parameter: Age (day) Value: 37
  misc_feature: MA Experiment 20001904 PARAMETER Experiment Name: At_Drought_Reproduction_P Parameter: Organism Value: A. thaliana
  misc_feature: MA Experiment 20001904 PARAMETER Experiment Name: At_Drought_Reproduction_P Parameter: Plant Line Value: WS
  misc_feature: MA Experiment 20001904 PARAMETER Experiment Name: At_Drought_Reproduction_P Parameter: Timepoint (day) Value: 7
  misc_feature: MA Experiment 20001904 PARAMETER Experiment Name: At_Drought_Reproduction_P Parameter: Tissue Value: Rosettes
  misc_feature: MA Experiment 20001904 PARAMETER Experiment Name: At_Drought_Reproduction_P Parameter: Treatment Value: Drought vs. No Drought
  misc_feature: MA Experiment ID: 20001905 Result: Down-regulated in Transcription
  misc_feature: MA Experiment 20001905 PARAMETER Experiment Name: At_Drought_Reproduction_P Parameter: Age (day) Value: 40
  misc_feature: MA Experiment 20001905 PARAMETER Experiment Name: At_Drought_Reproduction_P Parameter: Organism Value: A. thaliana
  misc_feature: MA Experiment 20001905 PARAMETER Experiment Name: At_Drought_Reproduction_P Parameter: Plant Line Value: WS
  misc_feature: MA Experiment 20001905 PARAMETER Experiment Name: At_Drought_Reproduction_P Parameter: Timepoint (day) Value: 10
  misc_feature: MA Experiment 20001905 PARAMETER Experiment Name: At_Drought_Reproduction_P Parameter: Tissue Value: Rosettes
  misc_feature: MA Experiment 20001905 PARAMETER Experiment Name: At_Drought_Reproduction_P Parameter: Treatment Value: Drought vs. No Drought
  misc_feature: MA Experiment ID: 20001906 Result: Down-regulated in Transcription
  misc_feature: MA Experiment 20001906 PARAMETER Experiment Name: At_Drought_Reproduction_P Parameter: Age (day) Value: 35
  misc_feature: MA Experiment 20001906 PARAMETER Experiment Name: At_Drought_Reproduction_P Parameter: Organism Value: A. thaliana
  misc_feature: MA Experiment 20001906 PARAMETER Experiment Name: At_Drought_Reproduction_P Parameter: Plant Line Value: WS
  misc_feature: MA Experiment 20001906 PARAMETER Experiment Name: At_Drought_Reproduction_P Parameter: Timepoint (day) Value: 5
  misc_feature: MA Experiment 20001906 PARAMETER Experiment Name: At_Drought_Reproduction_P Parameter: Tissue Value: Siliques
  misc_feature: MA Experiment 20001906 PARAMETER Experiment Name: At_Drought_Reproduction_P Parameter: Treatment Value: Drought vs. No Drought
  misc_feature: MA Experiment ID: 20001908 Result: Down-regulated in Transcription
  misc_feature: MA Experiment 20001908 PARAMETER Experiment Name: At_Drought_Reproduction_P Parameter: Age (day) Value: 40
  misc_feature: MA Experiment 20001908 PARAMETER Experiment Name: At_Drought_Reproduction_P Parameter: Organism Value: A. thaliana
  misc_feature: MA Experiment 20001908 PARAMETER Experiment Name: At_Drought_Reproduction_P Parameter: Plant Line Value: WS
  misc_feature: MA Experiment 20001908 PARAMETER Experiment Name: At_Drought_Reproduction_P Parameter: Timepoint (day) Value: 10
  misc_feature: MA Experiment 20001908 PARAMETER Experiment Name: At_Drought_Reproduction_P Parameter: Tissue Value: Siliques
  misc_feature: MA Experiment 20001908 PARAMETER Experiment Name: At_Drought_Reproduction_P Parameter: Treatment Value: Drought vs. No Drought

SEQ ID NO: 49937 - protein, 241 aa, Arabidopsis thaliana; identical to SEQ ID NO: 35134
  peptide (1)..(241): Ceres Seq. ID no. 12602232
  misc_feature (53)..(210): Pfam Name: Chlorophyll A-B binding protein Pfam Description: Chlorophyll A-B binding protein
  misc_feature (53)..(210): Pfam Name: Chlorophyll A-B binding protein Pfam Description: Chlorophyll A-B binding protein
  misc_feature (1)..(239): Homolog of NCBI NO: 3789954 NR Description: chlorophyll a/b-binding protein precursor [Oryza
  misc_feature (1)..(241): Homolog of NCBI NO: 6685157 NR Description: chlorophyll a/b binding protein precursor
  misc_feature (186)..(241): Homolog of NCBI NO: 30694146 NR Description: light-harvesting chlorophyll a/b binding protein
  misc_feature (1)..(151): Homolog of NCBI NO: 30694146 NR Description: light-harvesting chlorophyll a/b binding protein
  misc_feature (1)..(239): Homolog of NCBI NO: 115764 NR Description: Chlorophyll A-B binding protein 6A, chloroplast
  misc_feature (1)..(239): Homolog of NCBI NO: 3789954 NR Description: chlorophyll a/b-binding protein precursor [Oryza
  misc_feature (186)..(241): Homolog of NCBI NO: 30694146 NR Description: light-harvesting chlorophyll a/b binding protein
  misc_feature (1)..(239): Homolog of NCBI NO: 115764 NR Description: Chlorophyll A-B binding protein 6A, chloroplast
  misc_feature (1)..(241): Homolog of NCBI NO: 15233115 NR Description: light-harvesting chlorophyll a/b binding protein
  misc_feature (1)..(241): Homolog of NCBI NO: 13265501 NR Description: AT3g54890 [Arabidopsis thaliana]
  misc_feature (1)..(238): Homolog of NCBI NO: 625547 NR Description: chlorophyll a/b-binding protein type I - common
  misc_feature (1)..(239): Homolog of NCBI NO: 82078 NR Description: chlorophyll a/b-binding protein type I precursor
  misc_feature (1)..(239): Homolog of NCBI NO: 82079 NR Description: chlorophyll a/b-binding protein type I precursor
  misc_feature (1)..(151): Homolog of NCBI NO: 30694146 NR Description: light-harvesting chlorophyll a/b binding protein
  misc_feature (1)..(241): Homolog of NCBI NO: 6685157 NR Description: chlorophyll a/b binding protein precursor
  misc_feature (1)..(239): Homolog of NCBI NO: 82079 NR Description: chlorophyll a/b-binding protein type I precursor
  misc_feature (1)..(239): Homolog of NCBI NO: 82078 NR Description: chlorophyll a/b-binding protein type I precursor
  misc_feature (1)..(238): Homolog of NCBI NO: 625547 NR Description: chlorophyll a/b-binding protein type I - common
  misc_feature (1)..(241): Homolog of NCBI NO: 13265501 NR Description: AT3g54890 [Arabidopsis thaliana]
  misc_feature (1)..(241): Homolog of NCBI NO: 15233115 NR Description: light-harvesting chlorophyll a/b binding protein

SEQ ID NO: 49938 - protein, 235 aa, Arabidopsis thaliana; identical to SEQ ID NO: 35135
  peptide (1)..(235): Ceres Seq. ID no. 12602233
  misc_feature (47)..(204): Pfam Name: Chlorophyll A-B binding protein Pfam Description: Chlorophyll A-B binding protein
  misc_feature (47)..(204): Pfam Name: Chlorophyll A-B binding protein Pfam Description: Chlorophyll A-B binding protein
  misc_feature (1)..(233): Homolog of NCBI NO: 3789954 NR Description: chlorophyll a/b-binding protein precursor [Oryza
  misc_feature (1)..(235): Homolog of NCBI NO: 6685157 NR Description: chlorophyll a/b binding protein precursor
  misc_feature (180)..(235): Homolog of NCBI NO: 30694146 NR Description: light-harvesting chlorophyll a/b binding protein
  misc_feature (1)..(145): Homolog of NCBI NO: 30694146 NR Description: light-harvesting chlorophyll a/b binding protein
  misc_feature (1)..(233): Homolog of NCBI NO: 115764 NR Description: Chlorophyll A-B binding protein 6A, chloroplast
  misc_feature (1)..(233): Homolog of NCBI NO: 3789954 NR Description: chlorophyll a/b-binding protein precursor [Oryza
  misc_feature (180)..(235): Homolog of NCBI NO: 30694146 NR Description: light-harvesting chlorophyll a/b binding protein
  misc_feature (1)..(233): Homolog of NCBI NO: 115764 NR Description: Chlorophyll A-B binding protein 6A, chloroplast
  misc_feature (1)..(235): Homolog of NCBI NO: 15233115 NR Description: light-harvesting chlorophyll a/b binding protein
  misc_feature (1)..(235): Homolog of NCBI NO: 13265501 NR Description: AT3g54890 [Arabidopsis thaliana]
  misc_feature (1)..(232): Homolog of NCBI NO: 625547 NR Description: chlorophyll a/b-binding protein type I - common
  misc_feature (1)..(233): Homolog of NCBI NO: 82078 NR Description: chlorophyll a/b-binding protein type I precursor
  misc_feature (1)..(233): Homolog of NCBI NO: 82079 NR Description: chlorophyll a/b-binding protein type I precursor
  misc_feature (1)..(145): Homolog of NCBI NO: 30694146 NR Description: light-harvesting chlorophyll a/b binding protein
  misc_feature (1)..(235): Homolog of NCBI NO: 6685157 NR Description: chlorophyll a/b binding protein precursor
  misc_feature (1)..(233): Homolog of NCBI NO: 82079 NR Description: chlorophyll a/b-binding protein type I precursor
  misc_feature (1)..(233): Homolog of NCBI NO: 82078 NR Description: chlorophyll a/b-binding protein type I precursor
  misc_feature (1)..(232): Homolog of NCBI NO: 625547 NR Description: chlorophyll a/b-binding protein type I - common
  misc_feature (1)..(235): Homolog of NCBI NO: 13265501 NR Description: AT3g54890 [Arabidopsis thaliana]
  misc_feature (1)..(235): Homolog of NCBI NO: 15233115 NR Description: light-harvesting chlorophyll a/b binding protein

SEQ ID NO: 49939 - protein, 198 aa, Arabidopsis thaliana; identical to SEQ ID NO: 35136
  peptide (1)..(198): Ceres Seq. ID no. 12602234
  misc_feature (10)..(167): Pfam Name: Chlorophyll A-B binding protein Pfam Description: Chlorophyll A-B binding protein
  misc_feature (10)..(167): Pfam Name: Chlorophyll A-B binding protein Pfam Description: Chlorophyll A-B binding protein
  misc_feature (1)..(196): Homolog of NCBI NO: 3789954 NR Description: chlorophyll a/b-binding protein precursor [Oryza
  misc_feature (1)..(198): Homolog of NCBI NO: 6685157 NR Description: chlorophyll a/b binding protein precursor
  misc_feature (143)..(198): Homolog of NCBI NO: 30694146 NR Description: light-harvesting chlorophyll a/b binding protein
  misc_feature (1)..(108): Homolog of NCBI NO: 30694146 NR Description: light-harvesting chlorophyll a/b binding protein
  misc_feature (1)..(196): Homolog of NCBI NO: 115764 NR Description: Chlorophyll A-B binding protein 6A, chloroplast
  misc_feature (1)..(196): Homolog of NCBI NO: 3789954 NR Description: chlorophyll a/b-binding protein precursor [Oryza
  misc_feature (143)..(198): Homolog of NCBI NO: 30694146 NR Description: light-harvesting chlorophyll a/b binding protein
  misc_feature (1)..(196): Homolog of NCBI NO: 115764 NR Description: Chlorophyll A-B binding protein 6A, chloroplast
  misc_feature (1)..(198): Homolog of NCBI NO: 15233115 NR Description: light-harvesting chlorophyll a/b binding protein
  misc_feature (1)..(198): Homolog of NCBI NO: 13265501 NR Description: AT3g54890 [Arabidopsis thaliana]
  misc_feature (1)..(195): Homolog of NCBI NO: 625547 NR Description: chlorophyll a/b-binding protein type I - common
  misc_feature (1)..(196): Homolog of NCBI NO: 82078 NR Description: chlorophyll a/b-binding protein type I precursor
  misc_feature (1)..(196): Homolog of NCBI NO: 82079 NR Description: chlorophyll a/b-binding protein type I precursor
  misc_feature (1)..(108): Homolog of NCBI NO: 30694146 NR Description: light-harvesting chlorophyll a/b binding protein
  misc_feature (1)..(198): Homolog of NCBI NO: 6685157 NR Description: chlorophyll a/b binding protein precursor
  misc_feature (1)..(196): Homolog of NCBI NO: 82079 NR Description: chlorophyll a/b-binding protein type I precursor
  misc_feature (1)..(196): Homolog of NCBI NO: 82078 NR Description: chlorophyll a/b-binding protein type I precursor
  misc_feature (1)..(195): Homolog of NCBI NO: 625547 NR Description: chlorophyll a/b-binding protein type I - common
  misc_feature (1)..(198): Homolog of NCBI NO: 13265501 NR Description: AT3g54890 [Arabidopsis thaliana]
  misc_feature (1)..(198): Homolog of NCBI NO: 15233115 NR Description: light-harvesting chlorophyll a/b binding protein

SEQ ID NO: 49940 - DNA, 1415 bp, Arabidopsis thaliana
  misc_feature (1)..(1415): Ceres Seq. ID no. 13592359
  misc_feature: MA Experiment ID: 20000794 Result: Up-regulated in Transcription
  misc_feature: MA Experiment 20000794 PARAMETER Experiment Name: At_Petals_P Parameter: Age (day) Value: 23-25 days
  misc_feature: MA Experiment 20000794 PARAMETER Experiment Name: At_Petals_P Parameter: Plant Line Value: WS
  misc_feature: MA Experiment 20000794 PARAMETER Experiment Name: At_Petals_P Parameter: Tissue Value: Petals vs. Whole plant
gaagcttcgttctcaatccccaattcgaaatcctagctgaagtctatgctccataatcaaatccagttcatcagagatcaaagatggctattgcacgaactggagtttatgttgatgattaccttgagtatgcaagcactttccctgcagagctacaaagattactaaacacagttcgcgaactagacgagagatctcaatcgcttataaatcagacaagacagcaaactaagtattgcttagggcttgcttcacagagttctaaaaagggtaatggtaatcattacaataatggtggtcttgatgaagaggaaacgattgagaaaatgcgtaaagagattgagtctagtcaggaaaatgcgttaagtttgtgtaccgagaaggttttattggcccgacaagcgtatgatcttatagatagtcatgtaaaacgacttgatgaagatctgaataattttgcagaagatttaaagcaagagggaaaaattccaccagacgagccctctgttcttcctccactacctatagttcctaaagcggaaaagcgtaagtccttctatggcacacctcagcccaagaagattgattatagagatagagactgggatcgtgacagggattttgagctcatgcctcctccaggaagcaatcggaaagaccttatgccaattgaagagcagccaatcgatccaaacgaaccaacttactgtgtctgccatcaggtgtcctttggagacatgattgcctgtgacaatgagaatgtgagcctgctctcccagcatcttattatttattttttaatgtatagctgttatgatgaaaccttttgttcctgtttcgacagtgccaaggaggtgaatggtttcactatacatgcgttggcctcacacctgagaccagattcaaagggaaatggtactgccccacctgcagactcctcccacagtcacactaatatcatttgtacctgtgagaaggtattgctttactatcatcagaactaagctctcctcctgcaatttccatgcattctgtagctaatataatacgtatggagatttgcacgtacttatgatattaattctcataggtgccactggcatcttctttggcaccttcccttcatgaccaatgccaccaaactcatctttcttgttacccaacatctagcaagtgcaagtagaagcaaactttagatggagaaatcatcatgttttgtaaacctcgggttaattcgtggagcatatattttgtatatcaattgtatttgggtattggtgggcattttccgttttattctactagtatcgatatttacatctgcttctttctttcttttttcccctcaaaccatgagcctttgtattgatcaaatgacatgtacaaaggttttgttcatcagaaggaatttcact

SEQ ID NO: 49941 - protein, 306 aa, Arabidopsis thaliana
  peptide (1)..(306): Ceres Seq. ID no. 13592360
  misc_feature (9)..(260): Homolog of NCBI NO: 29367421 NR Description: putative PHD-finger protein
  misc_feature (7)..(229): Homolog of NCBI NO: 26370605 NR Description: unnamed protein product [Mus musculus]
  misc_feature (7)..(257): Homolog of NCBI NO: 34858458 NR Description: similar to ING1-like protein
  misc_feature (7)..(234): Homolog of NCBI NO: 21307722 NR Description: ING1-like protein long 2 form [Mus musculus]
  misc_feature (7)..(257): Homolog of NCBI NO: 12002020 NR Description: brain my036 protein [Homo sapiens]
  misc_feature (7)..(257): Homolog of NCBI NO: 19111152 NR Description: ING1-like protein
  misc_feature (1)..(230): Homolog of NCBI NO: 18087670 NR Description: putative growth inhibitory protein [Oryza sativa]
  misc_feature (82)..(226): Homolog of NCBI NO: 21553698 NR Description: putative growth inhibitory protein [Arabidopsis
  misc_feature (39)..(226): Homolog of NCBI NO: 25405727 NR Description: hypothetical protein F20D21.22 [imported] -
  misc_feature (1)..(306): Homolog of NCBI NO: 30695729 NR Description: expressed protein [Arabidopsis thaliana]
MAIARTGVYVDDYLEYASTFPAELQRLLNTVRELDERSQSLINQTRQQTKYCLGLASQSSKKGNGNHYNNGGLDEEETIEKMRKEIESSQENALSLCTEKVLLARQAYDLIDSHVKRLDEDLNNFAEDLKQEGKIPPDEPSVLPPLPIVPKAEKRKSFYGTPQPKKIDYRDRDWDRDRDFELMPPPGSNRKDLMPIEEQPIDPNEPTYCVCHQVSFGDMIACDNENVSLLSQHLIIYFLMYSCYDETFCSCFDSAKEVNGFTIHALASHLRPDSKGNGTAPPADSSHSHTNIICTCEKVLLYYHQN

SEQ ID NO: 49942 - protein, 225 aa, Arabidopsis thaliana
  peptide (1)..(225): Ceres Seq. ID no. 13592361
  misc_feature (1)..(179): Homolog of NCBI NO: 29367421 NR Description: putative PHD-finger protein
  misc_feature (1)..(148): Homolog of NCBI NO: 26370605 NR Description: unnamed protein product [Mus musculus]
  misc_feature (1)..(176): Homolog of NCBI NO: 34858458 NR Description: similar to ING1-like protein
  misc_feature (1)..(153): Homolog of NCBI NO: 21307722 NR Description: ING1-like protein long 2 form [Mus musculus]
  misc_feature (1)..(176): Homolog of NCBI NO: 12002020 NR Description: brain my036 protein [Homo sapiens]
  misc_feature (1)..(176): Homolog of NCBI NO: 19111152 NR Description: ING1-like protein
  misc_feature (1)..(149): Homolog of NCBI NO: 18087670 NR Description: putative growth inhibitory protein [Oryza sativa]
  misc_feature (1)..(145): Homolog of NCBI NO: 21553698 NR Description: putative growth inhibitory protein [Arabidopsis
  misc_feature (1)..(145): Homolog of NCBI NO: 25405727 NR Description: hypothetical protein F20D21.22 [imported] -
  misc_feature (1)..(225): Homolog of NCBI NO: 30695729 NR Description: expressed protein [Arabidopsis thaliana]
MRKEIESSQENALSLCTEKVLLARQAYDLIDSHVKRLDEDLNNFAEDLKQEGKIPPDEPSVLPPLPIVPKAEKRKSFYGTPQPKKIDYRDRDWDRDRDFELMPPPGSNRKDLMPIEEQPIDPNEPTYCVCHQVSFGDMIACDNENVSLLSQHLIIYFLMYSCYDETFCSCFDSAKEVNGFTIHALASHLRPDSKGNGTAPPADSSHSHTNIICTCEKVLLYYHQN

SEQ ID NO: 49943 - DNA, 1710 bp, Arabidopsis thaliana; identical to SEQ ID NO: 49481
  misc_feature (1)..(1710): Ceres Seq. ID no. 12601847
  misc_feature: MA Experiment ID: 20000184 Result: Down-regulated in Transcription
  misc_feature: MA Experiment 20000184 PARAMETER Experiment Name: At_Shoots__P Parameter: Age (day) Value: 7
  misc_feature: MA Experiment 20000184 PARAMETER Experiment Name: At_Shoots__P Parameter: Tissue Value: Shoots vs. Whole Plant
  misc_feature: MA Experiment ID: 20000234 Result: Up-regulated in Transcription
  misc_feature: MA Experiment 20000234 PARAMETER Experiment Name: At_Siliques_P Parameter: Age (day) Value: 21
  misc_feature: MA Experiment 20000234 PARAMETER Experiment Name: At_Siliques_P Parameter: Organism Value: A. thaliana
  misc_feature: MA Experiment 20000234 PARAMETER Experiment Name: At_Siliques_P Parameter: Plant Line Value: WS
  misc_feature: MA Experiment 20000234 PARAMETER Experiment Name: At_Siliques_P Parameter: Tissue Value: Less Than 5mm Siliques vs. Whole Plant
  misc_feature: MA Experiment ID: 20000235 Result: Up-regulated in Transcription
  misc_feature: MA Experiment 20000235 PARAMETER Experiment Name: At_Siliques_P Parameter: Age (day) Value: 21
  misc_feature: MA Experiment 20000235 PARAMETER Experiment Name: At_Siliques_P Parameter: Organism Value: A. thaliana
  misc_feature: MA Experiment 20000235 PARAMETER Experiment Name: At_Siliques_P Parameter: Plant Line Value: WS
  misc_feature: MA Experiment 20000235 PARAMETER Experiment Name: At_Siliques_P Parameter: Tissue Value: 5-10mm Siliques vs. Whole Plant
  misc_feature: MA Experiment ID: 20000264 Result: Up-regulated in Transcription
  misc_feature: MA Experiment 20000264 PARAMETER Experiment Name: At_Open_Flower_P Parameter: Age (day) Value: 21
  misc_feature: MA Experiment 20000264 PARAMETER Experiment Name: At_Open_Flower_P Parameter: Plant Line Value: WS
  misc_feature: MA Experiment 20000264 PARAMETER Experiment Name: At_Open_Flower_P Parameter: Tissue Value: Open Flower vs. Whole Plant
  misc_feature: MA Experiment ID: 20000265 Result: Up-regulated in Transcription
  misc_feature: MA Experiment 20000265 PARAMETER Experiment Name: At_Open_Flower_P Parameter: Age (day) Value: 21
  misc_feature: MA Experiment 20000265 PARAMETER Experiment Name: At_Open_Flower_P Parameter: Plant Line Value: WS
  misc_feature: MA Experiment 20000265 PARAMETER Experiment Name: At_Open_Flower_P Parameter: Tissue Value: Closed Flower vs. Whole Plant
  misc_feature: MA Experiment ID: 20000286 Result: Up-regulated in Transcription
  misc_feature: MA Experiment 20000286 PARAMETER Experiment Name: At_Open_Flower_P Parameter: Age (day) Value: 21
  misc_feature: MA Experiment 20000286 PARAMETER Experiment Name: At_Open_Flower_P Parameter: Plant Line Value: WS
  misc_feature: MA Experiment 20000286 PARAMETER Experiment Name: At_Open_Flower_P Parameter: Tissue Value: Half Open vs. Whole Plant
  misc_feature: MA Experiment ID: 20000438 Result: Down-regulated in Transcription
  misc_feature: MA Experiment 20000438 PARAMETER Experiment Name: At_Shoots__P Parameter: Age (day) Value: 14
  misc_feature: MA Experiment 20000438 PARAMETER Experiment Name: At_Shoots__P Parameter: Tissue Value: Shoots vs. Whole Plant
  misc_feature: MA Experiment ID: 20000794 Result: Up-regulated in Transcription
  misc_feature: MA Experiment 20000794 PARAMETER Experiment Name: At_Petals_P Parameter: Age (day) Value: 23-25 days
  misc_feature: MA Experiment 20000794 PARAMETER Experiment Name: At_Petals_P Parameter: Plant Line Value: WS
  misc_feature: MA Experiment 20000794 PARAMETER Experiment Name: At_Petals_P Parameter: Tissue Value: Petals vs. Whole plant
  misc_feature: MA Experiment ID: 20001558 Result: Up-regulated in Transcription
  misc_feature: MA Experiment 20001558 PARAMETER Experiment Name: At_Drought_Soil_Dry_P Parameter: Age (day) Value: 27
  misc_feature: MA Experiment 20001558 PARAMETER Experiment Name: At_Drought_Soil_Dry_P Parameter: Organism Value: A. thaliana
  misc_feature: MA Experiment 20001558 PARAMETER Experiment Name: At_Drought_Soil_Dry_P Parameter: Plant Line Value: WS
  misc_feature: MA Experiment 20001558 PARAMETER Experiment Name: At_Drought_Soil_Dry_P Parameter: Post Timepoint (hr) Value: 6
  misc_feature: MA Experiment 20001558 PARAMETER Experiment Name: At_Drought_Soil_Dry_P Parameter: Post-Treatment Value: Re-Water vs. No Drought
  misc_feature: MA Experiment 20001558 PARAMETER Experiment Name: At_Drought_Soil_Dry_P Parameter: Timepoint (day) Value: 13
  misc_feature: MA Experiment 20001558 PARAMETER Experiment Name: At_Drought_Soil_Dry_P Parameter: Treatment Value: Drought vs. No Drought
  misc_feature: MA Experiment ID: 20001560 Result: Up-regulated in Transcription
  misc_feature: MA Experiment 20001560 PARAMETER Experiment Name: At_Drought_Soil_Dry_P Parameter: Age (day) Value: 28
  misc_feature: MA Experiment 20001560 PARAMETER Experiment Name: At_Drought_Soil_Dry_P Parameter: Organism Value: A. thaliana
  misc_feature: MA Experiment 20001560 PARAMETER Experiment Name: At_Drought_Soil_Dry_P Parameter: Plant Line Value: WS
  misc_feature: MA Experiment 20001560 PARAMETER Experiment Name: At_Drought_Soil_Dry_P Parameter: Post Timepoint (hr) Value: None
  misc_feature: MA Experiment 20001560 PARAMETER Experiment Name: At_Drought_Soil_Dry_P Parameter: Post-Treatment Value: None
  misc_feature: MA Experiment 20001560 PARAMETER Experiment Name: At_Drought_Soil_Dry_P Parameter: Timepoint (day) Value: 14
  misc_feature: MA Experiment 20001560 PARAMETER Experiment Name: At_Drought_Soil_Dry_P Parameter: Treatment Value: Drought vs. No Drought
  misc_feature: MA Experiment ID: 20001906 Result: Down-regulated in Transcription
  misc_feature: MA Experiment 20001906 PARAMETER Experiment Name: At_Drought_Reproduction_P Parameter: Age (day) Value: 35
  misc_feature: MA Experiment 20001906 PARAMETER Experiment Name: At_Drought_Reproduction_P Parameter: Organism Value: A. thaliana
  misc_feature: MA Experiment 20001906 PARAMETER Experiment Name: At_Drought_Reproduction_P Parameter: Plant Line Value: WS
  misc_feature: MA Experiment 20001906 PARAMETER Experiment Name: At_Drought_Reproduction_P Parameter: Timepoint (day) Value: 5
  misc_feature: MA Experiment 20001906 PARAMETER Experiment Name: At_Drought_Reproduction_P Parameter: Tissue Value: Siliques
  misc_feature: MA Experiment 20001906 PARAMETER Experiment Name: At_Drought_Reproduction_P Parameter: Treatment Value: Drought vs. No Drought

SEQ ID NO: 49944 - protein, 519 aa, Arabidopsis thaliana; identical to SEQ ID NO: 49482
  peptide (1)..(519): Ceres Seq. ID no. 12601848
  misc_feature (25)..(518): Homolog of NCBI NO: 15810341 NR Description: putative cytochrome P450 protein [Arabidopsis
  misc_feature (25)..(518): Homolog of NCBI NO: 30685891 NR Description: cytochrome P450 family [Arabidopsis thaliana]
  misc_feature (25)..(518): Homolog of NCBI NO: 15235775 NR Description: cytochrome p450 family; protein id: At4g22710.1
  misc_feature (25)..(518): Homolog of NCBI NO: 7430667 NR Description: cytochrome P450 homolog T12H17.80 - Arabidopsis
  misc_feature (1)..(518): Homolog of NCBI NO: 15234517 NR Description: cytochrome p450, putative; protein id:
  misc_feature (1)..(519): Homolog of NCBI NO: 15234514 NR Description: cytochrome p450 family; protein id: At4g12300.1
  misc_feature (25)..(519): Homolog of NCBI NO: 11345411 NR Description: putative cytochrome P450 [Matthiola incana]
  misc_feature (1)..(519): Homolog of NCBI NO: 15234521 NR Description: cytochrome p450 family
  misc_feature (1)..(479): Homolog of NCBI NO: 16226350 NR Description: AT5g44620/K15C23_6 [Arabidopsis thaliana]
  misc_feature (1)..(519): Homolog of NCBI NO: 15241541 NR Description: cytochrome p450 family
  misc_feature (25)..(518): Homolog of NCBI NO: 15810341 NR Description: putative cytochrome P450 protein [Arabidopsis
  misc_feature (25)..(518): Homolog of NCBI NO: 30685891 NR Description: cytochrome P450 family [Arabidopsis thaliana]
  misc_feature (25)..(518): Homolog of NCBI NO: 15235775 NR Description: cytochrome p450 family; protein id: At4g22710.1
  misc_feature (25)..(518): Homolog of NCBI NO: 7430667 NR Description: cytochrome P450 homolog T12H17.80 - Arabidopsis
  misc_feature (1)..(518): Homolog of NCBI NO: 15234517 NR Description: cytochrome p450, putative; protein id:
  misc_feature (1)..(519): Homolog of NCBI NO: 15234514 NR Description: cytochrome p450 family; protein id: At4g12300.1
  misc_feature (25)..(519): Homolog of NCBI NO: 11345411 NR Description: putative cytochrome P450 [Matthiola incana]
  misc_feature (1)..(519): Homolog of NCBI NO: 15234521 NR Description: cytochrome p450 family
  misc_feature (1)..(479): Homolog of NCBI NO: 16226350 NR Description: AT5g44620/K15C23_6 [Arabidopsis thaliana]
  misc_feature (1)..(519): Homolog of NCBI NO: 15241541 NR Description: cytochrome p450 family

SEQ ID NO: 49945 - protein, 380 aa, Arabidopsis thaliana; identical to SEQ ID NO: 49483
  peptide (1)..(380): Ceres Seq. ID no. 12601849
  misc_feature (1)..(379): Homolog of NCBI NO: 15810341 NR Description: putative cytochrome P450 protein [Arabidopsis
  misc_feature (1)..(379): Homolog of NCBI NO: 30685891 NR Description: cytochrome P450 family [Arabidopsis thaliana]
  misc_feature (1)..(379): Homolog of NCBI NO: 15235775 NR Description: cytochrome p450 family; protein id: At4g22710.1
  misc_feature (1)..(379): Homolog of NCBI NO: 7430667 NR Description: cytochrome P450 homolog T12H17.80 - Arabidopsis
  misc_feature (1)..(379): Homolog of NCBI NO: 15234517 NR Description: cytochrome p450, putative; protein id:
  misc_feature (1)..(380): Homolog of NCBI NO: 15234514 NR Description: cytochrome p450 family; protein id: At4g12300.1
  misc_feature (1)..(380): Homolog of NCBI NO: 11345411 NR Description: putative cytochrome P450 [Matthiola incana]
  misc_feature (1)..(380): Homolog of NCBI NO: 15234521 NR Description: cytochrome p450 family
  misc_feature (1)..(340): Homolog of NCBI NO: 16226350 NR Description: AT5g44620/K15C23_6 [Arabidopsis thaliana]
  misc_feature (1)..(380): Homolog of NCBI NO: 15241541 NR Description: cytochrome p450 family
  misc_feature (1)..(379): Homolog of NCBI NO: 15810341 NR Description: putative cytochrome P450 protein [Arabidopsis
  misc_feature (1)..(379): Homolog of NCBI NO: 30685891 NR Description: cytochrome P450 family [Arabidopsis thaliana]
  misc_feature (1)..(379): Homolog of NCBI NO: 15235775 NR Description: cytochrome p450 family; protein id: At4g22710.1
  misc_feature (1)..(379): Homolog of NCBI NO: 7430667 NR Description: cytochrome P450 homolog T12H17.80 - Arabidopsis
  misc_feature (1)..(379): Homolog of NCBI NO: 15234517 NR Description: cytochrome p450, putative; protein id:
  misc_feature (1)..(380): Homolog of NCBI NO: 15234514 NR Description: cytochrome p450 family; protein id: At4g12300.1
  misc_feature (1)..(380): Homolog of NCBI NO: 11345411 NR Description: putative cytochrome P450 [Matthiola incana]
  misc_feature (1)..(380): Homolog of NCBI NO: 15234521 NR Description: cytochrome p450 family
  misc_feature (1)..(340): Homolog of NCBI NO: 16226350 NR Description: AT5g44620/K15C23_6 [Arabidopsis thaliana]
  misc_feature (1)..(380): Homolog of NCBI NO: 15241541 NR Description: cytochrome p450 family

SEQ ID NO: 49946 - protein, 366 aa, Arabidopsis thaliana; identical to SEQ ID NO: 49484
  peptide (1)..(366): Ceres Seq. ID no. 12601850
  misc_feature (1)..(365): Homolog of NCBI NO: 15810341 NR Description: putative cytochrome P450 protein [Arabidopsis
  misc_feature (1)..(365): Homolog of NCBI NO: 30685891 NR Description: cytochrome P450 family [Arabidopsis thaliana]
  misc_feature (1)..(365): Homolog of NCBI NO: 15235775 NR Description: cytochrome p450 family; protein id: At4g22710.1
  misc_feature (1)..(365): Homolog of NCBI NO: 7430667 NR Description: cytochrome P450 homolog T12H17.80 - Arabidopsis
  misc_feature (1)..(365): Homolog of NCBI NO: 15234517 NR Description: cytochrome p450, putative; protein id:
  misc_feature (1)..(366): Homolog of NCBI NO: 15234514 NR Description: cytochrome p450 family; protein id: At4g12300.1
  misc_feature (1)..(366): Homolog of NCBI NO: 11345411 NR Description: putative cytochrome P450 [Matthiola incana]
  misc_feature (1)..(366): Homolog of NCBI NO: 15234521 NR Description: cytochrome p450 family
  misc_feature (1)..(326): Homolog of NCBI NO: 16226350 NR Description: AT5g44620/K15C23_6 [Arabidopsis thaliana]
  misc_feature (1)..(366): Homolog of NCBI NO: 15241541 NR Description: cytochrome p450 family
  misc_feature (1)..(365): Homolog of NCBI NO: 15810341 NR Description: putative cytochrome P450 protein [Arabidopsis
  misc_feature (1)..(365): Homolog of NCBI NO: 30685891 NR Description: cytochrome P450 family [Arabidopsis thaliana]
  misc_feature (1)..(365): Homolog of NCBI NO: 15235775 NR Description: cytochrome p450 family; protein id: At4g22710.1
  misc_feature (1)..(365): Homolog of NCBI NO: 7430667 NR Description: cytochrome P450 homolog T12H17.80 - Arabidopsis
  misc_feature (1)..(365): Homolog of NCBI NO: 15234517 NR Description: cytochrome p450, putative; protein id:
  misc_feature (1)..(366): Homolog of NCBI NO: 15234514 NR Description: cytochrome p450 family; protein id: At4g12300.1
  misc_feature (1)..(366): Homolog of NCBI NO: 11345411 NR Description: putative cytochrome P450 [Matthiola incana]
  misc_feature (1)..(366): Homolog of NCBI NO: 15234521 NR Description: cytochrome p450 family
  misc_feature (1)..(326): Homolog of NCBI NO: 16226350 NR Description: AT5g44620/K15C23_6 [Arabidopsis thaliana]
  misc_feature (1)..(366): Homolog of NCBI NO: 15241541 NR Description: cytochrome p450 family

SEQ ID NO: 49947 - DNA, 2050 bp, Arabidopsis thaliana; identical to SEQ ID NO: 47611
  misc_feature (1)..(2050): Ceres Seq. ID no. 13592370
  misc_feature: MA Experiment ID: 108595 Result: Down-regulated in Transcription
  misc_feature: MA Experiment 108595 PARAMETER Experiment Name: At_Ler-pi_Ovule_cDNA_P Parameter: Plant Line Value: null
  misc_feature: MA Experiment ID: 20000185 Result: Down-regulated in Transcription
  misc_feature: MA Experiment 20000185 PARAMETER Experiment Name: At_Roots__P Parameter: Age (day) Value: 7 vs. 21
  misc_feature: MA Experiment 20000185 PARAMETER Experiment Name: At_Roots__P Parameter: Organism Value: A. thaliana
  misc_feature: MA Experiment 20000185 PARAMETER Experiment Name: At_Roots__P Parameter: Tissue Value: Roots vs. Whole Plant
  misc_feature: MA Experiment ID: 20000286 Result: Down-regulated in Transcription
  misc_feature: MA Experiment 20000286 PARAMETER Experiment Name: At_Open_Flower_P Parameter: Age (day) Value: 21
  misc_feature: MA Experiment 20000286 PARAMETER Experiment Name: At_Open_Flower_P Parameter: Plant Line Value: WS
  misc_feature: MA Experiment 20000286 PARAMETER Experiment Name: At_Open_Flower_P Parameter: Tissue Value: Half Open vs. Whole Plant
  misc_feature: MA Experiment ID: 20001451 Result: Up-regulated in Transcription
  misc_feature: MA Experiment 20001451 PARAMETER Experiment Name: At_Far-red-induction_P Parameter: Age (day) Value: 7
  misc_feature: MA Experiment 20001451 PARAMETER Experiment Name: At_Far-red-induction_P Parameter: Light Value: Far-red vs. White
  misc_feature: MA Experiment 20001451 PARAMETER Experiment Name: At_Far-red-induction_P Parameter: Organism Value: A. thaliana
  misc_feature: MA Experiment 20001451 PARAMETER Experiment Name: At_Far-red-induction_P Parameter: Plant Line Value: Columbia
  misc_feature: MA Experiment 20001451 PARAMETER Experiment Name: At_Far-red-induction_P Parameter: Timepoint (hr) Value: 24
  misc_feature: MA Experiment 20001451 PARAMETER Experiment Name: At_Far-red-induction_P Parameter: Tissue Value: Whole Plant
  misc_feature: MA Experiment ID: 20001911 Result: Up-regulated in Transcription
  misc_feature: MA Experiment 20001911 PARAMETER Experiment Name: At_Drought_Reproduction_P Parameter: Age (day) Value: 40
  misc_feature: MA Experiment 20001911 PARAMETER Experiment Name: At_Drought_Reproduction_P Parameter: Organism Value: A. thaliana
  misc_feature: MA Experiment 20001911 PARAMETER Experiment Name: At_Drought_Reproduction_P Parameter: Plant Line Value: WS
  misc_feature: MA Experiment 20001911 PARAMETER Experiment Name: At_Drought_Reproduction_P Parameter: Timepoint (day) Value: 10
  misc_feature: MA Experiment 20001911 PARAMETER Experiment Name: At_Drought_Reproduction_P Parameter: Tissue Value: Flowers
  misc_feature: MA Experiment 20001911 PARAMETER Experiment Name: At_Drought_Reproduction_P Parameter: Treatment Value: Drought vs. No Drought

SEQ ID NO: 49948 - protein, 521 aa, Arabidopsis thaliana; identical to SEQ ID NO: 47612
  peptide (1)..(521): Ceres Seq. ID no. 13592371
  misc_feature (172)..(407): Homolog of NCBI NO: 22331818 NR Description: chloroplast lumen common protein family
  misc_feature (172)..(407): Homolog of NCBI NO: 34907912 NR Description: B1088C09.1 [Oryza sativa (japonica
  misc_feature (240)..(433): Homolog of NCBI NO: 6934300 NR Description: unknown [Euphorbia esula]
  misc_feature (130)..(433): Homolog of NCBI NO: 30687286 NR Description: expressed protein [Arabidopsis thaliana]
  misc_feature (115)..(433): Homolog of NCBI NO: 34900644 NR Description: hypothetical protein~similar to Arabidopsis
  misc_feature (115)..(433): Homolog of NCBI NO: 34395170 NR Description: chloroplast lumen common protein family-like
  misc_feature (107)..(433): Homolog of NCBI NO: 15242979 NR Description: expressed protein [Arabidopsis thaliana]
  misc_feature (1)..(117): Homolog of NCBI NO: 9759210 NR Description: gene_id:MXC17.9~unknown protein [Arabidopsis
  misc_feature (166)..(521): Homolog of NCBI NO: 9759209 NR Description: gb|AAD25674.1~gene_id:MXC17.8~similar to unknown
  misc_feature (1)..(521): Homolog of NCBI NO: 22327037 NR Description: expressed protein [Arabidopsis thaliana]
  misc_feature (172)..(407): Homolog of NCBI NO: 22331818 NR Description: chloroplast lumen common protein family
  misc_feature (172)..(407): Homolog of NCBI NO: 34907912 NR Description: B1088C09.1 [Oryza sativa (japonica
  misc_feature (240)..(433): Homolog of NCBI NO: 6934300 NR Description: unknown [Euphorbia esula]
  misc_feature (130)..(433): Homolog of NCBI NO: 30687286 NR Description: expressed protein [Arabidopsis thaliana]
  misc_feature (115)..(433): Homolog of NCBI NO: 34900644 NR Description: hypothetical protein~similar to Arabidopsis
  misc_feature (115)..(433): Homolog of NCBI NO: 34395170 NR Description: chloroplast lumen common protein family-like
  misc_feature (107)..(433): Homolog of NCBI NO: 15242979 NR Description: expressed protein [Arabidopsis thaliana]
  misc_feature (1)..(117): Homolog of NCBI NO: 9759210 NR Description: gene_id:MXC17.9~unknown protein [Arabidopsis
  misc_feature (166)..(521): Homolog of NCBI NO: 9759209 NR Description: gb|AAD25674.1~gene_id:MXC17.8~similar to unknown
  misc_feature (1)..(521): Homolog of NCBI NO: 22327037 NR Description: expressed protein [Arabidopsis thaliana]

SEQ ID NO: 49949 - protein, 518 aa, Arabidopsis thaliana; identical to SEQ ID NO: 47613
  peptide (1)..(518): Ceres Seq. ID no. 13592372
  misc_feature (169)..(404): Homolog of NCBI NO: 22331818 NR Description: chloroplast lumen common protein family
  misc_feature (169)..(404): Homolog of NCBI NO: 34907912 NR Description: B1088C09.1 [Oryza sativa (japonica
  misc_feature (237)..(430): Homolog of NCBI NO: 6934300 NR Description: unknown [Euphorbia esula]
  misc_feature (127)..(430): Homolog of NCBI NO: 30687286 NR Description: expressed protein [Arabidopsis thaliana]
  misc_feature (112)..(430): Homolog of NCBI NO: 34900644 NR Description: hypothetical protein~similar to Arabidopsis
  misc_feature (112)..(430): Homolog of NCBI NO: 34395170 NR Description: chloroplast lumen common protein family-like
  misc_feature (104)..(430): Homolog of NCBI NO: 15242979 NR Description: expressed protein [Arabidopsis thaliana]
  misc_feature (1)..(114): Homolog of NCBI NO: 9759210 NR Description: gene_id:MXC17.9~unknown protein [Arabidopsis
  misc_feature (163)..(518): Homolog of NCBI NO: 9759209 NR Description: gb|AAD25674.1~gene_id:MXC17.8~similar to unknown
  misc_feature (1)..(518): Homolog of NCBI NO: 22327037 NR Description: expressed protein [Arabidopsis thaliana]
  misc_feature (169)..(404): Homolog of NCBI NO: 22331818 NR Description: chloroplast lumen common protein family
  misc_feature (169)..(404): Homolog of NCBI NO: 34907912 NR Description: B1088C09.1 [Oryza sativa (japonica
  misc_feature (237)..(430): Homolog of NCBI NO: 6934300 NR Description: unknown [Euphorbia esula]
  misc_feature (127)..(430): Homolog of NCBI NO: 30687286 NR Description: expressed protein [Arabidopsis thaliana]
  misc_feature (112)..(430): Homolog of NCBI NO: 34900644 NR Description: hypothetical protein~similar to Arabidopsis
  misc_feature (112)..(430): Homolog of NCBI NO: 34395170 NR Description: chloroplast lumen common protein family-like
  misc_feature (104)..(430): Homolog of NCBI NO: 15242979 NR Description: expressed protein [Arabidopsis thaliana]
  misc_feature (1)..(114): Homolog of NCBI NO: 9759210 NR Description: gene_id:MXC17.9~unknown protein [Arabidopsis
  misc_feature (163)..(518): Homolog of NCBI NO: 9759209 NR Description: gb|AAD25674.1~gene_id:MXC17.8~similar to unknown
  misc_feature (1)..(518): Homolog of NCBI NO: 22327037 NR Description: expressed protein [Arabidopsis thaliana]

SEQ ID NO: 49950 - protein, 440 aa, Arabidopsis thaliana; identical to SEQ ID NO: 47614
  peptide (1)..(440): Ceres Seq. ID no. 13592373
  misc_feature (91)..(326): Homolog of NCBI NO: 22331818 NR Description: chloroplast lumen common protein family
  misc_feature (91)..(326): Homolog of NCBI NO: 34907912 NR Description: B1088C09.1 [Oryza sativa (japonica
  misc_feature (159)..(352): Homolog of NCBI NO: 6934300 NR Description: unknown [Euphorbia esula]
  misc_feature (49)..(352): Homolog of NCBI NO: 30687286 NR Description: expressed protein [Arabidopsis thaliana]
  misc_feature (34)..(352): Homolog of NCBI NO: 34900644 NR Description: hypothetical protein~similar to Arabidopsis
  misc_feature (34)..(352): Homolog of NCBI NO: 34395170 NR Description: chloroplast lumen common protein family-like
  misc_feature (26)..(352): Homolog of NCBI NO: 15242979 NR Description: expressed protein [Arabidopsis thaliana]
  misc_feature (1)..(36): Homolog of NCBI NO: 9759210 NR Description: gene_id:MXC17.9~unknown protein [Arabidopsis
  misc_feature (85)..(440): Homolog of NCBI NO: 9759209 NR Description: gb|AAD25674.1~gene_id:MXC17.8~similar to unknown
  misc_feature (1)..(440): Homolog of NCBI NO: 22327037 NR Description: expressed protein [Arabidopsis thaliana]
  misc_feature (91)..(326): Homolog of NCBI NO: 22331818 NR Description: chloroplast lumen common protein family
  misc_feature (91)..(326): Homolog of NCBI NO: 34907912 NR Description: B1088C09.1 [Oryza sativa (japonica
  misc_feature (159)..(352): Homolog of NCBI NO: 6934300 NR Description: unknown [Euphorbia esula]
  misc_feature (49)..(352): Homolog of NCBI NO: 30687286 NR Description: expressed protein [Arabidopsis thaliana]
  misc_feature (34)..(352): Homolog of NCBI NO: 34900644 NR Description: hypothetical protein~similar to Arabidopsis
  misc_feature (34)..(352): Homolog of NCBI NO: 34395170 NR Description: chloroplast lumen common protein family-like
  misc_feature (26)..(352): Homolog of NCBI NO: 15242979 NR Description: expressed protein [Arabidopsis thaliana]
  misc_feature (1)..(36): Homolog of NCBI NO: 9759210 NR Description: gene_id:MXC17.9~unknown protein [Arabidopsis
  misc_feature (85)..(440): Homolog of NCBI NO: 9759209 NR Description: gb|AAD25674.1~gene_id:MXC17.8~similar to unknown
  misc_feature (1)..(440): Homolog of NCBI NO: 22327037 NR Description: expressed protein [Arabidopsis thaliana]

SEQ ID NO: 49951 - DNA, 646 bp, Arabidopsis thaliana; identical to SEQ ID NO: 21352
  misc_feature (1)..(646): Ceres Seq. ID no. 12601909
  misc_feature: MA Experiment ID: 108434 Result: Up-regulated in Transcription
  misc_feature: MA Experiment 108434 PARAMETER Experiment Name: At_Root_Tips_cDNA_P Parameter: Tissue Value: Root Tips
  misc_feature: MA Experiment ID: 20000286 Result: Up-regulated in Transcription
  misc_feature: MA Experiment 20000286 PARAMETER Experiment Name: At_Open_Flower_P Parameter: Age (day) Value: 21
  misc_feature: MA Experiment 20000286 PARAMETER Experiment Name: At_Open_Flower_P Parameter: Plant Line Value: WS
  misc_feature: MA Experiment 20000286 PARAMETER Experiment Name: At_Open_Flower_P Parameter: Tissue Value: Half Open vs. Whole Plant
  misc_feature: MA Experiment ID: 20000495 Result: Down-regulated in Transcription
  misc_feature: MA Experiment 20000495 PARAMETER Experiment Name: At_Guard_Cells_P Parameter: Harvest Date Value: 8/2/2002
  misc_feature: MA Experiment 20000495 PARAMETER Experiment Name: At_Guard_Cells_P Parameter: Organism Value: A. thaliana
  misc_feature: MA Experiment 20000495 PARAMETER Experiment Name: At_Guard_Cells_P Parameter: Tissue Value: Guard Cells vs. Leaves
  misc_feature: MA Experiment ID: 20001451 Result: Down-regulated in Transcription
  misc_feature: MA Experiment 20001451 PARAMETER Experiment Name: At_Far-red-induction_P Parameter: Age (day) Value: 7
  misc_feature: MA Experiment 20001451 PARAMETER Experiment Name: At_Far-red-induction_P Parameter: Light Value: Far-red vs. White
  misc_feature: MA Experiment 20001451 PARAMETER Experiment Name: At_Far-red-induction_P Parameter: Organism Value: A. thaliana
  misc_feature: MA Experiment 20001451 PARAMETER Experiment Name: At_Far-red-induction_P Parameter: Plant Line Value: Columbia
  misc_feature: MA Experiment 20001451 PARAMETER Experiment Name: At_Far-red-induction_P Parameter: Timepoint (hr) Value: 24
  misc_feature: MA Experiment 20001451 PARAMETER Experiment Name: At_Far-red-induction_P Parameter: Tissue Value: Whole Plant

SEQ ID NO: 49952 - protein, 116 aa, Arabidopsis thaliana; identical to SEQ ID NO: 21353
  peptide (1)..(116): Ceres Seq. ID no. 12601910
  misc_feature (1)..(105): Homolog of NCBI NO: 21704274 NR Description: DNA directed RNA polymerase II polypeptide
  misc_feature (1)..(105): Homolog of NCBI NO: 21704272 NR Description: DNA directed RNA polymerase II polypeptide
  misc_feature (1)..(105): Homolog of NCBI NO: 31239143 NR Description: ENSANGP00000016837 [Anopheles gambiae]
  misc_feature (1)..(106): Homolog of NCBI NO: 19921456 NR Description: CG6840-PA [Drosophila melanogaster]
  misc_feature (1)..(105): Homolog of NCBI NO: 11595485 NR Description: RPB11a protein [Homo sapiens]
  misc_feature (1)..(109): Homolog of NCBI NO: 6755362 NR Description: polymerase (RNA) II (DNA directed) polypeptide J
  misc_feature (1)..(109): Homolog of NCBI NO: 5453932 NR Description: DNA directed RNA polymerase II polypeptide J
  misc_feature (1)..(114): Homolog of NCBI NO: 28828983 NR Description: similar to DNA-directed RNA polymerase II 13.6K
  misc_feature (1)..(115): Homolog of NCBI NO: 34394446 NR Description: putative DNA-directed RNA polymerase II 13.6K
  misc_feature (1)..(116): Homolog of NCBI NO: 15231127 NR Description: DNA-directed RNA polymerase II 13.6K chain
  misc_feature (1)..(105): Homolog of NCBI NO: 21704274 NR Description: DNA directed RNA polymerase II polypeptide
  misc_feature (1)..(105): Homolog of NCBI NO: 21704272 NR Description: DNA directed RNA polymerase II polypeptide
  misc_feature (1)..(105): Homolog of NCBI NO: 31239143 NR Description: ENSANGP00000016837 [Anopheles gambiae]
  misc_feature (1)..(106): Homolog of NCBI NO: 19921456 NR Description: CG6840-PA [Drosophila melanogaster]
  misc_feature (1)..(105): Homolog of NCBI NO: 11595485 NR Description: RPB11a protein [Homo sapiens]
  misc_feature (1)..(109): Homolog of NCBI NO: 6755362 NR Description: polymerase (RNA) II (DNA directed) polypeptide J
  misc_feature (1)..(109): Homolog of NCBI NO: 5453932 NR Description: DNA directed RNA polymerase II polypeptide J
  misc_feature (1)..(114): Homolog of NCBI NO: 28828983 NR Description: similar to DNA-directed RNA polymerase II 13.6K
  misc_feature (1)..(115): Homolog of NCBI NO: 34394446 NR Description: putative DNA-directed RNA polymerase II 13.6K
  misc_feature (1)..(116): Homolog of NCBI NO: 15231127 NR Description: DNA-directed RNA polymerase II 13.6K chain

SEQ ID NO: 49953 - protein, 70 aa, Arabidopsis thaliana; identical to SEQ ID NO: 21354
  peptide (1)..(70): Ceres Seq. ID no. 12601911

SEQ ID NO: 49954 - protein, 69 aa, Arabidopsis thaliana; identical to SEQ ID NO: 21355
  peptide (1)..(69): Ceres Seq. ID no. 12601912
  misc_feature (1)..(58): Homolog of NCBI NO: 21704274 NR Description: DNA directed RNA polymerase II polypeptide
  misc_feature (1)..(58): Homolog of NCBI NO: 21704272 NR Description: DNA directed RNA polymerase II polypeptide
  misc_feature (1)..(58): Homolog of NCBI NO: 31239143 NR Description: ENSANGP00000016837 [Anopheles gambiae]
  misc_feature (1)..(59): Homolog of NCBI NO: 19921456 NR Description: CG6840-PA [Drosophila melanogaster]
  misc_feature (1)..(58): Homolog of NCBI NO: 11595485 NR Description: RPB11a protein [Homo sapiens]
  misc_feature (1)..(62): Homolog of NCBI NO: 6755362 NR Description: polymerase (RNA) II (DNA directed) polypeptide J
  misc_feature (1)..(62): Homolog of NCBI NO: 5453932 NR Description: DNA directed RNA polymerase II polypeptide J
  misc_feature (1)..(67): Homolog of NCBI NO: 28828983 NR Description: similar to DNA-directed RNA polymerase II 13.6K
  misc_feature (1)..(68): Homolog of NCBI NO: 34394446 NR Description: putative DNA-directed RNA polymerase II 13.6K
  misc_feature (1)..(69): Homolog of NCBI NO: 15231127 NR Description: DNA-directed RNA polymerase II 13.6K chain
  misc_feature (1)..(58): Homolog of NCBI NO: 21704274 NR Description: DNA directed RNA polymerase II polypeptide
  misc_feature (1)..(58): Homolog of NCBI NO: 21704272 NR Description: DNA directed RNA polymerase II polypeptide
  misc_feature (1)..(58): Homolog of NCBI NO: 31239143 NR Description: ENSANGP00000016837 [Anopheles gambiae]
  misc_feature (1)..(59): Homolog of NCBI NO: 19921456 NR Description: CG6840-PA [Drosophila melanogaster]
  misc_feature (1)..(58): Homolog of NCBI NO: 11595485 NR Description: RPB11a protein [Homo sapiens]
  misc_feature (1)..(62): Homolog of NCBI NO: 6755362 NR Description: polymerase (RNA) II (DNA directed) polypeptide J
  misc_feature (1)..(62): Homolog of NCBI NO: 5453932 NR Description: DNA directed RNA polymerase II polypeptide J
  misc_feature (1)..(67): Homolog of NCBI NO: 28828983 NR Description: similar to DNA-directed RNA polymerase II 13.6K
  misc_feature (1)..(68): Homolog of NCBI NO: 34394446 NR Description: putative DNA-directed RNA polymerase II 13.6K
  misc_feature (1)..(69): Homolog of NCBI NO: 15231127 NR Description: DNA-directed RNA polymerase II 13.6K chain

SEQ ID NO: 49955 - DNA, 1166 bp, Arabidopsis thaliana; identical to SEQ ID NO: 45209
  misc_feature (1)..(1166): Ceres Seq. ID no. 13591615
  misc_feature: MA Experiment ID: 20000180 Result: Up-regulated in Transcription
  misc_feature: MA Experiment 20000180 PARAMETER Experiment Name: At_Germinating_Seeds_P Parameter: Age (hr) Value: 24 vs. 0
  misc_feature: MA Experiment 20000180 PARAMETER Experiment Name: At_Germinating_Seeds_P Parameter: Tissue Value: Germinating Seeds
  misc_feature: MA Experiment ID: 20000182 Result: Up-regulated in Transcription
  misc_feature: MA Experiment 20000182 PARAMETER Experiment Name: At_2mM_SA_P Parameter: Age (day) Value: 14
  misc_feature: MA Experiment 20000182 PARAMETER Experiment Name: At_2mM_SA_P Parameter: Organism Value: A. thaliana
  misc_feature: MA Experiment 20000182 PARAMETER Experiment Name: At_2mM_SA_P Parameter: Plant Line Value: WS
  misc_feature: MA Experiment 20000182 PARAMETER Experiment Name: At_2mM_SA_P Parameter: Timepoint (hr) Value: 6
  misc_feature: MA Experiment 20000182 PARAMETER Experiment Name: At_2mM_SA_P Parameter: Tissue Value: Aerial
  misc_feature: MA Experiment 20000182 PARAMETER Experiment Name: At_2mM_SA_P Parameter: Treatment Value: 2mM SA vs. No Treatment
  misc_feature: MA Experiment ID: 20000185 Result: Up-regulated in Transcription
  misc_feature: MA Experiment 20000185 PARAMETER Experiment Name: At_Roots__P Parameter: Age (day) Value: 7 vs. 21
  misc_feature: MA Experiment 20000185 PARAMETER Experiment Name: At_Roots__P Parameter: Organism Value: A. thaliana
  misc_feature: MA Experiment 20000185 PARAMETER Experiment Name: At_Roots__P Parameter: Tissue Value: Roots vs. Whole Plant
  misc_feature: MA Experiment ID: 20000227 Result: Up-regulated in Transcription
  misc_feature: MA Experiment 20000227 PARAMETER Experiment Name: At_Root-Tips-vs-Tops_P Parameter: Tissue Value: Root Tips vs. Root Tops
  misc_feature: MA Experiment ID: 20000264 Result: Up-regulated in Transcription
  misc_feature: MA Experiment 20000264 PARAMETER Experiment Name: At_Open_Flower_P Parameter: Age (day) Value: 21
  misc_feature: MA Experiment 20000264 PARAMETER Experiment Name: At_Open_Flower_P Parameter: Plant Line Value: WS
  misc_feature: MA Experiment 20000264 PARAMETER Experiment Name: At_Open_Flower_P Parameter: Tissue Value: Open Flower vs. Whole Plant
  misc_feature: MA Experiment ID: 20000265 Result: Up-regulated in Transcription
  misc_feature: MA Experiment 20000265 PARAMETER Experiment Name: At_Open_Flower_P Parameter: Age (day) Value: 21
  misc_feature: MA Experiment 20000265 PARAMETER Experiment Name: At_Open_Flower_P Parameter: Plant Line Value: WS
  misc_feature: MA Experiment 20000265 PARAMETER Experiment Name: At_Open_Flower_P Parameter: Tissue Value: Closed Flower vs. Whole Plant
  misc_feature: MA Experiment ID: 20000286 Result: Up-regulated in Transcription
  misc_feature: MA Experiment 20000286 PARAMETER Experiment Name: At_Open_Flower_P Parameter: Age (day) Value: 21
  misc_feature: MA Experiment 20000286 PARAMETER Experiment Name: At_Open_Flower_P Parameter: Plant Line Value: WS
  misc_feature: MA Experiment 20000286 PARAMETER Experiment Name: At_Open_Flower_P Parameter: Tissue Value: Half Open vs. Whole Plant
  misc_feature: MA Experiment ID: 20000439 Result: Up-regulated in Transcription
  misc_feature: MA Experiment 20000439 PARAMETER Experiment Name: At_Roots__P Parameter: Age (day) Value: 14 vs. 21
  misc_feature: MA Experiment 20000439 PARAMETER Experiment Name: At_Roots__P Parameter: Organism Value: A. thaliana
  misc_feature: MA Experiment 20000439 PARAMETER Experiment Name: At_Roots__P Parameter: Tissue Value: Roots vs. Whole Plant
  misc_feature: MA Experiment ID: 20000496 Result: Up-regulated in Transcription
  misc_feature: MA Experiment 20000496 PARAMETER Experiment Name: At_Guard_Cells_P Parameter: Harvest Date Value: 7/19/2002
  misc_feature: MA Experiment 20000496 PARAMETER Experiment Name: At_Guard_Cells_P Parameter: Organism Value: Canola
  misc_feature: MA Experiment 20000496 PARAMETER Experiment Name: At_Guard_Cells_P Parameter: Tissue Value: Guard Cells vs. Leaves
  misc_feature: MA Experiment ID: 20000527 Result: Down-regulated in Transcription
  misc_feature: MA Experiment 20000527 PARAMETER Experiment Name: At_10percent_PEG_P Parameter: Age (day) Value: 20
  misc_feature: MA Experiment 20000527 PARAMETER Experiment Name: At_10percent_PEG_P Parameter: Organism Value: A. thaliana
  misc_feature: MA Experiment 20000527 PARAMETER Experiment Name: At_10percent_PEG_P Parameter: Plant Line Value: WS
  misc_feature: MA Experiment 20000527 PARAMETER Experiment Name: At_10percent_PEG_P Parameter: Timepoint (day) Value: 20
  misc_feature: MA Experiment 20000527 PARAMETER Experiment Name: At_10percent_PEG_P Parameter: Tissue Value: Whole Plant
  misc_feature: MA Experiment 20000527 PARAMETER Experiment Name: At_10percent_PEG_P Parameter: Treatment Value: 10percent PEG vs. No Treatment
  misc_feature: MA Experiment ID: 20001248 Result: Down-regulated in Transcription
  misc_feature: MA Experiment 20001248 PARAMETER Experiment Name: At_Far-red-induction_P Parameter: Age (day) Value: 7
  misc_feature: MA Experiment 20001248 PARAMETER Experiment Name: At_Far-red-induction_P Parameter: Light Value: Far-red vs. White
  misc_feature: MA Experiment 20001248 PARAMETER Experiment Name: At_Far-red-induction_P Parameter: Organism Value: A. thaliana
  misc_feature: MA Experiment 20001248 PARAMETER Experiment Name: At_Far-red-induction_P Parameter: Plant Line Value: Columbia
  misc_feature: MA Experiment 20001248 PARAMETER Experiment Name: At_Far-red-induction_P Parameter: Timepoint (hr) Value: 4
  misc_feature: MA Experiment 20001248 PARAMETER Experiment Name: At_Far-red-induction_P Parameter: Tissue Value: Whole Plant

SEQ ID NO: 49956 - protein, 385 aa, Arabidopsis thaliana; identical to SEQ ID NO: 45210
  peptide (1)..(385): Ceres Seq. ID no. 13591616
  misc_feature (49)..(361): Pfam Name: GDSL-like Lipase/Acylhydrolase Pfam Description: GDSL-like Lipase/Acylhydrolase
  misc_feature (49)..(361): Pfam Name: GDSL-like Lipase/Acylhydrolase Pfam Description: GDSL-like Lipase/Acylhydrolase
  misc_feature (19)..(384): Homolog of NCBI NO: 15221018 NR Description: GDSL-motif lipase/hydrolase protein [Arabidopsis
  misc_feature (27)..(384): Homolog of NCBI NO: 15231809 NR Description: GDSL-motif lipase/hydrolase protein [Arabidopsis
  misc_feature (19)..(106): Homolog of NCBI NO: 25405682 NR Description: hypothetical protein F15I1.7 [imported] -
  misc_feature (95)..(384): Homolog of NCBI NO: 25405682 NR Description: hypothetical protein F15I1.7 [imported] -
  misc_feature (16)..(364): Homolog of NCBI NO: 15220995 NR Description: GDSL-motif lipase/hydrolase protein [Arabidopsis
  misc_feature (19)..(384): Homolog of NCBI NO: 15221018 NR Description: GDSL-motif lipase/hydrolase protein [Arabidopsis
  misc_feature (19)..(106): Homolog of NCBI NO: 25405682 NR Description: hypothetical protein F15I1.7 [imported] -
  misc_feature (16)..(364): Homolog of NCBI NO: 15220995 NR Description: GDSL-motif lipase/hydrolase protein [Arabidopsis
  misc_feature (1)..(385): Homolog of NCBI NO: 30695607 NR Description: GDSL-motif lipase/hydrolase protein [Arabidopsis
  misc_feature (7)..(385): Homolog of NCBI NO: 25336254 NR Description: hypothetical protein T18A20.15 [imported] -
  misc_feature (25)..(384): Homolog of NCBI NO: 21358785 NR Description: lipase SIL1 [Brassica rapa subsp. pekinensis]
  misc_feature (16)..(384): Homolog of NCBI NO: 25336255 NR Description: hypothetical protein F15I1.2 [imported] -
  misc_feature (26)..(384): Homolog of NCBI NO: 15237530 NR Description: GDSL-motif lipase/hydrolase protein [Arabidopsis
  misc_feature (95)..(384): Homolog of NCBI NO: 25405682 NR Description: hypothetical protein F15I1.7 [imported] -
  misc_feature (27)..(384): Homolog of NCBI NO: 15231809 NR Description: GDSL-motif lipase/hydrolase protein [Arabidopsis
  misc_feature (26)..(384): Homolog of NCBI NO: 15237530 NR Description: GDSL-motif lipase/hydrolase protein [Arabidopsis
  misc_feature (16)..(384): Homolog of NCBI NO: 25336255 NR Description: hypothetical protein F15I1.2 [imported] -
  misc_feature (25)..(384): Homolog of NCBI NO: 21358785 NR Description: lipase SIL1 [Brassica rapa subsp. pekinensis]
  misc_feature (7)..(385): Homolog of NCBI NO: 25336254 NR Description: hypothetical protein T18A20.15 [imported] -
  misc_feature (1)..(385): Homolog of NCBI NO: 30695607 NR Description: GDSL-motif lipase/hydrolase protein [Arabidopsis

SEQ ID NO: 49957 - protein, 379 aa, Arabidopsis thaliana; identical to SEQ ID NO: 45211
  peptide (1)..(379): Ceres Seq. ID no. 13591617
  misc_feature (43)..(355): Pfam Name: GDSL-like Lipase/Acylhydrolase Pfam Description: GDSL-like Lipase/Acylhydrolase
  misc_feature (43)..(355): Pfam Name: GDSL-like Lipase/Acylhydrolase Pfam Description: GDSL-like Lipase/Acylhydrolase
  misc_feature (13)..(378): Homolog of NCBI NO: 15221018 NR Description: GDSL-motif lipase/hydrolase protein [Arabidopsis
  misc_feature (21)..(378): Homolog of NCBI NO: 15231809 NR Description: GDSL-motif lipase/hydrolase protein [Arabidopsis
  misc_feature (13)..(100): Homolog of NCBI NO: 25405682 NR Description: hypothetical protein F15I1.7 [imported] -
  misc_feature (89)..(378): Homolog of NCBI NO: 25405682 NR Description: hypothetical protein F15I1.7 [imported] -
  misc_feature (10)..(358): Homolog of NCBI NO: 15220995 NR Description: GDSL-motif lipase/hydrolase protein [Arabidopsis
  misc_feature (13)..(378): Homolog of NCBI NO: 15221018 NR Description: GDSL-motif lipase/hydrolase protein [Arabidopsis
  misc_feature (13)..(100): Homolog of NCBI NO: 25405682 NR Description: hypothetical protein F15I1.7 [imported] -
  misc_feature (10)..(358): Homolog of NCBI NO: 15220995 NR Description: GDSL-motif lipase/hydrolase protein [Arabidopsis
  misc_feature (1)..(379): Homolog of NCBI NO: 30695607 NR Description: GDSL-motif lipase/hydrolase protein [Arabidopsis
  misc_feature (1)..(379): Homolog of NCBI NO: 25336254 NR Description: hypothetical protein T18A20.15 [imported] -
  misc_feature (19)..(378): Homolog of NCBI NO: 21358785 NR Description: lipase SIL1 [Brassica rapa subsp. pekinensis]
  misc_feature (10)..(378): Homolog of NCBI NO: 25336255 NR Description: hypothetical protein F15I1.2 [imported] -
  misc_feature (20)..(378): Homolog of NCBI NO: 15237530 NR Description: GDSL-motif lipase/hydrolase protein [Arabidopsis
  misc_feature (89)..(378): Homolog of NCBI NO: 25405682 NR Description: hypothetical protein F15I1.7 [imported] -
  misc_feature (21)..(378): Homolog of NCBI NO: 15231809 NR Description: GDSL-motif lipase/hydrolase protein [Arabidopsis
  misc_feature (20)..(378): Homolog of NCBI NO: 15237530 NR Description: GDSL-motif lipase/hydrolase protein [Arabidopsis
  misc_feature (10)..(378): Homolog of NCBI NO: 25336255 NR Description: hypothetical protein F15I1.2 [imported] -
  misc_feature (19)..(378): Homolog of NCBI NO: 21358785 NR Description: lipase SIL1 [Brassica rapa subsp. pekinensis]
  misc_feature (1)..(379): Homolog of NCBI NO: 25336254 NR Description: hypothetical protein T18A20.15 [imported] -
  misc_feature (1)..(379): Homolog of NCBI NO: 30695607 NR Description: GDSL-motif lipase/hydrolase protein [Arabidopsis

SEQ ID NO: 49958 - DNA, 1258 bp, Arabidopsis thaliana
  misc_feature (1)..(1258): Ceres Seq. ID no. 13592599
  misc_feature: MA Experiment ID: 20000495 Result: Down-regulated in Transcription
  misc_feature: MA Experiment 20000495 PARAMETER Experiment Name: At_Guard_Cells_P Parameter: Harvest Date Value: 8/2/2002
  misc_feature: MA Experiment 20000495 PARAMETER Experiment Name: At_Guard_Cells_P Parameter: Organism Value: A. thaliana
  misc_feature: MA Experiment 20000495 PARAMETER Experiment Name: At_Guard_Cells_P Parameter: Tissue Value: Guard Cells vs. Leaves
  misc_feature: MA Experiment ID: 20001451 Result: Down-regulated in Transcription
  misc_feature: MA Experiment 20001451 PARAMETER Experiment Name: At_Far-red-induction_P Parameter: Age (day) Value: 7
  misc_feature: MA Experiment 20001451 PARAMETER Experiment Name: At_Far-red-induction_P Parameter: Light Value: Far-red vs. White
  misc_feature: MA Experiment 20001451 PARAMETER Experiment Name: At_Far-red-induction_P Parameter: Organism Value: A. thaliana
  misc_feature: MA Experiment 20001451 PARAMETER Experiment Name: At_Far-red-induction_P Parameter: Plant Line Value: Columbia
  misc_feature: MA Experiment 20001451 PARAMETER Experiment Name: At_Far-red-induction_P Parameter: Timepoint (hr) Value: 24
  misc_feature: MA Experiment 20001451 PARAMETER Experiment Name: At_Far-red-induction_P Parameter: Tissue Value: Whole Plant
ggaaaagatttttcaagctctctctttctctcgaaggtaaatgcttctctgatttcaccatttttgcttactcgattcaaaagacatgtcgccggcagctacggagacggagcgatggtgcgttgttaccggcggtagaggattcgcggcgaggcatcttgttgaaatgctcgtacgctacgaaatgttttgcgtccgtatcgccgatttagctccggcgataatgcttgatcctcaggaagggaacggagttctcgacgaaggattaagatctggtcgtgttcaatatatctccgctgatcttcgagataaatctcaagtcgttaaagcttttcagggagcggaggtggtgtttcatatggcagctccagattcttctattaacaatcatcagcttcagtattcggtgaatgttcaagggacacaaaatgtgattgatgcttgtgttgatgttggagtaaagaggcttatttacactagctctcctagtgttgtgtttgatggtgttcatggtattttgaacggtactgaatcaatggcttacccaattaagcacaatgactcatattcagcaactaaagctgaaggagaagagttgatcatgaaggctaatggtagaaatggactactcacttgttgcatacgtccaagcagtatttttggtcccggtgatagattattggttccgtcgcttgttgctgctgctagggctgggaaatctaagtttattattggtgatgggaataatctctatgatttcacttacgttgagaatgttgctcatgcccatgtttgtgctgagcgtgctctagcttcaggaggagatgtttctacaaaagctgcaggacaggcatatttcattaccaacatggagccaattaaattttgggaatttatgtcacagctccttgatggacttggttacgagaggccaagcataaagatccctgcgtttatcatgatgccgattgcgcatctggttgaactgacatataaagtgttgggaccatatgggatgacagtaccacaactaacaccttcaagagttaggcttctctcatgcagcagaactttcgattccacgaaagcaaaggatcgactaggctatgctcctgtggtcccacttcaggaaggtatacggaggacgatagactcattctctcacctaacagctggaagtcaatccaaaagagagggcccatccaaggcttctaggattcttggaggcggaaagggtatgaccatatatttcaattag

SEQ ID NO: 49959 - protein, 390 aa, Arabidopsis thaliana
  peptide (1)..(390): Ceres Seq. ID no. 13592600
  misc_feature (8)..(358): Pfam Name: 3-beta hydroxysteroid dehydrogenase/isomerase family Pfam Description: 3-beta hydroxysteroid dehydrogenase/isomerase
  misc_feature (57)..(361): Homolog of NCBI NO: 31127258 NR Description: Nsdhl protein [Mus musculus]
  misc_feature (12)..(83): Homolog of NCBI NO: 25408868 NR Description: probable sterol dehydrogenase [imported] -
  misc_feature (84)..(358): Homolog of NCBI NO: 25408868 NR Description: probable sterol dehydrogenase [imported] -
  misc_feature (12)..(383): Homolog of NCBI NO: 18406234 NR Description: 3-beta hydroxysteroid dehydrogenase/isomerase
  misc_feature (255)..(383): Homolog of NCBI NO: 21539467 NR Description: 3-beta-hydroxysteroid dehydrogenase [Arabidopsis
  misc_feature (1)..(213): Homolog of NCBI NO: 23198272 NR Description: 3-beta-hydroxysteroid dehydrogenase [Arabidopsis
  misc_feature (6)..(370): Homolog of NCBI NO: 30694041 NR Description: 3-beta hydroxysteroid dehydrogenase/isomerase
  misc_feature (6)..(374): Homolog of NCBI NO: 21553411 NR Description: 3-beta-hydroxysteroid dehydrogenase, putative
  misc_feature (6)..(374): Homolog of NCBI NO: 18401656 NR Description: 3-beta hydroxysteroid dehydrogenase/isomerase
  misc_feature (1)..(390): Homolog of NCBI NO: 15225272 NR Description: 3-beta hydroxysteroid dehydrogenase/isomerase
MSPAATETERWCVVTGGRGFAARHLVEMLVRYEMFCVRIADLAPAIMLDPQEGNGVLDEGLRSGRVQYISADLRDKSQVVKAFQGAEVVFHMAAPDSSINNHQLQYSVNVQGTQNVIDACVDVGVKRLIYTSSPSVVFDGVHGILNGTESMAYPIKHNDSYSATKAEGEELIMKANGRNGLLTCCIRPSSIFGPGDRLLVPSLVAAARAGKSKFIIGDGNNLYDFTYVENVAHAHVCAERALASGGDVSTKAAGQAYFITNMEPIKFWEFMSQLLDGLGYERPSIKIPAFIMMPIAHLVELTYKVLGPYGMTVPQLTPSRVRLLSCSRTFDSTKAKDRLGYAPVVPLQEGIRRTIDSFSHLTAGSQSKREGPSKASRILGGGKGMTIYFN

SEQ ID NO: 49960 - protein, 363 aa, Arabidopsis thaliana
  peptide (1)..(363): Ceres Seq. ID no. 13592601
  misc_feature (1)..(331): Pfam Name: 3-beta hydroxysteroid dehydrogenase/isomerase family Pfam Description: 3-beta hydroxysteroid dehydrogenase/isomerase
  misc_feature (30)..(334): Homolog of NCBI NO: 31127258 NR Description: Nsdhl protein [Mus musculus]
  misc_feature (1)..(56): Homolog of NCBI NO: 25408868 NR Description: probable sterol dehydrogenase [imported] -
  misc_feature (57)..(331): Homolog of NCBI NO: 25408868 NR Description: probable sterol dehydrogenase [imported] -
  misc_feature (1)..(356): Homolog of NCBI NO: 18406234 NR Description: 3-beta hydroxysteroid dehydrogenase/isomerase
  misc_feature (228)..(356): Homolog of NCBI NO: 21539467 NR Description: 3-beta-hydroxysteroid dehydrogenase [Arabidopsis
  misc_feature (1)..(186): Homolog of NCBI NO: 23198272 NR Description: 3-beta-hydroxysteroid dehydrogenase [Arabidopsis
  misc_feature (1)..(343): Homolog of NCBI NO: 30694041 NR Description: 3-beta hydroxysteroid dehydrogenase/isomerase
  misc_feature (1)..(347): Homolog of NCBI NO: 21553411 NR Description: 3-beta-hydroxysteroid dehydrogenase, putative
  misc_feature (1)..(347): Homolog of NCBI NO: 18401656 NR Description: 3-beta hydroxysteroid dehydrogenase/isomerase
  misc_feature (1)..(363): Homolog of NCBI NO: 15225272 NR Description: 3-beta hydroxysteroid dehydrogenase/isomerase
MLVRYEMFCVRIADLAPAIMLDPQEGNGVLDEGLRSGRVQYISADLRDKSQVVKAFQGAEVVFHMAAPDSSINNHQLQYSVNVQGTQNVIDACVDVGVKRLIYTSSPSVVFDGVHGILNGTESMAYPIKHNDSYSATKAEGEELIMKANGRNGLLTCCIRPSSIFGPGDRLLVPSLVAAARAGKSKFIIGDGNNLYDFTYVENVAHAHVCAERALASGGDVSTKAAGQAYFITNMEPIKFWEFMSQLLDGLGYERPSIKIPAFIMMPIAHLVELTYKVLGPYGMTVPQLTPSRVRLLSCSRTFDSTKAKDRLGYAPVVPLQEGIRRTIDSFSHLTAGSQSKREGPSKASRILGGGKGMTIYFN

SEQ ID NO: 49961 - protein, 357 aa, Arabidopsis thaliana
  peptide (1)..(357): Ceres Seq. ID no. 13592602
  misc_feature (1)..(325): Pfam Name: 3-beta hydroxysteroid dehydrogenase/isomerase family Pfam Description: 3-beta hydroxysteroid dehydrogenase/isomerase
  misc_feature (24)..(328): Homolog of NCBI NO: 31127258 NR Description: Nsdhl protein [Mus musculus]
  misc_feature (1)..(50): Homolog of NCBI NO: 25408868 NR Description: probable sterol dehydrogenase [imported] -
  misc_feature (51)..(325): Homolog of NCBI NO: 25408868 NR Description: probable sterol dehydrogenase [imported] -
  misc_feature (1)..(350): Homolog of NCBI NO: 18406234 NR Description: 3-beta hydroxysteroid dehydrogenase/isomerase
  misc_feature (222)..(350): Homolog of NCBI NO: 21539467 NR Description: 3-beta-hydroxysteroid dehydrogenase [Arabidopsis
  misc_feature (1)..(180): Homolog of NCBI NO: 23198272 NR Description: 3-beta-hydroxysteroid dehydrogenase [Arabidopsis
  misc_feature (1)..(337): Homolog of NCBI NO: 30694041 NR Description: 3-beta hydroxysteroid dehydrogenase/isomerase
  misc_feature (1)..(341): Homolog of NCBI NO: 21553411 NR Description: 3-beta-hydroxysteroid dehydrogenase, putative
  misc_feature (1)..(341): Homolog of NCBI NO: 18401656 NR Description: 3-beta hydroxysteroid dehydrogenase/isomerase
  misc_feature (1)..(357): Homolog of NCBI NO: 15225272 NR Description: 3-beta hydroxysteroid dehydrogenase/isomerase
MFCVRIADLAPAIMLDPQEGNGVLDEGLRSGRVQYISADLRDKSQVVKAFQGAEVVFHMAAPDSSINNHQLQYSVNVQGTQNVIDACVDVGVKRLIYTSSPSVVFDGVHGILNGTESMAYPIKHNDSYSATKAEGEELIMKANGRNGLLTCCIRPSSIFGPGDRLLVPSLVAAARAGKSKFIIGDGNNLYDFTYVENVAHAHVCAERALASGGDVSTKAAGQAYFITNMEPIKFWEFMSQLLDGLGYERPSIKIPAFIMMPIAHLVELTYKVLGPYGMTVPQLTPSRVRLLSCSRTFDSTKAKDRLGYAPVVPLQEGIRRTIDSFSHLTAGSQSKREGPSKASRILGGGKGMTIYFN

SEQ ID NO: 49962 - DNA, 1627 bp, Arabidopsis thaliana
  misc_feature (1)..(1627): Ceres Seq. ID no. 12591332
  misc_feature: MA Experiment ID: 20000306 Result: Up-regulated in Transcription
  misc_feature: MA Experiment 20000306 PARAMETER Experiment Name: At_Germinating_Seeds_Sub_P Parameter: Age (hr) Value: 6 vs. 0
  misc_feature: MA Experiment 20000306 PARAMETER Experiment Name: At_Germinating_Seeds_Sub_P Parameter: Organism Value: A. thaliana
  misc_feature: MA Experiment 20000306 PARAMETER Experiment Name: At_Germinating_Seeds_Sub_P Parameter: Plant Line Value: WS
  misc_feature: MA Experiment 20000306 PARAMETER Experiment Name: At_Germinating_Seeds_Sub_P Parameter: Tissue Value: Germinating Seeds
  misc_feature: MA Experiment ID: 20000307 Result: Up-regulated in Transcription
  misc_feature: MA Experiment 20000307 PARAMETER Experiment Name: At_Germinating_Seeds_Sub_P Parameter: Age (hr) Value: 24 vs. 0
  misc_feature: MA Experiment 20000307 PARAMETER Experiment Name: At_Germinating_Seeds_Sub_P Parameter: Organism Value: A. thaliana
  misc_feature: MA Experiment 20000307 PARAMETER Experiment Name: At_Germinating_Seeds_Sub_P Parameter: Plant Line Value: WS
  misc_feature: MA Experiment 20000307 PARAMETER Experiment Name: At_Germinating_Seeds_Sub_P Parameter: Tissue Value: Germinating Seeds
aaaacaattgtctacattcatcttcttcttcttcaaacaaaaaatgggtttcttaaagttatctccaatgatccttctcctagcaatgatcggcgtttcatatgccatggacatgtcaatcatctcctacgacgaaaaccaccacatcaccaccgagaccagccgtagcgactcggaggttgagagaatctacgaagcgtggatggtggaacacgggaagaagaagatgaatcaaaacggtcttggtgcagagaaagatcaaagattcgagatctttaaagataatcttcgtttcatcgatgaacataacaccaaaaacctcagttataaacttggtttaacccggtttgctgatttaaccaatgaggagtaccgatctatgtaccttggtgctaaaccgaccaagagggttttgaaaaccagtgatcggtatcaggcgcgtgttggtgacgcgcttcctgattcggttgactggagaaaagaaggtgccgtcgctgatgttaaagatcaaggaagctgtgggagttgttgggcattctcaactattggagcagtggaaggaataaacaagattgtgacaggagatttaatatctttgtctgaacaagaattggttgattgtgacacatcttataaccaaggatgtaatggtggtttaatggactatgcgtttgagtttattatcaaaaatggtggtattgataccgaagcggattatccttacaaggctgctgatggtcgttgtgaccagaacaggaaaaatgctaaggttgttaccattgattcatatgaagatgtccctgagaacagcgaggcgtctctaaagaaagctttggctcaccagcctattagtgtcgccattgaagcgggtggtcgcgctttccagctctattcttcgggtgtatttgatggactttgtgggacggagttagaccacggtgttgtggctgtgggttatggaaccgagaacggaaaggactactggattgtgagaaactcatggggaaacagatggggagagagcggatacataaagatggcacgtaacattgaagcgccaacaggaaagtgtggaatcgctatggaggcttcgtatccgatcaagaaaggtcagaacccaccaaaccctggcccgtcaccaccatctcccattaagccaccaaccacatgtgacaagtacttctcttgccctgagagcaacacttgttgttgtctctacaagtatggtaagtactgcttcggatggggatgttgcccgctcgaagctgctacttgctgcgatgataactcaagttgctgtcctcatgagtacccggtttgtgacgttaaccgcggaacctgtttgatgagcaagaacagtccgtttagcgtgaaggctttaaagcgtacacccgcaataccgttctgggcaaagagcagaaagcacattgcgtaagaagaggaagacaaaaacattgagaattcatcaaaagcattttatgttgttgttgttcagatttaaaaattgctgattctgctgctgaggttttctgtacatataaaacctctccctaagtttcattcagtttcatcattgttaaagtaactaactcagaacaaatgggtttggttattaatctctttcaac

SEQ ID NO: 49963 - protein, 477 aa, Arabidopsis thaliana
  peptide (1)..(477): Ceres Seq. ID no. 12591333
  misc_feature (152)..(367): Pfam Name: Papain family cysteine protease Pfam Description: Papain family cysteine protease
  misc_feature (19)..(475): Homolog of NCBI NO: 100069 NR Description: cysteine proteinase tpp (EC 3.4.22.-) - garden
  misc_feature (24)..(472): Homolog of NCBI NO: 6682829 NR Description: cysteine protease component of protease-inhibitor
  misc_feature (18)..(467): Homolog of NCBI NO: 129231 NR Description: Oryzain alpha chain precursor
  misc_feature (15)..(465): Homolog of NCBI NO: 13897890 NR Description: putative cysteine protease [Ipomoea batatas]
  misc_feature (24)..(470): Homolog of NCBI NO: 7435791 NR Description: cysteine proteinase (EC 3.4.22.-) 3 precursor -
  misc_feature (15)..(451): Homolog of NCBI NO: 18141285 NR Description: senescence-associated cysteine protease [Brassica
  misc_feature (15)..(477): Homolog of NCBI NO: 14517542 NR Description: F2G19.31/F2G19.31 [Arabidopsis thaliana]
  misc_feature (15)..(477): Homolog of NCBI NO: 18401614 NR Description: cysteine proteinase RD21A
  misc_feature (15)..(477): Homolog of NCBI NO: 18141283 NR Description: senescence-associated cysteine protease [Brassica
  misc_feature (15)..(477): Homolog of NCBI NO: 18422289 NR Description: cysteine proteinase RD21A
KQLSTFIFFFFKQKMGFLKLSPMILLLAMIGVSYAMDMSIISYDENHHITTETSRSDSEVERIYEAWMVEHGKKKMNQNGLGAEKDQRFEIFKDNLRFIDEHNTKNLSYKLGLTRFADLTNEEYRSMYLGAKPTKRVLKTSDRYQARVGDALPDSVDWRKEGAVADVKDQGSCGSCWAFSTIGAVEGINKIVTGDLISLSEQELVDCDTSYNQGCNGGLMDYAFEFIIKNGGIDTEADYPYKAADGRCDQNRKNAKVVTIDSYEDVPENSEASLKKALAHQPISVAIEAGGRAFQLYSSGVFDGLCGTELDHGVVAVGYGTENGKDYWIVRNSWGNRWGESGYIKMARNIEAPTGKCGIAMEASYPIKKGQNPPNPGPSPPSPIKPPTTCDKYFSCPESNTCCCLYKYGKYCFGWGCCPLEAATCCDDNSSCCPHEYPVCDVNRGTCLMSKNSPFSVKALKRTPAIPFWAKSRKHIA

SEQ ID NO: 49964 - protein, 463 aa, Arabidopsis thaliana
  peptide (1)..(463): Ceres Seq. ID no. 12591334
  misc_feature (138)..(353): Pfam Name: Papain family cysteine protease Pfam Description: Papain family cysteine protease
  misc_feature (5)..(461): Homolog of NCBI NO: 100069 NR Description: cysteine proteinase tpp (EC 3.4.22.-) - garden
  misc_feature (10)..(458): Homolog of NCBI NO: 6682829 NR Description: cysteine protease component of protease-inhibitor
  misc_feature (4)..(453): Homolog of NCBI NO: 129231 NR Description: Oryzain alpha chain precursor
  misc_feature (1)..(451): Homolog of NCBI NO: 13897890 NR Description: putative cysteine protease [Ipomoea batatas]
  misc_feature (10)..(456): Homolog of NCBI NO: 7435791 NR Description: cysteine proteinase (EC 3.4.22.-) 3 precursor -
  misc_feature (1)..(437): Homolog of NCBI NO: 18141285 NR Description: senescence-associated cysteine protease [Brassica
  misc_feature (1)..(463): Homolog of NCBI NO: 14517542 NR Description: F2G19.31/F2G19.31 [Arabidopsis thaliana]
  misc_feature (1)..(463): Homolog of NCBI NO: 18401614 NR Description: cysteine proteinase RD21A
  misc_feature (1)..(463): Homolog of NCBI NO: 18141283 NR Description: senescence-associated cysteine protease [Brassica
  misc_feature (1)..(463): Homolog of NCBI NO: 18422289 NR Description: cysteine proteinase RD21A
MGFLKLSPMILLLAMIGVSYAMDMSIISYDENHHITTETSRSDSEVERIYEAWMVEHGKKKMNQNGLGAEKDQRFEIFKDNLRFIDEHNTKNLSYKLGLTRFADLTNEEYRSMYLGAKPTKRVLKTSDRYQARVGDALPDSVDWRKEGAVADVKDQGSCGSCWAFSTIGAVEGINKIVTGDLISLSEQELVDCDTSYNQGCNGGLMDYAFEFIIKNGGIDTEADYPYKAADGRCDQNRKNAKVVTIDSYEDVPENSEASLKKALAHQPISVAIEAGGRAFQLYSSGVFDGLCGTELDHGVVAVGYGTENGKDYWIVRNSWGNRWGESGYIKMARNIEAPTGKCGIAMEASYPIKKGQNPPNPGPSPPSPIKPPTTCDKYFSCPESNTCCCLYKYGKYCFGWGCCPLEAATCCDDNSSCCPHEYPVCDVNRGTCLMSKNSPFSVKALKRTPAIPFWAKSRKHIA

SEQ ID NO: 49965 - protein, 455 aa, Arabidopsis thaliana
  peptide (1)..(455): Ceres Seq. ID no. 12591335
  misc_feature (130)..(345): Pfam Name: Papain family cysteine protease Pfam Description: Papain family cysteine protease
  misc_feature (1)..(453): Homolog of NCBI NO: 100069 NR Description: cysteine proteinase tpp (EC 3.4.22.-) - garden
  misc_feature (2)..(450): Homolog of NCBI NO: 6682829 NR Description: cysteine protease component of protease-inhibitor
  misc_feature (1)..(445): Homolog of NCBI NO: 129231 NR Description: Oryzain alpha chain precursor
  misc_feature (1)..(443): Homolog of NCBI NO: 13897890 NR Description: putative cysteine protease [Ipomoea batatas]
  misc_feature (2)..(448): Homolog of NCBI NO: 7435791 NR Description: cysteine proteinase (EC 3.4.22.-) 3 precursor -
  misc_feature (1)..(429): Homolog of NCBI NO: 18141285 NR Description: senescence-associated cysteine protease [Brassica
  misc_feature (1)..(455): Homolog of NCBI NO: 14517542 NR Description: F2G19.31/F2G19.31 [Arabidopsis thaliana]
  misc_feature (1)..(455): Homolog of NCBI NO: 18401614 NR Description: cysteine proteinase RD21A
  misc_feature (1)..(455): Homolog of NCBI NO: 18141283 NR Description: senescence-associated cysteine protease [Brassica
  misc_feature (1)..(455): Homolog of NCBI NO: 18422289 NR Description: cysteine proteinase RD21A
MILLLAMIGVSYAMDMSIISYDENHHITTETSRSDSEVERIYEAWMVEHGKKKMNQNGLGAEKDQRFEIFKDNLRFIDEHNTKNLSYKLGLTRFADLTNEEYRSMYLGAKPTKRVLKTSDRYQARVGDALPDSVDWRKEGAVADVKDQGSCGSCWAFSTIGAVEGINKIVTGDLISLSEQELVDCDTSYNQGCNGGLMDYAFEFIIKNGGIDTEADYPYKAADGRCDQNRKNAKVVTIDSYEDVPENSEASLKKALAHQPISVAIEAGGRAFQLYSSGVFDGLCGTELDHGVVAVGYGTENGKDYWIVRNSWGNRWGESGYIKMARNIEAPTGKCGIAMEASYPIKKGQNPPNPGPSPPSPIKPPTTCDKYFSCPESNTCCCLYKYGKYCFGWGCCPLEAATCCDDNSSCCPHEYPVCDVNRGTCLMSKNSPFSVKALKRTPAIPFWAKSRKHIA

SEQ ID NO: 49966 - DNA, 1337 bp, Arabidopsis thaliana
  misc_feature (1)..(1337): Ceres Seq. ID no. 13592378
  misc_feature: MA Experiment ID: 108474 Result: Down-regulated in Transcription
  misc_feature: MA Experiment 108474 PARAMETER Experiment Name: At_Drought_Flowers_cDNA_P Parameter: Timepoint (hr) Value: null
  misc_feature: MA Experiment 108474 PARAMETER Experiment Name: At_Drought_Flowers_cDNA_P Parameter: Treatment Value: Drought vs. No Drought
  misc_feature: MA Experiment ID: 20000440 Result: Up-regulated in Transcription
  misc_feature: MA Experiment 20000440 PARAMETER Experiment Name: At_Closed-Flower__Sub_P Parameter: Tissue Value: Closed Flower vs. Whole Plant
gatccagaaaaaaaaaacgaaaaaaaacaaaaagaaataataaaacaaaaaacactttttatttttaaataaaaataaaataaaaaatgggatacacaaatgtgtccattttattaggtctgttggtggtctttgttacaccgatggtgttcgcagatgatgtgacaccaatcccagagggcaaaccccaagtggcgcagtggttcaatgccaacgttggtccattggctcaacgtaaaggcttagatcctgctcttgtagctgctgaggctgctccacgtatcatcaacgtgaatccaaagggtggtgaattcaaaacactaacggacgcaataaagagcgttcctgcagggaacacaaagcgggtgatcataaagatggctcctggtgagtacaaagagaaggtcactattgacaggaacaaacccttcattacattgatgggacaacccaatgccatgcctgttatcacctatgacggtaccgccgccaagtatggaaccgttgatagcgcctctctcataatcttatccgactatttcatggccgttaacatcgtcgttaagaacactgcgccggcaccagatggtaaaactaagggagcacaagctttatccatgagaatctccggaaattttgctgctttctacaactgcaaattctacggtttccaagacacaatctgtgacgatacaggaaaccatttcttcaaggattgttacgttgaaggaacattcgatttcatcttcggaagtggaacctctatgtacttgggaacacaattgcacgtggttggagacggtattagagtgatagcagcgcatgcaggaaagagcgcagaagagaagagtggatactctttcgtgcactgcaaggtgactggaaccggtggaggaatttatttgggaagagcatggatgagccaccctaaggttgtttatgcctacaccgagatgaccagcgttgtcaaccccaccggatggcaagaaaacaagactcccgcacatgacaaaaccgtgttctacggagagtacaagtgttcaggaccaggatcacacaaagccaagagagtaccattcacacaagacattgacgacaaagaagctaaccgtttcctatccctcggctacatccaaggatccaagtggcttctcccaccacccgctttgtaaactcttcaatatcaagtctaaaatcatattttgcacatatatcacttttaacaaaaaaattatttttacatatatcacttttagcaaactttttctttacctagtcgtcactacttacgaccctatgtatgcttttatgcaaagaaccgagaggtcgataatctg

SEQ ID NO: 49967 - protein, 361 aa, Arabidopsis thaliana
  peptide (1)..(361): Ceres Seq. ID no. 13592379
  misc_feature (74)..(352): Pfam Name: Pectinesterase Pfam Description: Pectinesterase
  misc_feature (1)..(359): Homolog of NCBI NO: 15240792 NR Description: pectinesterase family [Arabidopsis thaliana]
  misc_feature (1)..(360): Homolog of NCBI NO: 15240781 NR Description: pectinesterase family [Arabidopsis thaliana]
  misc_feature (1)..(44): Homolog of NCBI NO: 15240325 NR Description: pectinesterase family [Arabidopsis thaliana]
  misc_feature (68)..(360): Homolog of NCBI NO: 15240325 NR Description: pectinesterase family [Arabidopsis thaliana]
  misc_feature (1)..(360): Homolog of NCBI NO: 9758483 NR Description: pectin methylesterase-like protein [Arabidopsis
  misc_feature (20)..(361): Homolog of NCBI NO: 25404855 NR Description: probable pectin methylesterase T17F3.3
  misc_feature (20)..(361): Homolog of NCBI NO: 21593398 NR Description: pectin methyl-esterase-like protein [Arabidopsis
  misc_feature (20)..(361): Homolog of NCBI NO: 11358603 NR Description: pectin methyl-esterase-like protein - Arabidopsis
  misc_feature (1)..(361): Homolog of NCBI NO: 18415486 NR Description: pectinesterase family [Arabidopsis thaliana]
  misc_feature (1)..(361): Homolog of NCBI NO: 30697951 NR Description: pectinesterase family [Arabidopsis thaliana]
MGYTNVSILLGLLVVFVTPMVFADDVTPIPEGKPQVAQWFNANVGPLAQRKGLDPALVAAEAAPRIINVNPKGGEFKTLTDAIKSVPAGNTKRVIIKMAPGEYKEKVTIDRNKPFITLMGQPNAMPVITYDGTAAKYGTVDSASLIILSDYFMAVNIVVKNTAPAPDGKTKGAQALSMRISGNFAAFYNCKFYGFQDTICDDTGNHFFKDCYVEGTFDFIFGSGTSMYLGTQLHVVGDGIRVIAAHAGKSAEEKSGYSFVHCKVTGTGGGIYLGRAWMSHPKVVYAYTEMTSVVNPTGWQENKTPAHDKTVFYGEYKCSGPGSHKAKRVPFTQDIDDKEANRFLSLGYIQGSKWLLPPPAL

SEQ ID NO: 49968 - protein, 342 aa, Arabidopsis thaliana
  peptide (1)..(342): Ceres Seq. ID no. 13592380
  misc_feature (55)..(333): Pfam Name: Pectinesterase Pfam Description: Pectinesterase
  misc_feature (1)..(340): Homolog of NCBI NO: 15240792 NR Description: pectinesterase family [Arabidopsis thaliana]
  misc_feature (1)..(341): Homolog of NCBI NO: 15240781 NR Description: pectinesterase family [Arabidopsis thaliana]
  misc_feature (1)..(25): Homolog of NCBI NO: 15240325 NR Description: pectinesterase family [Arabidopsis thaliana]
  misc_feature (49)..(341): Homolog of NCBI NO: 15240325 NR Description: pectinesterase family [Arabidopsis thaliana]
  misc_feature (1)..(341): Homolog of NCBI NO: 9758483 NR Description: pectin methylesterase-like protein [Arabidopsis
  misc_feature (1)..(342): Homolog of NCBI NO: 25404855 NR Description: probable pectin methylesterase T17F3.3
  misc_feature (1)..(342): Homolog of NCBI NO: 21593398 NR Description: pectin methyl-esterase-like protein [Arabidopsis
  misc_feature (1)..(342): Homolog of NCBI NO: 11358603 NR Description: pectin methyl-esterase-like protein - Arabidopsis
  misc_feature (1)..(342): Homolog of NCBI NO: 18415486 NR Description: pectinesterase family [Arabidopsis thaliana]
  misc_feature (1)..(342): Homolog of NCBI NO: 30697951 NR Description: pectinesterase family [Arabidopsis thaliana]
MVFADDVTPIPEGKPQVAQWFNANVGPLAQRKGLDPALVAAEAAPRIINVNPKGGEFKTLTDAIKSVPAGNTKRVIIKMAPGEYKEKVTIDRNKPFITLMGQPNAMPVITYDGTAAKYGTVDSASLIILSDYFMAVNIVVKNTAPAPDGKTKGAQALSMRISGNFAAFYNCKFYGFQDTICDDTGNHFFKDCYVEGTFDFIFGSGTSMYLGTQLHVVGDGIRVIAAHAGKSAEEKSGYSFVHCKVTGTGGGIYLGRAWMSHPKVVYAYTEMTSVVNPTGWQENKTPAHDKTVFYGEYKCSGPGSHKAKRVPFTQDIDDKEANRFLSLGYIQGSKWLLPPPAL

SEQ ID NO: 49969 - protein, 264 aa, Arabidopsis thaliana
  peptide (1)..(264): Ceres Seq. ID no. 13592381
  misc_feature (1)..(255): Pfam Name: Pectinesterase Pfam Description: Pectinesterase
  misc_feature (1)..(258): Homolog of NCBI NO: 15241163 NR Description: pectinesterase family [Arabidopsis thaliana]
  misc_feature (1)..(262): Homolog of NCBI NO: 15240792 NR Description: pectinesterase family [Arabidopsis thaliana]
  misc_feature (1)..(263): Homolog of NCBI NO: 15240781 NR Description: pectinesterase family [Arabidopsis thaliana]
  misc_feature (1)..(263): Homolog of NCBI NO: 15240325 NR Description: pectinesterase family [Arabidopsis thaliana]
  misc_feature (1)..(263): Homolog of NCBI NO: 9758483 NR Description: pectin methylesterase-like protein [Arabidopsis
  misc_feature (1)..(264): Homolog of NCBI NO: 25404855 NR Description: probable pectin methylesterase T17F3.3
  misc_feature (1)..(264): Homolog of NCBI NO: 21593398 NR Description: pectin methyl-esterase-like protein [Arabidopsis
  misc_feature (1)..(264): Homolog of NCBI NO: 11358603 NR Description: pectin methyl-esterase-like protein - Arabidopsis
  misc_feature (1)..(264): Homolog of NCBI NO: 18415486 NR Description: pectinesterase family [Arabidopsis thaliana]
  misc_feature (1)..(264): Homolog of NCBI NO: 30697951 NR Description: pectinesterase family [Arabidopsis thaliana]
MAPGEYKEKVTIDRNKPFITLMGQPNAMPVITYDGTAAKYGTVDSASLIILSDYFMAVNIVVKNTAPAPDGKTKGAQALSMRISGNFAAFYNCKFYGFQDTICDDTGNHFFKDCYVEGTFDFIFGSGTSMYLGTQLHVVGDGIRVIAAHAGKSAEEKSGYSFVHCKVTGTGGGIYLGRAWMSHPKVVYAYTEMTSVVNPTGWQENKTPAHDKTVFYGEYKCSGPGSHKAKRVPFTQDIDDKEANRFLSLGYIQGSKWLLPPPAL

SEQ ID NO: 49970 - DNA, 1581 bp, Arabidopsis thaliana; identical to SEQ ID NO: 49485
  misc_feature (1)..(1581): Ceres Seq. ID no. 13592277
  misc_feature: MA Experiment ID: 20000173 Result: Down-regulated in Transcription
  misc_feature: MA Experiment 20000173 PARAMETER Experiment Name: At_42deg_Heat_P Parameter: Age (day) Value: 14
  misc_feature: MA Experiment 20000173 PARAMETER Experiment Name: At_42deg_Heat_P Parameter: Organism Value: A. thaliana
  misc_feature: MA Experiment 20000173 PARAMETER Experiment Name: At_42deg_Heat_P Parameter: Plant Line Value: WS
  misc_feature: MA Experiment 20000173 PARAMETER Experiment Name: At_42deg_Heat_P Parameter: Temperature (deg C) Value: 42 vs. 22
  misc_feature: MA Experiment 20000173 PARAMETER Experiment Name: At_42deg_Heat_P Parameter: Timepoint (hr) Value: 6
  misc_feature: MA Experiment 20000173 PARAMETER Experiment Name: At_42deg_Heat_P Parameter: Tissue Value: Aerial
  misc_feature: MA Experiment ID: 20000180 Result: Up-regulated in Transcription
  misc_feature: MA Experiment 20000180 PARAMETER Experiment Name: At_Germinating_Seeds_P Parameter: Age (hr) Value: 24 vs. 0
  misc_feature: MA Experiment 20000180 PARAMETER Experiment Name: At_Germinating_Seeds_P Parameter: Tissue Value: Germinating Seeds
  misc_feature: MA Experiment ID: 20000184 Result: Down-regulated in Transcription
  misc_feature: MA Experiment 20000184 PARAMETER Experiment Name: At_Shoots__P Parameter: Age (day) Value: 7
  misc_feature: MA Experiment 20000184 PARAMETER Experiment Name: At_Shoots__P Parameter: Tissue Value: Shoots vs. Whole Plant
  misc_feature: MA Experiment ID: 20000227 Result: Up-regulated in Transcription
  misc_feature: MA Experiment 20000227 PARAMETER Experiment Name: At_Root-Tips-vs-Tops_P Parameter: Tissue Value: Root Tips vs. Root Tops
  misc_feature: MA Experiment ID: 20000234 Result: Up-regulated in Transcription
  misc_feature: MA Experiment 20000234 PARAMETER Experiment Name: At_Siliques_P Parameter: Age (day) Value: 21
  misc_feature: MA Experiment 20000234 PARAMETER Experiment Name: At_Siliques_P Parameter: Organism Value: A. thaliana
  misc_feature: MA Experiment 20000234 PARAMETER Experiment Name: At_Siliques_P Parameter: Plant Line Value: WS
  misc_feature: MA Experiment 20000234 PARAMETER Experiment Name: At_Siliques_P Parameter: Tissue Value: Less Than 5mm Siliques vs. Whole Plant
  misc_feature: MA Experiment ID: 20000235 Result: Up-regulated in Transcription
  misc_feature: MA Experiment 20000235 PARAMETER Experiment Name: At_Siliques_P Parameter: Age (day) Value: 21
  misc_feature: MA Experiment 20000235 PARAMETER Experiment Name: At_Siliques_P Parameter: Organism Value: A. thaliana
  misc_feature: MA Experiment 20000235 PARAMETER Experiment Name: At_Siliques_P Parameter: Plant Line Value: WS
  misc_feature: MA Experiment 20000235 PARAMETER Experiment Name: At_Siliques_P Parameter: Tissue Value: 5-10mm Siliques vs. Whole Plant
  misc_feature: MA Experiment ID: 20000264 Result: Up-regulated in Transcription
  misc_feature: MA Experiment 20000264 PARAMETER Experiment Name: At_Open_Flower_P Parameter: Age (day) Value: 21
  misc_feature: MA Experiment 20000264 PARAMETER Experiment Name: At_Open_Flower_P Parameter: Plant Line Value: WS
  misc_feature: MA Experiment 20000264 PARAMETER Experiment Name: At_Open_Flower_P Parameter: Tissue Value: Open Flower vs. Whole Plant
  misc_feature: MA Experiment ID: 20000265 Result: Up-regulated in Transcription
  misc_feature: MA Experiment 20000265 PARAMETER Experiment Name: At_Open_Flower_P Parameter: Age (day) Value: 21
  misc_feature: MA Experiment 20000265 PARAMETER Experiment Name: At_Open_Flower_P Parameter: Plant Line Value: WS
  misc_feature: MA Experiment 20000265 PARAMETER Experiment Name: At_Open_Flower_P Parameter: Tissue Value: Closed Flower vs. Whole Plant
  misc_feature: MA Experiment ID: 20000286 Result: Up-regulated in Transcription
  misc_feature: MA Experiment 20000286 PARAMETER Experiment Name: At_Open_Flower_P Parameter: Age (day) Value: 21
  misc_feature: MA Experiment 20000286 PARAMETER Experiment Name: At_Open_Flower_P Parameter: Plant Line Value: WS
  misc_feature: MA Experiment 20000286 PARAMETER Experiment Name: At_Open_Flower_P Parameter: Tissue Value: Half Open vs. Whole Plant
  misc_feature: MA Experiment ID: 20000495 Result: Up-regulated in Transcription
  misc_feature: MA Experiment 20000495 PARAMETER Experiment Name: At_Guard_Cells_P Parameter: Harvest Date Value: 8/2/2002
  misc_feature: MA Experiment 20000495 PARAMETER Experiment Name: At_Guard_Cells_P Parameter: Organism Value: A. thaliana
  misc_feature: MA Experiment 20000495 PARAMETER Experiment Name: At_Guard_Cells_P Parameter: Tissue Value: Guard Cells vs. Leaves
  misc_feature: MA Experiment ID: 20000496 Result: Up-regulated in Transcription
  misc_feature: MA Experiment 20000496 PARAMETER Experiment Name: At_Guard_Cells_P Parameter: Harvest Date Value: 7/19/2002
  misc_feature: MA Experiment 20000496 PARAMETER Experiment Name: At_Guard_Cells_P Parameter: Organism Value: Canola
  misc_feature: MA Experiment 20000496 PARAMETER Experiment Name: At_Guard_Cells_P Parameter: Tissue Value: Guard Cells vs. Leaves
  misc_feature: MA Experiment ID: 20000527 Result: Down-regulated in Transcription
  misc_feature: MA Experiment 20000527 PARAMETER Experiment Name: At_10percent_PEG_P Parameter: Age (day) Value: 20
  misc_feature: MA Experiment 20000527 PARAMETER Experiment Name: At_10percent_PEG_P Parameter: Organism Value: A. thaliana
  misc_feature: MA Experiment 20000527 PARAMETER Experiment Name: At_10percent_PEG_P Parameter: Plant Line Value: WS
  misc_feature: MA Experiment 20000527 PARAMETER Experiment Name: At_10percent_PEG_P Parameter: Timepoint (day) Value: 20
  misc_feature: MA Experiment 20000527 PARAMETER Experiment Name: At_10percent_PEG_P Parameter: Tissue Value: Whole Plant
  misc_feature: MA Experiment 20000527 PARAMETER Experiment Name: At_10percent_PEG_P Parameter: Treatment Value: 10percent PEG vs. No Treatment
  misc_feature: MA Experiment ID: 20001248 Result: Down-regulated in Transcription
  misc_feature: MA Experiment 20001248 PARAMETER Experiment Name: At_Far-red-induction_P Parameter: Age (day) Value: 7
  misc_feature: MA Experiment 20001248 PARAMETER Experiment Name: At_Far-red-induction_P Parameter: Light Value: Far-red vs. White
  misc_feature: MA Experiment 20001248 PARAMETER Experiment Name: At_Far-red-induction_P Parameter: Organism Value: A. thaliana
  misc_feature: MA Experiment 20001248 PARAMETER Experiment Name: At_Far-red-induction_P Parameter: Plant Line Value: Columbia
  misc_feature: MA Experiment 20001248 PARAMETER Experiment Name: At_Far-red-induction_P Parameter: Timepoint (hr) Value: 4
  misc_feature: MA Experiment 20001248 PARAMETER Experiment Name: At_Far-red-induction_P Parameter: Tissue Value: Whole Plant
  misc_feature: MA Experiment ID: 20001451 Result: Down-regulated in Transcription
  misc_feature: MA Experiment 20001451 PARAMETER Experiment Name: At_Far-red-induction_P Parameter: Age (day) Value: 7
  misc_feature: MA Experiment 20001451 PARAMETER Experiment Name: At_Far-red-induction_P Parameter: Light Value: Far-red vs. White
  misc_feature: MA Experiment 20001451 PARAMETER Experiment Name: At_Far-red-induction_P Parameter: Organism Value: A. thaliana
  misc_feature: MA Experiment 20001451 PARAMETER Experiment Name: At_Far-red-induction_P Parameter: Plant Line Value: Columbia
  misc_feature: MA Experiment 20001451 PARAMETER Experiment Name: At_Far-red-induction_P Parameter: Timepoint (hr) Value: 24
  misc_feature: MA Experiment 20001451 PARAMETER Experiment Name: At_Far-red-induction_P Parameter: Tissue Value: Whole Plant
  misc_feature: MA Experiment ID: 20001560 Result: Up-regulated in Transcription
  misc_feature: MA Experiment 20001560 PARAMETER Experiment Name: At_Drought_Soil_Dry_P Parameter: Age (day) Value: 28
  misc_feature: MA Experiment 20001560 PARAMETER Experiment Name: At_Drought_Soil_Dry_P Parameter: Organism Value: A. thaliana
  misc_feature: MA Experiment 20001560 PARAMETER Experiment Name: At_Drought_Soil_Dry_P Parameter: Plant Line Value: WS
  misc_feature: MA Experiment 20001560 PARAMETER Experiment Name: At_Drought_Soil_Dry_P Parameter: Post Timepoint (hr) Value: None
  misc_feature: MA Experiment 20001560 PARAMETER Experiment Name: At_Drought_Soil_Dry_P Parameter: Post-Treatment Value: None
  misc_feature: MA Experiment 20001560 PARAMETER Experiment Name: At_Drought_Soil_Dry_P Parameter: Timepoint (day) Value: 14
  misc_feature: MA Experiment 20001560 PARAMETER Experiment Name: At_Drought_Soil_Dry_P Parameter: Treatment Value: Drought vs. No Drought
  misc_feature: MA Experiment ID: 20001904 Result: Up-regulated in Transcription
  misc_feature: MA Experiment 20001904 PARAMETER Experiment Name: At_Drought_Reproduction_P Parameter: Age (day) Value: 37
  misc_feature: MA Experiment 20001904 PARAMETER Experiment Name: At_Drought_Reproduction_P Parameter: Organism Value: A. thaliana
  misc_feature: MA Experiment 20001904 PARAMETER Experiment Name: At_Drought_Reproduction_P Parameter: Plant Line Value: WS
  misc_feature: MA Experiment 20001904 PARAMETER Experiment Name: At_Drought_Reproduction_P Parameter: Timepoint (day) Value: 7
  misc_feature: MA Experiment 20001904 PARAMETER Experiment Name: At_Drought_Reproduction_P Parameter: Tissue Value: Rosettes
  misc_feature: MA Experiment 20001904 PARAMETER Experiment Name: At_Drought_Reproduction_P Parameter: Treatment Value: Drought vs. No Drought
  misc_feature: MA Experiment ID: 20001911 Result: Down-regulated in Transcription
  misc_feature: MA Experiment 20001911 PARAMETER Experiment Name: At_Drought_Reproduction_P Parameter: Age (day) Value: 40
  misc_feature: MA Experiment 20001911 PARAMETER Experiment Name: At_Drought_Reproduction_P Parameter: Organism Value: A. thaliana
  misc_feature: MA Experiment 20001911 PARAMETER Experiment Name: At_Drought_Reproduction_P Parameter: Plant Line Value: WS
  misc_feature: MA Experiment 20001911 PARAMETER Experiment Name: At_Drought_Reproduction_P Parameter: Timepoint (day) Value: 10
  misc_feature: MA Experiment 20001911 PARAMETER Experiment Name: At_Drought_Reproduction_P Parameter: Tissue Value: Flowers
  misc_feature: MA Experiment 20001911 PARAMETER Experiment Name: At_Drought_Reproduction_P Parameter: Treatment Value: Drought vs. No Drought

SEQ ID NO: 49971 - protein, 494 aa, Arabidopsis thaliana; identical to SEQ ID NO: 49486
  peptide (1)..(494): Ceres Seq. ID no. 13592278
  misc_feature (156)..(456): Pfam Name: Dehydrogenase E1 component Pfam Description: Dehydrogenase E1 component
  misc_feature (156)..(456): Pfam Name: Dehydrogenase E1 component Pfam Description: Dehydrogenase E1 component
  misc_feature (92)..(491): Homolog of NCBI NO: 8176547 NR Description: branched-chain alpha-keto acid dehydrogenase E1
  misc_feature (92)..(491): Homolog of NCBI NO: 386841 NR Description: branched-chain alpha-keto acid dehydrogenase
  misc_feature (92)..(491): Homolog of NCBI NO: 27806229 NR Description: branched chain keto acid dehydrogenase E1, alpha
  misc_feature (104)..(492): Homolog of NCBI NO: 12964598 NR Description: branched-chain alpha-keto acid dehydrogenase
  misc_feature (108)..(494): Homolog of NCBI NO: 30145768 NR Description: Hypothetical protein Y39E4A.3 [Caenorhabditis
  misc_feature (92)..(491): Homolog of NCBI NO: 8176547 NR Description: branched-chain alpha-keto acid dehydrogenase E1
  misc_feature (92)..(491): Homolog of NCBI NO: 27806229 NR Description: branched chain keto acid dehydrogenase E1, alpha
  misc_feature (108)..(494): Homolog of NCBI NO: 30145768 NR Description: Hypothetical protein Y39E4A.3 [Caenorhabditis
  misc_feature (23)..(494): Homolog of NCBI NO: 18415939 NR Description: branched-chain alpha keto-acid dehydrogenase E1
  misc_feature (81)..(494): Homolog of NCBI NO: 9955517 NR Description: branched-chain alpha keto-acid dehydrogenase E1
  misc_feature (31)..(489): Homolog of NCBI NO: 15218984 NR Description: branched-chain alpha keto-acid dehydrogenase
  misc_feature (31)..(489): Homolog of NCBI NO: 11357201 NR Description: branched-chain alpha keto-acid dehydrogenase E1
  misc_feature (83)..(491): Homolog of NCBI NO: 7431561 NR Description: 3-methyl-2-oxobutanoate dehydrogenase (lipoamide)
  misc_feature (104)..(492): Homolog of NCBI NO: 12964598 NR Description: branched-chain alpha-keto acid dehydrogenase
  misc_feature (92)..(491): Homolog of NCBI NO: 386841 NR Description: branched-chain alpha-keto acid dehydrogenase
  misc_feature (83)..(491): Homolog of NCBI NO: 7431561 NR Description: 3-methyl-2-oxobutanoate dehydrogenase (lipoamide)
  misc_feature (31)..(489): Homolog of NCBI NO: 11357201 NR Description: branched-chain alpha keto-acid dehydrogenase E1
  misc_feature (31)..(489): Homolog of NCBI NO: 15218984 NR Description: branched-chain alpha keto-acid dehydrogenase
  misc_feature (81)..(494): Homolog of NCBI NO: 9955517 NR Description: branched-chain alpha keto-acid dehydrogenase E1
  misc_feature (23)..(494): Homolog of NCBI NO: 18415939 NR Description: branched-chain alpha keto-acid dehydrogenase E1

SEQ ID NO: 49972 - protein, 472 aa, Arabidopsis thaliana; identical to SEQ ID NO: 49487
  peptide (1)..(472): Ceres Seq. ID no. 13592279
  misc_feature (134)..(434): Pfam Name: Dehydrogenase E1 component Pfam Description: Dehydrogenase E1 component
  misc_feature (134)..(434): Pfam Name: Dehydrogenase E1 component Pfam Description: Dehydrogenase E1 component
  misc_feature (70)..(469): Homolog of NCBI NO: 8176547 NR Description: branched-chain alpha-keto acid dehydrogenase E1
  misc_feature (70)..(469): Homolog of NCBI NO: 386841 NR Description: branched-chain alpha-keto acid dehydrogenase
  misc_feature (70)..(469): Homolog of NCBI NO: 27806229 NR Description: branched chain keto acid dehydrogenase E1, alpha
  misc_feature (82)..(470): Homolog of NCBI NO: 12964598 NR Description: branched-chain alpha-keto acid dehydrogenase
  misc_feature (86)..(472): Homolog of NCBI NO: 30145768 NR Description: Hypothetical protein Y39E4A.3 [Caenorhabditis
  misc_feature (70)..(469): Homolog of NCBI NO: 8176547 NR Description: branched-chain alpha-keto acid dehydrogenase E1
  misc_feature (70)..(469): Homolog of NCBI NO: 27806229 NR Description: branched chain keto acid dehydrogenase E1, alpha
  misc_feature (86)..(472): Homolog of NCBI NO: 30145768 NR Description: Hypothetical protein Y39E4A.3 [Caenorhabditis
  misc_feature (1)..(472): Homolog of NCBI NO: 18415939 NR Description: branched-chain alpha keto-acid dehydrogenase E1
  misc_feature (59)..(472): Homolog of NCBI NO: 9955517 NR Description: branched-chain alpha keto-acid dehydrogenase E1
  misc_feature (9)..(467): Homolog of NCBI NO: 15218984 NR Description: branched-chain alpha keto-acid dehydrogenase
  misc_feature (9)..(467): Homolog of NCBI NO: 11357201 NR Description: branched-chain alpha keto-acid dehydrogenase E1
  misc_feature (61)..(469): Homolog of NCBI NO: 7431561 NR Description: 3-methyl-2-oxobutanoate dehydrogenase (lipoamide)
  misc_feature (82)..(470): Homolog of NCBI NO: 12964598 NR Description: branched-chain alpha-keto acid dehydrogenase
  misc_feature (70)..(469): Homolog of NCBI NO: 386841 NR Description: branched-chain alpha-keto acid dehydrogenase
  misc_feature (61)..(469): Homolog of NCBI NO: 7431561 NR Description: 3-methyl-2-oxobutanoate dehydrogenase (lipoamide)
  misc_feature (9)..(467): Homolog of NCBI NO: 11357201 NR Description: branched-chain alpha keto-acid dehydrogenase E1
  misc_feature (9)..(467): Homolog of NCBI NO: 15218984 NR Description: branched-chain alpha keto-acid dehydrogenase
  misc_feature (59)..(472): Homolog of NCBI NO: 9955517 NR Description: branched-chain alpha keto-acid dehydrogenase E1
  misc_feature (1)..(472): Homolog of NCBI NO: 18415939 NR Description: branched-chain alpha keto-acid dehydrogenase E1

SEQ ID NO: 49973 - protein, 414 aa, Arabidopsis thaliana; identical to SEQ ID NO: 49488
  peptide (1)..(414): Ceres Seq. ID no. 13592280
  misc_feature (76)..(376): Pfam Name: Dehydrogenase E1 component Pfam Description: Dehydrogenase E1 component
  misc_feature (76)..(376): Pfam Name: Dehydrogenase E1 component Pfam Description: Dehydrogenase E1 component
  misc_feature (12)..(411): Homolog of NCBI NO: 8176547 NR Description: branched-chain alpha-keto acid dehydrogenase E1
  misc_feature (12)..(411): Homolog of NCBI NO: 386841 NR Description: branched-chain alpha-keto acid dehydrogenase
  misc_feature (12)..(411): Homolog of NCBI NO: 27806229 NR Description: branched chain keto acid dehydrogenase E1, alpha
  misc_feature (24)..(412): Homolog of NCBI NO: 12964598 NR Description: branched-chain alpha-keto acid dehydrogenase
  misc_feature (28)..(414): Homolog of NCBI NO: 30145768 NR Description: Hypothetical protein Y39E4A.3 [Caenorhabditis
  misc_feature (12)..(411): Homolog of NCBI NO: 8176547 NR Description: branched-chain alpha-keto acid dehydrogenase E1
  misc_feature (12)..(411): Homolog of NCBI NO: 27806229 NR Description: branched chain keto acid dehydrogenase E1, alpha
  misc_feature (28)..(414): Homolog of NCBI NO: 30145768 NR Description: Hypothetical protein Y39E4A.3 [Caenorhabditis
  misc_feature (1)..(414): Homolog of NCBI NO: 18415939 NR Description: branched-chain alpha keto-acid dehydrogenase E1
  misc_feature (1)..(414): Homolog of NCBI NO: 9955517 NR Description: branched-chain alpha keto-acid dehydrogenase E1
  misc_feature (1)..(409): Homolog of NCBI NO: 15218984 NR Description: branched-chain alpha keto-acid dehydrogenase
  misc_feature (1)..(409): Homolog of NCBI NO: 11357201 NR Description: branched-chain alpha keto-acid dehydrogenase E1
  misc_feature (3)..(411): Homolog of NCBI NO: 7431561 NR Description: 3-methyl-2-oxobutanoate dehydrogenase (lipoamide)
  misc_feature (24)..(412): Homolog of NCBI NO: 12964598 NR Description: branched-chain alpha-keto acid dehydrogenase
  misc_feature (12)..(411): Homolog of NCBI NO: 386841 NR Description: branched-chain alpha-keto acid dehydrogenase
  misc_feature (3)..(411): Homolog of NCBI NO: 7431561 NR Description: 3-methyl-2-oxobutanoate dehydrogenase (lipoamide)
  misc_feature (1)..(409): Homolog of NCBI NO: 11357201 NR Description: branched-chain alpha keto-acid dehydrogenase E1
  misc_feature (1)..(409): Homolog of NCBI NO: 15218984 NR Description: branched-chain alpha keto-acid dehydrogenase
  misc_feature (1)..(414): Homolog of NCBI NO: 9955517 NR Description: branched-chain alpha keto-acid dehydrogenase E1
  misc_feature (1)..(414): Homolog of NCBI NO: 18415939 NR Description: branched-chain alpha keto-acid dehydrogenase E1

SEQ ID NO: 49974 - DNA, 1537 bp, Arabidopsis thaliana
  misc_feature (1)..(1537): Ceres Seq. ID no. 13647981
  misc_feature: MA Experiment ID: 20000171 Result: Up-regulated in Transcription
  misc_feature: MA Experiment 20000171 PARAMETER Experiment Name: At_42deg_Heat_P Parameter: Age (day) Value: 14
  misc_feature: MA Experiment 20000171 PARAMETER Experiment Name: At_42deg_Heat_P Parameter: Organism Value: A. thaliana
  misc_feature: MA Experiment 20000171 PARAMETER Experiment Name: At_42deg_Heat_P Parameter: Plant Line Value: WS
  misc_feature: MA Experiment 20000171 PARAMETER Experiment Name: At_42deg_Heat_P Parameter: Temperature (deg C) Value: 42 vs. 22
  misc_feature: MA Experiment 20000171 PARAMETER Experiment Name: At_42deg_Heat_P Parameter: Timepoint (hr) Value: 1
  misc_feature: MA Experiment 20000171 PARAMETER Experiment Name: At_42deg_Heat_P Parameter: Tissue Value: Aerial
  misc_feature: MA Experiment ID: 20000182 Result: Up-regulated in Transcription
  misc_feature: MA Experiment 20000182 PARAMETER Experiment Name: At_2mM_SA_P Parameter: Age (day) Value: 14
  misc_feature: MA Experiment 20000182 PARAMETER Experiment Name: At_2mM_SA_P Parameter: Organism Value: A. thaliana
  misc_feature: MA Experiment 20000182 PARAMETER Experiment Name: At_2mM_SA_P Parameter: Plant Line Value: WS
  misc_feature: MA Experiment 20000182 PARAMETER Experiment Name: At_2mM_SA_P Parameter: Timepoint (hr) Value: 6
  misc_feature: MA Experiment 20000182 PARAMETER Experiment Name: At_2mM_SA_P Parameter: Tissue Value: Aerial
  misc_feature: MA Experiment 20000182 PARAMETER Experiment Name: At_2mM_SA_P Parameter: Treatment Value: 2mM SA vs. No Treatment
  misc_feature: MA Experiment ID: 20000184 Result: Down-regulated in Transcription
  misc_feature: MA Experiment 20000184 PARAMETER Experiment Name: At_Shoots__P Parameter: Age (day) Value: 7
  misc_feature: MA Experiment 20000184 PARAMETER Experiment Name: At_Shoots__P Parameter: Tissue Value: Shoots vs. Whole Plant
  misc_feature: MA Experiment ID: 20000234 Result: Down-regulated in Transcription
  misc_feature: MA Experiment 20000234 PARAMETER Experiment Name: At_Siliques_P Parameter: Age (day) Value: 21
  misc_feature: MA Experiment 20000234 PARAMETER Experiment Name: At_Siliques_P Parameter: Organism Value: A. thaliana
  misc_feature: MA Experiment 20000234 PARAMETER Experiment Name: At_Siliques_P Parameter: Plant Line Value: WS
  misc_feature: MA Experiment 20000234 PARAMETER Experiment Name: At_Siliques_P Parameter: Tissue Value: Less Than 5mm Siliques vs. Whole Plant
  misc_feature: MA Experiment ID: 20000235 Result: Down-regulated in Transcription
  misc_feature: MA Experiment 20000235 PARAMETER Experiment Name: At_Siliques_P Parameter: Age (day) Value: 21
  misc_feature: MA Experiment 20000235 PARAMETER Experiment Name: At_Siliques_P Parameter: Organism Value: A. thaliana
  misc_feature: MA Experiment 20000235 PARAMETER Experiment Name: At_Siliques_P Parameter: Plant Line Value: WS
  misc_feature: MA Experiment 20000235 PARAMETER Experiment Name: At_Siliques_P Parameter: Tissue Value: 5-10mm Siliques vs. Whole Plant
  misc_feature: MA Experiment ID: 20000437 Result: Up-regulated in Transcription
  misc_feature: MA Experiment 20000437 PARAMETER Experiment Name: At_Drought_P Parameter: Age (day) Value: 8
  misc_feature: MA Experiment 20000437 PARAMETER Experiment Name: At_Drought_P Parameter: Organism Value: A. thaliana
  misc_feature: MA Experiment 20000437 PARAMETER Experiment Name: At_Drought_P Parameter: Plant Line Value: WS
  misc_feature: MA Experiment 20000437 PARAMETER Experiment Name: At_Drought_P Parameter: Timepoint (hr) Value: 24
  misc_feature: MA Experiment 20000437 PARAMETER Experiment Name: At_Drought_P Parameter: Tissue Value: Whole Plant
  misc_feature: MA Experiment 20000437 PARAMETER Experiment Name: At_Drought_P Parameter: Treatment Value: Drought vs. No Drought
  misc_feature: MA Experiment ID: 20000438 Result: Down-regulated in Transcription
  misc_feature: MA Experiment 20000438 PARAMETER Experiment Name: At_Shoots__P Parameter: Age (day) Value: 14
  misc_feature: MA Experiment 20000438 PARAMETER Experiment Name: At_Shoots__P Parameter: Tissue Value: Shoots vs. Whole Plant
  misc_feature: MA Experiment ID: 20000451 Result: Down-regulated in Transcription
  misc_feature: MA Experiment 20000451 PARAMETER Experiment Name: At_CS6879_Shoots-Roots_P Parameter: Age (day) Value: 14
  misc_feature: MA Experiment 20000451 PARAMETER Experiment Name: At_CS6879_Shoots-Roots_P Parameter: Organism Value: A. thaliana
  misc_feature: MA Experiment 20000451 PARAMETER Experiment Name: At_CS6879_Shoots-Roots_P Parameter: Plant Line Value: CS6879 vs. WS
  misc_feature: MA Experiment 20000451 PARAMETER Experiment Name: At_CS6879_Shoots-Roots_P Parameter: Tissue Value: Roots
  misc_feature: MA Experiment ID: 20001558 Result: Down-regulated in Transcription
  misc_feature: MA Experiment 20001558 PARAMETER Experiment Name: At_Drought_Soil_Dry_P Parameter: Age (day) Value: 27
  misc_feature: MA Experiment 20001558 PARAMETER Experiment Name: At_Drought_Soil_Dry_P Parameter: Organism Value: A. thaliana
  misc_feature: MA Experiment 20001558 PARAMETER Experiment Name: At_Drought_Soil_Dry_P Parameter: Plant Line Value: WS
  misc_feature: MA Experiment 20001558 PARAMETER Experiment Name: At_Drought_Soil_Dry_P Parameter: Post Timepoint (hr) Value: 6
  misc_feature: MA Experiment 20001558 PARAMETER Experiment Name: At_Drought_Soil_Dry_P Parameter: Post-Treatment Value: Re-Water vs. No Drought
  misc_feature: MA Experiment 20001558 PARAMETER Experiment Name: At_Drought_Soil_Dry_P Parameter: Timepoint (day) Value: 13
  misc_feature: MA Experiment 20001558 PARAMETER Experiment Name: At_Drought_Soil_Dry_P Parameter: Treatment Value: Drought vs. No Drought
  misc_feature: MA Experiment ID: 20001911 Result: Up-regulated in Transcription
  misc_feature: MA Experiment 20001911 PARAMETER Experiment Name: At_Drought_Reproduction_P Parameter: Age (day) Value: 40
  misc_feature: MA Experiment 20001911 PARAMETER Experiment Name: At_Drought_Reproduction_P Parameter: Organism Value: A. thaliana
  misc_feature: MA Experiment 20001911 PARAMETER Experiment Name: At_Drought_Reproduction_P Parameter: Plant Line Value: WS
  misc_feature: MA Experiment 20001911 PARAMETER Experiment Name: At_Drought_Reproduction_P Parameter: Timepoint (day) Value: 10
  misc_feature: MA Experiment 20001911 PARAMETER Experiment Name: At_Drought_Reproduction_P Parameter: Tissue Value: Flowers
  misc_feature: MA Experiment 20001911 PARAMETER Experiment Name: At_Drought_Reproduction_P Parameter: Treatment Value: Drought vs. No Drought
gaaaacagcaataatatctttttttctctgctccagggggaaattaaaaaagtggaaccttttcatctcctggagcgatcaatttctttttcatcatatcgctgactctcgtcttcgtcgtctttgatcgtatcgaggaattgggtttagttcgattcgatcatcagctatctcaatttttctggggattgttctaaaggtttctagtgacttgtttaaagtggttggtattggataatgccttctctcatctcacagcaatggcaggagaggactagtggattcttttcttcatcaggaacgaagcttagggaagcagggcagactgctggtagttttgtcggggaagttgctaaggatgcgaaagtgaatgttgcagatgttgcagaaagagttgggtcgttgtttaaaagccggtgggcaattcttcagcagcctgcaactagacatgccgtgcaagaacacctcataacagctgctgccacaaccgggacttttgtcaggaagggtataactgagacaaaggaaaaggtttctgttggaaagatcaaagtggaagaggcggccaaaaagactgcacaaaagagcaagaccattttgacggatatcgaaaggtggcaaaagggagttgccagctcagatgtgtttggtgttgcgattgagatcactgtccagcggcaggagtcaagcaggcctattcctctgatactagttaaatgcgcagattatctcatattaacaggacttaattcaccgaacttgttcaaggccgaaggagatagaaagttgattcaacaattggtttctgcttacaatcaagatcctagggcgtcaatacctgagggtgtgaatccagttgatgtcgctgcactcttgaaatactatcttgctagccttccgacaccactaactacttttgagctttataatgaaatcaaagatgcacggtcgagcatacacagaatgagacagtcactccagaagctttccaatgtgaattataatacattggagttcataacagcgctattgcttcgtgtgagccagaaatcacttcttaacaaaatggattcgcatagcctagctatggaaatggctccagtgatcatgtggcgagaagacaacaggcctgaatcttatcgggaatactggagacgcccgtcaaggagtcctaagaaaagtaacgactttgaaactgctactccatgggacttgctctcagatgaaggagaaggtccagatgcatcctcatcaatccctctagatgatatcgcacgagttgattttggagcggtcgaggttgtccagtgcctaattgaacaccacaatgcgattttcactgatgcagccgagactgtatggaggtgaaaccaccacagttaaccaatattgatctggttacaagaacatatgcattttgatctggatgatgattgactagtggtttcagtaaataagatgttgtttcatatttggttcttctgtaacaatttttagactttagaactctgatgattaaaagataagtttttcttat

SEQ ID NO: 49975 - protein, 376 aa, Arabidopsis thaliana
  peptide (1)..(376): Ceres Seq. ID no. 13647982
  misc_feature (155)..(299): Pfam Name: RhoGAP domain Pfam Description: RhoGAP domain
  misc_feature (155)..(299): Pfam Name: RhoGAP domain Pfam Description: RhoGAP domain
  misc_feature (137)..(295): Homolog of NCBI NO: 34856548 NR Description: similar to RIKEN cDNA B230365D05 [Rattus
  misc_feature (136)..(291): Homolog of NCBI NO: 26333369 NR Description: unnamed protein product [Mus musculus]
  misc_feature (137)..(295): Homolog of NCBI NO: 4139447 NR Description: Chain B, Transition State Complex For Gtp By Cdc42: Comparisons Of The High Resolution Structures For Cdc42 To The Active And Catalytically Compromised Forms Of The
  misc_feature (137)..(295): Homolog of NCBI NO: 6730013 NR Description: Chain B, Crystal Structure Of The
  misc_feature (137)..(295): Homolog of NCBI NO: 3660275 NR Description: Chain A, RhoRHOGAPGDP(DOT)ALF4 COMPLEX
  misc_feature (137)..(295): Homolog of NCBI NO: 34856548 NR Description: similar to RIKEN cDNA B230365D05 [Rattus
  misc_feature (137)..(295): Homolog of NCBI NO: 4139447 NR Description: Chain B, Transition State Complex For Gtp By Cdc42: Comparisons Of The High Resolution Structures For Cdc42 To The Active And Catalytically Compromised Forms Of The
  misc_feature (137)..(295): Homolog of NCBI NO: 3660275 NR Description: Chain A, RhoRHOGAPGDP(DOT)ALF4 COMPLEX
  misc_feature (1)..(376): Homolog of NCBI NO: 18424478 NR Description: auxin-regulated protein [Arabidopsis thaliana]
  misc_feature (1)..(376): Homolog of NCBI NO: 21553593 NR Description: unknown [Arabidopsis thaliana]
  misc_feature (1)..(376): Homolog of NCBI NO: 28564771 NR Description: putative auxin-regulated protein
  misc_feature (137)..(295): Homolog of NCBI NO: 2624718 NR Description: Gtpase-Activation Domain From Rhogap
  misc_feature (137)..(295): Homolog of NCBI NO: 3402094 NR Description: Chain A, Complex Between Cdc42hs.Gmppnp And P50
  misc_feature (137)..(295): Homolog of NCBI NO: 6730013 NR Description: Chain B, Crystal Structure Of The
  misc_feature (136)..(291): Homolog of NCBI NO: 26333369 NR Description: unnamed protein product [Mus musculus]
  misc_feature (137)..(295): Homolog of NCBI NO: 3402094 NR Description: Chain A, Complex Between Cdc42hs.Gmppnp And P50
  misc_feature (137)..(295): Homolog of NCBI NO: 2624718 NR Description: Gtpase-Activation Domain From Rhogap
  misc_feature (1)..(376): Homolog of NCBI NO: 28564771 NR Description: putative auxin-regulated protein
  misc_feature (1)..(376): Homolog of NCBI NO: 21553593 NR Description: unknown [Arabidopsis thaliana]
  misc_feature (1)..(376): Homolog of NCBI NO: 18424478 NR Description: auxin-regulated protein [Arabidopsis thaliana]
MPSLISQQWQERTSGFFSSSGTKLREAGQTAGSFVGEVAKDAKVNVADVAERVGSLFKSRWAILQQPATRHAVQEHLITAAATTGTFVRKGITETKEKVSVGKIKVEEAAKKTAQKSKTILTDIERWQKGVASSDVFGVAIEITVQRQESSRPIPLILVKCADYLILTGLNSPNLFKAEGDRKLIQQLVSAYNQDPRASIPEGVNPVDVAALLKYYLASLPTPLTTFELYNEIKDARSSIHRMRQSLQKLSNVNYNTLEFITALLLRVSQKSLLNKMDSHSLAMEMAPVIMWREDNRPESYREYWRRPSRSPKKSNDFETATPWDLLSDEGEGPDASSSIPLDDIARVDFGAVEVVQCLIEHHNAIFTDAAETVWR

SEQ ID NO: 49976 - DNA, 876 bp, Arabidopsis thaliana
  misc_feature (1)..(876): Ceres Seq. ID no. 13648398
  misc_feature: MA Experiment ID: 20000169 Result: Up-regulated in Transcription
  misc_feature: MA Experiment 20000169 PARAMETER Experiment Name: At_100uM_ABA_P Parameter: Age (day) Value: 14
  misc_feature: MA Experiment 20000169 PARAMETER Experiment Name: At_100uM_ABA_P Parameter: Organism Value: A. thaliana
  misc_feature: MA Experiment 20000169 PARAMETER Experiment Name: At_100uM_ABA_P Parameter: Plant Line Value: WS
  misc_feature: MA Experiment 20000169 PARAMETER Experiment Name: At_100uM_ABA_P Parameter: Timepoint (hr) Value: 6
  misc_feature: MA Experiment 20000169 PARAMETER Experiment Name: At_100uM_ABA_P Parameter: Tissue Value: Aerial
  misc_feature: MA Experiment 20000169 PARAMETER Experiment Name: At_100uM_ABA_P Parameter: Treatment Value: 100uM ABA vs. No Treatment
  misc_feature: MA Experiment ID: 20000184 Result: Down-regulated in Transcription
  misc_feature: MA Experiment 20000184 PARAMETER Experiment Name: At_Shoots__P Parameter: Age (day) Value: 7
  misc_feature: MA Experiment 20000184 PARAMETER Experiment Name: At_Shoots__P Parameter: Tissue Value: Shoots vs. Whole Plant
  misc_feature: MA Experiment ID: 20000185 Result: Down-regulated in Transcription
  misc_feature: MA Experiment 20000185 PARAMETER Experiment Name: At_Roots__P Parameter: Age (day) Value: 7 vs. 21
  misc_feature: MA Experiment 20000185 PARAMETER Experiment Name: At_Roots__P Parameter: Organism Value: A. thaliana
  misc_feature: MA Experiment 20000185 PARAMETER Experiment Name: At_Roots__P Parameter: Tissue Value: Roots vs. Whole Plant
  misc_feature: MA Experiment ID: 20000227 Result: Down-regulated in Transcription
  misc_feature: MA Experiment 20000227 PARAMETER Experiment Name: At_Root-Tips-vs-Tops_P Parameter: Tissue Value: Root Tips vs. Root Tops
  misc_feature: MA Experiment ID: 20000234 Result: Down-regulated in Transcription
  misc_feature: MA Experiment 20000234 PARAMETER Experiment Name: At_Siliques_P Parameter: Age (day) Value: 21
  misc_feature: MA Experiment 20000234 PARAMETER Experiment Name: At_Siliques_P Parameter: Organism Value: A. thaliana
  misc_feature: MA Experiment 20000234 PARAMETER Experiment Name: At_Siliques_P Parameter: Plant Line Value: WS
  misc_feature: MA Experiment 20000234 PARAMETER Experiment Name: At_Siliques_P Parameter: Tissue Value: Less Than 5mm Siliques vs. Whole Plant
  misc_feature: MA Experiment ID: 20000235 Result: Down-regulated in Transcription
  misc_feature: MA Experiment 20000235 PARAMETER Experiment Name: At_Siliques_P Parameter: Age (day) Value: 21
  misc_feature: MA Experiment 20000235 PARAMETER Experiment Name: At_Siliques_P Parameter: Organism Value: A. thaliana
  misc_feature: MA Experiment 20000235 PARAMETER Experiment Name: At_Siliques_P Parameter: Plant Line Value: WS
  misc_feature: MA Experiment 20000235 PARAMETER Experiment Name: At_Siliques_P Parameter: Tissue Value: 5-10mm Siliques vs. Whole Plant
  misc_feature: MA Experiment ID: 20000264 Result: Down-regulated in Transcription
  misc_feature: MA Experiment 20000264 PARAMETER Experiment Name: At_Open_Flower_P Parameter: Age (day) Value: 21
  misc_feature: MA Experiment 20000264 PARAMETER Experiment Name: At_Open_Flower_P Parameter: Plant Line Value: WS
  misc_feature: MA Experiment 20000264 PARAMETER Experiment Name: At_Open_Flower_P Parameter: Tissue Value: Open Flower vs. Whole Plant
  misc_feature: MA Experiment ID: 20000265 Result: Down-regulated in Transcription
  misc_feature: MA Experiment 20000265 PARAMETER Experiment Name: At_Open_Flower_P Parameter: Age (day) Value: 21
  misc_feature: MA Experiment 20000265 PARAMETER Experiment Name: At_Open_Flower_P Parameter: Plant Line Value: WS
  misc_feature: MA Experiment 20000265 PARAMETER Experiment Name: At_Open_Flower_P Parameter: Tissue Value: Closed Flower vs. Whole Plant
  misc_feature: MA Experiment ID: 20000286 Result: Down-regulated in Transcription
  misc_feature: MA Experiment 20000286 PARAMETER Experiment Name: At_Open_Flower_P Parameter: Age (day) Value: 21
  misc_feature: MA Experiment 20000286 PARAMETER Experiment Name: At_Open_Flower_P Parameter: Plant Line Value: WS
  misc_feature: MA Experiment 20000286 PARAMETER Experiment Name: At_Open_Flower_P Parameter: Tissue Value: Half Open vs. Whole Plant
  misc_feature: MA Experiment ID: 20000438 Result: Down-regulated in Transcription
  misc_feature: MA Experiment 20000438 PARAMETER Experiment Name: At_Shoots__P Parameter: Age (day) Value: 14
  misc_feature: MA Experiment 20000438 PARAMETER Experiment Name: At_Shoots__P Parameter: Tissue Value: Shoots vs. Whole Plant
  misc_feature: MA Experiment ID: 20000439 Result: Down-regulated in Transcription
  misc_feature: MA Experiment 20000439 PARAMETER Experiment Name: At_Roots__P Parameter: Age (day) Value: 14 vs. 21
  misc_feature: MA Experiment 20000439 PARAMETER Experiment Name: At_Roots__P Parameter: Organism Value: A. thaliana
  misc_feature: MA Experiment 20000439 PARAMETER Experiment Name: At_Roots__P Parameter: Tissue Value: Roots vs. Whole Plant
  misc_feature: MA Experiment ID: 20000441 Result: Up-regulated in Transcription
  misc_feature: MA Experiment 20000441 PARAMETER Experiment Name: At_1uM_BR-BRZ__P Parameter: Tissue Value: Shoot Apices
  misc_feature: MA Experiment 20000441 PARAMETER Experiment Name: At_1uM_BR-BRZ__P Parameter: Treatment Value: 1uM BR vs. No Treatment
  misc_feature: MA Experiment ID: 20000443 Result: Up-regulated in Transcription
  misc_feature: MA Experiment 20000443 PARAMETER Experiment Name: At_1uM_BR-BRZ__P Parameter: Tissue Value: Shoot Apices
  misc_feature: MA Experiment 20000443 PARAMETER Experiment Name: At_1uM_BR-BRZ__P Parameter: Treatment Value: 1uM BRZ vs. No Treatment
  misc_feature: MA Experiment ID: 20000794 Result: Down-regulated in Transcription
  misc_feature: MA Experiment 20000794 PARAMETER Experiment Name: At_Petals_P Parameter: Age (day) Value: 23-25 days
  misc_feature: MA Experiment 20000794 PARAMETER Experiment Name: At_Petals_P Parameter: Plant Line Value: WS
  misc_feature: MA Experiment 20000794 PARAMETER Experiment Name: At_Petals_P Parameter: Tissue Value: Petals vs. Whole plant
  misc_feature: MA Experiment ID: 20001554 Result: Up-regulated in Transcription
  misc_feature: MA Experiment 20001554 PARAMETER Experiment Name: At_Drought_Soil_Dry_P Parameter: Age (day) Value: 21
  misc_feature: MA Experiment 20001554 PARAMETER Experiment Name: At_Drought_Soil_Dry_P Parameter: Organism Value: A. thaliana
  misc_feature: MA Experiment 20001554 PARAMETER Experiment Name: At_Drought_Soil_Dry_P Parameter: Plant Line Value: WS
  misc_feature: MA Experiment 20001554 PARAMETER Experiment Name: At_Drought_Soil_Dry_P Parameter: Post Timepoint (hr) Value: None
  misc_feature: MA Experiment 20001554 PARAMETER Experiment Name: At_Drought_Soil_Dry_P Parameter: Post-Treatment Value: None
  misc_feature: MA Experiment 20001554 PARAMETER Experiment Name: At_Drought_Soil_Dry_P Parameter: Timepoint (day) Value: 7
  misc_feature: MA Experiment 20001554 PARAMETER Experiment Name: At_Drought_Soil_Dry_P Parameter: Treatment Value: Drought vs. No Drought
  misc_feature: MA Experiment ID: 20001555 Result: Up-regulated in Transcription
  misc_feature: MA Experiment 20001555 PARAMETER Experiment Name: At_Drought_Soil_Dry_P Parameter: Age (day) Value: 24
  misc_feature: MA Experiment 20001555 PARAMETER Experiment Name: At_Drought_Soil_Dry_P Parameter: Organism Value: A. thaliana
  misc_feature: MA Experiment 20001555 PARAMETER Experiment Name: At_Drought_Soil_Dry_P Parameter: Plant Line Value: WS
  misc_feature: MA Experiment 20001555 PARAMETER Experiment Name: At_Drought_Soil_Dry_P Parameter: Post Timepoint (hr) Value: None
  misc_feature: MA Experiment 20001555 PARAMETER Experiment Name: At_Drought_Soil_Dry_P Parameter: Post-Treatment Value: None
  misc_feature: MA Experiment 20001555 PARAMETER Experiment Name: At_Drought_Soil_Dry_P Parameter: Timepoint (day) Value: 10
  misc_feature: MA Experiment 20001555 PARAMETER Experiment Name: At_Drought_Soil_Dry_P Parameter: Treatment Value: Drought vs. No Drought
  misc_feature: MA Experiment ID: 20001905 Result: Up-regulated in Transcription
  misc_feature: MA Experiment 20001905 PARAMETER Experiment Name: At_Drought_Reproduction_P Parameter: Age (day) Value: 40
  misc_feature: MA Experiment 20001905 PARAMETER Experiment Name: At_Drought_Reproduction_P Parameter: Organism Value: A. thaliana
  misc_feature: MA Experiment 20001905 PARAMETER Experiment Name: At_Drought_Reproduction_P Parameter: Plant Line Value: WS
  misc_feature: MA Experiment 20001905 PARAMETER Experiment Name: At_Drought_Reproduction_P Parameter: Timepoint (day) Value: 10
  misc_feature: MA Experiment 20001905 PARAMETER Experiment Name: At_Drought_Reproduction_P Parameter: Tissue Value: Rosettes
  misc_feature: MA Experiment 20001905 PARAMETER Experiment Name: At_Drought_Reproduction_P Parameter: Treatment Value: Drought vs. No Drought
  misc_feature: MA Experiment ID: 20001910 Result: Up-regulated in Transcription
  misc_feature: MA Experiment 20001910 PARAMETER Experiment Name: At_Drought_Reproduction_P Parameter: Age (day) Value: 37
  misc_feature: MA Experiment 20001910 PARAMETER Experiment Name: At_Drought_Reproduction_P Parameter: Organism Value: A. thaliana
  misc_feature: MA Experiment 20001910 PARAMETER Experiment Name: At_Drought_Reproduction_P Parameter: Plant Line Value: WS
  misc_feature: MA Experiment 20001910 PARAMETER Experiment Name: At_Drought_Reproduction_P Parameter: Timepoint (day) Value: 7
  misc_feature: MA Experiment 20001910 PARAMETER Experiment Name: At_Drought_Reproduction_P Parameter: Tissue Value: Flowers
  misc_feature: MA Experiment 20001910 PARAMETER Experiment Name: At_Drought_Reproduction_P Parameter: Treatment Value: Drought vs. No Drought
  misc_feature: MA Experiment ID: 20001911 Result: Up-regulated in Transcription
  misc_feature: MA Experiment 20001911 PARAMETER Experiment Name: At_Drought_Reproduction_P Parameter: Age (day) Value: 40
  misc_feature: MA Experiment 20001911 PARAMETER Experiment Name: At_Drought_Reproduction_P Parameter: Organism Value: A. thaliana
  misc_feature: MA Experiment 20001911 PARAMETER Experiment Name: At_Drought_Reproduction_P Parameter: Plant Line Value: WS
  misc_feature: MA Experiment 20001911 PARAMETER Experiment Name: At_Drought_Reproduction_P Parameter: Timepoint (day) Value: 10
  misc_feature: MA Experiment 20001911 PARAMETER Experiment Name: At_Drought_Reproduction_P Parameter: Tissue Value: Flowers
  misc_feature: MA Experiment 20001911 PARAMETER Experiment Name: At_Drought_Reproduction_P Parameter: Treatment Value: Drought vs. No Drought
tctttagcgtttacacagccacaaattcctcaatactctatatttctcttcccgtttgaaactccaaagcttgtttgatgaaaacagagtaaacggttctgttcaaaacatttttcaagctctgttactttgttttttcaacgatgaggaagttaagaggaatcaaaattagaagaccgattaaacaaatctcaagatggatcctccggagaattaagattcgtcgttcaagatacacccggttaagcccaaaccgcccggtttgcaagccgagagccatcacaaaactcataagttggggtcgaagtctcacatcccacagcgccaggtttattgggtctaaatgctccaattcagggtacataccaattggtcaagaacccattcgagaaaaactcgacccggttccgaaaggtcactcggcggtttatatcggtaaaaaagacggcgactttcagagagttttggtgcctatcgtttactttaaccatcctctgtttggtgagcttcttagagaggctgaagaagaatttgggttttctcaagaaggtggaatcactatcccttgtccttactcagatttcaaacgggtccaaacccgaattgaatccgggtcgggtttctgtaaatttccctggagccggcggcggcaataacgacggtggaagaagatgatgatgatgaaaaagttctttaactcttttttactattttctaccttttcacttttgttactatttttacccttttgttagatatgtacatattctgtatgtgaaaagtgaggtttgaatttaggcgataatgtaaataatataaagattttttatttttcatgaaaaaaaaaaaaaaaaaaaactcgagggggggcccggt

SEQ ID NO: 49977 - protein, 170 aa, Arabidopsis thaliana
  peptide (1)..(170): Ceres Seq. ID no. 13648399
  misc_feature (50)..(155): Pfam Name: Auxin responsive protein Pfam Description: Auxin responsive protein
  misc_feature (88)..(155): Homolog of NCBI NO: 38454072 NR Description: At5g53590 [Arabidopsis thaliana]
  misc_feature (88)..(155): Homolog of NCBI NO: 15238779 NR Description: auxin-induced (indole-3-acetic acid induced)
  misc_feature (88)..(154): Homolog of NCBI NO: 15228626 NR Description: auxin-induced (indole-3-acetic acid induced)
  misc_feature (84)..(155): Homolog of NCBI NO: 15226425 NR Description: auxin-induced (indole-3-acetic acid induced)
  misc_feature (86)..(155): Homolog of NCBI NO: 18411465 NR Description: auxin-induced (indole-3-acetic acid induced)
  misc_feature (6)..(157): Homolog of NCBI NO: 38567865 NR Description: OSJNBa0091D06.3 [Oryza sativa (japonica
  misc_feature (1)..(154): Homolog of NCBI NO: 15234550 NR Description: auxin-induced (indole-3-acetic acid induced)
  misc_feature (1)..(154): Homolog of NCBI NO: 15235723 NR Description: auxin-induced (indole-3-acetic acid induced)
  misc_feature (1)..(167): Homolog of NCBI NO: 15225432 NR Description: auxin-induced (indole-3-acetic acid induced)
  misc_feature (1)..(170): Homolog of NCBI NO: 15232400 NR Description: auxin-induced (indole-3-acetic acid induced)
MRKLRGIKIRRPIKQISRWILRRIKIRRSRYTRLSPNRPVCKPRAITKLISWGRSLTSHSARFIGSKCSNSGYIPIGQEPIREKLDPVPKGHSAVYIGKKDGDFQRVLVPIVYFNHPLFGELLREAEEEFGFSQEGGITIPCPYSDFKRVQTRIESGSGFCKFPWSRRRQ

SEQ ID NO: 49978 - DNA, 1176 bp, Arabidopsis thaliana; identical to SEQ ID NO: 35853
  misc_feature (1)..(1176): Ceres Seq. ID no. 13592325
  misc_feature: MA Experiment ID: 108595 Result: Down-regulated in Transcription
  misc_feature: MA Experiment 108595 PARAMETER Experiment Name: At_Ler-pi_Ovule_cDNA_P Parameter: Plant Line Value: null
  misc_feature: MA Experiment ID: 20000180 Result: Up-regulated in Transcription
  misc_feature: MA Experiment 20000180 PARAMETER Experiment Name: At_Germinating_Seeds_P Parameter: Age (hr) Value: 24 vs. 0
  misc_feature: MA Experiment 20000180 PARAMETER Experiment Name: At_Germinating_Seeds_P Parameter: Tissue Value: Germinating Seeds
  misc_feature: MA Experiment ID: 20000265 Result: Up-regulated in Transcription
  misc_feature: MA Experiment 20000265 PARAMETER Experiment Name: At_Open_Flower_P Parameter: Age (day) Value: 21
  misc_feature: MA Experiment 20000265 PARAMETER Experiment Name: At_Open_Flower_P Parameter: Plant Line Value: WS
  misc_feature: MA Experiment 20000265 PARAMETER Experiment Name: At_Open_Flower_P Parameter: Tissue Value: Closed Flower vs. Whole Plant
  misc_feature: MA Experiment ID: 20000436 Result: Down-regulated in Transcription
  misc_feature: MA Experiment 20000436 PARAMETER Experiment Name: At_Drought_P Parameter: Age (day) Value: 7
  misc_feature: MA Experiment 20000436 PARAMETER Experiment Name: At_Drought_P Parameter: Organism Value: A. thaliana
  misc_feature: MA Experiment 20000436 PARAMETER Experiment Name: At_Drought_P Parameter: Plant Line Value: WS
  misc_feature: MA Experiment 20000436 PARAMETER Experiment Name: At_Drought_P Parameter: Timepoint (hr) Value: 12
  misc_feature: MA Experiment 20000436 PARAMETER Experiment Name: At_Drought_P Parameter: Tissue Value: Whole Plant
  misc_feature: MA Experiment 20000436 PARAMETER Experiment Name: At_Drought_P Parameter: Treatment Value: Drought vs. No Drought
  misc_feature: MA Experiment ID: 20000438 Result: Up-regulated in Transcription
  misc_feature: MA Experiment 20000438 PARAMETER Experiment Name: At_Shoots__P Parameter: Age (day) Value: 14
  misc_feature: MA Experiment 20000438 PARAMETER Experiment Name: At_Shoots__P Parameter: Tissue Value: Shoots vs. Whole Plant
  misc_feature: MA Experiment ID: 20001248 Result: Down-regulated in Transcription
  misc_feature: MA Experiment 20001248 PARAMETER Experiment Name: At_Far-red-induction_P Parameter: Age (day) Value: 7
  misc_feature: MA Experiment 20001248 PARAMETER Experiment Name: At_Far-red-induction_P Parameter: Light Value: Far-red vs. White
  misc_feature: MA Experiment 20001248 PARAMETER Experiment Name: At_Far-red-induction_P Parameter: Organism Value: A. thaliana
  misc_feature: MA Experiment 20001248 PARAMETER Experiment Name: At_Far-red-induction_P Parameter: Plant Line Value: Columbia
  misc_feature: MA Experiment 20001248 PARAMETER Experiment Name: At_Far-red-induction_P Parameter: Timepoint (hr) Value: 4
  misc_feature: MA Experiment 20001248 PARAMETER Experiment Name: At_Far-red-induction_P Parameter: Tissue Value: Whole Plant
  misc_feature: MA Experiment ID: 20001450 Result: Down-regulated in Transcription
  misc_feature: MA Experiment 20001450 PARAMETER Experiment Name: At_Far-red-induction_P Parameter: Age (day) Value: 7
  misc_feature: MA Experiment 20001450 PARAMETER Experiment Name: At_Far-red-induction_P Parameter: Light Value: Far-red vs. White
  misc_feature: MA Experiment 20001450 PARAMETER Experiment Name: At_Far-red-induction_P Parameter: Organism Value: A. thaliana
  misc_feature: MA Experiment 20001450 PARAMETER Experiment Name: At_Far-red-induction_P Parameter: Plant Line Value: Columbia
  misc_feature: MA Experiment 20001450 PARAMETER Experiment Name: At_Far-red-induction_P Parameter: Timepoint (hr) Value: 8
  misc_feature: MA Experiment 20001450 PARAMETER Experiment Name: At_Far-red-induction_P Parameter: Tissue Value: Whole Plant

SEQ ID NO: 49979 - protein, 215 aa, Arabidopsis thaliana; identical to SEQ ID NO: 35854
  peptide (1)..(215): Ceres Seq. ID no. 13592326
  misc_feature (38)..(198): Pfam Name: haloacid dehalogenase-like hydrolase Pfam Description: haloacid dehalogenase-like hydrolase
  misc_feature (38)..(198): Pfam Name: haloacid dehalogenase-like hydrolase Pfam Description: haloacid dehalogenase-like hydrolase
  misc_feature (68)..(181): Homolog of NCBI NO: 21622506 NR Description: conserved hypothetical protein [Neurospora crassa]
  misc_feature (37)..(195): Homolog of NCBI NO: 28900419 NR Description: hypothetical protein [Vibrio parahaemolyticus
  misc_feature (38)..(191): Homolog of NCBI NO: 26991442 NR Description: hydrolase, haloacid dehalogenase-like family
  misc_feature (36)..(205): Homolog of NCBI NO: 27366476 NR Description: Predicted phosphatases [Vibrio vulnificus CMCP6]
  misc_feature (42)..(195): Homolog of NCBI NO: 39995800 NR Description: HAD-superfamily hydrolase, subfamily IA, variant
  misc_feature (68)..(181): Homolog of NCBI NO: 21622506 NR Description: conserved hypothetical protein [Neurospora crassa]
  misc_feature (38)..(191): Homolog of NCBI NO: 26991442 NR Description: hydrolase, haloacid dehalogenase-like family
  misc_feature (42)..(195): Homolog of NCBI NO: 39995800 NR Description: HAD-superfamily hydrolase, subfamily IA, variant
  misc_feature (6)..(198): Homolog of NCBI NO: 20196855 NR Description: unknown protein [Arabidopsis thaliana]
  misc_feature (27)..(198): Homolog of NCBI NO: 30685622 NR Description: haloacid dehalogenase-like hydrolase family
  misc_feature (13)..(198): Homolog of NCBI NO: 25408252 NR Description: hypothetical protein At2g33250 [imported] -
  misc_feature (38)..(200): Homolog of NCBI NO: 6324705 NR Description: Hypothetical ORF; Yor131cp [Saccharomyces
  misc_feature (27)..(195): Homolog of NCBI NO: 24375526 NR Description: hydrolase, haloacid dehalogenase-like family
  misc_feature (36)..(205): Homolog of NCBI NO: 27366476 NR Description: Predicted phosphatases [Vibrio vulnificus CMCP6]
  misc_feature (37)..(195): Homolog of NCBI NO: 28900419 NR Description: hypothetical protein [Vibrio parahaemolyticus
  misc_feature (27)..(195): Homolog of NCBI NO: 24375526 NR Description: hydrolase, haloacid dehalogenase-like family
  misc_feature (38)..(200): Homolog of NCBI NO: 6324705 NR Description: Hypothetical ORF; Yor131cp [Saccharomyces
  misc_feature (13)..(198): Homolog of NCBI NO: 25408252 NR Description: hypothetical protein At2g33250 [imported] -
  misc_feature (27)..(198): Homolog of NCBI NO: 30685622 NR Description: haloacid dehalogenase-like hydrolase family
  misc_feature (6)..(198): Homolog of NCBI NO: 20196855 NR Description: unknown protein [Arabidopsis thaliana]

SEQ ID NO: 49980 - protein, 210 aa, Arabidopsis thaliana; identical to SEQ ID NO: 35855
  peptide (1)..(210): Ceres Seq. ID no. 13592327
  misc_feature (33)..(193): Pfam Name: haloacid dehalogenase-like hydrolase Pfam Description: haloacid dehalogenase-like hydrolase
  misc_feature (33)..(193): Pfam Name: haloacid dehalogenase-like hydrolase Pfam Description: haloacid dehalogenase-like hydrolase
  misc_feature (63)..(176): Homolog of NCBI NO: 21622506 NR Description: conserved hypothetical protein [Neurospora crassa]
  misc_feature (32)..(190): Homolog of NCBI NO: 28900419 NR Description: hypothetical protein [Vibrio parahaemolyticus
  misc_feature (33)..(186): Homolog of NCBI NO: 26991442 NR Description: hydrolase, haloacid dehalogenase-like family
  misc_feature (31)..(200): Homolog of NCBI NO: 27366476 NR Description: Predicted phosphatases [Vibrio vulnificus CMCP6]
  misc_feature (37)..(190): Homolog of NCBI NO: 39995800 NR Description: HAD-superfamily hydrolase, subfamily IA, variant
  misc_feature (63)..(176): Homolog of NCBI NO: 21622506 NR Description: conserved hypothetical protein [Neurospora crassa]
  misc_feature (33)..(186): Homolog of NCBI NO: 26991442 NR Description: hydrolase, haloacid dehalogenase-like family
  misc_feature (37)..(190): Homolog of NCBI NO: 39995800 NR Description: HAD-superfamily hydrolase, subfamily IA, variant
  misc_feature (1)..(193): Homolog of NCBI NO: 20196855 NR Description: unknown protein [Arabidopsis thaliana]
  misc_feature (22)..(193): Homolog of NCBI NO: 30685622 NR Description: haloacid dehalogenase-like hydrolase family
  misc_feature (8)..(193): Homolog of NCBI NO: 25408252 NR Description: hypothetical protein At2g33250 [imported] -
  misc_feature (33)..(195): Homolog of NCBI NO: 6324705 NR Description: Hypothetical ORF; Yor131cp [Saccharomyces
  misc_feature (22)..(190): Homolog of NCBI NO: 24375526 NR Description: hydrolase, haloacid dehalogenase-like family
  misc_feature (31)..(200): Homolog of NCBI NO: 27366476 NR Description: Predicted phosphatases [Vibrio vulnificus CMCP6]
  misc_feature (32)..(190): Homolog of NCBI NO: 28900419 NR Description: hypothetical protein [Vibrio parahaemolyticus
  misc_feature (22)..(190): Homolog of NCBI NO: 24375526 NR Description: hydrolase, haloacid dehalogenase-like family
  misc_feature (33)..(195): Homolog of NCBI NO: 6324705 NR Description: Hypothetical ORF; Yor131cp [Saccharomyces
  misc_feature (8)..(193): Homolog of NCBI NO: 25408252 NR Description: hypothetical protein At2g33250 [imported] -
  misc_feature (22)..(193): Homolog of NCBI NO: 30685622 NR Description: haloacid dehalogenase-like hydrolase family
  misc_feature (1)..(193): Homolog of NCBI NO: 20196855 NR Description: unknown protein [Arabidopsis thaliana]

SEQ ID NO: 49981 - protein, 189 aa, Arabidopsis thaliana; identical to SEQ ID NO: 35856
  peptide (1)..(189): Ceres Seq. ID no. 13592328
  misc_feature (12)..(172): Pfam Name: haloacid dehalogenase-like hydrolase Pfam Description: haloacid dehalogenase-like hydrolase
  misc_feature (12)..(172): Pfam Name: haloacid dehalogenase-like hydrolase Pfam Description: haloacid dehalogenase-like hydrolase
  misc_feature (42)..(155): Homolog of NCBI NO: 21622506 NR Description: conserved hypothetical protein [Neurospora crassa]
  misc_feature (11)..(169): Homolog of NCBI NO: 28900419 NR Description: hypothetical protein [Vibrio parahaemolyticus
  misc_feature (12)..(165): Homolog of NCBI NO: 26991442 NR Description: hydrolase, haloacid dehalogenase-like family
  misc_feature (10)..(179): Homolog of NCBI NO: 27366476 NR Description: Predicted phosphatases [Vibrio vulnificus CMCP6]
  misc_feature (16)..(169): Homolog of NCBI NO: 39995800 NR Description: HAD-superfamily hydrolase, subfamily IA, variant
  misc_feature (42)..(155): Homolog of NCBI NO: 21622506 NR Description: conserved hypothetical protein [Neurospora crassa]
  misc_feature (12)..(165): Homolog of NCBI NO: 26991442 NR Description: hydrolase, haloacid dehalogenase-like family
  misc_feature (16)..(169): Homolog of NCBI NO: 39995800 NR Description: HAD-superfamily hydrolase, subfamily IA, variant
  misc_feature (1)..(172): Homolog of NCBI NO: 20196855 NR Description: unknown protein [Arabidopsis thaliana]
  misc_feature (1)..(172): Homolog of NCBI NO: 30685622 NR Description: haloacid dehalogenase-like hydrolase family
  misc_feature (1)..(172): Homolog of NCBI NO: 25408252 NR Description: hypothetical protein At2g33250 [imported] -
  misc_feature (12)..(174): Homolog of NCBI NO: 6324705 NR Description: Hypothetical ORF; Yor131cp [Saccharomyces
  misc_feature (1)..(169): Homolog of NCBI NO: 24375526 NR Description: hydrolase, haloacid dehalogenase-like family
  misc_feature (10)..(179): Homolog of NCBI NO: 27366476 NR Description: Predicted phosphatases [Vibrio vulnificus CMCP6]
  misc_feature (11)..(169): Homolog of NCBI NO: 28900419 NR Description: hypothetical protein [Vibrio parahaemolyticus
  misc_feature (1)..(169): Homolog of NCBI NO: 24375526 NR Description: hydrolase, haloacid dehalogenase-like family
  misc_feature (12)..(174): Homolog of NCBI NO: 6324705 NR Description: Hypothetical ORF; Yor131cp [Saccharomyces
  misc_feature (1)..(172): Homolog of NCBI NO: 25408252 NR Description: hypothetical protein At2g33250 [imported] -
  misc_feature (1)..(172): Homolog of NCBI NO: 30685622 NR Description: haloacid dehalogenase-like hydrolase family
  misc_feature (1)..(172): Homolog of NCBI NO: 20196855 NR Description: unknown protein [Arabidopsis thaliana]

SEQ ID NO: 49982 - DNA, 1276 bp, Arabidopsis thaliana
  misc_feature (1)..(1276): Ceres Seq. ID no. 14307635
  misc_feature: MA Experiment ID: 20000184 Result: Down-regulated in Transcription
  misc_feature: MA Experiment 20000184 PARAMETER Experiment Name: At_Shoots__P Parameter: Age (day) Value: 7
  misc_feature: MA Experiment 20000184 PARAMETER Experiment Name: At_Shoots__P Parameter: Tissue Value: Shoots vs. Whole Plant
  misc_feature: MA Experiment ID: 20000227 Result: Up-regulated in Transcription
  misc_feature: MA Experiment 20000227 PARAMETER Experiment Name: At_Root-Tips-vs-Tops_P Parameter: Tissue Value: Root Tips vs. Root Tops
attatcgctctgtagaaagcttccccattttcgtagatcactctcactgacaagatgaattctcttcatcgtgttgtaggattgatcaccagaacgacgaacacatctccaatttctcatacccgtttcaatctcccatcgattctcgtcaatttgatgtcaacaaaatctggaaacgatgaagacaaatggaacgacgcttgggaatcagcttggttaccagatgatctcacagataaaatccgagcaccatgggagagagatgtgaacttccctgtaaaagaatcaacggcgacggcgattgaagaaatcgatgtggaagcaaaagcgttcgtagaggatatgaatgagcattgggacgagaggagagggaagagtgggaaagtggagaagagagaagagaagaagaaagagattggagatggagaagatgaatcatcatcatcgctttatagtttggagacgatgaagaaggattataggttgaagaaacaaagagttcatgcttctctgtgggttaaagagattgagaaattggaagaagctaaattggatgattctggatctggtggtggagctgatgatattgataggcttcttgatagttgctcagagattttcgattcggtagaccatgattttgacaaattagaggtttcgagtggatctgaattgaagaataagcctgatggttgggaatcaacagcaaaggaacaagatggaaacctctgggagatgtcacaaagagaagaagacattcttctccaagaatttgatcgtcgcactgccttctgcaaatttcagatagctagttttataaagcaacacatattcagtaggagaagaccgattgatgggtggaaatacatgattgaagtgattggtccaaatgcgaggaaagggaaaggaagtgtttctaggctcccggctttatcggatgtgtcgactcagccgtttaaagaagaaaccagcagtctcactaccttgaagcgtcggtagaagaaactagaggagttcacaatgtttgttagattgttaaatgatcttcaactacttgcacttgttaaaggccggccatgtcctctgttcctacagttctaccatttcgggttttatattagcatcagttcttcaatcatgcaatttcttgttagcttagttttgaaacgttgaaacaatgggtcttgtcttagatgttgatcaagaacagaggacaaatctcacccagtagaaactaacaatgttgaaaattaaagcaaatataatcagatgagag

SEQ ID NO: 49983 - protein, 314 aa, Arabidopsis thaliana
  peptide (1)..(314): Ceres Seq. ID no. 14307636
  misc_feature (83)..(303): Homolog of NCBI NO: 15241764 NR Description: hypothetical protein [Arabidopsis thaliana]
  misc_feature (83)..(303): Homolog of NCBI NO: 8809640 NR Description: gb|AAC32909.1~gene_id:MMI9.10~similar to unknown
  misc_feature (82)..(303): Homolog of NCBI NO: 34908962 NR Description: P0003D09.18 [Oryza sativa (japonica
  misc_feature (1)..(310): Homolog of NCBI NO: 18071389 NR Description: putative mucin [Oryza sativa]
  misc_feature (1)..(314): Homolog of NCBI NO: 15227059 NR Description: mucin -related [Arabidopsis thaliana]
MNSLHRVVGLITRTTNTSPISHTRFNLPSILVNLMSTKSGNDEDKWNDAWESAWLPDDLTDKIRAPWERDVNFPVKESTATAIEEIDVEAKAFVEDMNEHWDERRGKSGKVEKREEKKKEIGDGEDESSSSLYSLETMKKDYRLKKQRVHASLWVKEIEKLEEAKLDDSGSGGGADDIDRLLDSCSEIFDSVDHDFDKLEVSSGSELKNKPDGWESTAKEQDGNLWEMSQREEDILLQEFDRRTAFCKFQIASFIKQHIFSRRRPIDGWKYMIEVIGPNARKGKGSVSRLPALSDVSTQPFKEETSSLTTLKRR

SEQ ID NO: 49984 - protein, 280 aa, Arabidopsis thaliana
  peptide (1)..(280): Ceres Seq. ID no. 14307637
  misc_feature (49)..(269): Homolog of NCBI NO: 15241764 NR Description: hypothetical protein [Arabidopsis thaliana]
  misc_feature (49)..(269): Homolog of NCBI NO: 8809640 NR Description: gb|AAC32909.1~gene_id:MMI9.10~similar to unknown
  misc_feature (48)..(269): Homolog of NCBI NO: 34908962 NR Description: P0003D09.18 [Oryza sativa (japonica
  misc_feature (1)..(276): Homolog of NCBI NO: 18071389 NR Description: putative mucin [Oryza sativa]
  misc_feature (1)..(280): Homolog of NCBI NO: 15227059 NR Description: mucin -related [Arabidopsis thaliana]
MSTKSGNDEDKWNDAWESAWLPDDLTDKIRAPWERDVNFPVKESTATAIEEIDVEAKAFVEDMNEHWDERRGKSGKVEKREEKKKEIGDGEDESSSSLYSLETMKKDYRLKKQRVHASLWVKEIEKLEEAKLDDSGSGGGADDIDRLLDSCSEIFDSVDHDFDKLEVSSGSELKNKPDGWESTAKEQDGNLWEMSQREEDILLQEFDRRTAFCKFQIASFIKQHIFSRRRPIDGWKYMIEVIGPNARKGKGSVSRLPALSDVSTQPFKEETSSLTTLKRR

SEQ ID NO: 49985 - protein, 218 aa, Arabidopsis thaliana
  peptide (1)..(218): Ceres Seq. ID no. 14307638
  misc_feature (1)..(207): Homolog of NCBI NO: 15241764 NR Description: hypothetical protein [Arabidopsis thaliana]
  misc_feature (1)..(207): Homolog of NCBI NO: 8809640 NR Description: gb|AAC32909.1~gene_id:MMI9.10~similar to unknown
  misc_feature (1)..(207): Homolog of NCBI NO: 34908962 NR Description: P0003D09.18 [Oryza sativa (japonica
  misc_feature (1)..(214): Homolog of NCBI NO: 18071389 NR Description: putative mucin [Oryza sativa]
  misc_feature (1)..(218): Homolog of NCBI NO: 15227059 NR Description: mucin -related [Arabidopsis thaliana]
MNEHWDERRGKSGKVEKREEKKKEIGDGEDESSSSLYSLETMKKDYRLKKQRVHASLWVKEIEKLEEAKLDDSGSGGGADDIDRLLDSCSEIFDSVDHDFDKLEVSSGSELKNKPDGWESTAKEQDGNLWEMSQREEDILLQEFDRRTAFCKFQIASFIKQHIFSRRRPIDGWKYMIEVIGPNARKGKGSVSRLPALSDVSTQPFKEETSSLTTLKRR

SEQ ID NO: 49986 - DNA, 1636 bp, Arabidopsis thaliana
  misc_feature (1)..(1636): Ceres Seq. ID no. 13648342
  misc_feature: MA Experiment ID: 20000180 Result: Up-regulated in Transcription
  misc_feature: MA Experiment 20000180 PARAMETER Experiment Name: At_Germinating_Seeds_P Parameter: Age (hr) Value: 24 vs. 0
  misc_feature: MA Experiment 20000180 PARAMETER Experiment Name: At_Germinating_Seeds_P Parameter: Tissue Value: Germinating Seeds
  misc_feature: MA Experiment ID: 20000184 Result: Up-regulated in Transcription
  misc_feature: MA Experiment 20000184 PARAMETER Experiment Name: At_Shoots__P Parameter: Age (day) Value: 7
  misc_feature: MA Experiment 20000184 PARAMETER Experiment Name: At_Shoots__P Parameter: Tissue Value: Shoots vs. Whole Plant
  misc_feature: MA Experiment ID: 20000185 Result: Down-regulated in Transcription
  misc_feature: MA Experiment 20000185 PARAMETER Experiment Name: At_Roots__P Parameter: Age (day) Value: 7 vs. 21
  misc_feature: MA Experiment 20000185 PARAMETER Experiment Name: At_Roots__P Parameter: Organism Value: A. thaliana
  misc_feature: MA Experiment 20000185 PARAMETER Experiment Name: At_Roots__P Parameter: Tissue Value: Roots vs. Whole Plant
  misc_feature: MA Experiment ID: 20000214 Result: Up-regulated in Transcription
  misc_feature: MA Experiment 20000214 PARAMETER Experiment Name: At_4deg_Cold_P Parameter: Timepoint (hr) Value: 6
  misc_feature: MA Experiment ID: 20000227 Result: Down-regulated in Transcription
  misc_feature: MA Experiment 20000227 PARAMETER Experiment Name: At_Root-Tips-vs-Tops_P Parameter: Tissue Value: Root Tips vs. Root Tops
  misc_feature: MA Experiment ID: 20000438 Result: Up-regulated in Transcription
  misc_feature: MA Experiment 20000438 PARAMETER Experiment Name: At_Shoots__P Parameter: Age (day) Value: 14
  misc_feature: MA Experiment 20000438 PARAMETER Experiment Name: At_Shoots__P Parameter: Tissue Value: Shoots vs. Whole Plant
  misc_feature: MA Experiment ID: 20000439 Result: Down-regulated in Transcription
  misc_feature: MA Experiment 20000439 PARAMETER Experiment Name: At_Roots__P Parameter: Age (day) Value: 14 vs. 21
  misc_feature: MA Experiment 20000439 PARAMETER Experiment Name: At_Roots__P Parameter: Organism Value: A. thaliana
  misc_feature: MA Experiment 20000439 PARAMETER Experiment Name: At_Roots__P Parameter: Tissue Value: Roots vs. Whole Plant
  misc_feature: MA Experiment ID: 20000794 Result: Down-regulated in Transcription
  misc_feature: MA Experiment 20000794 PARAMETER Experiment Name: At_Petals_P Parameter: Age (day) Value: 23-25 days
  misc_feature: MA Experiment 20000794 PARAMETER Experiment Name: At_Petals_P Parameter: Plant Line Value: WS
  misc_feature: MA Experiment 20000794 PARAMETER Experiment Name: At_Petals_P Parameter: Tissue Value: Petals vs. Whole plant
  misc_feature: MA Experiment ID: 20001450 Result: Down-regulated in Transcription
  misc_feature: MA Experiment 20001450 PARAMETER Experiment Name: At_Far-red-induction_P Parameter: Age (day) Value: 7
  misc_feature: MA Experiment 20001450 PARAMETER Experiment Name: At_Far-red-induction_P Parameter: Light Value: Far-red vs. White
  misc_feature: MA Experiment 20001450 PARAMETER Experiment Name: At_Far-red-induction_P Parameter: Organism Value: A. thaliana
  misc_feature: MA Experiment 20001450 PARAMETER Experiment Name: At_Far-red-induction_P Parameter: Plant Line Value: Columbia
  misc_feature: MA Experiment 20001450 PARAMETER Experiment Name: At_Far-red-induction_P Parameter: Timepoint (hr) Value: 8
  misc_feature: MA Experiment 20001450 PARAMETER Experiment Name: At_Far-red-induction_P Parameter: Tissue Value: Whole Plant
  misc_feature: MA Experiment ID: 20001904 Result: Down-regulated in Transcription
  misc_feature: MA Experiment 20001904 PARAMETER Experiment Name: At_Drought_Reproduction_P Parameter: Age (day) Value: 37
  misc_feature: MA Experiment 20001904 PARAMETER Experiment Name: At_Drought_Reproduction_P Parameter: Organism Value: A. thaliana
  misc_feature: MA Experiment 20001904 PARAMETER Experiment Name: At_Drought_Reproduction_P Parameter: Plant Line Value: WS
  misc_feature: MA Experiment 20001904 PARAMETER Experiment Name: At_Drought_Reproduction_P Parameter: Timepoint (day) Value: 7
  misc_feature: MA Experiment 20001904 PARAMETER Experiment Name: At_Drought_Reproduction_P Parameter: Tissue Value: Rosettes
  misc_feature: MA Experiment 20001904 PARAMETER Experiment Name: At_Drought_Reproduction_P Parameter: Treatment Value: Drought vs. No Drought
  misc_feature: MA Experiment ID: 20001905 Result: Down-regulated in Transcription
  misc_feature: MA Experiment 20001905 PARAMETER Experiment Name: At_Drought_Reproduction_P Parameter: Age (day) Value: 40
  misc_feature: MA Experiment 20001905 PARAMETER Experiment Name: At_Drought_Reproduction_P Parameter: Organism Value: A. thaliana
  misc_feature: MA Experiment 20001905 PARAMETER Experiment Name: At_Drought_Reproduction_P Parameter: Plant Line Value: WS
  misc_feature: MA Experiment 20001905 PARAMETER Experiment Name: At_Drought_Reproduction_P Parameter: Timepoint (day) Value: 10
  misc_feature: MA Experiment 20001905 PARAMETER Experiment Name: At_Drought_Reproduction_P Parameter: Tissue Value: Rosettes
  misc_feature: MA Experiment 20001905 PARAMETER Experiment Name: At_Drought_Reproduction_P Parameter: Treatment Value: Drought vs. No Drought
  misc_feature: MA Experiment ID: 20001908 Result: Down-regulated in Transcription
  misc_feature: MA Experiment 20001908 PARAMETER Experiment Name: At_Drought_Reproduction_P Parameter: Age (day) Value: 40
  misc_feature: MA Experiment 20001908 PARAMETER Experiment Name: At_Drought_Reproduction_P Parameter: Organism Value: A. thaliana
  misc_feature: MA Experiment 20001908 PARAMETER Experiment Name: At_Drought_Reproduction_P Parameter: Plant Line Value: WS
  misc_feature: MA Experiment 20001908 PARAMETER Experiment Name: At_Drought_Reproduction_P Parameter: Timepoint (day) Value: 10
  misc_feature: MA Experiment 20001908 PARAMETER Experiment Name: At_Drought_Reproduction_P Parameter: Tissue Value: Siliques
  misc_feature: MA Experiment 20001908 PARAMETER Experiment Name: At_Drought_Reproduction_P Parameter: Treatment Value: Drought vs. No Drought
gaaccattggttggttttgatcaaaaccaaaggatgtgtgtatgtatgtatatattctaacgctcaaaactgatcactagcattcctagatttttccttcttgtgatcacttgcagctatggccacacatgcagctctcgccgtctcaagaatcccggtcacacagcgactgcagtctaagagtgccattcactctttccctgctcaatgctcctccaagaggctagaagtcgctgaattctccggtctgcgtatgagtagtatcggtggggaagcatctttcttcgatgctgtagctgcacaaatcatccctaaggctgtgacaacatcaactcctgttagaggagagacagtggcgaaactgaaagttgcgattaacggttttggaaggattggtaggaactttcttaggtgttggcatggtcgtaaagactctcctctcgaagttgttgtacttaacgacagtggtggtgtcaagaatgcatcccacttgcttaagtatgactccatgcttggaaccttcaaggctgaagtgaaaattgtggacaatgaaactattagtgttgatggtaagctcatcaaagttgtctccaacagagaccctcttaagcttccatgggctgagctcggcattgacattgttatcgagggaacaggagtgtttgttgatgggccaggagcagggaagcatatccaagccggagcctcgaaagttatcatcactgcaccagccaaaggtgctgatatccctacctatgttatgggagtcaatgagcaagactatggtcacgatgtcgctaacattattagcaatgcatcttgcaccaccaactgtttggcaccttttgctaaagtcttggatgaagaatttggaattgtcaaggggacaatgacaaccacacactcctacaccggagaccaaaggcttctagatgcatcacacagggacctaaggcgtgcaagagccgcagcactgaacatagtgcctaccagcacaggagcagccaaggcggtgtcattagtgttgccgcagctgaagggtaaacttaacggcattgcactccgtgtgccaacaccaaacgtctcagtggttgaccttgttataaacgttgagaagaaaggtttgacagcagaggatgtgaacgaggcctttagaaaagccgctaatggaccgatgaaaggcattttagacgtttgcgatgcgcctcttgtctctgttgacttcaggtgctctgatgtctctaccaccattgactcgtccctcactatggttatgggtgatgatatggtcaaggtggttgcttggtatgataacgagtggggttacagccaaagagtggtggatttggctcacctagtggctagcaagtggccgggagcggaagctgttggaagtggagatcctttggaggatttctgcaagacaaacccggctgatgaggaatgcaaagtctatgactgaacaactttgatcatttctttctttatttttcaccaaaacaatactttgtatcatgagttacttattcgaaatcgtactatgcatacttgtttttctcataagattttcttgtctgatgaacaactatatgttaagactgagagaattgtatttgagaaataaccattttatgct

SEQ ID NO: 49987 - protein, 447 aa, Arabidopsis thaliana
  peptide (1)..(447): Ceres Seq. ID no. 13648343
  misc_feature (236)..(397): Pfam Name: Glyceraldehyde 3-phosphate dehydrogenase, Pfam Description: Glyceraldehyde 3-phosphate dehydrogenase,
  misc_feature (236)..(397): Pfam Name: Glyceraldehyde 3-phosphate dehydrogenase, Pfam Description: Glyceraldehyde 3-phosphate dehydrogenase,
  misc_feature (83)..(447): Homolog of NCBI NO: 18073141 NR Description: glyceraldehyde-3-phosphate dehydrogenase [Chara
  misc_feature (1)..(431): Homolog of NCBI NO: 18076102 NR Description: glyceraldehyde-3-phosphate dehydrogenase
  misc_feature (31)..(421): Homolog of NCBI NO: 120665 NR Description: Glyceraldehyde 3-phosphate dehydrogenase B, precursor (NADP-dependent glyceraldehydephosphate dehydrogenase
  misc_feature (1)..(447): Homolog of NCBI NO: 6063542 NR Description: EST C74302(E30840) corresponds to a region of the gene.~similar to glyceraldehyde-3-phosphate dehydrogenase.
  misc_feature (1)..(447): Homolog of NCBI NO: 120664 NR Description: Glyceraldehyde 3-phosphate dehydrogenase B, precursor (NADP-dependent glyceraldehydephosphate dehydrogenase
  misc_feature (83)..(447): Homolog of NCBI NO: 18073141 NR Description: glyceraldehyde-3-phosphate dehydrogenase [Chara
  misc_feature (31)..(421): Homolog of NCBI NO: 120665 NR Description: Glyceraldehyde 3-phosphate dehydrogenase B, precursor (NADP-dependent glyceraldehydephosphate dehydrogenase
  misc_feature (1)..(447): Homolog of NCBI NO: 120664 NR Description: Glyceraldehyde 3-phosphate dehydrogenase B, precursor (NADP-dependent glyceraldehydephosphate dehydrogenase
  misc_feature (1)..(447): Homolog of NCBI NO: 15217555 NR Description: glyceraldehyde-3-phosphate dehydrogenase
  misc_feature (46)..(447): Homolog of NCBI NO: 81621 NR Description: glyceraldehyde-3-phosphate dehydrogenase (NADP)
  misc_feature (1)..(447): Homolog of NCBI NO: 120663 NR Description: Glyceraldehyde 3-phosphate dehydrogenase B, precursor (NADP-dependent glyceraldehydephosphate dehydrogenase
  misc_feature (5)..(447): Homolog of NCBI NO: 20733 NR Description: precursor C-terminal fragment (AA -80 to 367)
  misc_feature (1)..(447): Homolog of NCBI NO: 66028 NR Description: glyceraldehyde-3-phosphate dehydrogenase (NADP)
  misc_feature (1)..(447): Homolog of NCBI NO: 6063542 NR Description: EST C74302(E30840) corresponds to a region of the gene.~similar to glyceraldehyde-3-phosphate dehydrogenase.
  misc_feature (1)..(431): Homolog of NCBI NO: 18076102 NR Description: glyceraldehyde-3-phosphate dehydrogenase
  misc_feature (1)..(447): Homolog of NCBI NO: 66028 NR Description: glyceraldehyde-3-phosphate dehydrogenase (NADP)
  misc_feature (5)..(447): Homolog of NCBI NO: 20733 NR Description: precursor C-terminal fragment (AA -80 to 367)
  misc_feature (1)..(447): Homolog of NCBI NO: 120663 NR Description: Glyceraldehyde 3-phosphate dehydrogenase B, precursor (NADP-dependent glyceraldehydephosphate dehydrogenase
  misc_feature (46)..(447): Homolog of NCBI NO: 81621 NR Description: glyceraldehyde-3-phosphate dehydrogenase (NADP)
  misc_feature (1)..(447): Homolog of NCBI NO: 15217555 NR Description: glyceraldehyde-3-phosphate dehydrogenase
MATHAALAVSRIPVTQRLQSKSAIHSFPAQCSSKRLEVAEFSGLRMSSIGGEASFFDAVAAQIIPKAVTTSTPVRGETVAKLKVAINGFGRIGRNFLRCWHGRKDSPLEVVVLNDSGGVKNASHLLKYDSMLGTFKAEVKIVDNETISVDGKLIKVVSNRDPLKLPWAELGIDIVIEGTGVFVDGPGAGKHIQAGASKVIITAPAKGADIPTYVMGVNEQDYGHDVANIISNASCTTNCLAPFAKVLDEEFGIVKGTMTTTHSYTGDQRLLDASHRDLRRARAAALNIVPTSTGAAKAVSLVLPQLKGKLNGIALRVPTPNVSVVDLVINVEKKGLTAEDVNEAFRKAANGPMKGILDVCDAPLVSVDFRCSDVSTTIDSSLTMVMGDDMVKVVAWYDNEWGYSQRVVDLAHLVASKWPGAEAVGSGDPLEDFCKTNPADEECKVYD

SEQ ID NO: 49988 - protein, 402 aa, Arabidopsis thaliana
  peptide (1)..(402): Ceres Seq. ID no. 13648344
  misc_feature (191)..(352): Pfam Name: Glyceraldehyde 3-phosphate dehydrogenase, Pfam Description: Glyceraldehyde 3-phosphate dehydrogenase,
  misc_feature (191)..(352): Pfam Name: Glyceraldehyde 3-phosphate dehydrogenase, Pfam Description: Glyceraldehyde 3-phosphate dehydrogenase,
  misc_feature (38)..(402): Homolog of NCBI NO: 18073141 NR Description: glyceraldehyde-3-phosphate dehydrogenase [Chara
  misc_feature (1)..(386): Homolog of NCBI NO: 18076102 NR Description: glyceraldehyde-3-phosphate dehydrogenase
  misc_feature (1)..(376): Homolog of NCBI NO: 120665 NR Description: Glyceraldehyde 3-phosphate dehydrogenase B, precursor (NADP-dependent glyceraldehydephosphate dehydrogenase
  misc_feature (1)..(402): Homolog of NCBI NO: 6063542 NR Description: EST C74302(E30840) corresponds to a region of the gene.~similar to glyceraldehyde-3-phosphate dehydrogenase.
  misc_feature (1)..(402): Homolog of NCBI NO: 120664 NR Description: Glyceraldehyde 3-phosphate dehydrogenase B, precursor (NADP-dependent glyceraldehydephosphate dehydrogenase
  misc_feature (38)..(402): Homolog of NCBI NO: 18073141 NR Description: glyceraldehyde-3-phosphate dehydrogenase [Chara
  misc_feature (1)..(376): Homolog of NCBI NO: 120665 NR Description: Glyceraldehyde 3-phosphate dehydrogenase B, precursor (NADP-dependent glyceraldehydephosphate dehydrogenase
  misc_feature (1)..(402): Homolog of NCBI NO: 120664 NR Description: Glyceraldehyde 3-phosphate dehydrogenase B, precursor (NADP-dependent glyceraldehydephosphate dehydrogenase
  misc_feature (1)..(402): Homolog of NCBI NO: 15217555 NR Description: glyceraldehyde-3-phosphate dehydrogenase
  misc_feature (1)..(402): Homolog of NCBI NO: 81621 NR Description: glyceraldehyde-3-phosphate dehydrogenase (NADP)
  misc_feature (1)..(402): Homolog of NCBI NO: 120663 NR Description: Glyceraldehyde 3-phosphate dehydrogenase B, precursor (NADP-dependent glyceraldehydephosphate dehydrogenase
  misc_feature (1)..(402): Homolog of NCBI NO: 20733 NR Description: precursor C-terminal fragment (AA -80 to 367)
  misc_feature (1)..(402): Homolog of NCBI NO: 66028 NR Description: glyceraldehyde-3-phosphate dehydrogenase (NADP)
  misc_feature (1)..(402): Homolog of NCBI NO: 6063542 NR Description: EST C74302(E30840) corresponds to a region of the gene.~similar to glyceraldehyde-3-phosphate dehydrogenase.
  misc_feature (1)..(386): Homolog of NCBI NO: 18076102 NR Description: glyceraldehyde-3-phosphate dehydrogenase
  misc_feature (1)..(402): Homolog of NCBI NO: 66028 NR Description: glyceraldehyde-3-phosphate dehydrogenase (NADP)
  misc_feature (1)..(402): Homolog of NCBI NO: 20733 NR Description: precursor C-terminal fragment (AA -80 to 367)
  misc_feature (1)..(402): Homolog of NCBI NO: 120663 NR Description: Glyceraldehyde 3-phosphate dehydrogenase B, precursor (NADP-dependent glyceraldehydephosphate dehydrogenase
  misc_feature (1)..(402): Homolog of NCBI NO: 81621 NR Description: glyceraldehyde-3-phosphate dehydrogenase (NADP)
  misc_feature (1)..(402): Homolog of NCBI NO: 15217555 NR Description: glyceraldehyde-3-phosphate dehydrogenase
MSSIGGEASFFDAVAAQIIPKAVTTSTPVRGETVAKLKVAINGFGRIGRNFLRCWHGRKDSPLEVVVLNDSGGVKNASHLLKYDSMLGTFKAEVKIVDNETISVDGKLIKVVSNRDPLKLPWAELGIDIVIEGTGVFVDGPGAGKHIQAGASKVIITAPAKGADIPTYVMGVNEQDYGHDVANIISNASCTTNCLAPFAKVLDEEFGIVKGTMTTTHSYTGDQRLLDASHRDLRRARAAALNIVPTSTGAAKAVSLVLPQLKGKLNGIALRVPTPNVSVVDLVINVEKKGLTAEDVNEAFRKAANGPMKGILDVCDAPLVSVDFRCSDVSTTIDSSLTMVMGDDMVKVVAWYDNEWGYSQRVVDLAHLVASKWPGAEAVGSGDPLEDFCKTNPADEECKVYD

SEQ ID NO: 49989 - protein, 317 aa, Arabidopsis thaliana
  peptide (1)..(317): Ceres Seq. ID no. 13648345
  misc_feature (106)..(267): Pfam Name: Glyceraldehyde 3-phosphate dehydrogenase, Pfam Description: Glyceraldehyde 3-phosphate dehydrogenase,
  misc_feature (106)..(267): Pfam Name: Glyceraldehyde 3-phosphate dehydrogenase, Pfam Description: Glyceraldehyde 3-phosphate dehydrogenase,
  misc_feature (1)..(317): Homolog of NCBI NO: 18073141 NR Description: glyceraldehyde-3-phosphate dehydrogenase [Chara
  misc_feature (1)..(301): Homolog of NCBI NO: 18076102 NR Description: glyceraldehyde-3-phosphate dehydrogenase
  misc_feature (1)..(291): Homolog of NCBI NO: 120665 NR Description: Glyceraldehyde 3-phosphate dehydrogenase B, precursor (NADP-dependent glyceraldehydephosphate dehydrogenase
  misc_feature (1)..(317): Homolog of NCBI NO: 6063542 NR Description: EST C74302(E30840) corresponds to a region of the gene.~similar to glyceraldehyde-3-phosphate dehydrogenase.
  misc_feature (1)..(317): Homolog of NCBI NO: 120664 NR Description: Glyceraldehyde 3-phosphate dehydrogenase B, precursor (NADP-dependent glyceraldehydephosphate dehydrogenase
  misc_feature (1)..(317): Homolog of NCBI NO: 18073141 NR Description: glyceraldehyde-3-phosphate dehydrogenase [Chara
  misc_feature (1)..(291): Homolog of NCBI NO: 120665 NR Description: Glyceraldehyde 3-phosphate dehydrogenase B, precursor (NADP-dependent glyceraldehydephosphate dehydrogenase
  misc_feature (1)..(317): Homolog of NCBI NO: 120664 NR Description: Glyceraldehyde 3-phosphate dehydrogenase B, precursor (NADP-dependent glyceraldehydephosphate dehydrogenase
  misc_feature (1)..(317): Homolog of NCBI NO: 15217555 NR Description: glyceraldehyde-3-phosphate dehydrogenase
  misc_feature (1)..(317): Homolog of NCBI NO: 81621 NR Description: glyceraldehyde-3-phosphate dehydrogenase (NADP)
  misc_feature (1)..(317): Homolog of NCBI NO: 120663 NR Description: Glyceraldehyde 3-phosphate dehydrogenase B, precursor (NADP-dependent glyceraldehydephosphate dehydrogenase
  misc_feature (1)..(317): Homolog of NCBI NO: 20733 NR Description: precursor C-terminal fragment (AA -80 to 367)
  misc_feature (1)..(317): Homolog of NCBI NO: 66028 NR Description: glyceraldehyde-3-phosphate dehydrogenase (NADP)
  misc_feature (1)..(317): Homolog of NCBI NO: 6063542 NR Description: EST C74302(E30840) corresponds to a region of the gene.~similar to glyceraldehyde-3-phosphate dehydrogenase.
  misc_feature (1)..(301): Homolog of NCBI NO: 18076102 NR Description: glyceraldehyde-3-phosphate dehydrogenase
  misc_feature (1)..(317): Homolog of NCBI NO: 66028 NR Description: glyceraldehyde-3-phosphate dehydrogenase (NADP)
  misc_feature (1)..(317): Homolog of NCBI NO: 20733 NR Description: precursor C-terminal fragment (AA -80 to 367)
  misc_feature (1)..(317): Homolog of NCBI NO: 120663 NR Description: Glyceraldehyde 3-phosphate dehydrogenase B, precursor (NADP-dependent glyceraldehydephosphate dehydrogenase
  misc_feature (1)..(317): Homolog of NCBI NO: 81621 NR Description: glyceraldehyde-3-phosphate dehydrogenase (NADP)
  misc_feature (1)..(317): Homolog of NCBI NO: 15217555 NR Description: glyceraldehyde-3-phosphate dehydrogenase
MLGTFKAEVKIVDNETISVDGKLIKVVSNRDPLKLPWAELGIDIVIEGTGVFVDGPGAGKHIQAGASKVIITAPAKGADIPTYVMGVNEQDYGHDVANIISNASCTTNCLAPFAKVLDEEFGIVKGTMTTTHSYTGDQRLLDASHRDLRRARAAALNIVPTSTGAAKAVSLVLPQLKGKLNGIALRVPTPNVSVVDLVINVEKKGLTAEDVNEAFRKAANGPMKGILDVCDAPLVSVDFRCSDVSTTIDSSLTMVMGDDMVKVVAWYDNEWGYSQRVVDLAHLVASKWPGAEAVGSGDPLEDFCKTNPADEECKVYD

SEQ ID NO: 49990 - DNA, 1573 bp, Arabidopsis thaliana; identical to SEQ ID NO: 49214
  misc_feature (1)..(1573): Ceres Seq. ID no. 13600765
  misc_feature: MA Experiment ID: 108461 Result: Up-regulated in Transcription
  misc_feature: MA Experiment 108461 PARAMETER Experiment Name: At_Germinating_Seeds_cDNA_P Parameter: Age (day) Value: 1 vs. 0
  misc_feature: MA Experiment 108461 PARAMETER Experiment Name: At_Germinating_Seeds_cDNA_P Parameter: Tissue Value: Germinating Seeds
  misc_feature: MA Experiment ID: 108463 Result: Up-regulated in Transcription
  misc_feature: MA Experiment 108463 PARAMETER Experiment Name: At_Germinating_Seeds_cDNA_P Parameter: Age (day) Value: 3 vs. 0
  misc_feature: MA Experiment 108463 PARAMETER Experiment Name: At_Germinating_Seeds_cDNA_P Parameter: Tissue Value: Germinating Seeds
  misc_feature: MA Experiment ID: 108488 Result: Down-regulated in Transcription
  misc_feature: MA Experiment ID: 108573 Result: Up-regulated in Transcription
  misc_feature: MA Experiment 108573 PARAMETER Experiment Name: At_Drought_cDNA_P Parameter: Timepoint (hr) Value: 6
  misc_feature: MA Experiment 108573 PARAMETER Experiment Name: At_Drought_cDNA_P Parameter: Tissue Value: Aerial
  misc_feature: MA Experiment 108573 PARAMETER Experiment Name: At_Drought_cDNA_P Parameter: Treatment Value: Drought vs. No Drought
  misc_feature: MA Experiment ID: 108608 Result: Down-regulated in Transcription
  misc_feature: MA Experiment 108608 PARAMETER Experiment Name: At_100uM_ABA_cDNA_P Parameter: Timepoint (hr) Value: 1
  misc_feature: MA Experiment 108608 PARAMETER Experiment Name: At_100uM_ABA_cDNA_P Parameter: Tissue Value: Aerial
  misc_feature: MA Experiment 108608 PARAMETER Experiment Name: At_100uM_ABA_cDNA_P Parameter: Treatment Value: 100uM ABA vs. No Treatment
  misc_feature: MA Experiment ID: 20000070 Result: Up-regulated in Transcription
  misc_feature: MA Experiment 20000070 PARAMETER Experiment Name: At_100uM_ABA_Mutants_cDNA_P Parameter: Plant Line Value: CS24
  misc_feature: MA Experiment 20000070 PARAMETER Experiment Name: At_100uM_ABA_Mutants_cDNA_P Parameter: Timepoint (hr) Value: 6
  misc_feature: MA Experiment 20000070 PARAMETER Experiment Name: At_100uM_ABA_Mutants_cDNA_P Parameter: Tissue Value: Aerial
  misc_feature: MA Experiment 20000070 PARAMETER Experiment Name: At_100uM_ABA_Mutants_cDNA_P Parameter: Treatment Value: 100uM ABA vs. No Treatment
  misc_feature: MA Experiment ID: 20000071 Result: Up-regulated in Transcription
  misc_feature: MA Experiment 20000071 PARAMETER Experiment Name: At_100uM_ABA_Mutants_cDNA_P Parameter: Plant Line Value: CS8104
  misc_feature: MA Experiment 20000071 PARAMETER Experiment Name: At_100uM_ABA_Mutants_cDNA_P Parameter: Timepoint (hr) Value: 6
  misc_feature: MA Experiment 20000071 PARAMETER Experiment Name: At_100uM_ABA_Mutants_cDNA_P Parameter: Tissue Value: Aerial
  misc_feature: MA Experiment 20000071 PARAMETER Experiment Name: At_100uM_ABA_Mutants_cDNA_P Parameter: Treatment Value: 100uM ABA vs. No Treatment
  misc_feature: MA Experiment ID: 20000072 Result: Up-regulated in Transcription
  misc_feature: MA Experiment 20000072 PARAMETER Experiment Name: At_100uM_ABA_Mutants_cDNA_P Parameter: Plant Line Value: CS8105
  misc_feature: MA Experiment 20000072 PARAMETER Experiment Name: At_100uM_ABA_Mutants_cDNA_P Parameter: Timepoint (hr) Value: 6
  misc_feature: MA Experiment 20000072 PARAMETER Experiment Name: At_100uM_ABA_Mutants_cDNA_P Parameter: Tissue Value: Aerial
  misc_feature: MA Experiment 20000072 PARAMETER Experiment Name: At_100uM_ABA_Mutants_cDNA_P Parameter: Treatment Value: 100uM ABA vs. No Treatment
  misc_feature: MA Experiment ID: 20000086 Result: Up-regulated in Transcription
  misc_feature: MA Experiment 20000086 PARAMETER Experiment Name: At_100uM_ABA_Mutants_cDNA_P Parameter: Plant Line Value: CS22
  misc_feature: MA Experiment 20000086 PARAMETER Experiment Name: At_100uM_ABA_Mutants_cDNA_P Parameter: Timepoint (hr) Value: 6
  misc_feature: MA Experiment 20000086 PARAMETER Experiment Name: At_100uM_ABA_Mutants_cDNA_P Parameter: Tissue Value: Aerial
  misc_feature: MA Experiment 20000086 PARAMETER Experiment Name: At_100uM_ABA_Mutants_cDNA_P Parameter: Treatment Value: 100uM ABA vs. No Treatment
  misc_feature: MA Experiment ID: 20000088 Result: Up-regulated in Transcription
  misc_feature: MA Experiment 20000088 PARAMETER Experiment Name: At_100uM_ABA_Mutants_cDNA_P Parameter: Plant Line Value: Landsberg
  misc_feature: MA Experiment 20000088 PARAMETER Experiment Name: At_100uM_ABA_Mutants_cDNA_P Parameter: Timepoint (hr) Value: 6
  misc_feature: MA Experiment 20000088 PARAMETER Experiment Name: At_100uM_ABA_Mutants_cDNA_P Parameter: Tissue Value: Aerial
  misc_feature: MA Experiment 20000088 PARAMETER Experiment Name: At_100uM_ABA_Mutants_cDNA_P Parameter: Treatment Value: 100uM ABA vs. No Treatment
  misc_feature: MA Experiment ID: 20000307 Result: Up-regulated in Transcription
  misc_feature: MA Experiment 20000307 PARAMETER Experiment Name: At_Germinating_Seeds_Sub_P Parameter: Age (hr) Value: 24 vs. 0
  misc_feature: MA Experiment 20000307 PARAMETER Experiment Name: At_Germinating_Seeds_Sub_P Parameter: Organism Value: A. thaliana
  misc_feature: MA Experiment 20000307 PARAMETER Experiment Name: At_Germinating_Seeds_Sub_P Parameter: Plant Line Value: WS
  misc_feature: MA Experiment 20000307 PARAMETER Experiment Name: At_Germinating_Seeds_Sub_P Parameter: Tissue Value: Germinating Seeds
  misc_feature: MA Experiment ID: 20000328 Result: Down-regulated in Transcription
  misc_feature: MA Experiment 20000328 PARAMETER Experiment Name: At_42deg_Heat_Sub_P Parameter: Age (day) Value: 14
  misc_feature: MA Experiment 20000328 PARAMETER Experiment Name: At_42deg_Heat_Sub_P Parameter: Organism Value: A. thaliana
  misc_feature: MA Experiment 20000328 PARAMETER Experiment Name: At_42deg_Heat_Sub_P Parameter: Plant Line Value: WS
  misc_feature: MA Experiment 20000328 PARAMETER Experiment Name: At_42deg_Heat_Sub_P Parameter: Temperature (deg C) Value: 42 vs. 22
  misc_feature: MA Experiment 20000328 PARAMETER Experiment Name: At_42deg_Heat_Sub_P Parameter: Timepoint (hr) Value: 6
  misc_feature: MA Experiment 20000328 PARAMETER Experiment Name: At_42deg_Heat_Sub_P Parameter: Tissue Value: Aerial
  misc_feature: MA Experiment ID: 20000349 Result: Up-regulated in Transcription
  misc_feature: MA Experiment 20000349 PARAMETER Experiment Name: At_100uM_ABA_Sub_P Parameter: Age (day) Value: 14
  misc_feature: MA Experiment 20000349 PARAMETER Experiment Name: At_100uM_ABA_Sub_P Parameter: Organism Value: A. thaliana
  misc_feature: MA Experiment 20000349 PARAMETER Experiment Name: At_100uM_ABA_Sub_P Parameter: Plant Line Value: WS
  misc_feature: MA Experiment 20000349 PARAMETER Experiment Name: At_100uM_ABA_Sub_P Parameter: Timepoint (hr) Value: 6
  misc_feature: MA Experiment 20000349 PARAMETER Experiment Name: At_100uM_ABA_Sub_P Parameter: Tissue Value: Aerial
  misc_feature: MA Experiment 20000349 PARAMETER Experiment Name: At_100uM_ABA_Sub_P Parameter: Treatment Value: 100uM ABA vs. No Treatment
  misc_feature: MA Experiment ID: 20000355 Result: Down-regulated in Transcription
  misc_feature: MA Experiment 20000355 PARAMETER Experiment Name: At_Siliques_Sub_P Parameter: Age (day) Value: 21
  misc_feature: MA Experiment 20000355 PARAMETER Experiment Name: At_Siliques_Sub_P Parameter: Organism Value: A. thaliana
  misc_feature: MA Experiment 20000355 PARAMETER Experiment Name: At_Siliques_Sub_P Parameter: Plant Line Value: WS
  misc_feature: MA Experiment 20000355 PARAMETER Experiment Name: At_Siliques_Sub_P Parameter: Tissue Value: Less Than 5mm Siliques vs. Whole Plant

SEQ ID NO: 49991 - protein, 467 aa, Arabidopsis thaliana; identical to SEQ ID NO: 49215
  peptide (1)..(467): Ceres Seq. ID no. 13600766
  misc_feature (32)..(412): Pfam Name: Sugar (and other) transporter Pfam Description: Sugar (and other) transporter
  misc_feature (32)..(412): Pfam Name: Sugar (and other) transporter Pfam Description: Sugar (and other) transporter
  misc_feature (184)..(467): Homolog of NCBI NO: 15081630 NR Description: AT3g05160/T12H1_13 [Arabidopsis thaliana]
  misc_feature (389)..(460): Homolog of NCBI NO: 6729026 NR Description: putative sugar transporter [Arabidopsis thaliana]
  misc_feature (1)..(310): Homolog of NCBI NO: 6729026 NR Description: putative sugar transporter [Arabidopsis thaliana]
  misc_feature (2)..(463): Homolog of NCBI NO: 18421106 NR Description: sugar-porter family protein 1 [Arabidopsis
  misc_feature (2)..(463): Homolog of NCBI NO: 14585699 NR Description: sugar-porter family protein 1 [Arabidopsis
  misc_feature (184)..(467): Homolog of NCBI NO: 15081630 NR Description: AT3g05160/T12H1_13 [Arabidopsis thaliana]
  misc_feature (1)..(310): Homolog of NCBI NO: 6729026 NR Description: putative sugar transporter [Arabidopsis thaliana]
  misc_feature (2)..(463): Homolog of NCBI NO: 14585699 NR Description: sugar-porter family protein 1 [Arabidopsis
  misc_feature (1)..(467): Homolog of NCBI NO: 18397141 NR Description: sugar transporter, putative [Arabidopsis thaliana]
  misc_feature (1)..(433): Homolog of NCBI NO: 20260272 NR Description: putative sugar transporter [Arabidopsis thaliana]
  misc_feature (10)..(467): Homolog of NCBI NO: 18397139 NR Description: sugar transporter, putative [Arabidopsis
  misc_feature (2)..(412): Homolog of NCBI NO: 6729026 NR Description: putative sugar transporter [Arabidopsis thaliana]
  misc_feature (1)..(463): Homolog of NCBI NO: 18421108 NR Description: sugar-porter family protein 2 [Arabidopsis
  misc_feature (2)..(463): Homolog of NCBI NO: 18421106 NR Description: sugar-porter family protein 1 [Arabidopsis
  misc_feature (389)..(460): Homolog of NCBI NO: 6729026 NR Description: putative sugar transporter [Arabidopsis thaliana]
  misc_feature (1)..(463): Homolog of NCBI NO: 18421108 NR Description: sugar-porter family protein 2 [Arabidopsis
  misc_feature (2)..(412): Homolog of NCBI NO: 6729026 NR Description: putative sugar transporter [Arabidopsis thaliana]
  misc_feature (10)..(467): Homolog of NCBI NO: 18397139 NR Description: sugar transporter, putative [Arabidopsis
  misc_feature (1)..(433): Homolog of NCBI NO: 20260272 NR Description: putative sugar transporter [Arabidopsis thaliana]
  misc_feature (1)..(467): Homolog of NCBI NO: 18397141 NR Description: sugar transporter, putative [Arabidopsis thaliana]

SEQ ID NO: 49992 - protein, 458 aa, Arabidopsis thaliana; identical to SEQ ID NO: 49216
  peptide (1)..(458): Ceres Seq. ID no. 13600767
  misc_feature (23)..(403): Pfam Name: Sugar (and other) transporter Pfam Description: Sugar (and other) transporter
  misc_feature (23)..(403): Pfam Name: Sugar (and other) transporter Pfam Description: Sugar (and other) transporter
  misc_feature (175)..(458): Homolog of NCBI NO: 15081630 NR Description: AT3g05160/T12H1_13 [Arabidopsis thaliana]
  misc_feature (380)..(451): Homolog of NCBI NO: 6729026 NR Description: putative sugar transporter [Arabidopsis thaliana]
  misc_feature (1)..(301): Homolog of NCBI NO: 6729026 NR Description: putative sugar transporter [Arabidopsis thaliana]
  misc_feature (1)..(454): Homolog of NCBI NO: 18421106 NR Description: sugar-porter family protein 1 [Arabidopsis
  misc_feature (1)..(454): Homolog of NCBI NO: 14585699 NR Description: sugar-porter family protein 1 [Arabidopsis
  misc_feature (175)..(458): Homolog of NCBI NO: 15081630 NR Description: AT3g05160/T12H1_13 [Arabidopsis thaliana]
  misc_feature (1)..(301): Homolog of NCBI NO: 6729026 NR Description: putative sugar transporter [Arabidopsis thaliana]
  misc_feature (1)..(454): Homolog of NCBI NO: 14585699 NR Description: sugar-porter family protein 1 [Arabidopsis
  misc_feature (1)..(458): Homolog of NCBI NO: 18397141 NR Description: sugar transporter, putative [Arabidopsis thaliana]
  misc_feature (1)..(424): Homolog of NCBI NO: 20260272 NR Description: putative sugar transporter [Arabidopsis thaliana]
  misc_feature (1)..(458): Homolog of NCBI NO: 18397139 NR Description: sugar transporter, putative [Arabidopsis
  misc_feature (1)..(403): Homolog of NCBI NO: 6729026 NR Description: putative sugar transporter [Arabidopsis thaliana]
  misc_feature (1)..(454): Homolog of NCBI NO: 18421108 NR Description: sugar-porter family protein 2 [Arabidopsis
  misc_feature (1)..(454): Homolog of NCBI NO: 18421106 NR Description: sugar-porter family protein 1 [Arabidopsis
  misc_feature (380)..(451): Homolog of NCBI NO: 6729026 NR Description: putative sugar transporter [Arabidopsis thaliana]
  misc_feature (1)..(454): Homolog of NCBI NO: 18421108 NR Description: sugar-porter family protein 2 [Arabidopsis
  misc_feature (1)..(403): Homolog of NCBI NO: 6729026 NR Description: putative sugar transporter [Arabidopsis thaliana]
  misc_feature (1)..(458): Homolog of NCBI NO: 18397139 NR Description: sugar transporter, putative [Arabidopsis
  misc_feature (1)..(424): Homolog of NCBI NO: 20260272 NR Description: putative sugar transporter [Arabidopsis thaliana]
  misc_feature (1)..(458): Homolog of NCBI NO: 18397141 NR Description: sugar transporter, putative [Arabidopsis thaliana]

SEQ ID NO: 49993 - protein, 409 aa, Arabidopsis thaliana; identical to SEQ ID NO: 49217
  peptide (1)..(409): Ceres Seq. ID no. 13600768
  misc_feature (1)..(354): Pfam Name: Sugar (and other) transporter Pfam Description: Sugar (and other) transporter
  misc_feature (1)..(354): Pfam Name: Sugar (and other) transporter Pfam Description: Sugar (and other) transporter
  misc_feature (126)..(409): Homolog of NCBI NO: 15081630 NR Description: AT3g05160/T12H1_13 [Arabidopsis thaliana]
  misc_feature (331)..(402): Homolog of NCBI NO: 6729026 NR Description: putative sugar transporter [Arabidopsis thaliana]
  misc_feature (1)..(252): Homolog of NCBI NO: 6729026 NR Description: putative sugar transporter [Arabidopsis thaliana]
  misc_feature (1)..(405): Homolog of NCBI NO: 18421106 NR Description: sugar-porter family protein 1 [Arabidopsis
  misc_feature (1)..(405): Homolog of NCBI NO: 14585699 NR Description: sugar-porter family protein 1 [Arabidopsis
  misc_feature (126)..(409): Homolog of NCBI NO: 15081630 NR Description: AT3g05160/T12H1_13 [Arabidopsis thaliana]
  misc_feature (1)..(252): Homolog of NCBI NO: 6729026 NR Description: putative sugar transporter [Arabidopsis thaliana]
  misc_feature (1)..(405): Homolog of NCBI NO: 14585699 NR Description: sugar-porter family protein 1 [Arabidopsis
  misc_feature (1)..(409): Homolog of NCBI NO: 18397141 NR Description: sugar transporter, putative [Arabidopsis thaliana]
  misc_feature (1)..(375): Homolog of NCBI NO: 20260272 NR Description: putative sugar transporter [Arabidopsis thaliana]
  misc_feature (1)..(409): Homolog of NCBI NO: 18397139 NR Description: sugar transporter, putative [Arabidopsis
  misc_feature (1)..(354): Homolog of NCBI NO: 6729026 NR Description: putative sugar transporter [Arabidopsis thaliana]
  misc_feature (1)..(405): Homolog of NCBI NO: 18421108 NR Description: sugar-porter family protein 2 [Arabidopsis
  misc_feature (1)..(405): Homolog of NCBI NO: 18421106 NR Description: sugar-porter family protein 1 [Arabidopsis
  misc_feature (331)..(402): Homolog of NCBI NO: 6729026 NR Description: putative sugar transporter [Arabidopsis thaliana]
  misc_feature (1)..(405): Homolog of NCBI NO: 18421108 NR Description: sugar-porter family protein 2 [Arabidopsis
  misc_feature (1)..(354): Homolog of NCBI NO: 6729026 NR Description: putative sugar transporter [Arabidopsis thaliana]
  misc_feature (1)..(409): Homolog of NCBI NO: 18397139 NR Description: sugar transporter, putative [Arabidopsis
  misc_feature (1)..(375): Homolog of NCBI NO: 20260272 NR Description: putative sugar transporter [Arabidopsis thaliana]
  misc_feature (1)..(409): Homolog of NCBI NO: 18397141 NR Description: sugar transporter, putative [Arabidopsis thaliana]

SEQ ID NO: 49994 - DNA, 3774 bp, Arabidopsis thaliana
  misc_feature (1)..(3774): Ceres Seq. ID no. 13588094
  misc_feature: MA Experiment ID: 20000315 Result: Down-regulated in Transcription
  misc_feature: MA Experiment 20000315 PARAMETER Experiment Name: At_14day_Shoots-Roots_Sub_P Parameter: Age (day) Value: 14
  misc_feature: MA Experiment 20000315 PARAMETER Experiment Name: At_14day_Shoots-Roots_Sub_P Parameter: Organism Value: A. thaliana
  misc_feature: MA Experiment 20000315 PARAMETER Experiment Name: At_14day_Shoots-Roots_Sub_P Parameter: Plant Line Value: WS
  misc_feature: MA Experiment 20000315 PARAMETER Experiment Name: At_14day_Shoots-Roots_Sub_P Parameter: Tissue Value: Shoots vs. Whole Plant
  misc_feature: MA Experiment ID: 20000327 Result: Down-regulated in Transcription
  misc_feature: MA Experiment 20000327 PARAMETER Experiment Name: At_42deg_Heat_Sub_P Parameter: Age (day) Value: 14
  misc_feature: MA Experiment 20000327 PARAMETER Experiment Name: At_42deg_Heat_Sub_P Parameter: Organism Value: A. thaliana
  misc_feature: MA Experiment 20000327 PARAMETER Experiment Name: At_42deg_Heat_Sub_P Parameter: Plant Line Value: WS
  misc_feature: MA Experiment 20000327 PARAMETER Experiment Name: At_42deg_Heat_Sub_P Parameter: Temperature (deg C) Value: 42 vs. 22
  misc_feature: MA Experiment 20000327 PARAMETER Experiment Name: At_42deg_Heat_Sub_P Parameter: Timepoint (hr) Value: 1
  misc_feature: MA Experiment 20000327 PARAMETER Experiment Name: At_42deg_Heat_Sub_P Parameter: Tissue Value: Aerial
  misc_feature: MA Experiment ID: 20000328 Result: Down-regulated in Transcription
  misc_feature: MA Experiment 20000328 PARAMETER Experiment Name: At_42deg_Heat_Sub_P Parameter: Age (day) Value: 14
  misc_feature: MA Experiment 20000328 PARAMETER Experiment Name: At_42deg_Heat_Sub_P Parameter: Organism Value: A. thaliana
  misc_feature: MA Experiment 20000328 PARAMETER Experiment Name: At_42deg_Heat_Sub_P Parameter: Plant Line Value: WS
  misc_feature: MA Experiment 20000328 PARAMETER Experiment Name: At_42deg_Heat_Sub_P Parameter: Temperature (deg C) Value: 42 vs. 22
  misc_feature: MA Experiment 20000328 PARAMETER Experiment Name: At_42deg_Heat_Sub_P Parameter: Timepoint (hr) Value: 6
  misc_feature: MA Experiment 20000328 PARAMETER Experiment Name: At_42deg_Heat_Sub_P Parameter: Tissue Value: Aerial
  misc_feature: MA Experiment ID: 20000440 Result: Down-regulated in Transcription
  misc_feature: MA Experiment 20000440 PARAMETER Experiment Name: At_Closed-Flower__Sub_P Parameter: Tissue Value: Closed Flower vs. Whole Plant
atggatcaagcaaaaggttatgaacatgttcggtatactgcccctgaccctagagatgagggacttggctccattaatcaaaggttttcccacgactcttcaactaatgttaacacttatgtacgacctccagattatggtgtttcaacccctgctcggccagtgctaaactactcaatacagaccggtgaagaatttgcttttgagtttatgagagatagggttattatgaaaccgcagttcatcccaaatgtgtatggtgagcacagtggtatgcctgtttctgttaacttaagtgctctgggaatggttcatccaatgtcagagagtggccctaacgctacagtgcttaacatagaagaaaaacgtcagagctttgagcacgagaggaaacccccttctagaattgaagataagacctatcatgaactggtccagtcagccccagttatctcttcgaaaaatgatactggtcaaaggcgtcatagtttggtttcttctagagcttctgatagctctttgaaccgtgcgaagttcttgtgtagttttggtggtaaagttataccccgccccagagatcagaaacttaggtatgtaggtggtgaaacgcgtatcatacggattagcaagactatttctttccaagaactcatgcataaaatgaaagaaatatttcctgaagcacgcaccataaaatatcagctgccaggagaggatcttgatgccctagtctctgtatcttctgacgaggatttacaaaacatgatggaagaatgtatcgtgtttggtaatggaggatctgagaagcccaggatgttcttgttttcaagcagtgatatagaggaggctcagtttgttatggaacatgcagagggtgattctgaggttcagtatgttgttgctgtcaatgggatggatctaagttcacggagaagttcccttggattaagtcctcccgggaacaatttggatgaactacttcatgggaattttgataggaagatcgatcgggctgctacagaaccagcagtggcttcgcttactcccttagcaggtaatgaatctttaccagcgagccaaacttctcaacctgtaacaggattttctactggaaatgagccattttcacagccttatctaggacaacaattgcagttccccggacttggtaaccaccaaatttacacgtcaggtcacatggcaagcataggctatatagatgagaagaggtctgctcctttacatgttcaaccacaacctcattatatcccgtattctgtgaatcctgaaacacctcttgaaagcctggtgccccactatccacaaaaacctgagcaaggatttttgcgtgaggagcagatctttcatgtacaagatccagaaacttcatcaaaagaggccaaaatgagaagagatgactcatttcagaaggtaaatgatcatcctatatctactgtcgagagcaatctttcagcaaaggagccaaagatgaggagagaatcctcaaccccaagggtcaatgagtatcctgtttcttctatgcctagtgatttaatagtcccagatgacctcccgaaggaagaagctccaattgtcacacaaacatctagttcaacaccagatccaagttcttcaactctctcagagaaaagtcttaggaaatccgaggaccatgttgagaacaatctgtcagcaaaggagccaaagatgagaaaagaacactccaccacaagggtcaatgaatattccgtttcctctgtatctagtgattctatggtcccagatcaagccctcaaggaagaagctcctatttccatgaagatatccaattcaacaccagatccaaaatccttggtttatccagaaaaaagtcttagaacatcccaggagaaaacgggtgccttcgatacaacaaatgaaggcatgaaaaagaatcaggacaatcaattttgtctgcttggaggattctcagtatctggacatggtacttcaaataatagttcatctaatgtgagcaatttcgaccagcctgtgactcagcaaagagtctttcattctgagcgaactgtacgagatccaacagaaactaaccgtttgtctaaatctgatgattcccttgcttctcaatttgtaatggctcaaacaacatcagatgctttcctgcctatcagcgaatcatctgaaacttctcatgaagcaaatatggagtcccagaatgttcatcctactgcgccagtaataccagctcctgatagcatctggacagccgagggtagtatgtcacagtctgaaaaaaaaaacgtggaaactaacaccccggagcatgtaagtcagacagagacttcagcaaaggctgttccacaaggacacaatgagaagggggatatagttgttgatataaatgataggtttcctcgtgagtttcttgctgatatattaaaaacgaaagagtctctgaacttccctggattagggccattgcatgccgatggagctggtgtgagtttaaatattcagaataatgaccctaaaacttggtcgtattttcgaaatttggcgcaggatgagtttgagaggaaggatctatcccttatggatcaggaccaccctggatttcccacttccatgactaacaccaacggagttcctattgattatagctacccaccattgcagtctgagaaagttgcctcaagtcagatacatccacaaatccactttgatggaaatatcaagccagatgtgtctaccattaccatacctgatttgaacacagtagacacacaagaagattacagtcagtcacaaatcaaaggtgctgaaagcacggatgcaactctgaatgctggagttcctcttattgactttatggctgcggatagtggcatgaggtctctgcaggtcattaaaaatgacgacttggaagaactgaaggaattaggttctggtacctttggaactgtttatcacggaaaatggaggggtacagatgttgctatcaagcgaataaaaaggagctgttttattggtcgttcatctgaacaagagagattgacctcggagttctggcatgaagcagaaattctttcaaagcttcatcatccaaatgttatggcattttacggcgtagtgaaagatggaccaggaggaactttagctacagtgacagagtacatggtcaatggatcgctcaggcatgttctgctcagcaacaggcaccttgatcgacgtaagcgacttatcattgcaatggacgcagcttttgggatggaatatttgcactcaaagagcatagtgcatttcgatttgaagtgtgataacttgcttgtcaacttaaaggatcccgcccgtcccatatgcaaggttggtgattttggtctgtcaaagataaaaagaaacactttggtcactggcggtgtaaggggaaccctcccttggatggctcccgagctacttagtggaagcagcagcaaagtttctgaaaaggttgatgtgttctctttcggaattgtcttatgggaaattcttaccggtgaggaaccctacgccaatatgcattatggggcaataatcggaggcatagtgaacaatacattgagaccaaccgtgccaaactactgtgacccggagtggagaatgctgatggagcagtgttgggctcctgacccatttgttcgacctgcgttcccggaaatagccagacgtctccgcaccatgtcctcctctgcggtccacacaaaaccacacgctgtcaaccaccaaatccacaagtaa

SEQ ID NO: 49995 - protein, 1257 aa, Arabidopsis thaliana
  peptide (1)..(1257): Ceres Seq. ID no. 13588095
  misc_feature (191)..(277): Pfam Name: PB1 domain Pfam Description: PB1 domain
  misc_feature (163)..(305): Homolog of NCBI NO: 15242791 NR Description: protein kinase family [Arabidopsis thaliana]
  misc_feature (959)..(1242): Homolog of NCBI NO: 15242791 NR Description: protein kinase family [Arabidopsis thaliana]
  misc_feature (150)..(317): Homolog of NCBI NO: 25406805 NR Description: hypothetical protein [imported] - Arabidopsis
  misc_feature (934)..(1240): Homolog of NCBI NO: 25406805 NR Description: hypothetical protein [imported] - Arabidopsis
  misc_feature (157)..(322): Homolog of NCBI NO: 15232679 NR Description: protein kinase family [Arabidopsis thaliana]
  misc_feature (956)..(1241): Homolog of NCBI NO: 15232679 NR Description: protein kinase family [Arabidopsis thaliana]
  misc_feature (138)..(317): Homolog of NCBI NO: 15219796 NR Description: protein kinase family [Arabidopsis thaliana]
  misc_feature (893)..(1240): Homolog of NCBI NO: 15219796 NR Description: protein kinase family [Arabidopsis thaliana]
  misc_feature (1)..(440): Homolog of NCBI NO: 15219417 NR Description: protein kinase family [Arabidopsis thaliana]
  misc_feature (793)..(1257): Homolog of NCBI NO: 15219417 NR Description: protein kinase family [Arabidopsis thaliana]
MDQAKGYEHVRYTAPDPRDEGLGSINQRFSHDSSTNVNTYVRPPDYGVSTPARPVLNYSIQTGEEFAFEFMRDRVIMKPQFIPNVYGEHSGMPVSVNLSALGMVHPMSESGPNATVLNIEEKRQSFEHERKPPSRIEDKTYHELVQSAPVISSKNDTGQRRHSLVSSRASDSSLNRAKFLCSFGGKVIPRPRDQKLRYVGGETRIIRISKTISFQELMHKMKEIFPEARTIKYQLPGEDLDALVSVSSDEDLQNMMEECIVFGNGGSEKPRMFLFSSSDIEEAQFVMEHAEGDSEVQYVVAVNGMDLSSRRSSLGLSPPGNNLDELLHGNFDRKIDRAATEPAVASLTPLAGNESLPASQTSQPVTGFSTGNEPFSQPYLGQQLQFPGLGNHQIYTSGHMASIGYIDEKRSAPLHVQPQPHYIPYSVNPETPLESLVPHYPQKPEQGFLREEQIFHVQDPETSSKEAKMRRDDSFQKVNDHPISTVESNLSAKEPKMRRESSTPRVNEYPVSSMPSDLIVPDDLPKEEAPIVTQTSSSTPDPSSSTLSEKSLRKSEDHVENNLSAKEPKMRKEHSTTRVNEYSVSSVSSDSMVPDQALKEEAPISMKISNSTPDPKSLVYPEKSLRTSQEKTGAFDTTNEGMKKNQDNQFCLLGGFSVSGHGTSNNSSSNVSNFDQPVTQQRVFHSERTVRDPTETNRLSKSDDSLASQFVMAQTTSDAFLPISESSETSHEANMESQNVHPTAPVIPAPDSIWTAEGSMSQSEKKNVETNTPEHVSQTETSAKAVPQGHNEKGDIVVDINDRFPREFLADILKTKESLNFPGLGPLHADGAGVSLNIQNNDPKTWSYFRNLAQDEFERKDLSLMDQDHPGFPTSMTNTNGVPIDYSYPPLQSEKVASSQIHPQIHFDGNIKPDVSTITIPDLNTVDTQEDYSQSQIKGAESTDATLNAGVPLIDFMAADSGMRSLQVIKNDDLEELKELGSGTFGTVYHGKWRGTDVAIKRIKRSCFIGRSSEQERLTSEFWHEAEILSKLHHPNVMAFYGVVKDGPGGTLATVTEYMVNGSLRHVLLSNRHLDRRKRLIIAMDAAFGMEYLHSKSIVHFDLKCDNLLVNLKDPARPICKVGDFGLSKIKRNTLVTGGVRGTLPWMAPELLSGSSSKVSEKVDVFSFGIVLWEILTGEEPYANMHYGAIIGGIVNNTLRPTVPNYCDPEWRMLMEQCWAPDPFVRPAFPEIARRLRTMSSSAVHTKPHAVNHQIHK

SEQ ID NO: 49996 - protein, 1187 aa, Arabidopsis thaliana
  peptide (1)..(1187): Ceres Seq. ID no. 13588096
  misc_feature (121)..(207): Pfam Name: PB1 domain Pfam Description: PB1 domain
  misc_feature (93)..(235): Homolog of NCBI NO: 15242791 NR Description: protein kinase family [Arabidopsis thaliana]
  misc_feature (889)..(1172): Homolog of NCBI NO: 15242791 NR Description: protein kinase family [Arabidopsis thaliana]
  misc_feature (80)..(247): Homolog of NCBI NO: 25406805 NR Description: hypothetical protein [imported] - Arabidopsis
  misc_feature (864)..(1170): Homolog of NCBI NO: 25406805 NR Description: hypothetical protein [imported] - Arabidopsis
  misc_feature (87)..(252): Homolog of NCBI NO: 15232679 NR Description: protein kinase family [Arabidopsis thaliana]
  misc_feature (886)..(1171): Homolog of NCBI NO: 15232679 NR Description: protein kinase family [Arabidopsis thaliana]
  misc_feature (68)..(247): Homolog of NCBI NO: 15219796 NR Description: protein kinase family [Arabidopsis thaliana]
  misc_feature (823)..(1170): Homolog of NCBI NO: 15219796 NR Description: protein kinase family [Arabidopsis thaliana]
  misc_feature (1)..(370): Homolog of NCBI NO: 15219417 NR Description: protein kinase family [Arabidopsis thaliana]
  misc_feature (723)..(1187): Homolog of NCBI NO: 15219417 NR Description: protein kinase family [Arabidopsis thaliana]
MRDRVIMKPQFIPNVYGEHSGMPVSVNLSALGMVHPMSESGPNATVLNIEEKRQSFEHERKPPSRIEDKTYHELVQSAPVISSKNDTGQRRHSLVSSRASDSSLNRAKFLCSFGGKVIPRPRDQKLRYVGGETRIIRISKTISFQELMHKMKEIFPEARTIKYQLPGEDLDALVSVSSDEDLQNMMEECIVFGNGGSEKPRMFLFSSSDIEEAQFVMEHAEGDSEVQYVVAVNGMDLSSRRSSLGLSPPGNNLDELLHGNFDRKIDRAATEPAVASLTPLAGNESLPASQTSQPVTGFSTGNEPFSQPYLGQQLQFPGLGNHQIYTSGHMASIGYIDEKRSAPLHVQPQPHYIPYSVNPETPLESLVPHYPQKPEQGFLREEQIFHVQDPETSSKEAKMRRDDSFQKVNDHPISTVESNLSAKEPKMRRESSTPRVNEYPVSSMPSDLIVPDDLPKEEAPIVTQTSSSTPDPSSSTLSEKSLRKSEDHVENNLSAKEPKMRKEHSTTRVNEYSVSSVSSDSMVPDQALKEEAPISMKISNSTPDPKSLVYPEKSLRTSQEKTGAFDTTNEGMKKNQDNQFCLLGGFSVSGHGTSNNSSSNVSNFDQPVTQQRVFHSERTVRDPTETNRLSKSDDSLASQFVMAQTTSDAFLPISESSETSHEANMESQNVHPTAPVIPAPDSIWTAEGSMSQSEKKNVETNTPEHVSQTETSAKAVPQGHNEKGDIVVDINDRFPREFLADILKTKESLNFPGLGPLHADGAGVSLNIQNNDPKTWSYFRNLAQDEFERKDLSLMDQDHPGFPTSMTNTNGVPIDYSYPPLQSEKVASSQIHPQIHFDGNIKPDVSTITIPDLNTVDTQEDYSQSQIKGAESTDATLNAGVPLIDFMAADSGMRSLQVIKNDDLEELKELGSGTFGTVYHGKWRGTDVAIKRIKRSCFIGRSSEQERLTSEFWHEAEILSKLHHPNVMAFYGVVKDGPGGTLATVTEYMVNGSLRHVLLSNRHLDRRKRLIIAMDAAFGMEYLHSKSIVHFDLKCDNLLVNLKDPARPICKVGDFGLSKIKRNTLVTGGVRGTLPWMAPELLSGSSSKVSEKVDVFSFGIVLWEILTGEEPYANMHYGAIIGGIVNNTLRPTVPNYCDPEWRMLMEQCWAPDPFVRPAFPEIARRLRTMSSSAVHTKPHAVNHQIHK

SEQ ID NO: 49997 - protein, 1181 aa, Arabidopsis thaliana
  peptide (1)..(1181): Ceres Seq. ID no. 13588097
  misc_feature (115)..(201): Pfam Name: PB1 domain Pfam Description: PB1 domain
  misc_feature (87)..(229): Homolog of NCBI NO: 15242791 NR Description: protein kinase family [Arabidopsis thaliana]
  misc_feature (883)..(1166): Homolog of NCBI NO: 15242791 NR Description: protein kinase family [Arabidopsis thaliana]
  misc_feature (74)..(241): Homolog of NCBI NO: 25406805 NR Description: hypothetical protein [imported] - Arabidopsis
  misc_feature (858)..(1164): Homolog of NCBI NO: 25406805 NR Description: hypothetical protein [imported] - Arabidopsis
  misc_feature (81)..(246): Homolog of NCBI NO: 15232679 NR Description: protein kinase family [Arabidopsis thaliana]
  misc_feature (880)..(1165): Homolog of NCBI NO: 15232679 NR Description: protein kinase family [Arabidopsis thaliana]
  misc_feature (62)..(241): Homolog of NCBI NO: 15219796 NR Description: protein kinase family [Arabidopsis thaliana]
  misc_feature (817)..(1164): Homolog of NCBI NO: 15219796 NR Description: protein kinase family [Arabidopsis thaliana]
  misc_feature (1)..(364): Homolog of NCBI NO: 15219417 NR Description: protein kinase family [Arabidopsis thaliana]
  misc_feature (717)..(1181): Homolog of NCBI NO: 15219417 NR Description: protein kinase family [Arabidopsis thaliana]
MKPQFIPNVYGEHSGMPVSVNLSALGMVHPMSESGPNATVLNIEEKRQSFEHERKPPSRIEDKTYHELVQSAPVISSKNDTGQRRHSLVSSRASDSSLNRAKFLCSFGGKVIPRPRDQKLRYVGGETRIIRISKTISFQELMHKMKEIFPEARTIKYQLPGEDLDALVSVSSDEDLQNMMEECIVFGNGGSEKPRMFLFSSSDIEEAQFVMEHAEGDSEVQYVVAVNGMDLSSRRSSLGLSPPGNNLDELLHGNFDRKIDRAATEPAVASLTPLAGNESLPASQTSQPVTGFSTGNEPFSQPYLGQQLQFPGLGNHQIYTSGHMASIGYIDEKRSAPLHVQPQPHYIPYSVNPETPLESLVPHYPQKPEQGFLREEQIFHVQDPETSSKEAKMRRDDSFQKVNDHPISTVESNLSAKEPKMRRESSTPRVNEYPVSSMPSDLIVPDDLPKEEAPIVTQTSSSTPDPSSSTLSEKSLRKSEDHVENNLSAKEPKMRKEHSTTRVNEYSVSSVSSDSMVPDQALKEEAPISMKISNSTPDPKSLVYPEKSLRTSQEKTGAFDTTNEGMKKNQDNQFCLLGGFSVSGHGTSNNSSSNVSNFDQPVTQQRVFHSERTVRDPTETNRLSKSDDSLASQFVMAQTTSDAFLPISESSETSHEANMESQNVHPTAPVIPAPDSIWTAEGSMSQSEKKNVETNTPEHVSQTETSAKAVPQGHNEKGDIVVDINDRFPREFLADILKTKESLNFPGLGPLHADGAGVSLNIQNNDPKTWSYFRNLAQDEFERKDLSLMDQDHPGFPTSMTNTNGVPIDYSYPPLQSEKVASSQIHPQIHFDGNIKPDVSTITIPDLNTVDTQEDYSQSQIKGAESTDATLNAGVPLIDFMAADSGMRSLQVIKNDDLEELKELGSGTFGTVYHGKWRGTDVAIKRIKRSCFIGRSSEQERLTSEFWHEAEILSKLHHPNVMAFYGVVKDGPGGTLATVTEYMVNGSLRHVLLSNRHLDRRKRLIIAMDAAFGMEYLHSKSIVHFDLKCDNLLVNLKDPARPICKVGDFGLSKIKRNTLVTGGVRGTLPWMAPELLSGSSSKVSEKVDVFSFGIVLWEILTGEEPYANMHYGAIIGGIVNNTLRPTVPNYCDPEWRMLMEQCWAPDPFVRPAFPEIARRLRTMSSSAVHTKPHAVNHQIHK

SEQ ID NO: 49998 - DNA, 1212 bp, Arabidopsis thaliana
  misc_feature (1)..(1212): Ceres Seq. ID no. 13592406
  misc_feature: MA Experiment ID: 20000314 Result: Down-regulated in Transcription
  misc_feature: MA Experiment 20000314 PARAMETER Experiment Name: At_14day_Shoots-Roots_Sub_P Parameter: Age (day) Value: 14
  misc_feature: MA Experiment 20000314 PARAMETER Experiment Name: At_14day_Shoots-Roots_Sub_P Parameter: Organism Value: A. thaliana
  misc_feature: MA Experiment 20000314 PARAMETER Experiment Name: At_14day_Shoots-Roots_Sub_P Parameter: Plant Line Value: WS
  misc_feature: MA Experiment 20000314 PARAMETER Experiment Name: At_14day_Shoots-Roots_Sub_P Parameter: Tissue Value: Roots vs. Whole Plant
  misc_feature: MA Experiment ID: 20000315 Result: Up-regulated in Transcription
  misc_feature: MA Experiment 20000315 PARAMETER Experiment Name: At_14day_Shoots-Roots_Sub_P Parameter: Age (day) Value: 14
  misc_feature: MA Experiment 20000315 PARAMETER Experiment Name: At_14day_Shoots-Roots_Sub_P Parameter: Organism Value: A. thaliana
  misc_feature: MA Experiment 20000315 PARAMETER Experiment Name: At_14day_Shoots-Roots_Sub_P Parameter: Plant Line Value: WS
  misc_feature: MA Experiment 20000315 PARAMETER Experiment Name: At_14day_Shoots-Roots_Sub_P Parameter: Tissue Value: Shoots vs. Whole Plant
  misc_feature: MA Experiment ID: 20000355 Result: Down-regulated in Transcription
  misc_feature: MA Experiment 20000355 PARAMETER Experiment Name: At_Siliques_Sub_P Parameter: Age (day) Value: 21
  misc_feature: MA Experiment 20000355 PARAMETER Experiment Name: At_Siliques_Sub_P Parameter: Organism Value: A. thaliana
  misc_feature: MA Experiment 20000355 PARAMETER Experiment Name: At_Siliques_Sub_P Parameter: Plant Line Value: WS
  misc_feature: MA Experiment 20000355 PARAMETER Experiment Name: At_Siliques_Sub_P Parameter: Tissue Value: Less Than 5mm Siliques vs. Whole Plant
  misc_feature: MA Experiment ID: 20000440 Result: Up-regulated in Transcription
  misc_feature: MA Experiment 20000440 PARAMETER Experiment Name: At_Closed-Flower__Sub_P Parameter: Tissue Value: Closed Flower vs. Whole Plant
gagagagataaaagagagaaagataatctctataatgtgcacattatctctctcttcttcttcaccttcttgagaaacctcctctccccaaaaacgacgtagtttcacatttctcgacttcttgaatggagtttgaagacaacaacaacaacaacgacgaagagcaagaagaggatatgaatcttcatgaggaagaagaagacgacgacgccgtttacgactctcctcctctctctcgtgttctccccaaagcctcgacagaaagtcatgaaaccaccggaactacttccacaggcggtggcggaggattcatggttgttcacggcggtggagggagcaggtttaggttccgtgagtgtctcaagaaccaagcggtgaacataggaggacacgcggtcgatggttgtggtgagtttatgccagctggaatcgaaggtaccatcgacgctctaaaatgcgccgcttgtggctgtcaccgtaacttccaccgcaaggaattaccttacttccatcacgcgccgccacaacatcagcctcctcctcccccgccagggttttaccgtcttccagctccggttagctaccgaccaccaccgtcacaagctcctcctcttcagctcgctcttccccctccacaaagagagagatcagaagatccaatggagacgtcttcagctgaagcaggaggagggattaggaagaggcataggactaagtttacggctgagcaaaaggaaaggatgttagctttagctgagaggattggatggagaattcagagacaagacgatgaagtgattcagagattttgtcaggagactggtgttccgagacaagttcttaaggtttggttacataacaacaaacacactcttggtaagtcgccttcaccacttcatcatcatcaggctcctcctcctccaccaccacagtcttcgtttcatcatgaacaagaccaaccatgaatcttgaatttctttgatcactagggttttaatttagcttaattaattacttgagaaatttgagagacaaggtttttattgtttaatttatgtacccattttcctctttgatgatgatgttgatgatgttggtgatgatctttaatttctggttaattatgtagtgcattaggagctttttaggtctcttagcaaaatctttgattggcctgactataaattactgacgtccttatttgcatcacat

SEQ ID NO: 49999 - protein, 279 aa, Arabidopsis thaliana
  peptide (1)..(279): Ceres Seq. ID no. 13592407
  misc_feature (70)..(129): Pfam Name: ZF-HD protein dimerisation region Pfam Description: ZF-HD protein dimerisation region
  misc_feature (70)..(129): Pfam Name: ZF-HD protein dimerisation region Pfam Description: ZF-HD protein dimerisation region
  misc_feature (47)..(252): Homolog of NCBI NO: 13277216 NR Description: ZF-HD homeobox protein [Flaveria trinervia]
  misc_feature (74)..(247): Homolog of NCBI NO: 15223757 NR Description: expressed protein [Arabidopsis thaliana]
  misc_feature (75)..(250): Homolog of NCBI NO: 15222382 NR Description: hypothetical protein [Arabidopsis thaliana]
  misc_feature (75)..(252): Homolog of NCBI NO: 13277218 NR Description: ZF-HD homeobox protein [Flaveria bidentis]
  misc_feature (40)..(278): Homolog of NCBI NO: 5091602 NR Description: 10A19I.6 [Oryza sativa]
  misc_feature (47)..(252): Homolog of NCBI NO: 13277216 NR Description: ZF-HD homeobox protein [Flaveria trinervia]
  misc_feature (75)..(250): Homolog of NCBI NO: 15222382 NR Description: hypothetical protein [Arabidopsis thaliana]
  misc_feature (40)..(278): Homolog of NCBI NO: 5091602 NR Description: 10A19I.6 [Oryza sativa]
  misc_feature (1)..(279): Homolog of NCBI NO: 15238445 NR Description: expressed protein [Arabidopsis thaliana]
  misc_feature (36)..(254): Homolog of NCBI NO: 15233925 NR Description: expressed protein [Arabidopsis thaliana]
  misc_feature (21)..(254): Homolog of NCBI NO: 13374061 NR Description: ZF-HD homeobox protein [Flaveria bidentis]
  misc_feature (4)..(189): Homolog of NCBI NO: 18410804 NR Description: expressed protein [Arabidopsis thaliana]
  misc_feature (191)..(256): Homolog of NCBI NO: 18410804 NR Description: expressed protein [Arabidopsis thaliana]
  misc_feature (75)..(252): Homolog of NCBI NO: 13277218 NR Description: ZF-HD homeobox protein [Flaveria bidentis]
  misc_feature (74)..(247): Homolog of NCBI NO: 15223757 NR Description: expressed protein [Arabidopsis thaliana]
  misc_feature (191)..(256): Homolog of NCBI NO: 18410804 NR Description: expressed protein [Arabidopsis thaliana]
  misc_feature (4)..(189): Homolog of NCBI NO: 18410804 NR Description: expressed protein [Arabidopsis thaliana]
  misc_feature (21)..(254): Homolog of NCBI NO: 13374061 NR Description: ZF-HD homeobox protein [Flaveria bidentis]
  misc_feature (36)..(254): Homolog of NCBI NO: 15233925 NR Description: expressed protein [Arabidopsis thaliana]
  misc_feature (1)..(279): Homolog of NCBI NO: 15238445 NR Description: expressed protein [Arabidopsis thaliana]
MEFEDNNNNNDEEQEEDMNLHEEEEDDDAVYDSPPLSRVLPKASTESHETTGTTSTGGGGGFMVVHGGGGSRFRFRECLKNQAVNIGGHAVDGCGEFMPAGIEGTIDALKCAACGCHRNFHRKELPYFHHAPPQHQPPPPPPGFYRLPAPVSYRPPPSQAPPLQLALPPPQRERSEDPMETSSAEAGGGIRKRHRTKFTAEQKERMLALAERIGWRIQRQDDEVIQRFCQETGVPRQVLKVWLHNNKHTLGKSPSPLHHHQAPPPPPPQSSFHHEQDQP

SEQ ID NO: 50000 - protein, 262 aa, Arabidopsis thaliana
  peptide (1)..(262): Ceres Seq. ID no. 13592408
  misc_feature (53)..(112): Pfam Name: ZF-HD protein dimerisation region Pfam Description: ZF-HD protein dimerisation region
  misc_feature (53)..(112): Pfam Name: ZF-HD protein dimerisation region Pfam Description: ZF-HD protein dimerisation region
  misc_feature (30)..(235): Homolog of NCBI NO: 13277216 NR Description: ZF-HD homeobox protein [Flaveria trinervia]
  misc_feature (57)..(230): Homolog of NCBI NO: 15223757 NR Description: expressed protein [Arabidopsis thaliana]
  misc_feature (58)..(233): Homolog of NCBI NO: 15222382 NR Description: hypothetical protein [Arabidopsis thaliana]
  misc_feature (58)..(235): Homolog of NCBI NO: 13277218 NR Description: ZF-HD homeobox protein [Flaveria bidentis]
  misc_feature (23)..(261): Homolog of NCBI NO: 5091602 NR Description: 10A19I.6 [Oryza sativa]
  misc_feature (30)..(235): Homolog of NCBI NO: 13277216 NR Description: ZF-HD homeobox protein [Flaveria trinervia]
  misc_feature (58)..(233): Homolog of NCBI NO: 15222382 NR Description: hypothetical protein [Arabidopsis thaliana]
  misc_feature (23)..(261): Homolog of NCBI NO: 5091602 NR Description: 10A19I.6 [Oryza sativa]
  misc_feature (1)..(262): Homolog of NCBI NO: 15238445 NR Description: expressed protein [Arabidopsis thaliana]
  misc_feature (19)..(237): Homolog of NCBI NO: 15233925 NR Description: expressed protein [Arabidopsis thaliana]
  misc_feature (4)..(237): Homolog of NCBI NO: 13374061 NR Description: ZF-HD homeobox protein [Flaveria bidentis]
  misc_feature (1)..(172): Homolog of NCBI NO: 18410804 NR Description: expressed protein [Arabidopsis thaliana]
  misc_feature (174)..(239): Homolog of NCBI NO: 18410804 NR Description: expressed protein [Arabidopsis thaliana]
  misc_feature (58)..(235): Homolog of NCBI NO: 13277218 NR Description: ZF-HD homeobox protein [Flaveria bidentis]
  misc_feature (57)..(230): Homolog of NCBI NO: 15223757 NR Description: expressed protein [Arabidopsis thaliana]
  misc_feature (174)..(239): Homolog of NCBI NO: 18410804 NR Description: expressed protein [Arabidopsis thaliana]
  misc_feature (1)..(172): Homolog of NCBI NO: 18410804 NR Description: expressed protein [Arabidopsis thaliana]
  misc_feature (4)..(237): Homolog of NCBI NO: 13374061 NR Description: ZF-HD homeobox protein [Flaveria bidentis]
  misc_feature (19)..(237): Homolog of NCBI NO: 15233925 NR Description: expressed protein [Arabidopsis thaliana]
  misc_feature (1)..(262): Homolog of NCBI NO: 15238445 NR Description: expressed protein [Arabidopsis thaliana]
MNLHEEEEDDDAVYDSPPLSRVLPKASTESHETTGTTSTGGGGGFMVVHGGGGSRFRFRECLKNQAVNIGGHAVDGCGEFMPAGIEGTIDALKCAACGCHRNFHRKELPYFHHAPPQHQPPPPPPGFYRLPAPVSYRPPPSQAPPLQLALPPPQRERSEDPMETSSAEAGGGIRKRHRTKFTAEQKERMLALAERIGWRIQRQDDEVIQRFCQETGVPRQVLKVWLHNNKHTLGKSPSPLHHHQAPPPPPPQSSFHHEQDQP

SEQ ID NO: 50001 - protein, 217 aa, Arabidopsis thaliana
  peptide (1)..(217): Ceres Seq. ID no. 13592409
  misc_feature (8)..(67): Pfam Name: ZF-HD protein dimerisation region Pfam Description: ZF-HD protein dimerisation region
  misc_feature (8)..(67): Pfam Name: ZF-HD protein dimerisation region Pfam Description: ZF-HD protein dimerisation region
  misc_feature (1)..(190): Homolog of NCBI NO: 13277216 NR Description: ZF-HD homeobox protein [Flaveria trinervia]
  misc_feature (12)..(185): Homolog of NCBI NO: 15223757 NR Description: expressed protein [Arabidopsis thaliana]
  misc_feature (13)..(188): Homolog of NCBI NO: 15222382 NR Description: hypothetical protein [Arabidopsis thaliana]
  misc_feature (13)..(190): Homolog of NCBI NO: 13277218 NR Description: ZF-HD homeobox protein [Flaveria bidentis]
  misc_feature (1)..(216): Homolog of NCBI NO: 5091602 NR Description: 10A19I.6 [Oryza sativa]
  misc_feature (1)..(190): Homolog of NCBI NO: 13277216 NR Description: ZF-HD homeobox protein [Flaveria trinervia]
  misc_feature (13)..(188): Homolog of NCBI NO: 15222382 NR Description: hypothetical protein [Arabidopsis thaliana]
  misc_feature (1)..(216): Homolog of NCBI NO: 5091602 NR Description: 10A19I.6 [Oryza sativa]
  misc_feature (1)..(217): Homolog of NCBI NO: 15238445 NR Description: expressed protein [Arabidopsis thaliana]
  misc_feature (1)..(192): Homolog of NCBI NO: 15233925 NR Description: expressed protein [Arabidopsis thaliana]
  misc_feature (1)..(192): Homolog of NCBI NO: 13374061 NR Description: ZF-HD homeobox protein [Flaveria bidentis]
  misc_feature (1)..(127): Homolog of NCBI NO: 18410804 NR Description: expressed protein [Arabidopsis thaliana]
  misc_feature (129)..(194): Homolog of NCBI NO: 18410804 NR Description: expressed protein [Arabidopsis thaliana]
  misc_feature (13)..(190): Homolog of NCBI NO: 13277218 NR Description: ZF-HD homeobox protein [Flaveria bidentis]
  misc_feature (12)..(185): Homolog of NCBI NO: 15223757 NR Description: expressed protein [Arabidopsis thaliana]
  misc_feature (129)..(194): Homolog of NCBI NO: 18410804 NR Description: expressed protein [Arabidopsis thaliana]
  misc_feature (1)..(127): Homolog of NCBI NO: 18410804 NR Description: expressed protein [Arabidopsis thaliana]
  misc_feature (1)..(192): Homolog of NCBI NO: 13374061 NR Description: ZF-HD homeobox protein [Flaveria bidentis]
  misc_feature (1)..(192): Homolog of NCBI NO: 15233925 NR Description: expressed protein [Arabidopsis thaliana]
  misc_feature (1)..(217): Homolog of NCBI NO: 15238445 NR Description: expressed protein [Arabidopsis thaliana]
MVVHGGGGSRFRFRECLKNQAVNIGGHAVDGCGEFMPAGIEGTIDALKCAACGCHRNFHRKELPYFHHAPPQHQPPPPPPGFYRLPAPVSYRPPPSQAPPLQLALPPPQRERSEDPMETSSAEAGGGIRKRHRTKFTAEQKERMLALAERIGWRIQRQDDEVIQRFCQETGVPRQVLKVWLHNNKHTLGKSPSPLHHHQAPPPPPPQSSFHHEQDQP

SEQ ID NO: 50002 - DNA, 1259 bp, Arabidopsis thaliana
  misc_feature (1)..(1259): Ceres Seq. ID no. 13588405
  misc_feature: MA Experiment ID: 20000184 Result: Up-regulated in Transcription
  misc_feature: MA Experiment 20000184 PARAMETER Experiment Name: At_Shoots__P Parameter: Age (day) Value: 7
  misc_feature: MA Experiment 20000184 PARAMETER Experiment Name: At_Shoots__P Parameter: Tissue Value: Shoots vs. Whole Plant
atgatgatagcaaggtgttctctttttccgccgccgtgtttctccgccgtgaggattagatgtttcgccggagaaacttcagatactgggattctattccgggagaagcttatttaccttcaagaccttaacgtagatcctcacaaagctctccgagtaaacccatctctccgttctgctccaatctcctccgtcgtctccgtcgagactctactctcttccaccggactctcaagacccgccgttggtcgtatcctcgacatgtttccagatttgttaacttctgatcctgaatctgaaatcttaccagttcttcgcttcttatccaatgagatttcaatttcagagcaagacatacctaaatcgatctctcgttgtcctcgattgctaatttcatctgtagattatcagcttcgtcctgcattaacgttcctcaaaaccctaggattcgtgggtcgcgacacgattacgtcacggaacacggtgttgcttgtatcgaatgtggaacgaaccctaatccccaaaattgagtatcttgaagaagggttagggtttacaagagaagaagtagcgaagatggttgtgagatctccggcgttgttgacttatagtgttgataacaatttagttcctaaagttgagttttttattgaggagatgcgtggagatgttaaggagctgaaacgtttccctcagtatttttcgtttagcttggagaggaagataaagccaaggcatagattgcttaaggaacatgggattttgatgcctttgtctgagatgttgaaggttagtgatggtcagtttaaccattggcttttagaacttcgtcttaggtctgctgaaagaagatgatgataaacaacaacgttctttttgatgttctttttacttgagatttgggacatgtcaagacacttcacatgagttttgtatatagtttctgtttcaatgattaggctgagtacatgtttcgttagatcatgtaatgtgtaacttgagatcgtgaaagaagatgatgatcaacaacaacaatgtaagctttttgatgttctttgttcttggtacttgagatttgagagatgaaaattgcagaagttttgtactttgggacatgctaagacactttcatatgagcttgtatatagttttttgtttcaatatgttagatcatgaaggtgtaattaagaatctagttttttttttttggtaaggtaattaagaatctagttgatgaggaatgaaagttgctttaaggt

SEQ ID NO: 50003 - protein, 284 aa, Arabidopsis thaliana
  peptide (1)..(284): Ceres Seq. ID no. 13588406
  misc_feature (1)..(271): Pfam Name: mTERF Pfam Description: mTERF
  misc_feature (43)..(269): Homolog of NCBI NO: 30699372 NR Description: expressed protein [Arabidopsis thaliana]
  misc_feature (43)..(269): Homolog of NCBI NO: 33589698 NR Description: At1g78930 [Arabidopsis thaliana]
  misc_feature (34)..(272): Homolog of NCBI NO: 15230219 NR Description: hypothetical protein [Arabidopsis thaliana]
  misc_feature (25)..(273): Homolog of NCBI NO: 21537209 NR Description: unknown [Arabidopsis thaliana]
  misc_feature (12)..(273): Homolog of NCBI NO: 30686636 NR Description: expressed protein [Arabidopsis thaliana]
  misc_feature (12)..(273): Homolog of NCBI NO: 30686631 NR Description: expressed protein [Arabidopsis thaliana]
  misc_feature (43)..(273): Homolog of NCBI NO: 28392870 NR Description: unknown protein [Arabidopsis thaliana]
  misc_feature (34)..(273): Homolog of NCBI NO: 15226787 NR Description: expressed protein [Arabidopsis thaliana]
  misc_feature (2)..(284): Homolog of NCBI NO: 28204784 NR Description: hypothetical protein [Arabidopsis thaliana]
  misc_feature (1)..(284): Homolog of NCBI NO: 15227524 NR Description: hypothetical protein [Arabidopsis thaliana]
MMIARCSLFPPPCFSAVRIRCFAGETSDTGILFREKLIYLQDLNVDPHKALRVNPSLRSAPISSVVSVETLLSSTGLSRPAVGRILDMFPDLLTSDPESEILPVLRFLSNEISISEQDIPKSISRCPRLLISSVDYQLRPALTFLKTLGFVGRDTITSRNTVLLVSNVERTLIPKIEYLEEGLGFTREEVAKMVVRSPALLTYSVDNNLVPKVEFFIEEMRGDVKELKRFPQYFSFSLERKIKPRHRLLKEHGILMPLSEMLKVSDGQFNHWLLELRLRSAERR

SEQ ID NO: 50004 - protein, 283 aa, Arabidopsis thaliana
  peptide (1)..(283): Ceres Seq. ID no. 13588407
  misc_feature (1)..(270): Pfam Name: mTERF Pfam Description: mTERF
  misc_feature (42)..(268): Homolog of NCBI NO: 30699372 NR Description: expressed protein [Arabidopsis thaliana]
  misc_feature (42)..(268): Homolog of NCBI NO: 33589698 NR Description: At1g78930 [Arabidopsis thaliana]
  misc_feature (33)..(271): Homolog of NCBI NO: 15230219 NR Description: hypothetical protein [Arabidopsis thaliana]
  misc_feature (24)..(272): Homolog of NCBI NO: 21537209 NR Description: unknown [Arabidopsis thaliana]
  misc_feature (11)..(272): Homolog of NCBI NO: 30686636 NR Description: expressed protein [Arabidopsis thaliana]
  misc_feature (11)..(272): Homolog of NCBI NO: 30686631 NR Description: expressed protein [Arabidopsis thaliana]
  misc_feature (42)..(272): Homolog of NCBI NO: 28392870 NR Description: unknown protein [Arabidopsis thaliana]
  misc_feature (33)..(272): Homolog of NCBI NO: 15226787 NR Description: expressed protein [Arabidopsis thaliana]
  misc_feature (1)..(283): Homolog of NCBI NO: 28204784 NR Description: hypothetical protein [Arabidopsis thaliana]
  misc_feature (1)..(283): Homolog of NCBI NO: 15227524 NR Description: hypothetical protein [Arabidopsis thaliana]
MIARCSLFPPPCFSAVRIRCFAGETSDTGILFREKLIYLQDLNVDPHKALRVNPSLRSAPISSVVSVETLLSSTGLSRPAVGRILDMFPDLLTSDPESEILPVLRFLSNEISISEQDIPKSISRCPRLLISSVDYQLRPALTFLKTLGFVGRDTITSRNTVLLVSNVERTLIPKIEYLEEGLGFTREEVAKMVVRSPALLTYSVDNNLVPKVEFFIEEMRGDVKELKRFPQYFSFSLERKIKPRHRLLKEHGILMPLSEMLKVSDGQFNHWLLELRLRSAERR

SEQ ID NO: 50005 - protein, 197 aa, Arabidopsis thaliana
  peptide (1)..(197): Ceres Seq. ID no. 13588408
  misc_feature (1)..(184): Pfam Name: mTERF Pfam Description: mTERF
  misc_feature (1)..(182): Homolog of NCBI NO: 30699372 NR Description: expressed protein [Arabidopsis thaliana]
  misc_feature (1)..(182): Homolog of NCBI NO: 33589698 NR Description: At1g78930 [Arabidopsis thaliana]
  misc_feature (1)..(185): Homolog of NCBI NO: 15230219 NR Description: hypothetical protein [Arabidopsis thaliana]
  misc_feature (1)..(186): Homolog of NCBI NO: 21537209 NR Description: unknown [Arabidopsis thaliana]
  misc_feature (1)..(186): Homolog of NCBI NO: 30686636 NR Description: expressed protein [Arabidopsis thaliana]
  misc_feature (1)..(186): Homolog of NCBI NO: 30686631 NR Description: expressed protein [Arabidopsis thaliana]
  misc_feature (1)..(186): Homolog of NCBI NO: 28392870 NR Description: unknown protein [Arabidopsis thaliana]
  misc_feature (1)..(186): Homolog of NCBI NO: 15226787 NR Description: expressed protein [Arabidopsis thaliana]
  misc_feature (1)..(197): Homolog of NCBI NO: 28204784 NR Description: hypothetical protein [Arabidopsis thaliana]
  misc_feature (1)..(197): Homolog of NCBI NO: 15227524 NR Description: hypothetical protein [Arabidopsis thaliana]
MFPDLLTSDPESEILPVLRFLSNEISISEQDIPKSISRCPRLLISSVDYQLRPALTFLKTLGFVGRDTITSRNTVLLVSNVERTLIPKIEYLEEGLGFTREEVAKMVVRSPALLTYSVDNNLVPKVEFFIEEMRGDVKELKRFPQYFSFSLERKIKPRHRLLKEHGILMPLSEMLKVSDGQFNHWLLELRLRSAERR

SEQ ID NO: 50006 - DNA, 1440 bp, Arabidopsis thaliana
  misc_feature (1)..(1440): Ceres Seq. ID no. 13647884
  misc_feature: MA Experiment ID: 20000171 Result: Up-regulated in Transcription
  misc_feature: MA Experiment 20000171 PARAMETER Experiment Name: At_42deg_Heat_P Parameter: Age (day) Value: 14
  misc_feature: MA Experiment 20000171 PARAMETER Experiment Name: At_42deg_Heat_P Parameter: Organism Value: A. thaliana
  misc_feature: MA Experiment 20000171 PARAMETER Experiment Name: At_42deg_Heat_P Parameter: Plant Line Value: WS
  misc_feature: MA Experiment 20000171 PARAMETER Experiment Name: At_42deg_Heat_P Parameter: Temperature (deg C) Value: 42 vs. 22
  misc_feature: MA Experiment 20000171 PARAMETER Experiment Name: At_42deg_Heat_P Parameter: Timepoint (hr) Value: 1
  misc_feature: MA Experiment 20000171 PARAMETER Experiment Name: At_42deg_Heat_P Parameter: Tissue Value: Aerial
  misc_feature: MA Experiment ID: 20000185 Result: Down-regulated in Transcription
  misc_feature: MA Experiment 20000185 PARAMETER Experiment Name: At_Roots__P Parameter: Age (day) Value: 7 vs. 21
  misc_feature: MA Experiment 20000185 PARAMETER Experiment Name: At_Roots__P Parameter: Organism Value: A. thaliana
  misc_feature: MA Experiment 20000185 PARAMETER Experiment Name: At_Roots__P Parameter: Tissue Value: Roots vs. Whole Plant
  misc_feature: MA Experiment ID: 20000265 Result: Up-regulated in Transcription
  misc_feature: MA Experiment 20000265 PARAMETER Experiment Name: At_Open_Flower_P Parameter: Age (day) Value: 21
  misc_feature: MA Experiment 20000265 PARAMETER Experiment Name: At_Open_Flower_P Parameter: Plant Line Value: WS
  misc_feature: MA Experiment 20000265 PARAMETER Experiment Name: At_Open_Flower_P Parameter: Tissue Value: Closed Flower vs. Whole Plant
  misc_feature: MA Experiment ID: 20000438 Result: Up-regulated in Transcription
  misc_feature: MA Experiment 20000438 PARAMETER Experiment Name: At_Shoots__P Parameter: Age (day) Value: 14
  misc_feature: MA Experiment 20000438 PARAMETER Experiment Name: At_Shoots__P Parameter: Tissue Value: Shoots vs. Whole Plant
gagagagagagagagagagagctcactagtcccccccccccaaaaaccctcaacagcttttcagttttaggataaagttggagtttcaaattctgctgcctttactcttttcctcaatctctctgctttttgtcacataccaaaagatgtataagaatcagttgcaagagcttgcacagaggagttgtttcagtctcccatcatatacatgcacaagagaaggaccagatcatgctccaagattcaaagctagtgtaaacttcaatggtgagatatttgaaagcccaacttactgttctactctcagacaagctgagcattcagctgctgaagttgctcttagtgctctctcttccaaaggtccttcaaagtctctaactgctagagttctagatgagactgggatctacaagaatctgcttcaagagacagcacacagagctggtcttgatctaccggtttacacaagtgtgagatcaggacctggtcacatcccaacattctcttgtactgtggagcttgctggaatgagttttaatggagaatcagcaaagactaagaaacaagctgagaagaatgcagccattgcagcttggttctccttgagaaaaatgccaagattggacccattgagaggtgaagagaaggaacaagagatagttgcaagagtcctctcaagatttagacccaaagaagtgaaaagaagagaaccaaaccagtcaagaagaagaacagtcatcagaacaattcgccaaaacacaacaacaacaacaacaaccacaggagacttgttgtgtgagaaactcagatccatcaatctatataccaatgaagcttcatcatcatcaccaccaccacagagattctggccttcaagaacaaatctcacacaagaacaatccaaagtcaaatcattgctagagaaatgtcaagaatatgcagagaagaaacagagcctagatgatcctaagccagagatgagaatcaaaacatcatcaccatcaccattatcatcatcagtggagagaaactgttatagtaagctcttaccctttccaagttttgtgttaaaccatcagaaactagctccagctgttcacatcagatcagtgatcccagtttgttcagctcctccaccaaaacctaaccctaaccctaattcatcaccgttcatcacaagggagctgggaaatggaagccaagagaagaagtcattaccgaattaggattagaaacaaaatctgaatcaaacccatgattaaaggtcgtgtctttagataaacccatgttaaggatttgataatagagagattagagaaatgggtaaaatcaaatcaggtcatgggtttctgtatgttcgtcgtgtaaatttgacttttttgaattttacgacctgacacaaaaaaaaaaaaaaaaaaaactcgagggggggcccggtac

SEQ ID NO: 50007 - protein, 359 aa, Arabidopsis thaliana
  peptide (1)..(359): Ceres Seq. ID no. 15220525
  misc_feature (2)..(68): Pfam Name: Double-stranded RNA binding motif Pfam Description: Double-stranded RNA binding motif
  misc_feature (88)..(184): Homolog of NCBI NO: 11283535 NR Description: hypothetical protein F26K9.230 - Arabidopsis
  misc_feature (1)..(184): Homolog of NCBI NO: 22331912 NR Description: expressed protein [Arabidopsis thaliana]
  misc_feature (1)..(184): Homolog of NCBI NO: 18389232 NR Description: unknown protein [Arabidopsis thaliana]
  misc_feature (1)..(143): Homolog of NCBI NO: 40788412 NR Description: hypothetical protein [Oryza sativa (japonica
  misc_feature (1)..(183): Homolog of NCBI NO: 37535422 NR Description: putative extensin [Oryza sativa (japonica
  misc_feature (1)..(183): Homolog of NCBI NO: 18401724 NR Description: expressed protein [Arabidopsis thaliana]
  misc_feature (1)..(340): Homolog of NCBI NO: 9759153 NR Description: gb|AAD20688.1~gene_id:MEE6.14~similar to unknown
  misc_feature (1)..(340): Homolog of NCBI NO: 30693732 NR Description: expressed protein [Arabidopsis thaliana]
  misc_feature (1)..(359): Homolog of NCBI NO: 15231653 NR Description: hypothetical protein [Arabidopsis thaliana]
  misc_feature (1)..(359): Homolog of NCBI NO: 11994159 NR Description: gb|AAD20688.1~gene_id:MQP17.5~similar to unknown
MYKNQLQELAQRSCFSLPSYTCTREGPDHAPRFKASVNFNGEIFESPTYCSTLRQAEHSAAEVALSALSSKGPSKSLTARVLDETGIYKNLLQETAHRAGLDLPVYTSVRSGPGHIPTFSCTVELAGMSFNGESAKTKKQAEKNAAIAAWFSLRKMPRLDPLRGEEKEQEIVARVLSRFRPKEVKRREPNQSRRRTVIRTIRQNTTTTTTTTGDLLCEKLRSINLYTNEASSSSPPPQRFWPSRTNLTQEQSKVKSLLEKCQEYAEKKQSLDDPKPEMRIKTSSPSPLSSSVERNCYSKLLPFPSFVLNHQKLAPAVHIRSVIPVCSAPPPKPNPNPNSSPFITRELGNGSQEKKSLPN

SEQ ID NO: 50008 - protein, 232 aa, Arabidopsis thaliana
  peptide (1)..(232): Ceres Seq. ID no. 15220526
  misc_feature (1)..(57): Homolog of NCBI NO: 11283535 NR Description: hypothetical protein F26K9.230 - Arabidopsis
  misc_feature (1)..(57): Homolog of NCBI NO: 22331912 NR Description: expressed protein [Arabidopsis thaliana]
  misc_feature (1)..(57): Homolog of NCBI NO: 18389232 NR Description: unknown protein [Arabidopsis thaliana]
  misc_feature (1)..(16): Homolog of NCBI NO: 40788412 NR Description: hypothetical protein [Oryza sativa (japonica
  misc_feature (1)..(56): Homolog of NCBI NO: 37535422 NR Description: putative extensin [Oryza sativa (japonica
  misc_feature (1)..(56): Homolog of NCBI NO: 18401724 NR Description: expressed protein [Arabidopsis thaliana]
  misc_feature (1)..(213): Homolog of NCBI NO: 9759153 NR Description: gb|AAD20688.1~gene_id:MEE6.14~similar to unknown
  misc_feature (1)..(213): Homolog of NCBI NO: 30693732 NR Description: expressed protein [Arabidopsis thaliana]
  misc_feature (1)..(232): Homolog of NCBI NO: 15231653 NR Description: hypothetical protein [Arabidopsis thaliana]
  misc_feature (1)..(232): Homolog of NCBI NO: 11994159 NR Description: gb|AAD20688.1~gene_id:MQP17.5~similar to unknown
MSFNGESAKTKKQAEKNAAIAAWFSLRKMPRLDPLRGEEKEQEIVARVLSRFRPKEVKRREPNQSRRRTVIRTIRQNTTTTTTTTGDLLCEKLRSINLYTNEASSSSPPPQRFWPSRTNLTQEQSKVKSLLEKCQEYAEKKQSLDDPKPEMRIKTSSPSPLSSSVERNCYSKLLPFPSFVLNHQKLAPAVHIRSVIPVCSAPPPKPNPNPNSSPFITRELGNGSQEKKSLPN

SEQ ID NO: 50009 - protein, 204 aa, Arabidopsis thaliana
  peptide (1)..(204): Ceres Seq. ID no. 15220527
  misc_feature (1)..(45): Homolog of NCBI NO: 27262831 NR Description: dsRNA-binding protein [Brassica oleracea var.
  misc_feature (1)..(29): Homolog of NCBI NO: 11283535 NR Description: hypothetical protein F26K9.230 - Arabidopsis
  misc_feature (1)..(29): Homolog of NCBI NO: 22331912 NR Description: expressed protein [Arabidopsis thaliana]
  misc_feature (1)..(29): Homolog of NCBI NO: 18389232 NR Description: unknown protein [Arabidopsis thaliana]
  misc_feature (1)..(28): Homolog of NCBI NO: 37535422 NR Description: putative extensin [Oryza sativa (japonica
  misc_feature (1)..(28): Homolog of NCBI NO: 18401724 NR Description: expressed protein [Arabidopsis thaliana]
  misc_feature (1)..(185): Homolog of NCBI NO: 9759153 NR Description: gb|AAD20688.1~gene_id:MEE6.14~similar to unknown
  misc_feature (1)..(185): Homolog of NCBI NO: 30693732 NR Description: expressed protein [Arabidopsis thaliana]
  misc_feature (1)..(204): Homolog of NCBI NO: 15231653 NR Description: hypothetical protein [Arabidopsis thaliana]
  misc_feature (1)..(204): Homolog of NCBI NO: 11994159 NR Description: gb|AAD20688.1~gene_id:MQP17.5~similar to unknown
MPRLDPLRGEEKEQEIVARVLSRFRPKEVKRREPNQSRRRTVIRTIRQNTTTTTTTTGDLLCEKLRSINLYTNEASSSSPPPQRFWPSRTNLTQEQSKVKSLLEKCQEYAEKKQSLDDPKPEMRIKTSSPSPLSSSVERNCYSKLLPFPSFVLNHQKLAPAVHIRSVIPVCSAPPPKPNPNPNSSPFITRELGNGSQEKKSLPN

SEQ ID NO: 50010 - DNA, 1959 bp, Arabidopsis thaliana
  misc_feature (1)..(1959): Ceres Seq. ID no. 13588423
  misc_feature: MA Experiment ID: 20000171 Result: Down-regulated in Transcription
  misc_feature: MA Experiment 20000171 PARAMETER Experiment Name: At_42deg_Heat_P Parameter: Age (day) Value: 14
  misc_feature: MA Experiment 20000171 PARAMETER Experiment Name: At_42deg_Heat_P Parameter: Organism Value: A. thaliana
  misc_feature: MA Experiment 20000171 PARAMETER Experiment Name: At_42deg_Heat_P Parameter: Plant Line Value: WS
  misc_feature: MA Experiment 20000171 PARAMETER Experiment Name: At_42deg_Heat_P Parameter: Temperature (deg C) Value: 42 vs. 22
  misc_feature: MA Experiment 20000171 PARAMETER Experiment Name: At_42deg_Heat_P Parameter: Timepoint (hr) Value: 1
  misc_feature: MA Experiment 20000171 PARAMETER Experiment Name: At_42deg_Heat_P Parameter: Tissue Value: Aerial
  misc_feature: MA Experiment ID: 20000173 Result: Down-regulated in Transcription
  misc_feature: MA Experiment 20000173 PARAMETER Experiment Name: At_42deg_Heat_P Parameter: Age (day) Value: 14
  misc_feature: MA Experiment 20000173 PARAMETER Experiment Name: At_42deg_Heat_P Parameter: Organism Value: A. thaliana
  misc_feature: MA Experiment 20000173 PARAMETER Experiment Name: At_42deg_Heat_P Parameter: Plant Line Value: WS
  misc_feature: MA Experiment 20000173 PARAMETER Experiment Name: At_42deg_Heat_P Parameter: Temperature (deg C) Value: 42 vs. 22
  misc_feature: MA Experiment 20000173 PARAMETER Experiment Name: At_42deg_Heat_P Parameter: Timepoint (hr) Value: 6
  misc_feature: MA Experiment 20000173 PARAMETER Experiment Name: At_42deg_Heat_P Parameter: Tissue Value: Aerial
  misc_feature: MA Experiment ID: 20000179 Result: Up-regulated in Transcription
  misc_feature: MA Experiment 20000179 PARAMETER Experiment Name: At_Germinating_Seeds_P Parameter: Age (hr) Value: 6 vs. 0
  misc_feature: MA Experiment 20000179 PARAMETER Experiment Name: At_Germinating_Seeds_P Parameter: Tissue Value: Germinating Seeds
  misc_feature: MA Experiment ID: 20000180 Result: Up-regulated in Transcription
  misc_feature: MA Experiment 20000180 PARAMETER Experiment Name: At_Germinating_Seeds_P Parameter: Age (hr) Value: 24 vs. 0
  misc_feature: MA Experiment 20000180 PARAMETER Experiment Name: At_Germinating_Seeds_P Parameter: Tissue Value: Germinating Seeds
  misc_feature: MA Experiment ID: 20000185 Result: Down-regulated in Transcription
  misc_feature: MA Experiment 20000185 PARAMETER Experiment Name: At_Roots__P Parameter: Age (day) Value: 7 vs. 21
  misc_feature: MA Experiment 20000185 PARAMETER Experiment Name: At_Roots__P Parameter: Organism Value: A. thaliana
  misc_feature: MA Experiment 20000185 PARAMETER Experiment Name: At_Roots__P Parameter: Tissue Value: Roots vs. Whole Plant
  misc_feature: MA Experiment ID: 20000234 Result: Down-regulated in Transcription
  misc_feature: MA Experiment 20000234 PARAMETER Experiment Name: At_Siliques_P Parameter: Age (day) Value: 21
  misc_feature: MA Experiment 20000234 PARAMETER Experiment Name: At_Siliques_P Parameter: Organism Value: A. thaliana
  misc_feature: MA Experiment 20000234 PARAMETER Experiment Name: At_Siliques_P Parameter: Plant Line Value: WS
  misc_feature: MA Experiment 20000234 PARAMETER Experiment Name: At_Siliques_P Parameter: Tissue Value: Less Than 5mm Siliques vs. Whole Plant
  misc_feature: MA Experiment ID: 20000264 Result: Up-regulated in Transcription
  misc_feature: MA Experiment 20000264 PARAMETER Experiment Name: At_Open_Flower_P Parameter: Age (day) Value: 21
  misc_feature: MA Experiment 20000264 PARAMETER Experiment Name: At_Open_Flower_P Parameter: Plant Line Value: WS
  misc_feature: MA Experiment 20000264 PARAMETER Experiment Name: At_Open_Flower_P Parameter: Tissue Value: Open Flower vs. Whole Plant
  misc_feature: MA Experiment ID: 20000451 Result: Down-regulated in Transcription
  misc_feature: MA Experiment 20000451 PARAMETER Experiment Name: At_CS6879_Shoots-Roots_P Parameter: Age (day) Value: 14
  misc_feature: MA Experiment 20000451 PARAMETER Experiment Name: At_CS6879_Shoots-Roots_P Parameter: Organism Value: A. thaliana
  misc_feature: MA Experiment 20000451 PARAMETER Experiment Name: At_CS6879_Shoots-Roots_P Parameter: Plant Line Value: CS6879 vs. WS
  misc_feature: MA Experiment 20000451 PARAMETER Experiment Name: At_CS6879_Shoots-Roots_P Parameter: Tissue Value: Roots
  misc_feature: MA Experiment ID: 20000794 Result: Up-regulated in Transcription
  misc_feature: MA Experiment 20000794 PARAMETER Experiment Name: At_Petals_P Parameter: Age (day) Value: 23-25 days
  misc_feature: MA Experiment 20000794 PARAMETER Experiment Name: At_Petals_P Parameter: Plant Line Value: WS
  misc_feature: MA Experiment 20000794 PARAMETER Experiment Name: At_Petals_P Parameter: Tissue Value: Petals vs. Whole plant
  misc_feature: MA Experiment ID: 20001248 Result: Down-regulated in Transcription
  misc_feature: MA Experiment 20001248 PARAMETER Experiment Name: At_Far-red-induction_P Parameter: Age (day) Value: 7
  misc_feature: MA Experiment 20001248 PARAMETER Experiment Name: At_Far-red-induction_P Parameter: Light Value: Far-red vs. White
  misc_feature: MA Experiment 20001248 PARAMETER Experiment Name: At_Far-red-induction_P Parameter: Organism Value: A. thaliana
  misc_feature: MA Experiment 20001248 PARAMETER Experiment Name: At_Far-red-induction_P Parameter: Plant Line Value: Columbia
  misc_feature: MA Experiment 20001248 PARAMETER Experiment Name: At_Far-red-induction_P Parameter: Timepoint (hr) Value: 4
  misc_feature: MA Experiment 20001248 PARAMETER Experiment Name: At_Far-red-induction_P Parameter: Tissue Value: Whole Plant
  misc_feature: MA Experiment ID: 20001457 Result: Down-regulated in Transcription
  misc_feature: MA Experiment 20001457 PARAMETER Experiment Name: At_50mM_NH4NO3_L-to-H_P Parameter: Age (day) Value: Undefined
  misc_feature: MA Experiment 20001457 PARAMETER Experiment Name: At_50mM_NH4NO3_L-to-H_P Parameter: Organism Value: Undefined
  misc_feature: MA Experiment 20001457 PARAMETER Experiment Name: At_50mM_NH4NO3_L-to-H_P Parameter: Plant Line Value: Undefined
  misc_feature: MA Experiment 20001457 PARAMETER Experiment Name: At_50mM_NH4NO3_L-to-H_P Parameter: Timepoint (hr) Value: 0.5
  misc_feature: MA Experiment 20001457 PARAMETER Experiment Name: At_50mM_NH4NO3_L-to-H_P Parameter: Tissue Value: Siliques
  misc_feature: MA Experiment 20001457 PARAMETER Experiment Name: At_50mM_NH4NO3_L-to-H_P Parameter: Treatment Value: 50mM NH4NO3 vs. 100mM Manitol
  misc_feature: MA Experiment ID: 20001556 Result: Down-regulated in Transcription
  misc_feature: MA Experiment 20001556 PARAMETER Experiment Name: At_Drought_Soil_Dry_P Parameter: Age (day) Value: 26
  misc_feature: MA Experiment 20001556 PARAMETER Experiment Name: At_Drought_Soil_Dry_P Parameter: Organism Value: A. thaliana
  misc_feature: MA Experiment 20001556 PARAMETER Experiment Name: At_Drought_Soil_Dry_P Parameter: Plant Line Value: WS
  misc_feature: MA Experiment 20001556 PARAMETER Experiment Name: At_Drought_Soil_Dry_P Parameter: Post Timepoint (hr) Value: None
  misc_feature: MA Experiment 20001556 PARAMETER Experiment Name: At_Drought_Soil_Dry_P Parameter: Post-Treatment Value: None
  misc_feature: MA Experiment 20001556 PARAMETER Experiment Name: At_Drought_Soil_Dry_P Parameter: Timepoint (day) Value: 12
  misc_feature: MA Experiment 20001556 PARAMETER Experiment Name: At_Drought_Soil_Dry_P Parameter: Treatment Value: Drought vs. No Drought
  misc_feature: MA Experiment ID: 20001557 Result: Down-regulated in Transcription
  misc_feature: MA Experiment 20001557 PARAMETER Experiment Name: At_Drought_Soil_Dry_P Parameter: Age (day) Value: 27
  misc_feature: MA Experiment 20001557 PARAMETER Experiment Name: At_Drought_Soil_Dry_P Parameter: Organism Value: A. thaliana
  misc_feature: MA Experiment 20001557 PARAMETER Experiment Name: At_Drought_Soil_Dry_P Parameter: Plant Line Value: WS
  misc_feature: MA Experiment 20001557 PARAMETER Experiment Name: At_Drought_Soil_Dry_P Parameter: Post Timepoint (hr) Value: 3
  misc_feature: MA Experiment 20001557 PARAMETER Experiment Name: At_Drought_Soil_Dry_P Parameter: Post-Treatment Value: Re-Water vs. No Drought
  misc_feature: MA Experiment 20001557 PARAMETER Experiment Name: At_Drought_Soil_Dry_P Parameter: Timepoint (day) Value: 13
  misc_feature: MA Experiment 20001557 PARAMETER Experiment Name: At_Drought_Soil_Dry_P Parameter: Treatment Value: Drought vs. No Drought
  misc_feature: MA Experiment ID: 20001904 Result: Down-regulated in Transcription
  misc_feature: MA Experiment 20001904 PARAMETER Experiment Name: At_Drought_Reproduction_P Parameter: Age (day) Value: 37
  misc_feature: MA Experiment 20001904 PARAMETER Experiment Name: At_Drought_Reproduction_P Parameter: Organism Value: A. thaliana
  misc_feature: MA Experiment 20001904 PARAMETER Experiment Name: At_Drought_Reproduction_P Parameter: Plant Line Value: WS
  misc_feature: MA Experiment 20001904 PARAMETER Experiment Name: At_Drought_Reproduction_P Parameter: Timepoint (day) Value: 7
  misc_feature: MA Experiment 20001904 PARAMETER Experiment Name: At_Drought_Reproduction_P Parameter: Tissue Value: Rosettes
  misc_feature: MA Experiment 20001904 PARAMETER Experiment Name: At_Drought_Reproduction_P Parameter: Treatment Value: Drought vs. No Drought
aaagaaccaaacctataatcttcctctataatgaattttcatatctttcgattttttcaatttatcctcgtcgcagttttcatcttccacgactcgtgttattccgatgaagctggaaactatagatttatgaaagatgcaacattagcaccaaagttatctcacttcgactacataatcatcggaggaggaaccgctggatgtgcattagccgcaacgctctctcaaaacgcaaccgttctagtcctcgaacgcggaggttccccttacgacgatccagcggcaacagacatcggaaacttcgcaaacacactcttgaacataactccaaactcatggtcgcagcttttcatctccgaagacggcgttttcaactcacgcgctcgtgtactcggtggaggcacagtcataaacgcaggattctactcacgtgcggaagaagatttcgtggcggaagcaggatgggagagagacgaggtcgaagcggcttacgagtgggtcgagaagaaagtggtttttgaaccaccggttaacaaatggcaatcagcgtttcgagatgggcttttggaagctggtgtgactccatacaatggtttcacgtacgaacatatcgttgggactaaatttggtggtacgatatttgaccgggatggtcatagacacacggcggcgaatttgttggagtatgctaatccgaacatgatagttgtctacttgcatgcttctgtccataagatcctcttcactattaaaggtaaccagaggcccaaagcatatggggtgatatttctggacgcaaatggagtgtcctacaaggcagaattggcaacgcaagactcgacaatgagtgaggtgatcttatcagcaggtgccatcgcgagccctcaactattgatgctaagtggtgtgggccctgcggctcatcttgcagcctatagagtgaacccggtcatcgtagatcaacccatggtgggccaagggatgggtgataacccgatgaatccggtttttatcccttctcctgaacccgtagaagtgtctcttgtacaagccgtaggaatcaccaagtttggtagttacattgaaggtggaagtgccttaagtctctctattagtttgacccgtagcttcttcgatggtgttttgaatcttcttaaaaagacaaaacttcctacccaatccatctcaaagtttttcaaatctttggatcttaccttgaacgtgactacaaaagcgggtgtgatcatccaaaaagtgaatggaccgctctcgagaggtcacttggagttgcggaatacgaatccagatgataacccttcagtgacattcaactactttaaggatccagaggatttgaacaagtgtgttgaaggacttagtaccattattaaagtgatagattcgaagggatactccaagtacaagtaccctttagcgagtgcacgtggactactaaatctcattcttgctcttcccactaatttaaggccaagacacataacttcaacgtttgatttggagcagtattgtatcgataccgtgatgactatttatcattaccatggaggttgtcaagttggaaaagtggtcgacaacaattacaaagtattaggggttgatgctttgaggatcatcgatggatccacgtttctcaagtctccggggactaatccacaggccacaatcatgatgctcggaagatatatggggcagaagattcttcgagagaggatggctttccgaggaaaagaggaagaaacatgagatttctaagtacatatgctaaaagatattgttgtttggtgttcgttgctccaaacgaagacattcactatagtgtatatcacatatttcatgaatcttacaaatggggttttctgttgcactaaagtcatttataaccgactgaaacacttgatacatatccttgttgataatggccttagacaataaaaggat

SEQ ID NO: 50011 - protein, 577 aa, Arabidopsis thaliana
  peptide (1)..(577): Ceres Seq. ID no. 13588424
  misc_feature (46)..(315): Pfam Name: GMC oxidoreductase Pfam Description: GMC oxidoreductase
  misc_feature (46)..(315): Pfam Name: GMC oxidoreductase Pfam Description: GMC oxidoreductase
  misc_feature (12)..(572): Homolog of NCBI NO: 38605946 NR Description: OSJNBa0019K04.7 [Oryza sativa (japonica
  misc_feature (11)..(568): Homolog of NCBI NO: 22329512 NR Description: glucose-methanol-choline (GMC) oxidoreductase
  misc_feature (11)..(568): Homolog of NCBI NO: 17978954 NR Description: At1g12570/T12C24_9 [Arabidopsis thaliana]
  misc_feature (9)..(557): Homolog of NCBI NO: 15242234 NR Description: glucose-methanol-choline (GMC) oxidoreductase
  misc_feature (9)..(557): Homolog of NCBI NO: 10177728 NR Description: mandelonitrile lyase-like protein [Arabidopsis
  misc_feature (12)..(572): Homolog of NCBI NO: 38605946 NR Description: OSJNBa0019K04.7 [Oryza sativa (japonica
  misc_feature (11)..(568): Homolog of NCBI NO: 17978954 NR Description: At1g12570/T12C24_9 [Arabidopsis thaliana]
  misc_feature (9)..(557): Homolog of NCBI NO: 10177728 NR Description: mandelonitrile lyase-like protein [Arabidopsis
  misc_feature (1)..(577): Homolog of NCBI NO: 18410417 NR Description: glucose-methanol-choline (GMC) oxidoreductase
  misc_feature (1)..(557): Homolog of NCBI NO: 11358498 NR Description: mandelonitrile lyase homolog - Arabidopsis
  misc_feature (159)..(577): Homolog of NCBI NO: 24417440 NR Description: unknown [Arabidopsis thaliana]
  misc_feature (1)..(576): Homolog of NCBI NO: 15242236 NR Description: glucose-methanol-choline (GMC) oxidoreductase
  misc_feature (1)..(557): Homolog of NCBI NO: 10177730 NR Description: mandelonitrile lyase-like protein [Arabidopsis
  misc_feature (9)..(557): Homolog of NCBI NO: 15242234 NR Description: glucose-methanol-choline (GMC) oxidoreductase
  misc_feature (11)..(568): Homolog of NCBI NO: 22329512 NR Description: glucose-methanol-choline (GMC) oxidoreductase
  misc_feature (1)..(557): Homolog of NCBI NO: 10177730 NR Description: mandelonitrile lyase-like protein [Arabidopsis
  misc_feature (1)..(576): Homolog of NCBI NO: 15242236 NR Description: glucose-methanol-choline (GMC) oxidoreductase
  misc_feature (159)..(577): Homolog of NCBI NO: 24417440 NR Description: unknown [Arabidopsis thaliana]
  misc_feature (1)..(557): Homolog of NCBI NO: 11358498 NR Description: mandelonitrile lyase homolog - Arabidopsis
  misc_feature (1)..(577): Homolog of NCBI NO: 18410417 NR Description: glucose-methanol-choline (GMC) oxidoreductase
MNFHIFRFFQFILVAVFIFHDSCYSDEAGNYRFMKDATLAPKLSHFDYIIIGGGTAGCALAATLSQNATVLVLERGGSPYDDPAATDIGNFANTLLNITPNSWSQLFISEDGVFNSRARVLGGGTVINAGFYSRAEEDFVAEAGWERDEVEAAYEWVEKKVVFEPPVNKWQSAFRDGLLEAGVTPYNGFTYEHIVGTKFGGTIFDRDGHRHTAANLLEYANPNMIVVYLHASVHKILFTIKGNQRPKAYGVIFLDANGVSYKAELATQDSTMSEVILSAGAIASPQLLMLSGVGPAAHLAAYRVNPVIVDQPMVGQGMGDNPMNPVFIPSPEPVEVSLVQAVGITKFGSYIEGGSALSLSISLTRSFFDGVLNLLKKTKLPTQSISKFFKSLDLTLNVTTKAGVIIQKVNGPLSRGHLELRNTNPDDNPSVTFNYFKDPEDLNKCVEGLSTIIKVIDSKGYSKYKYPLASARGLLNLILALPTNLRPRHITSTFDLEQYCIDTVMTIYHYHGGCQVGKVVDNNYKVLGVDALRIIDGSTFLKSPGTNPQATIMMLGRYMGQKILRERMAFRGKEEET

SEQ ID NO: 50012 - protein, 544 aa, Arabidopsis thaliana
  peptide (1)..(544): Ceres Seq. ID no. 13588425
  misc_feature (13)..(282): Pfam Name: GMC oxidoreductase Pfam Description: GMC oxidoreductase
  misc_feature (13)..(282): Pfam Name: GMC oxidoreductase Pfam Description: GMC oxidoreductase
  misc_feature (1)..(539): Homolog of NCBI NO: 38605946 NR Description: OSJNBa0019K04.7 [Oryza sativa (japonica
  misc_feature (1)..(535): Homolog of NCBI NO: 22329512 NR Description: glucose-methanol-choline (GMC) oxidoreductase
  misc_feature (1)..(535): Homolog of NCBI NO: 17978954 NR Description: At1g12570/T12C24_9 [Arabidopsis thaliana]
  misc_feature (1)..(524): Homolog of NCBI NO: 15242234 NR Description: glucose-methanol-choline (GMC) oxidoreductase
  misc_feature (1)..(524): Homolog of NCBI NO: 10177728 NR Description: mandelonitrile lyase-like protein [Arabidopsis
  misc_feature (1)..(539): Homolog of NCBI NO: 38605946 NR Description: OSJNBa0019K04.7 [Oryza sativa (japonica
  misc_feature (1)..(535): Homolog of NCBI NO: 17978954 NR Description: At1g12570/T12C24_9 [Arabidopsis thaliana]
  misc_feature (1)..(524): Homolog of NCBI NO: 10177728 NR Description: mandelonitrile lyase-like protein [Arabidopsis
  misc_feature (1)..(544): Homolog of NCBI NO: 18410417 NR Description: glucose-methanol-choline (GMC) oxidoreductase
  misc_feature (1)..(524): Homolog of NCBI NO: 11358498 NR Description: mandelonitrile lyase homolog - Arabidopsis
  misc_feature (126)..(544): Homolog of NCBI NO: 24417440 NR Description: unknown [Arabidopsis thaliana]
  misc_feature (1)..(543): Homolog of NCBI NO: 15242236 NR Description: glucose-methanol-choline (GMC) oxidoreductase
  misc_feature (1)..(524): Homolog of NCBI NO: 10177730 NR Description: mandelonitrile lyase-like protein [Arabidopsis
  misc_feature (1)..(524): Homolog of NCBI NO: 15242234 NR Description: glucose-methanol-choline (GMC) oxidoreductase
  misc_feature (1)..(535): Homolog of NCBI NO: 22329512 NR Description: glucose-methanol-choline (GMC) oxidoreductase
  misc_feature (1)..(524): Homolog of NCBI NO: 10177730 NR Description: mandelonitrile lyase-like protein [Arabidopsis
  misc_feature (1)..(543): Homolog of NCBI NO: 15242236 NR Description: glucose-methanol-choline (GMC) oxidoreductase
  misc_feature (126)..(544): Homolog of NCBI NO: 24417440 NR Description: unknown [Arabidopsis thaliana]
  misc_feature (1)..(524): Homolog of NCBI NO: 11358498 NR Description: mandelonitrile lyase homolog - Arabidopsis
  misc_feature (1)..(544): Homolog of NCBI NO: 18410417 NR Description: glucose-methanol-choline (GMC) oxidoreductase
MKDATLAPKLSHFDYIIIGGGTAGCALAATLSQNATVLVLERGGSPYDDPAATDIGNFANTLLNITPNSWSQLFISEDGVFNSRARVLGGGTVINAGFYSRAEEDFVAEAGWERDEVEAAYEWVEKKVVFEPPVNKWQSAFRDGLLEAGVTPYNGFTYEHIVGTKFGGTIFDRDGHRHTAANLLEYANPNMIVVYLHASVHKILFTIKGNQRPKAYGVIFLDANGVSYKAELATQDSTMSEVILSAGAIASPQLLMLSGVGPAAHLAAYRVNPVIVDQPMVGQGMGDNPMNPVFIPSPEPVEVSLVQAVGITKFGSYIEGGSALSLSISLTRSFFDGVLNLLKKTKLPTQSISKFFKSLDLTLNVTTKAGVIIQKVNGPLSRGHLELRNTNPDDNPSVTFNYFKDPEDLNKCVEGLSTIIKVIDSKGYSKYKYPLASARGLLNLILALPTNLRPRHITSTFDLEQYCIDTVMTIYHYHGGCQVGKVVDNNYKVLGVDALRIIDGSTFLKSPGTNPQATIMMLGRYMGQKILRERMAFRGKEEET

SEQ ID NO: 50013 - protein, 354 aa, Arabidopsis thaliana
  peptide (1)..(354): Ceres Seq. ID no. 13588426
  misc_feature (1)..(92): Pfam Name: GMC oxidoreductase Pfam Description: GMC oxidoreductase
  misc_feature (1)..(92): Pfam Name: GMC oxidoreductase Pfam Description: GMC oxidoreductase
  misc_feature (1)..(349): Homolog of NCBI NO: 38605946 NR Description: OSJNBa0019K04.7 [Oryza sativa (japonica
  misc_feature (1)..(345): Homolog of NCBI NO: 22329512 NR Description: glucose-methanol-choline (GMC) oxidoreductase
  misc_feature (1)..(345): Homolog of NCBI NO: 17978954 NR Description: At1g12570/T12C24_9 [Arabidopsis thaliana]
  misc_feature (1)..(334): Homolog of NCBI NO: 15242234 NR Description: glucose-methanol-choline (GMC) oxidoreductase
  misc_feature (1)..(334): Homolog of NCBI NO: 10177728 NR Description: mandelonitrile lyase-like protein [Arabidopsis
  misc_feature (1)..(349): Homolog of NCBI NO: 38605946 NR Description: OSJNBa0019K04.7 [Oryza sativa (japonica
  misc_feature (1)..(345): Homolog of NCBI NO: 17978954 NR Description: At1g12570/T12C24_9 [Arabidopsis thaliana]
  misc_feature (1)..(334): Homolog of NCBI NO: 10177728 NR Description: mandelonitrile lyase-like protein [Arabidopsis
  misc_feature (1)..(354): Homolog of NCBI NO: 18410417 NR Description: glucose-methanol-choline (GMC) oxidoreductase
  misc_feature (1)..(334): Homolog of NCBI NO: 11358498 NR Description: mandelonitrile lyase homolog - Arabidopsis
  misc_feature (1)..(354): Homolog of NCBI NO: 24417440 NR Description: unknown [Arabidopsis thaliana]
  misc_feature (1)..(353): Homolog of NCBI NO: 15242236 NR Description: glucose-methanol-choline (GMC) oxidoreductase
  misc_feature (1)..(334): Homolog of NCBI NO: 10177730 NR Description: mandelonitrile lyase-like protein [Arabidopsis
  misc_feature (1)..(334): Homolog of NCBI NO: 15242234 NR Description: glucose-methanol-choline (GMC) oxidoreductase
  misc_feature (1)..(345): Homolog of NCBI NO: 22329512 NR Description: glucose-methanol-choline (GMC) oxidoreductase
  misc_feature (1)..(334): Homolog of NCBI NO: 10177730 NR Description: mandelonitrile lyase-like protein [Arabidopsis
  misc_feature (1)..(353): Homolog of NCBI NO: 15242236 NR Description: glucose-methanol-choline (GMC) oxidoreductase
  misc_feature (1)..(354): Homolog of NCBI NO: 24417440 NR Description: unknown [Arabidopsis thaliana]
  misc_feature (1)..(334): Homolog of NCBI NO: 11358498 NR Description: mandelonitrile lyase homolog - Arabidopsis
  misc_feature (1)..(354): Homolog of NCBI NO: 18410417 NR Description: glucose-methanol-choline (GMC) oxidoreductase
MIVVYLHASVHKILFTIKGNQRPKAYGVIFLDANGVSYKAELATQDSTMSEVILSAGAIASPQLLMLSGVGPAAHLAAYRVNPVIVDQPMVGQGMGDNPMNPVFIPSPEPVEVSLVQAVGITKFGSYIEGGSALSLSISLTRSFFDGVLNLLKKTKLPTQSISKFFKSLDLTLNVTTKAGVIIQKVNGPLSRGHLELRNTNPDDNPSVTFNYFKDPEDLNKCVEGLSTIIKVIDSKGYSKYKYPLASARGLLNLILALPTNLRPRHITSTFDLEQYCIDTVMTIYHYHGGCQVGKVVDNNYKVLGVDALRIIDGSTFLKSPGTNPQATIMMLGRYMGQKILRERMAFRGKEEET

SEQ ID NO: 50014 - DNA, 1859 bp, Arabidopsis thaliana
  misc_feature (1)..(1859): Ceres Seq. ID no. 12602423
  misc_feature: MA Experiment ID: 20000166 Result: Up-regulated in Transcription
  misc_feature: MA Experiment 20000166 PARAMETER Experiment Name: At_100uM_ABA_P Parameter: Age (day) Value: 14
  misc_feature: MA Experiment 20000166 PARAMETER Experiment Name: At_100uM_ABA_P Parameter: Organism Value: A. thaliana
  misc_feature: MA Experiment 20000166 PARAMETER Experiment Name: At_100uM_ABA_P Parameter: Plant Line Value: WS
  misc_feature: MA Experiment 20000166 PARAMETER Experiment Name: At_100uM_ABA_P Parameter: Timepoint (hr) Value: 1
  misc_feature: MA Experiment 20000166 PARAMETER Experiment Name: At_100uM_ABA_P Parameter: Tissue Value: Aerial
  misc_feature: MA Experiment 20000166 PARAMETER Experiment Name: At_100uM_ABA_P Parameter: Treatment Value: 100uM ABA vs. No Treatment
  misc_feature: MA Experiment ID: 20000234 Result: Up-regulated in Transcription
  misc_feature: MA Experiment 20000234 PARAMETER Experiment Name: At_Siliques_P Parameter: Age (day) Value: 21
  misc_feature: MA Experiment 20000234 PARAMETER Experiment Name: At_Siliques_P Parameter: Organism Value: A. thaliana
  misc_feature: MA Experiment 20000234 PARAMETER Experiment Name: At_Siliques_P Parameter: Plant Line Value: WS
  misc_feature: MA Experiment 20000234 PARAMETER Experiment Name: At_Siliques_P Parameter: Tissue Value: Less Than 5mm Siliques vs. Whole Plant
  misc_feature: MA Experiment ID: 20000267 Result: Up-regulated in Transcription
  misc_feature: MA Experiment 20000267 PARAMETER Experiment Name: At_Drought_P Parameter: Age (day) Value: 7
  misc_feature: MA Experiment 20000267 PARAMETER Experiment Name: At_Drought_P Parameter: Organism Value: A. thaliana
  misc_feature: MA Experiment 20000267 PARAMETER Experiment Name: At_Drought_P Parameter: Plant Line Value: WS
  misc_feature: MA Experiment 20000267 PARAMETER Experiment Name: At_Drought_P Parameter: Timepoint (hr) Value: 6
  misc_feature: MA Experiment 20000267 PARAMETER Experiment Name: At_Drought_P Parameter: Tissue Value: Whole Plant
  misc_feature: MA Experiment 20000267 PARAMETER Experiment Name: At_Drought_P Parameter: Treatment Value: Drought vs. No Drought
  misc_feature: MA Experiment ID: 20000436 Result: Up-regulated in Transcription
  misc_feature: MA Experiment 20000436 PARAMETER Experiment Name: At_Drought_P Parameter: Age (day) Value: 7
  misc_feature: MA Experiment 20000436 PARAMETER Experiment Name: At_Drought_P Parameter: Organism Value: A. thaliana
  misc_feature: MA Experiment 20000436 PARAMETER Experiment Name: At_Drought_P Parameter: Plant Line Value: WS
  misc_feature: MA Experiment 20000436 PARAMETER Experiment Name: At_Drought_P Parameter: Timepoint (hr) Value: 12
  misc_feature: MA Experiment 20000436 PARAMETER Experiment Name: At_Drought_P Parameter: Tissue Value: Whole Plant
  misc_feature: MA Experiment 20000436 PARAMETER Experiment Name: At_Drought_P Parameter: Treatment Value: Drought vs. No Drought
  misc_feature: MA Experiment ID: 20000453 Result: Up-regulated in Transcription
  misc_feature: MA Experiment 20000453 PARAMETER Experiment Name: At_100uM_ABA_P Parameter: Age (day) Value: 15
  misc_feature: MA Experiment 20000453 PARAMETER Experiment Name: At_100uM_ABA_P Parameter: Organism Value: A. thaliana
  misc_feature: MA Experiment 20000453 PARAMETER Experiment Name: At_100uM_ABA_P Parameter: Plant Line Value: WS
  misc_feature: MA Experiment 20000453 PARAMETER Experiment Name: At_100uM_ABA_P Parameter: Timepoint (hr) Value: 24
  misc_feature: MA Experiment 20000453 PARAMETER Experiment Name: At_100uM_ABA_P Parameter: Tissue Value: Aerial
  misc_feature: MA Experiment 20000453 PARAMETER Experiment Name: At_100uM_ABA_P Parameter: Treatment Value: 100uM ABA vs. No Treatment
  misc_feature: MA Experiment ID: 20000495 Result: Down-regulated in Transcription
  misc_feature: MA Experiment 20000495 PARAMETER Experiment Name: At_Guard_Cells_P Parameter: Harvest Date Value: 8/2/2002
  misc_feature: MA Experiment 20000495 PARAMETER Experiment Name: At_Guard_Cells_P Parameter: Organism Value: A. thaliana
  misc_feature: MA Experiment 20000495 PARAMETER Experiment Name: At_Guard_Cells_P Parameter: Tissue Value: Guard Cells vs. Leaves
  misc_feature: MA Experiment ID: 20000794 Result: Up-regulated in Transcription
  misc_feature: MA Experiment 20000794 PARAMETER Experiment Name: At_Petals_P Parameter: Age (day) Value: 23-25 days
  misc_feature: MA Experiment 20000794 PARAMETER Experiment Name: At_Petals_P Parameter: Plant Line Value: WS
  misc_feature: MA Experiment 20000794 PARAMETER Experiment Name: At_Petals_P Parameter: Tissue Value: Petals vs. Whole plant
  misc_feature: MA Experiment ID: 20001247 Result: Up-regulated in Transcription
  misc_feature: MA Experiment 20001247 PARAMETER Experiment Name: At_Far-red-induction_P Parameter: Age (day) Value: 7
  misc_feature: MA Experiment 20001247 PARAMETER Experiment Name: At_Far-red-induction_P Parameter: Light Value: Far-red vs. White
  misc_feature: MA Experiment 20001247 PARAMETER Experiment Name: At_Far-red-induction_P Parameter: Organism Value: A. thaliana
  misc_feature: MA Experiment 20001247 PARAMETER Experiment Name: At_Far-red-induction_P Parameter: Plant Line Value: Columbia
  misc_feature: MA Experiment 20001247 PARAMETER Experiment Name: At_Far-red-induction_P Parameter: Timepoint (hr) Value: 1
  misc_feature: MA Experiment 20001247 PARAMETER Experiment Name: At_Far-red-induction_P Parameter: Tissue Value: Whole Plant
  misc_feature: MA Experiment ID: 20001248 Result: Down-regulated in Transcription
  misc_feature: MA Experiment 20001248 PARAMETER Experiment Name: At_Far-red-induction_P Parameter: Age (day) Value: 7
  misc_feature: MA Experiment 20001248 PARAMETER Experiment Name: At_Far-red-induction_P Parameter: Light Value: Far-red vs. White
  misc_feature: MA Experiment 20001248 PARAMETER Experiment Name: At_Far-red-induction_P Parameter: Organism Value: A. thaliana
  misc_feature: MA Experiment 20001248 PARAMETER Experiment Name: At_Far-red-induction_P Parameter: Plant Line Value: Columbia
  misc_feature: MA Experiment 20001248 PARAMETER Experiment Name: At_Far-red-induction_P Parameter: Timepoint (hr) Value: 4
  misc_feature: MA Experiment 20001248 PARAMETER Experiment Name: At_Far-red-induction_P Parameter: Tissue Value: Whole Plant
  misc_feature: MA Experiment ID: 20001560 Result: Up-regulated in Transcription
  misc_feature: MA Experiment 20001560 PARAMETER Experiment Name: At_Drought_Soil_Dry_P Parameter: Age (day) Value: 28
  misc_feature: MA Experiment 20001560 PARAMETER Experiment Name: At_Drought_Soil_Dry_P Parameter: Organism Value: A. thaliana
  misc_feature: MA Experiment 20001560 PARAMETER Experiment Name: At_Drought_Soil_Dry_P Parameter: Plant Line Value: WS
  misc_feature: MA Experiment 20001560 PARAMETER Experiment Name: At_Drought_Soil_Dry_P Parameter: Post Timepoint (hr) Value: None
  misc_feature: MA Experiment 20001560 PARAMETER Experiment Name: At_Drought_Soil_Dry_P Parameter: Post-Treatment Value: None
  misc_feature: MA Experiment 20001560 PARAMETER Experiment Name: At_Drought_Soil_Dry_P Parameter: Timepoint (day) Value: 14
  misc_feature: MA Experiment 20001560 PARAMETER Experiment Name: At_Drought_Soil_Dry_P Parameter: Treatment Value: Drought vs. No Drought
  misc_feature: MA Experiment ID: 20001757 Result: Down-regulated in Transcription
  misc_feature: MA Experiment 20001757 PARAMETER Experiment Name: At_50mM_NH4NO3_L-to-H_P Parameter: Timepoint (hr) Value: 6
  misc_feature: MA Experiment 20001757 PARAMETER Experiment Name: At_50mM_NH4NO3_L-to-H_P Parameter: Tissue Value: Leaf
  misc_feature: MA Experiment 20001757 PARAMETER Experiment Name: At_50mM_NH4NO3_L-to-H_P Parameter: Treatment Value: 50mM NH4NO3 vs 100mM Mannitol
  misc_feature: MA Experiment ID: 20001904 Result: Up-regulated in Transcription
  misc_feature: MA Experiment 20001904 PARAMETER Experiment Name: At_Drought_Reproduction_P Parameter: Age (day) Value: 37
  misc_feature: MA Experiment 20001904 PARAMETER Experiment Name: At_Drought_Reproduction_P Parameter: Organism Value: A. thaliana
  misc_feature: MA Experiment 20001904 PARAMETER Experiment Name: At_Drought_Reproduction_P Parameter: Plant Line Value: WS
  misc_feature: MA Experiment 20001904 PARAMETER Experiment Name: At_Drought_Reproduction_P Parameter: Timepoint (day) Value: 7
  misc_feature: MA Experiment 20001904 PARAMETER Experiment Name: At_Drought_Reproduction_P Parameter: Tissue Value: Rosettes
  misc_feature: MA Experiment 20001904 PARAMETER Experiment Name: At_Drought_Reproduction_P Parameter: Treatment Value: Drought vs. No Drought
  misc_feature: MA Experiment ID: 20001905 Result: Up-regulated in Transcription
  misc_feature: MA Experiment 20001905 PARAMETER Experiment Name: At_Drought_Reproduction_P Parameter: Age (day) Value: 40
  misc_feature: MA Experiment 20001905 PARAMETER Experiment Name: At_Drought_Reproduction_P Parameter: Organism Value: A. thaliana
  misc_feature: MA Experiment 20001905 PARAMETER Experiment Name: At_Drought_Reproduction_P Parameter: Plant Line Value: WS
  misc_feature: MA Experiment 20001905 PARAMETER Experiment Name: At_Drought_Reproduction_P Parameter: Timepoint (day) Value: 10
  misc_feature: MA Experiment 20001905 PARAMETER Experiment Name: At_Drought_Reproduction_P Parameter: Tissue Value: Rosettes
  misc_feature: MA Experiment 20001905 PARAMETER Experiment Name: At_Drought_Reproduction_P Parameter: Treatment Value: Drought vs. No Drought
gaatcctaaaacttcttttgagtgtgttgaagaagaagaagattaaaattcactaaaaacccgagaaaagtggaagaagaaggaaggaagaagaagacaagagagcattctgattcatgtgactctggtttcgtttctttctgtgtctctgctgtgtcgttttctcggcatatttctgatctttcgttctcggttggtttttggtttctgggtattgattgattgattcaaaagtcttcaactttcctggaaactggatctgggtttatccgtttttactcgtctgagaagagaaaaaaggatgaatccttatgatgcgaaagacagaagatggattctctctatgttcttcttcgtcgttttgttctgcaacaacgtttcgacttcgtcttcttcatctgaagttatcacgattaagccaagacatttatccttgctaaagagtgctttacaacggtcaagtggagaacagtctgatctatggaggccattgactgatcaaggatggagtccttgtattgatttgggaaattctccttcattaccggataaaaccgcgggatatgttcaggtatttcttgatggaggacttaaccagcaacgaatgggaatatgtgatgctgttgcagttgcgaagattttaaacgcaacactcgtgatcccttatcttgaagtgaatcctgtgtggcaagattcaagttcttttgttgatatttttgatgtcgatcattttatcgattctttaaaagatgacataagggtggttagagaactacctgatgaatactcttggagtacaagagagtattacggtacagcagtacgtgaaacacgagtgaaaaccgcgcctgttcatgcctctgcgaattggtatattgagaacgtctcaccagttctacaaagttatgggattgctgccatttctccattctctcaccggctatcattcgaccacttacctgctgagatccaacgactaagatgcaaagtgaatttccaagctttacgttttgtccctcacattacatcactcggtgatgctcttgtcagccgccttagaaacccgtcatggagaagcaataaggaacagaaaaatgttgatcatttaggagacatgaccaacccacacagaagacaagaacccgggaagtttgctgtgcttcatcttcgcttcgacaaggacatggctgcgcattcagcgtgtgattttggcggaggcaaagccgagaaactctccttggcgaaatacagacaaatgatttggcaaggaagagtgttgaattctcaattcactgatgaagagttaagaagtcaaggacggtgtcctctaacaccagaagaaatgggacttcttttagctgctttcggattcgataacaatactcgtctctatcttgcatcccacaaggtgtatggaggagaagctagaatctcaacattaagacaagtattcccaagaatggaagacaaaagaagtcttgcatcttctgaagaacgagctcgaatcaagggcaaagcttctttattagctgcacttgactactacgttagtatgcacagcgacattttcatctccgcatcacctggaaacatgcacaacgctcttgttggtcatcgaacattcgagaatctcaagacgatcagaccaaacatggcgttaataggacagcttttcctcaacaaaagcatcacttgggtagattttcagcaagcgcttggtgaaggacatgtgaatagacaaggacagatccggttaaggaaaccaaaacagtcgatttatacttatcctgctcctgattgtatgtgccatgtttgattagtttttaaagtcttgatctttagatatttcttataagaat

SEQ ID NO: 50015 - protein, 504 aa, Arabidopsis thaliana
  peptide (1)..(504): Ceres Seq. ID no. 12602424
  misc_feature (90)..(468): Pfam Name: Plant protein family Pfam Description: Plant protein family
  misc_feature (90)..(468): Pfam Name: Plant protein family Pfam Description: Plant protein family
  misc_feature (282)..(502): Homolog of NCBI NO: 15293043 NR Description: putative growth regulator protein [Arabidopsis
  misc_feature (72)..(463): Homolog of NCBI NO: 7488844 NR Description: RT17-1 protein homolog - garden pea
  misc_feature (80)..(504): Homolog of NCBI NO: 15233855 NR Description: PsRT17-1 like protein; protein id: At4g24530.1
  misc_feature (33)..(72): Homolog of NCBI NO: 15144512 NR Description: putative auxin growth promotor protein
  misc_feature (107)..(502): Homolog of NCBI NO: 15144512 NR Description: putative auxin growth promotor protein
  misc_feature (282)..(502): Homolog of NCBI NO: 15293043 NR Description: putative growth regulator protein [Arabidopsis
  misc_feature (80)..(504): Homolog of NCBI NO: 15233855 NR Description: PsRT17-1 like protein; protein id: At4g24530.1
  misc_feature (107)..(502): Homolog of NCBI NO: 15144512 NR Description: putative auxin growth promotor protein
  misc_feature (1)..(504): Homolog of NCBI NO: 22328073 NR Description: putative protein
  misc_feature (1)..(504): Homolog of NCBI NO: 20260536 NR Description: unknown protein [Arabidopsis thaliana]
  misc_feature (51)..(504): Homolog of NCBI NO: 9759627 NR Description: contains similarity to auxin-independent growth
  misc_feature (1)..(52): Homolog of NCBI NO: 9759627 NR Description: contains similarity to auxin-independent growth
  misc_feature (27)..(504): Homolog of NCBI NO: 31711716 NR Description: At4g24530 [Arabidopsis thaliana]
  misc_feature (33)..(72): Homolog of NCBI NO: 15144512 NR Description: putative auxin growth promotor protein
  misc_feature (72)..(463): Homolog of NCBI NO: 7488844 NR Description: RT17-1 protein homolog - garden pea
  misc_feature (27)..(504): Homolog of NCBI NO: 31711716 NR Description: At4g24530 [Arabidopsis thaliana]
  misc_feature (1)..(52): Homolog of NCBI NO: 9759627 NR Description: contains similarity to auxin-independent growth
  misc_feature (51)..(504): Homolog of NCBI NO: 9759627 NR Description: contains similarity to auxin-independent growth
  misc_feature (1)..(504): Homolog of NCBI NO: 20260536 NR Description: unknown protein [Arabidopsis thaliana]
  misc_feature (1)..(504): Homolog of NCBI NO: 22328073 NR Description: putative protein
MNPYDAKDRRWILSMFFFVVLFCNNVSTSSSSSEVITIKPRHLSLLKSALQRSSGEQSDLWRPLTDQGWSPCIDLGNSPSLPDKTAGYVQVFLDGGLNQQRMGICDAVAVAKILNATLVIPYLEVNPVWQDSSSFVDIFDVDHFIDSLKDDIRVVRELPDEYSWSTREYYGTAVRETRVKTAPVHASANWYIENVSPVLQSYGIAAISPFSHRLSFDHLPAEIQRLRCKVNFQALRFVPHITSLGDALVSRLRNPSWRSNKEQKNVDHLGDMTNPHRRQEPGKFAVLHLRFDKDMAAHSACDFGGGKAEKLSLAKYRQMIWQGRVLNSQFTDEELRSQGRCPLTPEEMGLLLAAFGFDNNTRLYLASHKVYGGEARISTLRQVFPRMEDKRSLASSEERARIKGKASLLAALDYYVSMHSDIFISASPGNMHNALVGHRTFENLKTIRPNMALIGQLFLNKSITWVDFQQALGEGHVNRQGQIRLRKPKQSIYTYPAPDCMCHV

SEQ ID NO: 50016 - protein, 490 aa, Arabidopsis thaliana
  peptide (1)..(490): Ceres Seq. ID no. 12602425
  misc_feature (76)..(454): Pfam Name: Plant protein family Pfam Description: Plant protein family
  misc_feature (76)..(454): Pfam Name: Plant protein family Pfam Description: Plant protein family
  misc_feature (268)..(488): Homolog of NCBI NO: 15293043 NR Description: putative growth regulator protein [Arabidopsis
  misc_feature (58)..(449): Homolog of NCBI NO: 7488844 NR Description: RT17-1 protein homolog - garden pea
  misc_feature (66)..(490): Homolog of NCBI NO: 15233855 NR Description: PsRT17-1 like protein; protein id: At4g24530.1
  misc_feature (19)..(58): Homolog of NCBI NO: 15144512 NR Description: putative auxin growth promotor protein
  misc_feature (93)..(488): Homolog of NCBI NO: 15144512 NR Description: putative auxin growth promotor protein
  misc_feature (268)..(488): Homolog of NCBI NO: 15293043 NR Description: putative growth regulator protein [Arabidopsis
  misc_feature (66)..(490): Homolog of NCBI NO: 15233855 NR Description: PsRT17-1 like protein; protein id: At4g24530.1
  misc_feature (93)..(488): Homolog of NCBI NO: 15144512 NR Description: putative auxin growth promotor protein
  misc_feature (1)..(490): Homolog of NCBI NO: 22328073 NR Description: putative protein
  misc_feature (1)..(490): Homolog of NCBI NO: 20260536 NR Description: unknown protein [Arabidopsis thaliana]
  misc_feature (37)..(490): Homolog of NCBI NO: 9759627 NR Description: contains similarity to auxin-independent growth
  misc_feature (1)..(38): Homolog of NCBI NO: 9759627 NR Description: contains similarity to auxin-independent growth
  misc_feature (13)..(490): Homolog of NCBI NO: 31711716 NR Description: At4g24530 [Arabidopsis thaliana]
  misc_feature (19)..(58): Homolog of NCBI NO: 15144512 NR Description: putative auxin growth promotor protein
  misc_feature (58)..(449): Homolog of NCBI NO: 7488844 NR Description: RT17-1 protein homolog - garden pea
  misc_feature (13)..(490): Homolog of NCBI NO: 31711716 NR Description: At4g24530 [Arabidopsis thaliana]
  misc_feature (1)..(38): Homolog of NCBI NO: 9759627 NR Description: contains similarity to auxin-independent growth
  misc_feature (37)..(490): Homolog of NCBI NO: 9759627 NR Description: contains similarity to auxin-independent growth
  misc_feature (1)..(490): Homolog of NCBI NO: 20260536 NR Description: unknown protein [Arabidopsis thaliana]
  misc_feature (1)..(490): Homolog of NCBI NO: 22328073 NR Description: putative protein
MFFFVVLFCNNVSTSSSSSEVITIKPRHLSLLKSALQRSSGEQSDLWRPLTDQGWSPCIDLGNSPSLPDKTAGYVQVFLDGGLNQQRMGICDAVAVAKILNATLVIPYLEVNPVWQDSSSFVDIFDVDHFIDSLKDDIRVVRELPDEYSWSTREYYGTAVRETRVKTAPVHASANWYIENVSPVLQSYGIAAISPFSHRLSFDHLPAEIQRLRCKVNFQALRFVPHITSLGDALVSRLRNPSWRSNKEQKNVDHLGDMTNPHRRQEPGKFAVLHLRFDKDMAAHSACDFGGGKAEKLSLAKYRQMIWQGRVLNSQFTDEELRSQGRCPLTPEEMGLLLAAFGFDNNTRLYLASHKVYGGEARISTLRQVFPRMEDKRSLASSEERARIKGKASLLAALDYYVSMHSDIFISASPGNMHNALVGHRTFENLKTIRPNMALIGQLFLNKSITWVDFQQALGEGHVNRQGQIRLRKPKQSIYTYPAPDCMCHV

SEQ ID NO: 50017 - protein, 403 aa, Arabidopsis thaliana
  peptide (1)..(403): Ceres Seq. ID no. 12602426
  misc_feature (1)..(367): Pfam Name: Plant protein family Pfam Description: Plant protein family
  misc_feature (1)..(367): Pfam Name: Plant protein family Pfam Description: Plant protein family
  misc_feature (1)..(168): Homolog of NCBI NO: 15293043 NR Description: putative growth regulator protein [Arabidopsis
  misc_feature (181)..(401): Homolog of NCBI NO: 18399706 NR Description: growth regulator, putative
  misc_feature (181)..(401): Homolog of NCBI NO: 15293043 NR Description: putative growth regulator protein [Arabidopsis
  misc_feature (1)..(362): Homolog of NCBI NO: 7488844 NR Description: RT17-1 protein homolog - garden pea
  misc_feature (1)..(403): Homolog of NCBI NO: 15233855 NR Description: PsRT17-1 like protein; protein id: At4g24530.1
  misc_feature (1)..(168): Homolog of NCBI NO: 15293043 NR Description: putative growth regulator protein [Arabidopsis
  misc_feature (181)..(401): Homolog of NCBI NO: 15293043 NR Description: putative growth regulator protein [Arabidopsis
  misc_feature (1)..(403): Homolog of NCBI NO: 15233855 NR Description: PsRT17-1 like protein; protein id: At4g24530.1
  misc_feature (1)..(403): Homolog of NCBI NO: 22328073 NR Description: putative protein
  misc_feature (1)..(403): Homolog of NCBI NO: 20260536 NR Description: unknown protein [Arabidopsis thaliana]
  misc_feature (1)..(403): Homolog of NCBI NO: 9759627 NR Description: contains similarity to auxin-independent growth
  misc_feature (1)..(403): Homolog of NCBI NO: 31711716 NR Description: At4g24530 [Arabidopsis thaliana]
  misc_feature (6)..(401): Homolog of NCBI NO: 15144512 NR Description: putative auxin growth promotor protein
  misc_feature (1)..(362): Homolog of NCBI NO: 7488844 NR Description: RT17-1 protein homolog - garden pea
  misc_feature (181)..(401): Homolog of NCBI NO: 18399706 NR Description: growth regulator, putative
  misc_feature (6)..(401): Homolog of NCBI NO: 15144512 NR Description: putative auxin growth promotor protein
  misc_feature (1)..(403): Homolog of NCBI NO: 31711716 NR Description: At4g24530 [Arabidopsis thaliana]
  misc_feature (1)..(403): Homolog of NCBI NO: 9759627 NR Description: contains similarity to auxin-independent growth
  misc_feature (1)..(403): Homolog of NCBI NO: 20260536 NR Description: unknown protein [Arabidopsis thaliana]
  misc_feature (1)..(403): Homolog of NCBI NO: 22328073 NR Description: putative protein
MGICDAVAVAKILNATLVIPYLEVNPVWQDSSSFVDIFDVDHFIDSLKDDIRVVRELPDEYSWSTREYYGTAVRETRVKTAPVHASANWYIENVSPVLQSYGIAAISPFSHRLSFDHLPAEIQRLRCKVNFQALRFVPHITSLGDALVSRLRNPSWRSNKEQKNVDHLGDMTNPHRRQEPGKFAVLHLRFDKDMAAHSACDFGGGKAEKLSLAKYRQMIWQGRVLNSQFTDEELRSQGRCPLTPEEMGLLLAAFGFDNNTRLYLASHKVYGGEARISTLRQVFPRMEDKRSLASSEERARIKGKASLLAALDYYVSMHSDIFISASPGNMHNALVGHRTFENLKTIRPNMALIGQLFLNKSITWVDFQQALGEGHVNRQGQIRLRKPKQSIYTYPAPDCMCHV

SEQ ID NO: 50018 - DNA, 1308 bp, Arabidopsis thaliana
  misc_feature (1)..(1308): Ceres Seq. ID no. 14304345
  misc_feature: MA Experiment ID: 108434 Result: Down-regulated in Transcription
  misc_feature: MA Experiment 108434 PARAMETER Experiment Name: At_Root_Tips_cDNA_P Parameter: Tissue Value: Root Tips
  misc_feature: MA Experiment ID: 108488 Result: Down-regulated in Transcription
  misc_feature: MA Experiment ID: 108501 Result: Up-regulated in Transcription
  misc_feature: MA Experiment 108501 PARAMETER Experiment Name: At_ap2_floral_buds_cDNA_P Parameter: Plant Line Value: ap2 (Ler.)
  misc_feature: MA Experiment 108501 PARAMETER Experiment Name: At_ap2_floral_buds_cDNA_P Parameter: Tissue Value: Closed Flower
  misc_feature: MA Experiment ID: 108569 Result: Up-regulated in Transcription
  misc_feature: MA Experiment 108569 PARAMETER Experiment Name: At_0.001%_MeJA__cDNA_P Parameter: Timepoint (hr) Value: 6
  misc_feature: MA Experiment 108569 PARAMETER Experiment Name: At_0.001%_MeJA__cDNA_P Parameter: Tissue Value: Aerial
  misc_feature: MA Experiment 108569 PARAMETER Experiment Name: At_0.001%_MeJA__cDNA_P Parameter: Treatment Value: 0.001% MeJA vs. No Treatment
  misc_feature: MA Experiment ID: 108573 Result: Up-regulated in Transcription
  misc_feature: MA Experiment 108573 PARAMETER Experiment Name: At_Drought_cDNA_P Parameter: Timepoint (hr) Value: 6
  misc_feature: MA Experiment 108573 PARAMETER Experiment Name: At_Drought_cDNA_P Parameter: Tissue Value: Aerial
  misc_feature: MA Experiment 108573 PARAMETER Experiment Name: At_Drought_cDNA_P Parameter: Treatment Value: Drought vs. No Drought
  misc_feature: MA Experiment ID: 108594 Result: Down-regulated in Transcription
  misc_feature: MA Experiment 108594 PARAMETER Experiment Name: At_Ler-rhl_Root_cDNA_P Parameter: Plant Line Value: null
  misc_feature: MA Experiment ID: 20000227 Result: Down-regulated in Transcription
  misc_feature: MA Experiment 20000227 PARAMETER Experiment Name: At_Root-Tips-vs-Tops_P Parameter: Tissue Value: Root Tips vs. Root Tops
  misc_feature: MA Experiment ID: 20000235 Result: Down-regulated in Transcription
  misc_feature: MA Experiment 20000235 PARAMETER Experiment Name: At_Siliques_P Parameter: Age (day) Value: 21
  misc_feature: MA Experiment 20000235 PARAMETER Experiment Name: At_Siliques_P Parameter: Organism Value: A. thaliana
  misc_feature: MA Experiment 20000235 PARAMETER Experiment Name: At_Siliques_P Parameter: Plant Line Value: WS
  misc_feature: MA Experiment 20000235 PARAMETER Experiment Name: At_Siliques_P Parameter: Tissue Value: 5-10mm Siliques vs. Whole Plant
aatgaagcattagaagaatcatttccacacgattttccctgtgatttcttcatttccggcgacttaaaacggtgtctagcaaaatgagccgaccacaagatccaccccgaggtttcttcccatttggaaatccctttcggatgttatcatcaaagggatcagatttatcgccatggctactttctctattgaacggctttgagctacgtttggaagagagactgaagaaacttatgcctaagaacaaagatgacatcctcactttatcctggatgaagctagctatggagtcactctgcgagactcataagaacattaacactctcattactgatctccagcttcctgtctctgattgggaagagaaatgggttgatgtttacctcaacataagcgttaggttactagatctctgtaatgcctttagctctgagctcacacgtctcaaccagggagatctcttcctcaagtgtgttctgcacaatttacaatcggattctggggagaagtatctccaggctcgatcttcgcttgatagctggaggcaacatgttaatacaaacaaccctagaattgaaaactgccgtgcggttctagacagtcttgttaaatctctgagtctgcctaaagtcaagaactcgcctaaaggaaaggttctgatgcgagctttttatggtgtgaaggttcaaacagtttatatctgcagtgtatttaccgcagcctggtctgattccaccaaggatcttttcgatttacctgtctctgaaaaaccattatgggcaaaggtctttactgatatgcagagtgttgtaaatgctgagatcagagacatgttgtcttccggtagaaccacgattctcaaagagctggagagcgttgatgctagtgtcgagaagctatacccgatgatccaagatggcgttgatcctgtcgaagttgaattcttcaaagataatgttatggaattggggacacaagctgagaaattgtctcaagggttggatcagttactggaggaagttgatagtttctttaaactgactttgagagggcgcgatgtgttgctctgtaatcttaggtcaagtgactcaatctctggcaatgcagttggagaagatgtagactaaaatagtgaggtaaacaaacaagtttaacccttacaaaaggcagctttaggttctataaatagtgttttctctattttctttgttttgagtccatctgtcgagcttgtctcttccgtttaggtgtgttggtcttgtatgtgtgactgtatgaaatcaattctgcaataaaatataaatatag

SEQ ID NO: 50019 - protein, 347 aa, Arabidopsis thaliana
  peptide (1)..(347): Ceres Seq. ID no. 14304346
  misc_feature (68)..(327): Homolog of NCBI NO: 15233126 NR Description: hypothetical protein [Arabidopsis thaliana]
  misc_feature (16)..(331): Homolog of NCBI NO: 30678866 NR Description: expressed protein [Arabidopsis thaliana]
  misc_feature (16)..(331): Homolog of NCBI NO: 7485228 NR Description: hypothetical protein A_IG002N01.26 - Arabidopsis
  misc_feature (16)..(331): Homolog of NCBI NO: 28392962 NR Description: unknown protein [Arabidopsis thaliana]
  misc_feature (292)..(338): Homolog of NCBI NO: 37536014 NR Description: unknown protein [Oryza sativa (japonica
  misc_feature (1)..(273): Homolog of NCBI NO: 37536014 NR Description: unknown protein [Oryza sativa (japonica
  misc_feature (1)..(333): Homolog of NCBI NO: 18378853 NR Description: expressed protein [Arabidopsis thaliana]
  misc_feature (1)..(347): Homolog of NCBI NO: 16604342 NR Description: At2g46080/T3F17.27 [Arabidopsis thaliana]
  misc_feature (1)..(347): Homolog of NCBI NO: 18406969 NR Description: expressed protein [Arabidopsis thaliana]
MSRPQDPPRGFFPFGNPFRMLSSKGSDLSPWLLSLLNGFELRLEERLKKLMPKNKDDILTLSWMKLAMESLCETHKNINTLITDLQLPVSDWEEKWVDVYLNISVRLLDLCNAFSSELTRLNQGDLFLKCVLHNLQSDSGEKYLQARSSLDSWRQHVNTNNPRIENCRAVLDSLVKSLSLPKVKNSPKGKVLMRAFYGVKVQTVYICSVFTAAWSDSTKDLFDLPVSEKPLWAKVFTDMQSVVNAEIRDMLSSGRTTILKELESVDASVEKLYPMIQDGVDPVEVEFFKDNVMELGTQAEKLSQGLDQLLEEVDSFFKLTLRGRDVLLCNLRSSDSISGNAVGEDVD

SEQ ID NO: 50020 - protein, 328 aa, Arabidopsis thaliana
  peptide (1)..(328): Ceres Seq. ID no. 14304347
  misc_feature (49)..(308): Homolog of NCBI NO: 15233126 NR Description: hypothetical protein [Arabidopsis thaliana]
  misc_feature (1)..(312): Homolog of NCBI NO: 30678866 NR Description: expressed protein [Arabidopsis thaliana]
  misc_feature (1)..(312): Homolog of NCBI NO: 7485228 NR Description: hypothetical protein A_IG002N01.26 - Arabidopsis
  misc_feature (1)..(312): Homolog of NCBI NO: 28392962 NR Description: unknown protein [Arabidopsis thaliana]
  misc_feature (273)..(319): Homolog of NCBI NO: 37536014 NR Description: unknown protein [Oryza sativa (japonica
  misc_feature (1)..(254): Homolog of NCBI NO: 37536014 NR Description: unknown protein [Oryza sativa (japonica
  misc_feature (1)..(314): Homolog of NCBI NO: 18378853 NR Description: expressed protein [Arabidopsis thaliana]
  misc_feature (1)..(328): Homolog of NCBI NO: 16604342 NR Description: At2g46080/T3F17.27 [Arabidopsis thaliana]
  misc_feature (1)..(328): Homolog of NCBI NO: 18406969 NR Description: expressed protein [Arabidopsis thaliana]
MLSSKGSDLSPWLLSLLNGFELRLEERLKKLMPKNKDDILTLSWMKLAMESLCETHKNINTLITDLQLPVSDWEEKWVDVYLNISVRLLDLCNAFSSELTRLNQGDLFLKCVLHNLQSDSGEKYLQARSSLDSWRQHVNTNNPRIENCRAVLDSLVKSLSLPKVKNSPKGKVLMRAFYGVKVQTVYICSVFTAAWSDSTKDLFDLPVSEKPLWAKVFTDMQSVVNAEIRDMLSSGRTTILKELESVDASVEKLYPMIQDGVDPVEVEFFKDNVMELGTQAEKLSQGLDQLLEEVDSFFKLTLRGRDVLLCNLRSSDSISGNAVGEDVD

SEQ ID NO: 50021 - protein, 297 aa, Arabidopsis thaliana
  peptide (1)..(297): Ceres Seq. ID no. 14304348
  misc_feature (18)..(277): Homolog of NCBI NO: 15233126 NR Description: hypothetical protein [Arabidopsis thaliana]
  misc_feature (1)..(281): Homolog of NCBI NO: 30678866 NR Description: expressed protein [Arabidopsis thaliana]
  misc_feature (1)..(281): Homolog of NCBI NO: 7485228 NR Description: hypothetical protein A_IG002N01.26 - Arabidopsis
  misc_feature (1)..(281): Homolog of NCBI NO: 28392962 NR Description: unknown protein [Arabidopsis thaliana]
  misc_feature (242)..(288): Homolog of NCBI NO: 37536014 NR Description: unknown protein [Oryza sativa (japonica
  misc_feature (1)..(223): Homolog of NCBI NO: 37536014 NR Description: unknown protein [Oryza sativa (japonica
  misc_feature (1)..(283): Homolog of NCBI NO: 18378853 NR Description: expressed protein [Arabidopsis thaliana]
  misc_feature (1)..(297): Homolog of NCBI NO: 16604342 NR Description: At2g46080/T3F17.27 [Arabidopsis thaliana]
  misc_feature (1)..(297): Homolog of NCBI NO: 18406969 NR Description: expressed protein [Arabidopsis thaliana]
MPKNKDDILTLSWMKLAMESLCETHKNINTLITDLQLPVSDWEEKWVDVYLNISVRLLDLCNAFSSELTRLNQGDLFLKCVLHNLQSDSGEKYLQARSSLDSWRQHVNTNNPRIENCRAVLDSLVKSLSLPKVKNSPKGKVLMRAFYGVKVQTVYICSVFTAAWSDSTKDLFDLPVSEKPLWAKVFTDMQSVVNAEIRDMLSSGRTTILKELESVDASVEKLYPMIQDGVDPVEVEFFKDNVMELGTQAEKLSQGLDQLLEEVDSFFKLTLRGRDVLLCNLRSSDSISGNAVGEDVD

SEQ ID NO: 50022 - DNA, 1218 bp, Arabidopsis thaliana
  misc_feature (1)..(1218): Ceres Seq. ID no. 13648010
  misc_feature: MA Experiment ID: 20000495 Result: Up-regulated in Transcription
  misc_feature: MA Experiment 20000495 PARAMETER Experiment Name: At_Guard_Cells_P Parameter: Harvest Date Value: 8/2/2002
  misc_feature: MA Experiment 20000495 PARAMETER Experiment Name: At_Guard_Cells_P Parameter: Organism Value: A. thaliana
  misc_feature: MA Experiment 20000495 PARAMETER Experiment Name: At_Guard_Cells_P Parameter: Tissue Value: Guard Cells vs. Leaves
gaagggggaaaagaaagactgattttacgctttattgctctcactaaaaccctaattctctccgtctcgatcgcgacctctgtttcttcggcaatggcggattctcctcaaagaagaagggattcacgatctccttcaccccgaaaagaacgagctagatccagatccaggtctaggtccaggtctagatccaggcccaggcttaggtccaggtcaagatctttgccaaggcctgtttctccatcacgaagccgtggaaggtcaaggtcaagaagccgtggaagaagtgaagttgaaaaccctggtaccactctctatgtgactggcctatctacaagagtcactgacaaggatcttgaagcacatttcgccaaggaaggaaaggttgcgtcttgttttcttgtgatggagccgcgcacccgtgtgtctcgtggttttgcctttgttacaatgagcagccttaaagatgctgagcggtgcattaaatatctcaaccagtctgtactagaaggccgatacataactgtggaaaggaaaatattgcatcaagcaacaatcagagatgataagagtactcatccttgctcaacatcattaagtgaaacacagcttgatcaatcgaatcgccagcttaaacataatcataagcaactatattgcctcaactctcaactctcaactagtcaaaggacattatcaatccaggagaaagcgcccgagaactcccaccccaggccactatcttggcttgaaaagctccagagacagcgatcgagaaggccgtagcagtcgagggaggcactatgatcgtgatgattacagagaccgtaggtcaccaagacgcgactattcacctcgtgatgaaagaaggtctagaagagatcggtcttactctcctcatggaagaagcccagagagaagatcagagagaaggtctgagaggtcagagagaaggtatgaaccccgtggctcgagatgacctgttttcatccttttgacaaaggattcaaaaacttctctgttgatttaggttgtgtaattgatcatccttaaaatagcacaaagattctgtcaggcaacgctttgggtttcatttattttctgttgttaacgtgttattctgtcggaactctctgaagtgaaaactaaaaactgtaatagcttctctgttatgtctctactctacttgtttttgaatgaatcagaatatcttatgtg

SEQ ID NO: 50023 - protein, 261 aa, Arabidopsis thaliana
  peptide (1)..(261): Ceres Seq. ID no. 13648011
  misc_feature (105)..(176): Pfam Name: RNA recognition motif. (a.k.a. RRM, RBD, or RNP domain) Pfam Description: RNA recognition motif. (a.k.a. RRM, RBD, or RNP
  misc_feature (96)..(178): Homolog of NCBI NO: 8778550 NR Description: F22G5.31 [Arabidopsis thaliana]
  misc_feature (56)..(178): Homolog of NCBI NO: 18390758 NR Description: transformer serine/arginine-rich
  misc_feature (48)..(178): Homolog of NCBI NO: 28973767 NR Description: putative transformer-SR ribonucleoprotein
  misc_feature (82)..(178): Homolog of NCBI NO: 34902002 NR Description: putative transformer serine/arginine-rich
  misc_feature (28)..(178): Homolog of NCBI NO: 7489207 NR Description: transformer-SR ribonucleoprotein - common tobacco
  misc_feature (29)..(178): Homolog of NCBI NO: 40253470 NR Description: putative transformer-SR ribonucleoprotein
  misc_feature (13)..(178): Homolog of NCBI NO: 11275253 NR Description: transformer-2-like protein - liverwort
  misc_feature (169)..(261): Homolog of NCBI NO: 22329196 NR Description: transformer serine/arginine-rich ribonucleo
  misc_feature (40)..(128): Homolog of NCBI NO: 22329196 NR Description: transformer serine/arginine-rich ribonucleo
  misc_feature (1)..(135): Homolog of NCBI NO: 7486399 NR Description: hypothetical protein F4B14.60 - Arabidopsis
EGGKERLILRFIALTKTLILSVSIATSVSSAMADSPQRRRDSRSPSPRKERARSRSRSRSRSRSRPRLRSRSRSLPRPVSPSRSRGRSRSRSRGRSEVENPGTTLYVTGLSTRVTDKDLEAHFAKEGKVASCFLVMEPRTRVSRGFAFVTMSSLKDAERCIKYLNQSVLEGRYITVERKILHQATIRDDKSTHPCSTSLSETQLDQSNRQLKHNHKQLYCLNSQLSTSQRTLSIQEKAPENSHPRPLSWLEKLQRQRSRRP

SEQ ID NO: 50024 - protein, 230 aa, Arabidopsis thaliana
  peptide (1)..(230): Ceres Seq. ID no. 13648012
  misc_feature (74)..(145): Pfam Name: RNA recognition motif. (a.k.a. RRM, RBD, or RNP domain) Pfam Description: RNA recognition motif. (a.k.a. RRM, RBD, or RNP
  misc_feature (65)..(147): Homolog of NCBI NO: 8778550 NR Description: F22G5.31 [Arabidopsis thaliana]
  misc_feature (25)..(147): Homolog of NCBI NO: 18390758 NR Description: transformer serine/arginine-rich
  misc_feature (17)..(147): Homolog of NCBI NO: 28973767 NR Description: putative transformer-SR ribonucleoprotein
  misc_feature (51)..(147): Homolog of NCBI NO: 34902002 NR Description: putative transformer serine/arginine-rich
  misc_feature (1)..(147): Homolog of NCBI NO: 7489207 NR Description: transformer-SR ribonucleoprotein - common tobacco
  misc_feature (1)..(147): Homolog of NCBI NO: 40253470 NR Description: putative transformer-SR ribonucleoprotein
  misc_feature (1)..(147): Homolog of NCBI NO: 11275253 NR Description: transformer-2-like protein - liverwort
  misc_feature (138)..(230): Homolog of NCBI NO: 22329196 NR Description: transformer serine/arginine-rich ribonucleo
  misc_feature (9)..(97): Homolog of NCBI NO: 22329196 NR Description: transformer serine/arginine-rich ribonucleo
  misc_feature (1)..(104): Homolog of NCBI NO: 7486399 NR Description: hypothetical protein F4B14.60 - Arabidopsis
MADSPQRRRDSRSPSPRKERARSRSRSRSRSRSRPRLRSRSRSLPRPVSPSRSRGRSRSRSRGRSEVENPGTTLYVTGLSTRVTDKDLEAHFAKEGKVASCFLVMEPRTRVSRGFAFVTMSSLKDAERCIKYLNQSVLEGRYITVERKILHQATIRDDKSTHPCSTSLSETQLDQSNRQLKHNHKQLYCLNSQLSTSQRTLSIQEKAPENSHPRPLSWLEKLQRQRSRRP

SEQ ID NO: 50025 - DNA, 1532 bp, Arabidopsis thaliana
  misc_feature (1)..(1532): Ceres Seq. ID no. 13588431
  misc_feature: MA Experiment ID: 20001905 Result: Down-regulated in Transcription
  misc_feature: MA Experiment 20001905 PARAMETER Experiment Name: At_Drought_Reproduction_P Parameter: Age (day) Value: 40
  misc_feature: MA Experiment 20001905 PARAMETER Experiment Name: At_Drought_Reproduction_P Parameter: Organism Value: A. thaliana
  misc_feature: MA Experiment 20001905 PARAMETER Experiment Name: At_Drought_Reproduction_P Parameter: Plant Line Value: WS
  misc_feature: MA Experiment 20001905 PARAMETER Experiment Name: At_Drought_Reproduction_P Parameter: Timepoint (day) Value: 10
  misc_feature: MA Experiment 20001905 PARAMETER Experiment Name: At_Drought_Reproduction_P Parameter: Tissue Value: Rosettes
  misc_feature: MA Experiment 20001905 PARAMETER Experiment Name: At_Drought_Reproduction_P Parameter: Treatment Value: Drought vs. No Drought
gaacacgtcaagatatggcagtgttcttcatcttggtcttggtctttttcttccttgtcttcagattcatctacagtaatatatgggttccgtggagaatccaatctcacttcaagaagcagagcgtgacgggtcctagttaccggatattcagtggaaactccggcgaggttagccggctaacggcaaaggcgaagtcaaagccgattccttccgggagaaatcctcatgagttcgtccaccgtgtggcgcctcactaccacgaatggtcacgtgtctacgggaagacgttcctctactggttcgggtcgaaacctgtggtggctacgtcggatccaagactaatccgggaagctttgacgacgggtgggtcgtttgaccgaattgggcataaccctttgtctaagctgctttatgctcaaggtcttcctggtcttagaggtgatcaatgggctttccatagaagaatcgccaaacaagcttttacaatggagaaactcaagaggtgggtgccacaaatggtaacaagtactatgatgttgatggagaagtgggaagatatgagaaacggaggagaagagattgagttagaggtacacaaagagatgcacaatttgtctgcagaaatgttatcaagaacagcttttgggaacagcgtggaagaagggaaaggaatctttgaattgcaggagcgtatgatgcgtcttttttatctggttcgatggagcgtttatatcccaggattcagattctttccttcgaagacgaatagagagatatggagaattgagaagcaaatccgtgtttctatcttgaaactgatcgaaaacaataaaacagctgttgagaaatcaggaactctgcttcaggcttttatgtctccttacacaaatcagaatggtcaagaagagaagcttgggatagaagaagttacagatgaatgcaaaacgttctactttgcagctaaggaaacaactgctaaccttatgacgtttgttttagtcctcttagctatgaaccaagaatggcaaaacattgctcgggaagaagtcatatgcgttctcggacaaaccgggcttcctactctagacatcttacaagacctcaagactctaagtatgataatcaatgagactctccggctctaccctccagcaatgacattaaaccgtgacactcttaaaagagctaagctaggagaccttgacatccctgcaggaactcaactctatttatcagtagtcgcgatgcaccacgataaagaaacatggggagacgacgcagaggagtttaatccgcgtaggtttgaagatcctaagaaacaatcagctctgcttgtaccgtttgggttagggcctaggacttgtgtgggacagaatcttgctgtgaatgaggctaaaactgttctggctacgatcttgaagtattacagtttcaggttgtctccaagttatgctcatgctcctgttttatttgtgacgttgcagcctcaaaatggtgctcatcttctctttactaggatatcaagttaa

SEQ ID NO: 50026 - protein, 509 aa, Arabidopsis thaliana
  peptide (1)..(509): Ceres Seq. ID no. 13588432
  misc_feature (28)..(507): Homolog of NCBI NO: 13661770 NR Description: putative cytochrome P450 [Lolium rigidum]
  misc_feature (28)..(509): Homolog of NCBI NO: 34898914 NR Description: putative cytochrome P450 [Oryza sativa (japonica
  misc_feature (368)..(507): Homolog of NCBI NO: 34912892 NR Description: putative cytochrome P450 [Oryza sativa (japonica
  misc_feature (28)..(387): Homolog of NCBI NO: 34912892 NR Description: putative cytochrome P450 [Oryza sativa (japonica
  misc_feature (28)..(507): Homolog of NCBI NO: 21842133 NR Description: cytochrome P450 monooxygenase CYP72A16 [Zea mays
  misc_feature (28)..(508): Homolog of NCBI NO: 21805645 NR Description: cytochrome P450 monooxygenase CYP72A5 [Zea mays
  misc_feature (28)..(94): Homolog of NCBI NO: 34896248 NR Description: OSJNBb0008D07.14 [Oryza sativa (japonica
  misc_feature (94)..(509): Homolog of NCBI NO: 34896248 NR Description: OSJNBb0008D07.14 [Oryza sativa (japonica
  misc_feature (28)..(509): Homolog of NCBI NO: 15225777 NR Description: cytochrome P450, putative [Arabidopsis thaliana]
  misc_feature (5)..(509): Homolog of NCBI NO: 15222125 NR Description: cytochrome P450 family [Arabidopsis thaliana]
TRQDMAVFFILVLVFFFLVFRFIYSNIWVPWRIQSHFKKQSVTGPSYRIFSGNSGEVSRLTAKAKSKPIPSGRNPHEFVHRVAPHYHEWSRVYGKTFLYWFGSKPVVATSDPRLIREALTTGGSFDRIGHNPLSKLLYAQGLPGLRGDQWAFHRRIAKQAFTMEKLKRWVPQMVTSTMMLMEKWEDMRNGGEEIELEVHKEMHNLSAEMLSRTAFGNSVEEGKGIFELQERMMRLFYLVRWSVYIPGFRFFPSKTNREIWRIEKQIRVSILKLIENNKTAVEKSGTLLQAFMSPYTNQNGQEEKLGIEEVTDECKTFYFAAKETTANLMTFVLVLLAMNQEWQNIAREEVICVLGQTGLPTLDILQDLKTLSMIINETLRLYPPAMTLNRDTLKRAKLGDLDIPAGTQLYLSVVAMHHDKETWGDDAEEFNPRRFEDPKKQSALLVPFGLGPRTCVGQNLAVNEAKTVLATILKYYSFRLSPSYAHAPVLFVTLQPQNGAHLLFTRISS

SEQ ID NO: 50027 - protein, 505 aa, Arabidopsis thaliana
  peptide (1)..(505): Ceres Seq. ID no. 13588433
  misc_feature (24)..(503): Homolog of NCBI NO: 13661770 NR Description: putative cytochrome P450 [Lolium rigidum]
  misc_feature (24)..(505): Homolog of NCBI NO: 34898914 NR Description: putative cytochrome P450 [Oryza sativa (japonica
  misc_feature (364)..(503): Homolog of NCBI NO: 34912892 NR Description: putative cytochrome P450 [Oryza sativa (japonica
  misc_feature (24)..(383): Homolog of NCBI NO: 34912892 NR Description: putative cytochrome P450 [Oryza sativa (japonica
  misc_feature (24)..(503): Homolog of NCBI NO: 21842133 NR Description: cytochrome P450 monooxygenase CYP72A16 [Zea mays
  misc_feature (24)..(504): Homolog of NCBI NO: 21805645 NR Description: cytochrome P450 monooxygenase CYP72A5 [Zea mays
  misc_feature (24)..(90): Homolog of NCBI NO: 34896248 NR Description: OSJNBb0008D07.14 [Oryza sativa (japonica
  misc_feature (90)..(505): Homolog of NCBI NO: 34896248 NR Description: OSJNBb0008D07.14 [Oryza sativa (japonica
  misc_feature (24)..(505): Homolog of NCBI NO: 15225777 NR Description: cytochrome P450, putative [Arabidopsis thaliana]
  misc_feature (1)..(505): Homolog of NCBI NO: 15222125 NR Description: cytochrome P450 family [Arabidopsis thaliana]
MAVFFILVLVFFFLVFRFIYSNIWVPWRIQSHFKKQSVTGPSYRIFSGNSGEVSRLTAKAKSKPIPSGRNPHEFVHRVAPHYHEWSRVYGKTFLYWFGSKPVVATSDPRLIREALTTGGSFDRIGHNPLSKLLYAQGLPGLRGDQWAFHRRIAKQAFTMEKLKRWVPQMVTSTMMLMEKWEDMRNGGEEIELEVHKEMHNLSAEMLSRTAFGNSVEEGKGIFELQERMMRLFYLVRWSVYIPGFRFFPSKTNREIWRIEKQIRVSILKLIENNKTAVEKSGTLLQAFMSPYTNQNGQEEKLGIEEVTDECKTFYFAAKETTANLMTFVLVLLAMNQEWQNIAREEVICVLGQTGLPTLDILQDLKTLSMIINETLRLYPPAMTLNRDTLKRAKLGDLDIPAGTQLYLSVVAMHHDKETWGDDAEEFNPRRFEDPKKQSALLVPFGLGPRTCVGQNLAVNEAKTVLATILKYYSFRLSPSYAHAPVLFVTLQPQNGAHLLFTRISS

SEQ ID NO: 50028 - protein, 347 aa, Arabidopsis thaliana
  peptide (1)..(347): Ceres Seq. ID no. 13588434
  misc_feature (1)..(345): Homolog of NCBI NO: 13661768 NR Description: putative cytochrome P450 [Lolium rigidum]
  misc_feature (1)..(345): Homolog of NCBI NO: 13661770 NR Description: putative cytochrome P450 [Lolium rigidum]
  misc_feature (1)..(347): Homolog of NCBI NO: 34898914 NR Description: putative cytochrome P450 [Oryza sativa (japonica
  misc_feature (206)..(345): Homolog of NCBI NO: 34912892 NR Description: putative cytochrome P450 [Oryza sativa (japonica
  misc_feature (1)..(225): Homolog of NCBI NO: 34912892 NR Description: putative cytochrome P450 [Oryza sativa (japonica
  misc_feature (1)..(345): Homolog of NCBI NO: 21842133 NR Description: cytochrome P450 monooxygenase CYP72A16 [Zea mays
  misc_feature (1)..(346): Homolog of NCBI NO: 21805645 NR Description: cytochrome P450 monooxygenase CYP72A5 [Zea mays
  misc_feature (1)..(347): Homolog of NCBI NO: 34896248 NR Description: OSJNBb0008D07.14 [Oryza sativa (japonica
  misc_feature (1)..(347): Homolog of NCBI NO: 15225777 NR Description: cytochrome P450, putative [Arabidopsis thaliana]
  misc_feature (1)..(347): Homolog of NCBI NO: 15222125 NR Description: cytochrome P450 family [Arabidopsis thaliana]
MEKLKRWVPQMVTSTMMLMEKWEDMRNGGEEIELEVHKEMHNLSAEMLSRTAFGNSVEEGKGIFELQERMMRLFYLVRWSVYIPGFRFFPSKTNREIWRIEKQIRVSILKLIENNKTAVEKSGTLLQAFMSPYTNQNGQEEKLGIEEVTDECKTFYFAAKETTANLMTFVLVLLAMNQEWQNIAREEVICVLGQTGLPTLDILQDLKTLSMIINETLRLYPPAMTLNRDTLKRAKLGDLDIPAGTQLYLSVVAMHHDKETWGDDAEEFNPRRFEDPKKQSALLVPFGLGPRTCVGQNLAVNEAKTVLATILKYYSFRLSPSYAHAPVLFVTLQPQNGAHLLFTRISS

SEQ ID NO: 50029 - DNA, 1999 bp, Arabidopsis thaliana
  misc_feature (1)..(1999): Ceres Seq. ID no. 13588106
  misc_feature: MA Experiment ID: 20000173 Result: Down-regulated in Transcription
  misc_feature: MA Experiment 20000173 PARAMETER Experiment Name: At_42deg_Heat_P Parameter: Age (day) Value: 14
  misc_feature: MA Experiment 20000173 PARAMETER Experiment Name: At_42deg_Heat_P Parameter: Organism Value: A. thaliana
  misc_feature: MA Experiment 20000173 PARAMETER Experiment Name: At_42deg_Heat_P Parameter: Plant Line Value: WS
  misc_feature: MA Experiment 20000173 PARAMETER Experiment Name: At_42deg_Heat_P Parameter: Temperature (deg C) Value: 42 vs. 22
  misc_feature: MA Experiment 20000173 PARAMETER Experiment Name: At_42deg_Heat_P Parameter: Timepoint (hr) Value: 6
  misc_feature: MA Experiment 20000173 PARAMETER Experiment Name: At_42deg_Heat_P Parameter: Tissue Value: Aerial
tctctctctctctctctctctctctctctctctcttcgacttcttcgtcttcgtttcttcatttcgaagctctctctgtgtgtgatggcgtgccctagaaactccataacatacaacgccacgcgctgcgcgtgcggtatcggtcagctactaaaccggagctccgggagctgcgagatcttcggttggccgtcaacaatctccacagacaaagatgtaaactacagcgtaatatcattcgccgagactttattcgctttcgataggatccgtaagttcacgcaatctcaagctattttcttagaagctacgctcgtgatgcttctctcctggttagtcttttgtttcttcctgagattcaccaaactcggcgatggtcgtaatgtctggtttaatctccgttggtggattactcgacttgacgtcttcttctccactagacattggctcgatgatcaacaaattgtcaagaaacgtaaaacagaacttggtggaacattttctgttgcgagctggattgttttcattggtttattcgctgcgctgctttatcaaatcataaccaagagaacaattgaagttcacaatgtgagagctactggttctccagatttgatctcattcgagaacgatttggagtttaacatcaccgctgtttcggatatgagttgctctaatttacgcggtattgggaacgtggtcatgggtaatcccgggtttagcgagttcaaagttgctgctctttctagtttaggaagctatacttgtaagaatacaacttcaggaccaacagtgaatttcaaatgtaccaaatgtcgtctcaccaacgattacatatatatctcgtggcatttcgttgatcttcctgattcgcctgctgctgctgttggatttcagtttaactttacgtctaagaatggacctaacgagaagcatatgagttttgttagtggcactctgagaaacggaagcattctcgatgaaagtccggttactttccgtggaaccgaagggaatatattgaagtttaatctgtttcctcggatttaccatcatttgcatgatctaaagctaatccaacctctctttcacgagtttatccctggctctgtttaccgagacactactcagcttcaggcatctatgggaaggtcaacagatggcatactcaatacgacattgttcatcaactatctctctgcttatattgttgagatagaccatgaaaatatactcggtcctgttagcttccttgccgatcttggtggtttgtattgcatcagtattggcatatttttctacctactagtgcagtgtgagtacaggatcaagaagctgcgaaatgaagatactgttttcaggaagataaggaatcgtcgtaaagctctagatcactgggataaactgagaagatatgttgcatacacatgggattgcagcatattggtcgatgatgccatcaaaacgacaaaggtatcaggaatgtgtggtttaacgagacctccaacatcttctaatagctcggaacacggggaatcgatcatggcgaacaagaagcctaacttaggtattgagaagaatgtgatttcacaacctgcaagtttagaactgagctcttttgattcggcttcttctctggctcatggagataatttctcaaataaaaagagtataactcatccaatttctcatagtgaagacgtttcaatccctccacctcctccaatggagttcattgatggatcttctggttcagaagtggacgcaatggatatcaagaataaatttcaacttctttacgactacaatgtattgcttagggaaaaacttttagagactcagtctttgcttaatactttggcacccaaaccaatagcatcatcatcttcaaccgtggaacgcagtgcctagaacaacgaggttgtttgacatgtattgtttgtatactccctgtaacttccacatttattgaacaaaggaatgactaatgcttgttgtt

SEQ ID NO: 50030 - protein, 636 aa, Arabidopsis thaliana
  peptide (1)..(636): Ceres Seq. ID no. 13588107
  misc_feature (29)..(226): Homolog of NCBI NO: 9759136 NR Description: gene_id:MQK4.27~unknown protein [Arabidopsis
  misc_feature (29)..(520): Homolog of NCBI NO: 34893992 NR Description: P0672D08.4 [Oryza sativa (japonica
  misc_feature (112)..(636): Homolog of NCBI NO: 9759136 NR Description: gene_id:MQK4.27~unknown protein [Arabidopsis
SLSLSLSLSLSLRLLRLRFFISKLSLCVMACPRNSITYNATRCACGIGQLLNRSSGSCEIFGWPSTISTDKDVNYSVISFAETLFAFDRIRKFTQSQAIFLEATLVMLLSWLVFCFFLRFTKLGDGRNVWFNLRWWITRLDVFFSTRHWLDDQQIVKKRKTELGGTFSVASWIVFIGLFAALLYQIITKRTIEVHNVRATGSPDLISFENDLEFNITAVSDMSCSNLRGIGNVVMGNPGFSEFKVAALSSLGSYTCKNTTSGPTVNFKCTKCRLTNDYIYISWHFVDLPDSPAAAVGFQFNFTSKNGPNEKHMSFVSGTLRNGSILDESPVTFRGTEGNILKFNLFPRIYHHLHDLKLIQPLFHEFIPGSVYRDTTQLQASMGRSTDGILNTTLFINYLSAYIVEIDHENILGPVSFLADLGGLYCISIGIFFYLLVQCEYRIKKLRNEDTVFRKIRNRRKALDHWDKLRRYVAYTWDCSILVDDAIKTTKVSGMCGLTRPPTSSNSSEHGESIMANKKPNLGIEKNVISQPASLELSSFDSASSLAHGDNFSNKKSITHPISHSEDVSIPPPPPMEFIDGSSGSEVDAMDIKNKFQLLYDYNVLLREKLLETQSLLNTLAPKPIASSSSTVERSA

SEQ ID NO: 50031 - protein, 608 aa, Arabidopsis thaliana
  peptide (1)..(608): Ceres Seq. ID no. 13588108
  misc_feature (1)..(198): Homolog of NCBI NO: 9759136 NR Description: gene_id:MQK4.27~unknown protein [Arabidopsis
  misc_feature (1)..(492): Homolog of NCBI NO: 34893992 NR Description: P0672D08.4 [Oryza sativa (japonica
  misc_feature (84)..(608): Homolog of NCBI NO: 9759136 NR Description: gene_id:MQK4.27~unknown protein [Arabidopsis
MACPRNSITYNATRCACGIGQLLNRSSGSCEIFGWPSTISTDKDVNYSVISFAETLFAFDRIRKFTQSQAIFLEATLVMLLSWLVFCFFLRFTKLGDGRNVWFNLRWWITRLDVFFSTRHWLDDQQIVKKRKTELGGTFSVASWIVFIGLFAALLYQIITKRTIEVHNVRATGSPDLISFENDLEFNITAVSDMSCSNLRGIGNVVMGNPGFSEFKVAALSSLGSYTCKNTTSGPTVNFKCTKCRLTNDYIYISWHFVDLPDSPAAAVGFQFNFTSKNGPNEKHMSFVSGTLRNGSILDESPVTFRGTEGNILKFNLFPRIYHHLHDLKLIQPLFHEFIPGSVYRDTTQLQASMGRSTDGILNTTLFINYLSAYIVEIDHENILGPVSFLADLGGLYCISIGIFFYLLVQCEYRIKKLRNEDTVFRKIRNRRKALDHWDKLRRYVAYTWDCSILVDDAIKTTKVSGMCGLTRPPTSSNSSEHGESIMANKKPNLGIEKNVISQPASLELSSFDSASSLAHGDNFSNKKSITHPISHSEDVSIPPPPPMEFIDGSSGSEVDAMDIKNKFQLLYDYNVLLREKLLETQSLLNTLAPKPIASSSSTVERSA

SEQ ID NO: 50032 - protein, 530 aa, Arabidopsis thaliana
  peptide (1)..(530): Ceres Seq. ID no. 13588109
  misc_feature (1)..(120): Homolog of NCBI NO: 9759136 NR Description: gene_id:MQK4.27~unknown protein [Arabidopsis
  misc_feature (1)..(414): Homolog of NCBI NO: 34893992 NR Description: P0672D08.4 [Oryza sativa (japonica
  misc_feature (6)..(530): Homolog of NCBI NO: 9759136 NR Description: gene_id:MQK4.27~unknown protein [Arabidopsis
MLLSWLVFCFFLRFTKLGDGRNVWFNLRWWITRLDVFFSTRHWLDDQQIVKKRKTELGGTFSVASWIVFIGLFAALLYQIITKRTIEVHNVRATGSPDLISFENDLEFNITAVSDMSCSNLRGIGNVVMGNPGFSEFKVAALSSLGSYTCKNTTSGPTVNFKCTKCRLTNDYIYISWHFVDLPDSPAAAVGFQFNFTSKNGPNEKHMSFVSGTLRNGSILDESPVTFRGTEGNILKFNLFPRIYHHLHDLKLIQPLFHEFIPGSVYRDTTQLQASMGRSTDGILNTTLFINYLSAYIVEIDHENILGPVSFLADLGGLYCISIGIFFYLLVQCEYRIKKLRNEDTVFRKIRNRRKALDHWDKLRRYVAYTWDCSILVDDAIKTTKVSGMCGLTRPPTSSNSSEHGESIMANKKPNLGIEKNVISQPASLELSSFDSASSLAHGDNFSNKKSITHPISHSEDVSIPPPPPMEFIDGSSGSEVDAMDIKNKFQLLYDYNVLLREKLLETQSLLNTLAPKPIASSSSTVERSA

SEQ ID NO: 50033 - DNA, 1351 bp, Arabidopsis thaliana
  misc_feature (1)..(1351): Ceres Seq. ID no. 12591870
  misc_feature: MA Experiment ID: 20000171 Result: Up-regulated in Transcription
  misc_feature: MA Experiment 20000171 PARAMETER Experiment Name: At_42deg_Heat_P Parameter: Age (day) Value: 14
  misc_feature: MA Experiment 20000171 PARAMETER Experiment Name: At_42deg_Heat_P Parameter: Organism Value: A. thaliana
  misc_feature: MA Experiment 20000171 PARAMETER Experiment Name: At_42deg_Heat_P Parameter: Plant Line Value: WS
  misc_feature: MA Experiment 20000171 PARAMETER Experiment Name: At_42deg_Heat_P Parameter: Temperature (deg C) Value: 42 vs. 22
  misc_feature: MA Experiment 20000171 PARAMETER Experiment Name: At_42deg_Heat_P Parameter: Timepoint (hr) Value: 1
  misc_feature: MA Experiment 20000171 PARAMETER Experiment Name: At_42deg_Heat_P Parameter: Tissue Value: Aerial
  misc_feature: MA Experiment ID: 20000173 Result: Up-regulated in Transcription
  misc_feature: MA Experiment 20000173 PARAMETER Experiment Name: At_42deg_Heat_P Parameter: Age (day) Value: 14
  misc_feature: MA Experiment 20000173 PARAMETER Experiment Name: At_42deg_Heat_P Parameter: Organism Value: A. thaliana
  misc_feature: MA Experiment 20000173 PARAMETER Experiment Name: At_42deg_Heat_P Parameter: Plant Line Value: WS
  misc_feature: MA Experiment 20000173 PARAMETER Experiment Name: At_42deg_Heat_P Parameter: Temperature (deg C) Value: 42 vs. 22
  misc_feature: MA Experiment 20000173 PARAMETER Experiment Name: At_42deg_Heat_P Parameter: Timepoint (hr) Value: 6
  misc_feature: MA Experiment 20000173 PARAMETER Experiment Name: At_42deg_Heat_P Parameter: Tissue Value: Aerial
  misc_feature: MA Experiment ID: 20000180 Result: Down-regulated in Transcription
  misc_feature: MA Experiment 20000180 PARAMETER Experiment Name: At_Germinating_Seeds_P Parameter: Age (hr) Value: 24 vs. 0
  misc_feature: MA Experiment 20000180 PARAMETER Experiment Name: At_Germinating_Seeds_P Parameter: Tissue Value: Germinating Seeds
  misc_feature: MA Experiment ID: 20000184 Result: Down-regulated in Transcription
  misc_feature: MA Experiment 20000184 PARAMETER Experiment Name: At_Shoots__P Parameter: Age (day) Value: 7
  misc_feature: MA Experiment 20000184 PARAMETER Experiment Name: At_Shoots__P Parameter: Tissue Value: Shoots vs. Whole Plant
  misc_feature: MA Experiment ID: 20000185 Result: Down-regulated in Transcription
  misc_feature: MA Experiment 20000185 PARAMETER Experiment Name: At_Roots__P Parameter: Age (day) Value: 7 vs. 21
  misc_feature: MA Experiment 20000185 PARAMETER Experiment Name: At_Roots__P Parameter: Organism Value: A. thaliana
  misc_feature: MA Experiment 20000185 PARAMETER Experiment Name: At_Roots__P Parameter: Tissue Value: Roots vs. Whole Plant
  misc_feature: MA Experiment ID: 20000211 Result: Up-regulated in Transcription
  misc_feature: MA Experiment 20000211 PARAMETER Experiment Name: At_0.001percent_MeJA__P Parameter: Age (day) Value: 14
  misc_feature: MA Experiment 20000211 PARAMETER Experiment Name: At_0.001percent_MeJA__P Parameter: Organism Value: A. thaliana
  misc_feature: MA Experiment 20000211 PARAMETER Experiment Name: At_0.001percent_MeJA__P Parameter: Plant Line Value: WS
  misc_feature: MA Experiment 20000211 PARAMETER Experiment Name: At_0.001percent_MeJA__P Parameter: Timepoint (hr) Value: 1
  misc_feature: MA Experiment 20000211 PARAMETER Experiment Name: At_0.001percent_MeJA__P Parameter: Tissue Value: Aerial
  misc_feature: MA Experiment 20000211 PARAMETER Experiment Name: At_0.001percent_MeJA__P Parameter: Treatment Value: 0.001percent MeJA vs. No Treatment
  misc_feature: MA Experiment ID: 20000213 Result: Up-regulated in Transcription
  misc_feature: MA Experiment 20000213 PARAMETER Experiment Name: At_4deg_Cold_P Parameter: Timepoint (hr) Value: 2
  misc_feature: MA Experiment ID: 20000234 Result: Down-regulated in Transcription
  misc_feature: MA Experiment 20000234 PARAMETER Experiment Name: At_Siliques_P Parameter: Age (day) Value: 21
  misc_feature: MA Experiment 20000234 PARAMETER Experiment Name: At_Siliques_P Parameter: Organism Value: A. thaliana
  misc_feature: MA Experiment 20000234 PARAMETER Experiment Name: At_Siliques_P Parameter: Plant Line Value: WS
  misc_feature: MA Experiment 20000234 PARAMETER Experiment Name: At_Siliques_P Parameter: Tissue Value: Less Than 5mm Siliques vs. Whole Plant
  misc_feature: MA Experiment ID: 20000265 Result: Down-regulated in Transcription
  misc_feature: MA Experiment 20000265 PARAMETER Experiment Name: At_Open_Flower_P Parameter: Age (day) Value: 21
  misc_feature: MA Experiment 20000265 PARAMETER Experiment Name: At_Open_Flower_P Parameter: Plant Line Value: WS
  misc_feature: MA Experiment 20000265 PARAMETER Experiment Name: At_Open_Flower_P Parameter: Tissue Value: Closed Flower vs. Whole Plant
  misc_feature: MA Experiment ID: 20000267 Result: Up-regulated in Transcription
  misc_feature: MA Experiment 20000267 PARAMETER Experiment Name: At_Drought_P Parameter: Age (day) Value: 7
  misc_feature: MA Experiment 20000267 PARAMETER Experiment Name: At_Drought_P Parameter: Organism Value: A. thaliana
  misc_feature: MA Experiment 20000267 PARAMETER Experiment Name: At_Drought_P Parameter: Plant Line Value: WS
  misc_feature: MA Experiment 20000267 PARAMETER Experiment Name: At_Drought_P Parameter: Timepoint (hr) Value: 6
  misc_feature: MA Experiment 20000267 PARAMETER Experiment Name: At_Drought_P Parameter: Tissue Value: Whole Plant
  misc_feature: MA Experiment 20000267 PARAMETER Experiment Name: At_Drought_P Parameter: Treatment Value: Drought vs. No Drought
  misc_feature: MA Experiment ID: 20000269 Result: Up-regulated in Transcription
  misc_feature: MA Experiment 20000269 PARAMETER Experiment Name: At_1mM_KNO3_L-vs-H_Roots_P Parameter: Age (day) Value: 7,10,12
  misc_feature: MA Experiment 20000269 PARAMETER Experiment Name: At_1mM_KNO3_L-vs-H_Roots_P Parameter: Organism Value: A. thaliana
  misc_feature: MA Experiment 20000269 PARAMETER Experiment Name: At_1mM_KNO3_L-vs-H_Roots_P Parameter: Plant Line Value: WS
  misc_feature: MA Experiment 20000269 PARAMETER Experiment Name: At_1mM_KNO3_L-vs-H_Roots_P Parameter: Timepoint (day) Value: 7,10,12
  misc_feature: MA Experiment 20000269 PARAMETER Experiment Name: At_1mM_KNO3_L-vs-H_Roots_P Parameter: Tissue Value: Roots
  misc_feature: MA Experiment 20000269 PARAMETER Experiment Name: At_1mM_KNO3_L-vs-H_Roots_P Parameter: Treatment Value: 1mM KNO3 vs. 50mM KNO3
  misc_feature: MA Experiment ID: 20000437 Result: Up-regulated in Transcription
  misc_feature: MA Experiment 20000437 PARAMETER Experiment Name: At_Drought_P Parameter: Age (day) Value: 8
  misc_feature: MA Experiment 20000437 PARAMETER Experiment Name: At_Drought_P Parameter: Organism Value: A. thaliana
  misc_feature: MA Experiment 20000437 PARAMETER Experiment Name: At_Drought_P Parameter: Plant Line Value: WS
  misc_feature: MA Experiment 20000437 PARAMETER Experiment Name: At_Drought_P Parameter: Timepoint (hr) Value: 24
  misc_feature: MA Experiment 20000437 PARAMETER Experiment Name: At_Drought_P Parameter: Tissue Value: Whole Plant
  misc_feature: MA Experiment 20000437 PARAMETER Experiment Name: At_Drought_P Parameter: Treatment Value: Drought vs. No Drought
  misc_feature: MA Experiment ID: 20000438 Result: Down-regulated in Transcription
  misc_feature: MA Experiment 20000438 PARAMETER Experiment Name: At_Shoots__P Parameter: Age (day) Value: 14
  misc_feature: MA Experiment 20000438 PARAMETER Experiment Name: At_Shoots__P Parameter: Tissue Value: Shoots vs. Whole Plant
  misc_feature: MA Experiment ID: 20000439 Result: Down-regulated in Transcription
  misc_feature: MA Experiment 20000439 PARAMETER Experiment Name: At_Roots__P Parameter: Age (day) Value: 14 vs. 21
  misc_feature: MA Experiment 20000439 PARAMETER Experiment Name: At_Roots__P Parameter: Organism Value: A. thaliana
  misc_feature: MA Experiment 20000439 PARAMETER Experiment Name: At_Roots__P Parameter: Tissue Value: Roots vs. Whole Plant
  misc_feature: MA Experiment ID: 20000460 Result: Up-regulated in Transcription
  misc_feature: MA Experiment 20000460 PARAMETER Experiment Name: At_10percent_PEG_P Parameter: Age (day) Value: 12
  misc_feature: MA Experiment 20000460 PARAMETER Experiment Name: At_10percent_PEG_P Parameter: Organism Value: A. thaliana
  misc_feature: MA Experiment 20000460 PARAMETER Experiment Name: At_10percent_PEG_P Parameter: Plant Line Value: WS
  misc_feature: MA Experiment 20000460 PARAMETER Experiment Name: At_10percent_PEG_P Parameter: Timepoint (day) Value: 12
  misc_feature: MA Experiment 20000460 PARAMETER Experiment Name: At_10percent_PEG_P Parameter: Tissue Value: Whole Plant
  misc_feature: MA Experiment 20000460 PARAMETER Experiment Name: At_10percent_PEG_P Parameter: Treatment Value: 10percent PEG vs. No Treatment
  misc_feature: MA Experiment ID: 20000495 Result: Down-regulated in Transcription
  misc_feature: MA Experiment 20000495 PARAMETER Experiment Name: At_Guard_Cells_P Parameter: Harvest Date Value: 8/2/2002
  misc_feature: MA Experiment 20000495 PARAMETER Experiment Name: At_Guard_Cells_P Parameter: Organism Value: A. thaliana
  misc_feature: MA Experiment 20000495 PARAMETER Experiment Name: At_Guard_Cells_P Parameter: Tissue Value: Guard Cells vs. Leaves
  misc_feature: MA Experiment ID: 20000527 Result: Up-regulated in Transcription
  misc_feature: MA Experiment 20000527 PARAMETER Experiment Name: At_10percent_PEG_P Parameter: Age (day) Value: 20
  misc_feature: MA Experiment 20000527 PARAMETER Experiment Name: At_10percent_PEG_P Parameter: Organism Value: A. thaliana
  misc_feature: MA Experiment 20000527 PARAMETER Experiment Name: At_10percent_PEG_P Parameter: Plant Line Value: WS
  misc_feature: MA Experiment 20000527 PARAMETER Experiment Name: At_10percent_PEG_P Parameter: Timepoint (day) Value: 20
  misc_feature: MA Experiment 20000527 PARAMETER Experiment Name: At_10percent_PEG_P Parameter: Tissue Value: Whole Plant
  misc_feature: MA Experiment 20000527 PARAMETER Experiment Name: At_10percent_PEG_P Parameter: Treatment Value: 10percent PEG vs. No Treatment
  misc_feature: MA Experiment ID: 20000709 Result: Up-regulated in Transcription
  misc_feature: MA Experiment 20000709 PARAMETER Experiment Name: At_15mM_NH4NO3_L-to-H_P Parameter: Age (hr) Value: 14
  misc_feature: MA Experiment 20000709 PARAMETER Experiment Name: At_15mM_NH4NO3_L-to-H_P Parameter: Organism Value: A. thaliana
  misc_feature: MA Experiment 20000709 PARAMETER Experiment Name: At_15mM_NH4NO3_L-to-H_P Parameter: Plant Line Value: WS
  misc_feature: MA Experiment 20000709 PARAMETER Experiment Name: At_15mM_NH4NO3_L-to-H_P Parameter: Timepoint (hr) Value: 4
  misc_feature: MA Experiment 20000709 PARAMETER Experiment Name: At_15mM_NH4NO3_L-to-H_P Parameter: Tissue Value: Aerial
  misc_feature: MA Experiment 20000709 PARAMETER Experiment Name: At_15mM_NH4NO3_L-to-H_P Parameter: Treatment Value: 15mM NH4NO3 vs. 30mM Mannitol
  misc_feature: MA Experiment ID: 20000794 Result: Down-regulated in Transcription
  misc_feature: MA Experiment 20000794 PARAMETER Experiment Name: At_Petals_P Parameter: Age (day) Value: 23-25 days
  misc_feature: MA Experiment 20000794 PARAMETER Experiment Name: At_Petals_P Parameter: Plant Line Value: WS
  misc_feature: MA Experiment 20000794 PARAMETER Experiment Name: At_Petals_P Parameter: Tissue Value: Petals vs. Whole plant
  misc_feature: MA Experiment ID: 20001451 Result: Down-regulated in Transcription
  misc_feature: MA Experiment 20001451 PARAMETER Experiment Name: At_Far-red-induction_P Parameter: Age (day) Value: 7
  misc_feature: MA Experiment 20001451 PARAMETER Experiment Name: At_Far-red-induction_P Parameter: Light Value: Far-red vs. White
  misc_feature: MA Experiment 20001451 PARAMETER Experiment Name: At_Far-red-induction_P Parameter: Organism Value: A. thaliana
  misc_feature: MA Experiment 20001451 PARAMETER Experiment Name: At_Far-red-induction_P Parameter: Plant Line Value: Columbia
  misc_feature: MA Experiment 20001451 PARAMETER Experiment Name: At_Far-red-induction_P Parameter: Timepoint (hr) Value: 24
  misc_feature: MA Experiment 20001451 PARAMETER Experiment Name: At_Far-red-induction_P Parameter: Tissue Value: Whole Plant
  misc_feature: MA Experiment ID: 20001457 Result: Up-regulated in Transcription
  misc_feature: MA Experiment 20001457 PARAMETER Experiment Name: At_50mM_NH4NO3_L-to-H_P Parameter: Age (day) Value: Undefined
  misc_feature: MA Experiment 20001457 PARAMETER Experiment Name: At_50mM_NH4NO3_L-to-H_P Parameter: Organism Value: Undefined
  misc_feature: MA Experiment 20001457 PARAMETER Experiment Name: At_50mM_NH4NO3_L-to-H_P Parameter: Plant Line Value: Undefined
  misc_feature: MA Experiment 20001457 PARAMETER Experiment Name: At_50mM_NH4NO3_L-to-H_P Parameter: Timepoint (hr) Value: 0.5
  misc_feature: MA Experiment 20001457 PARAMETER Experiment Name: At_50mM_NH4NO3_L-to-H_P Parameter: Tissue Value: Siliques
  misc_feature: MA Experiment 20001457 PARAMETER Experiment Name: At_50mM_NH4NO3_L-to-H_P Parameter: Treatment Value: 50mM NH4NO3 vs. 100mM Manitol
  misc_feature: MA Experiment ID: 20001458 Result: Up-regulated in Transcription
  misc_feature: MA Experiment 20001458 PARAMETER Experiment Name: At_50mM_NH4NO3_L-to-H_P Parameter: Age (day) Value: Undefined
  misc_feature: MA Experiment 20001458 PARAMETER Experiment Name: At_50mM_NH4NO3_L-to-H_P Parameter: Organism Value: Undefined
  misc_feature: MA Experiment 20001458 PARAMETER Experiment Name: At_50mM_NH4NO3_L-to-H_P Parameter: Plant Line Value: Undefined
  misc_feature: MA Experiment 20001458 PARAMETER Experiment Name: At_50mM_NH4NO3_L-to-H_P Parameter: Timepoint (hr) Value: 2
  misc_feature: MA Experiment 20001458 PARAMETER Experiment Name: At_50mM_NH4NO3_L-to-H_P Parameter: Tissue Value: Siliques
  misc_feature: MA Experiment 20001458 PARAMETER Experiment Name: At_50mM_NH4NO3_L-to-H_P Parameter: Treatment Value: 50mM NH4NO3 vs. 100mM Manitol
  misc_feature: MA Experiment ID: 20001459 Result: Up-regulated in Transcription
  misc_feature: MA Experiment 20001459 PARAMETER Experiment Name: At_50mM_NH4NO3_L-to-H_P Parameter: Age (day) Value: Undefined
  misc_feature: MA Experiment 20001459 PARAMETER Experiment Name: At_50mM_NH4NO3_L-to-H_P Parameter: Organism Value: Undefined
  misc_feature: MA Experiment 20001459 PARAMETER Experiment Name: At_50mM_NH4NO3_L-to-H_P Parameter: Plant Line Value: Undefined
  misc_feature: MA Experiment 20001459 PARAMETER Experiment Name: At_50mM_NH4NO3_L-to-H_P Parameter: Timepoint (hr) Value: 4
  misc_feature: MA Experiment 20001459 PARAMETER Experiment Name: At_50mM_NH4NO3_L-to-H_P Parameter: Tissue Value: Siliques
  misc_feature: MA Experiment 20001459 PARAMETER Experiment Name: At_50mM_NH4NO3_L-to-H_P Parameter: Treatment Value: 50mM NH4NO3 vs. 100mM Manitol
  misc_feature: MA Experiment ID: 20001554 Result: Up-regulated in Transcription
  misc_feature: MA Experiment 20001554 PARAMETER Experiment Name: At_Drought_Soil_Dry_P Parameter: Age (day) Value: 21
  misc_feature: MA Experiment 20001554 PARAMETER Experiment Name: At_Drought_Soil_Dry_P Parameter: Organism Value: A. thaliana
  misc_feature: MA Experiment 20001554 PARAMETER Experiment Name: At_Drought_Soil_Dry_P Parameter: Plant Line Value: WS
  misc_feature: MA Experiment 20001554 PARAMETER Experiment Name: At_Drought_Soil_Dry_P Parameter: Post Timepoint (hr) Value: None
  misc_feature: MA Experiment 20001554 PARAMETER Experiment Name: At_Drought_Soil_Dry_P Parameter: Post-Treatment Value: None
  misc_feature: MA Experiment 20001554 PARAMETER Experiment Name: At_Drought_Soil_Dry_P Parameter: Timepoint (day) Value: 7
  misc_feature: MA Experiment 20001554 PARAMETER Experiment Name: At_Drought_Soil_Dry_P Parameter: Treatment Value: Drought vs. No Drought
  misc_feature: MA Experiment ID: 20001555 Result: Up-regulated in Transcription
  misc_feature: MA Experiment 20001555 PARAMETER Experiment Name: At_Drought_Soil_Dry_P Parameter: Age (day) Value: 24
  misc_feature: MA Experiment 20001555 PARAMETER Experiment Name: At_Drought_Soil_Dry_P Parameter: Organism Value: A. thaliana
  misc_feature: MA Experiment 20001555 PARAMETER Experiment Name: At_Drought_Soil_Dry_P Parameter: Plant Line Value: WS
  misc_feature: MA Experiment 20001555 PARAMETER Experiment Name: At_Drought_Soil_Dry_P Parameter: Post Timepoint (hr) Value: None
  misc_feature: MA Experiment 20001555 PARAMETER Experiment Name: At_Drought_Soil_Dry_P Parameter: Post-Treatment Value: None
  misc_feature: MA Experiment 20001555 PARAMETER Experiment Name: At_Drought_Soil_Dry_P Parameter: Timepoint (day) Value: 10
  misc_feature: MA Experiment 20001555 PARAMETER Experiment Name: At_Drought_Soil_Dry_P Parameter: Treatment Value: Drought vs. No Drought
  misc_feature: MA Experiment ID: 20001557 Result: Up-regulated in Transcription
  misc_feature: MA Experiment 20001557 PARAMETER Experiment Name: At_Drought_Soil_Dry_P Parameter: Age (day) Value: 27
  misc_feature: MA Experiment 20001557 PARAMETER Experiment Name: At_Drought_Soil_Dry_P Parameter: Organism Value: A. thaliana
  misc_feature: MA Experiment 20001557 PARAMETER Experiment Name: At_Drought_Soil_Dry_P Parameter: Plant Line Value: WS
  misc_feature: MA Experiment 20001557 PARAMETER Experiment Name: At_Drought_Soil_Dry_P Parameter: Post Timepoint (hr) Value: 3
  misc_feature: MA Experiment 20001557 PARAMETER Experiment Name: At_Drought_Soil_Dry_P Parameter: Post-Treatment Value: Re-Water vs. No Drought
  misc_feature: MA Experiment 20001557 PARAMETER Experiment Name: At_Drought_Soil_Dry_P Parameter: Timepoint (day) Value: 13
  misc_feature: MA Experiment 20001557 PARAMETER Experiment Name: At_Drought_Soil_Dry_P Parameter: Treatment Value: Drought vs. No Drought
  misc_feature: MA Experiment ID: 20001559 Result: Up-regulated in Transcription
  misc_feature: MA Experiment 20001559 PARAMETER Experiment Name: At_Drought_Soil_Dry_P Parameter: Age (day) Value: 28
  misc_feature: MA Experiment 20001559 PARAMETER Experiment Name: At_Drought_Soil_Dry_P Parameter: Organism Value: A. thaliana
  misc_feature: MA Experiment 20001559 PARAMETER Experiment Name: At_Drought_Soil_Dry_P Parameter: Plant Line Value: WS
  misc_feature: MA Experiment 20001559 PARAMETER Experiment Name: At_Drought_Soil_Dry_P Parameter: Post Timepoint (hr) Value: 29
  misc_feature: MA Experiment 20001559 PARAMETER Experiment Name: At_Drought_Soil_Dry_P Parameter: Post-Treatment Value: Re-Water vs. No Drought
  misc_feature: MA Experiment 20001559 PARAMETER Experiment Name: At_Drought_Soil_Dry_P Parameter: Timepoint (day) Value: 14
  misc_feature: MA Experiment 20001559 PARAMETER Experiment Name: At_Drought_Soil_Dry_P Parameter: Treatment Value: Drought vs. No Drought
  misc_feature: MA Experiment ID: 20001760 Result: Up-regulated in Transcription
  misc_feature: MA Experiment 20001760 PARAMETER Experiment Name: At_50mM_NH4NO3_L-to-H_P Parameter: Timepoint (hr) Value: 2
  misc_feature: MA Experiment 20001760 PARAMETER Experiment Name: At_50mM_NH4NO3_L-to-H_P Parameter: Tissue Value: Siliques
  misc_feature: MA Experiment 20001760 PARAMETER Experiment Name: At_50mM_NH4NO3_L-to-H_P Parameter: Treatment Value: 50mM NH4NO3 vs 100mM Mannitol
ctctcactccaatttctttcattaccatataaatacaacgccttcacatttgcactctttatacatttctctcgagagcagaaacagagtcaccggtaaactcatctccggcgacataaaaacacaaaagttcatatatttagattctggtgactctctgctctaatgggtcaatctcaagtttctctctttcttcttctaattcttgttttcatctatggagtttcctccaccactttcaccatcgttaaccagtgtagctacaccgtctggcctggacttctctccggcgccggaacctctcctttacctacaaccggattctccttaaaccctaccgagacacgagttatcccgatccccgcagcttggtccggtcgtatttggggtcgtactctctgcacacaagacgcaaccaccggaagattcacttgcatcaccggggactgtggttcttccaccgtagaatgctccggatccggtgctgcacctccggctacactcgctgaattcaccttaaacggagctaatggtctcgatttctacgacgtcagtctcgtcgacggttacaacatcccgatgaccatcgtccctcagggtggaggagatgccggaggcgtcgccggaaactgtacgacaaccggctgcgttgcggagctcaacggtccatgtcctgctcagctgaaagtggcgacgacgggagctgaaggagtagcttgcaaaagcgcgtgtgaagcgtttggaacgccggagtactgctgtagcggcgcgtttggaacgccggacacgtgtaagccaagcgagtactcacagtttttcaaaaacgcgtgcccgagagcttatagttacgcttacgacgacggaactagtaccttcacttgtggcggagctgattacgtcatcactttctgtccttctcctaacccaagtgtgaagagtgcaacgaagggagtccaacccgtagctgttagctactctaaggcatctccaaacgcgtcgccaactctttctgccgtgttttcgattggcgttttggctgtcgcgtcttgggtgatgcaacgcgttttgtgattcatgtacggctgcgtttgaagtttttaataacatcaatctcaatcattcgacgagaaagaaaagatcattgaagagaagattttagttagtcgaggagtgatttattctaggtgataatttgtagaagaacaacttattttagattggattagttctagtattactattagtttctacgtaattttttagacaaatgttcagtctttatggtgtctctgtaagatatataacagttttgcttgcacaactaattgattggtaatgcgttttaaaattt

SEQ ID NO: 50034 - protein, 301 aa, Arabidopsis thaliana
  peptide (1)..(301): Ceres Seq. ID no. 12591871
  misc_feature (29)..(250): Pfam Name: Thaumatin family Pfam Description: Thaumatin family
  misc_feature (8)..(284): Homolog of NCBI NO: 37531036 NR Description: putative thaumatin-like protein
  misc_feature (11)..(257): Homolog of NCBI NO: 6273383 NR Description: SCUTL1 [Vitis vinifera]
  misc_feature (8)..(257): Homolog of NCBI NO: 30692042 NR Description: thaumatin family [Arabidopsis thaliana]
  misc_feature (22)..(264): Homolog of NCBI NO: 37531042 NR Description: putative thaumatin-like protein
  misc_feature (22)..(294): Homolog of NCBI NO: 30686652 NR Description: thaumatin family [Arabidopsis thaliana]
  misc_feature (8)..(253): Homolog of NCBI NO: 4105697 NR Description: thaumatin-like protein [Arabidopsis thaliana]
  misc_feature (6)..(294): Homolog of NCBI NO: 25296204 NR Description: hypothetical protein T20H2.19 [imported] -
  misc_feature (8)..(284): Homolog of NCBI NO: 15222875 NR Description: thaumatin, putative
  misc_feature (1)..(253): Homolog of NCBI NO: 15227907 NR Description: putative thaumatin-like pathogenesis-related
  misc_feature (1)..(301): Homolog of NCBI NO: 15233437 NR Description: thaumatin-like protein
MGQSQVSLFLLLILVFIYGVSSTTFTIVNQCSYTVWPGLLSGAGTSPLPTTGFSLNPTETRVIPIPAAWSGRIWGRTLCTQDATTGRFTCITGDCGSSTVECSGSGAAPPATLAEFTLNGANGLDFYDVSLVDGYNIPMTIVPQGGGDAGGVAGNCTTTGCVAELNGPCPAQLKVATTGAEGVACKSACEAFGTPEYCCSGAFGTPDTCKPSEYSQFFKNACPRAYSYAYDDGTSTFTCGGADYVITFCPSPNPSVKSATKGVQPVAVSYSKASPNASPTLSAVFSIGVLAVASWVMQRVL

SEQ ID NO: 50035 - protein, 163 aa, Arabidopsis thaliana
  peptide (1)..(163): Ceres Seq. ID no. 12591872
  misc_feature (1)..(112): Pfam Name: Thaumatin family Pfam Description: Thaumatin family
  misc_feature (1)..(146): Homolog of NCBI NO: 37531036 NR Description: putative thaumatin-like protein
  misc_feature (1)..(119): Homolog of NCBI NO: 6273383 NR Description: SCUTL1 [Vitis vinifera]
  misc_feature (1)..(119): Homolog of NCBI NO: 30692042 NR Description: thaumatin family [Arabidopsis thaliana]
  misc_feature (1)..(126): Homolog of NCBI NO: 37531042 NR Description: putative thaumatin-like protein
  misc_feature (1)..(156): Homolog of NCBI NO: 30686652 NR Description: thaumatin family [Arabidopsis thaliana]
  misc_feature (1)..(115): Homolog of NCBI NO: 4105697 NR Description: thaumatin-like protein [Arabidopsis thaliana]
  misc_feature (1)..(156): Homolog of NCBI NO: 25296204 NR Description: hypothetical protein T20H2.19 [imported] -
  misc_feature (1)..(146): Homolog of NCBI NO: 15222875 NR Description: thaumatin, putative
  misc_feature (1)..(115): Homolog of NCBI NO: 15227907 NR Description: putative thaumatin-like pathogenesis-related
  misc_feature (1)..(163): Homolog of NCBI NO: 15233437 NR Description: thaumatin-like protein
MTIVPQGGGDAGGVAGNCTTTGCVAELNGPCPAQLKVATTGAEGVACKSACEAFGTPEYCCSGAFGTPDTCKPSEYSQFFKNACPRAYSYAYDDGTSTFTCGGADYVITFCPSPNPSVKSATKGVQPVAVSYSKASPNASPTLSAVFSIGVLAVASWVMQRVL

SEQ ID NO: 50036 - DNA, 2070 bp, Arabidopsis thaliana; identical to SEQ ID NO: 44648
  misc_feature (1)..(2070): Ceres Seq. ID no. 12455389
  misc_feature: MA Experiment ID: 20000794 Result: Down-regulated in Transcription
  misc_feature: MA Experiment 20000794 PARAMETER Experiment Name: At_Petals_P Parameter: Age (day) Value: 23-25 days
  misc_feature: MA Experiment 20000794 PARAMETER Experiment Name: At_Petals_P Parameter: Plant Line Value: WS
  misc_feature: MA Experiment 20000794 PARAMETER Experiment Name: At_Petals_P Parameter: Tissue Value: Petals vs. Whole plant

SEQ ID NO: 50037 - protein, 525 aa, Arabidopsis thaliana; identical to SEQ ID NO: 44649
  peptide (1)..(525): Ceres Seq. ID no. 12455390
  misc_feature (3)..(62): Pfam Name: U-box domain Pfam Description: U-box domain
  misc_feature (3)..(62): Pfam Name: U-box domain Pfam Description: U-box domain
  misc_feature (3)..(62): Pfam Name: U-box domain Pfam Description: U-box domain
  misc_feature (3)..(509): Homolog of NCBI NO: 17647459 NR Description: GTP-binding-protein CG5519-PA [Drosophila
  misc_feature (1)..(33): Homolog of NCBI NO: 25406791 NR Description: hypothetical protein [imported] - Arabidopsis
  misc_feature (438)..(525): Homolog of NCBI NO: 25406791 NR Description: hypothetical protein [imported] - Arabidopsis
  misc_feature (107)..(398): Homolog of NCBI NO: 25406791 NR Description: hypothetical protein [imported] - Arabidopsis
  misc_feature (311)..(503): Homolog of NCBI NO: 25408261 NR Description: probable PRP19-like spliceosomal protein
  misc_feature (3)..(509): Homolog of NCBI NO: 17647459 NR Description: GTP-binding-protein CG5519-PA [Drosophila
  misc_feature (438)..(525): Homolog of NCBI NO: 25406791 NR Description: hypothetical protein [imported] - Arabidopsis
  misc_feature (311)..(503): Homolog of NCBI NO: 25408261 NR Description: probable PRP19-like spliceosomal protein
  misc_feature (107)..(398): Homolog of NCBI NO: 25406791 NR Description: hypothetical protein [imported] - Arabidopsis
  misc_feature (438)..(525): Homolog of NCBI NO: 25406791 NR Description: hypothetical protein [imported] - Arabidopsis
  misc_feature (1)..(33): Homolog of NCBI NO: 25406791 NR Description: hypothetical protein [imported] - Arabidopsis
  misc_feature (3)..(509): Homolog of NCBI NO: 17647459 NR Description: GTP-binding-protein CG5519-PA [Drosophila
  misc_feature (1)..(503): Homolog of NCBI NO: 30685651 NR Description: transducin / WD-40 repeat protein family
  misc_feature (1)..(503): Homolog of NCBI NO: 30685653 NR Description: transducin / WD-40 repeat protein family
  misc_feature (1)..(525): Homolog of NCBI NO: 18390401 NR Description: putative pre-mRNA splicing factor PRP19
  misc_feature (1)..(519): Homolog of NCBI NO: 37535206 NR Description: putative WD-repeat containing protein
  misc_feature (1)..(416): Homolog of NCBI NO: 25408261 NR Description: probable PRP19-like spliceosomal protein
  misc_feature (1)..(503): Homolog of NCBI NO: 30685651 NR Description: transducin / WD-40 repeat protein family
  misc_feature (1)..(503): Homolog of NCBI NO: 30685653 NR Description: transducin / WD-40 repeat protein family
  misc_feature (1)..(525): Homolog of NCBI NO: 18390401 NR Description: putative pre-mRNA splicing factor PRP19
  misc_feature (1)..(519): Homolog of NCBI NO: 37535206 NR Description: putative WD-repeat containing protein
  misc_feature (1)..(416): Homolog of NCBI NO: 25408261 NR Description: probable PRP19-like spliceosomal protein
  misc_feature (311)..(503): Homolog of NCBI NO: 25408261 NR Description: probable PRP19-like spliceosomal protein
  misc_feature (107)..(398): Homolog of NCBI NO: 25406791 NR Description: hypothetical protein [imported] - Arabidopsis
  misc_feature (1)..(33): Homolog of NCBI NO: 25406791 NR Description: hypothetical protein [imported] - Arabidopsis
  misc_feature (1)..(416): Homolog of NCBI NO: 25408261 NR Description: probable PRP19-like spliceosomal protein
  misc_feature (1)..(519): Homolog of NCBI NO: 37535206 NR Description: putative WD-repeat containing protein
  misc_feature (1)..(525): Homolog of NCBI NO: 18390401 NR Description: putative pre-mRNA splicing factor PRP19
  misc_feature (1)..(503): Homolog of NCBI NO: 30685653 NR Description: transducin / WD-40 repeat protein family
  misc_feature (1)..(503): Homolog of NCBI NO: 30685651 NR Description: transducin / WD-40 repeat protein family

SEQ ID NO: 50038 - protein, 442 aa, Arabidopsis thaliana; identical to SEQ ID NO: 44650
  peptide (1)..(442): Ceres Seq. ID no. 12455391
  misc_feature (1)..(426): Homolog of NCBI NO: 28278498 NR Description: Similar to nuclear matrix protein NMP200 related
  misc_feature (1)..(426): Homolog of NCBI NO: 17647459 NR Description: GTP-binding-protein CG5519-PA [Drosophila
  misc_feature (355)..(442): Homolog of NCBI NO: 25406791 NR Description: hypothetical protein [imported] - Arabidopsis
  misc_feature (24)..(315): Homolog of NCBI NO: 25406791 NR Description: hypothetical protein [imported] - Arabidopsis
  misc_feature (228)..(420): Homolog of NCBI NO: 25408261 NR Description: probable PRP19-like spliceosomal protein
  misc_feature (1)..(333): Homolog of NCBI NO: 25408261 NR Description: probable PRP19-like spliceosomal protein
  misc_feature (1)..(436): Homolog of NCBI NO: 37535206 NR Description: putative WD-repeat containing protein
  misc_feature (1)..(442): Homolog of NCBI NO: 18390401 NR Description: putative pre-mRNA splicing factor PRP19
  misc_feature (1)..(420): Homolog of NCBI NO: 30685653 NR Description: transducin / WD-40 repeat protein family
  misc_feature (1)..(420): Homolog of NCBI NO: 30685651 NR Description: transducin / WD-40 repeat protein family
  misc_feature (1)..(426): Homolog of NCBI NO: 28278498 NR Description: Similar to nuclear matrix protein NMP200 related
  misc_feature (1)..(426): Homolog of NCBI NO: 17647459 NR Description: GTP-binding-protein CG5519-PA [Drosophila
  misc_feature (355)..(442): Homolog of NCBI NO: 25406791 NR Description: hypothetical protein [imported] - Arabidopsis
  misc_feature (24)..(315): Homolog of NCBI NO: 25406791 NR Description: hypothetical protein [imported] - Arabidopsis
  misc_feature (228)..(420): Homolog of NCBI NO: 25408261 NR Description: probable PRP19-like spliceosomal protein
  misc_feature (1)..(333): Homolog of NCBI NO: 25408261 NR Description: probable PRP19-like spliceosomal protein
  misc_feature (1)..(436): Homolog of NCBI NO: 37535206 NR Description: putative WD-repeat containing protein
  misc_feature (1)..(442): Homolog of NCBI NO: 18390401 NR Description: putative pre-mRNA splicing factor PRP19
  misc_feature (1)..(420): Homolog of NCBI NO: 30685653 NR Description: transducin / WD-40 repeat protein family
  misc_feature (1)..(420): Homolog of NCBI NO: 30685651 NR Description: transducin / WD-40 repeat protein family
  misc_feature (1)..(426): Homolog of NCBI NO: 28278498 NR Description: Similar to nuclear matrix protein NMP200 related
  misc_feature (1)..(426): Homolog of NCBI NO: 17647459 NR Description: GTP-binding-protein CG5519-PA [Drosophila
  misc_feature (355)..(442): Homolog of NCBI NO: 25406791 NR Description: hypothetical protein [imported] - Arabidopsis
  misc_feature (24)..(315): Homolog of NCBI NO: 25406791 NR Description: hypothetical protein [imported] - Arabidopsis
  misc_feature (228)..(420): Homolog of NCBI NO: 25408261 NR Description: probable PRP19-like spliceosomal protein
  misc_feature (1)..(333): Homolog of NCBI NO: 25408261 NR Description: probable PRP19-like spliceosomal protein
  misc_feature (1)..(436): Homolog of NCBI NO: 37535206 NR Description: putative WD-repeat containing protein
  misc_feature (1)..(442): Homolog of NCBI NO: 18390401 NR Description: putative pre-mRNA splicing factor PRP19
  misc_feature (1)..(420): Homolog of NCBI NO: 30685653 NR Description: transducin / WD-40 repeat protein family
  misc_feature (1)..(420): Homolog of NCBI NO: 30685651 NR Description: transducin / WD-40 repeat protein family

SEQ ID NO: 50039 - protein, 298 aa, Arabidopsis thaliana; identical to SEQ ID NO: 44651
  peptide (1)..(298): Ceres Seq. ID no. 12455392
  misc_feature (1)..(282): Homolog of NCBI NO: 28278498 NR Description: Similar to nuclear matrix protein NMP200 related
  misc_feature (1)..(282): Homolog of NCBI NO: 17647459 NR Description: GTP-binding-protein CG5519-PA [Drosophila
  misc_feature (211)..(298): Homolog of NCBI NO: 25406791 NR Description: hypothetical protein [imported] - Arabidopsis
  misc_feature (1)..(171): Homolog of NCBI NO: 25406791 NR Description: hypothetical protein [imported] - Arabidopsis
  misc_feature (84)..(276): Homolog of NCBI NO: 25408261 NR Description: probable PRP19-like spliceosomal protein
  misc_feature (1)..(189): Homolog of NCBI NO: 25408261 NR Description: probable PRP19-like spliceosomal protein
  misc_feature (1)..(292): Homolog of NCBI NO: 37535206 NR Description: putative WD-repeat containing protein
  misc_feature (1)..(298): Homolog of NCBI NO: 18390401 NR Description: putative pre-mRNA splicing factor PRP19
  misc_feature (1)..(276): Homolog of NCBI NO: 30685653 NR Description: transducin / WD-40 repeat protein family
  misc_feature (1)..(276): Homolog of NCBI NO: 30685651 NR Description: transducin / WD-40 repeat protein family
  misc_feature (1)..(282): Homolog of NCBI NO: 28278498 NR Description: Similar to nuclear matrix protein NMP200 related
  misc_feature (1)..(282): Homolog of NCBI NO: 17647459 NR Description: GTP-binding-protein CG5519-PA [Drosophila
  misc_feature (211)..(298): Homolog of NCBI NO: 25406791 NR Description: hypothetical protein [imported] - Arabidopsis
  misc_feature (1)..(171): Homolog of NCBI NO: 25406791 NR Description: hypothetical protein [imported] - Arabidopsis
  misc_feature (84)..(276): Homolog of NCBI NO: 25408261 NR Description: probable PRP19-like spliceosomal protein
  misc_feature (1)..(189): Homolog of NCBI NO: 25408261 NR Description: probable PRP19-like spliceosomal protein
  misc_feature (1)..(292): Homolog of NCBI NO: 37535206 NR Description: putative WD-repeat containing protein
  misc_feature (1)..(298): Homolog of NCBI NO: 18390401 NR Description: putative pre-mRNA splicing factor PRP19
  misc_feature (1)..(276): Homolog of NCBI NO: 30685653 NR Description: transducin / WD-40 repeat protein family
  misc_feature (1)..(276): Homolog of NCBI NO: 30685651 NR Description: transducin / WD-40 repeat protein family
  misc_feature (1)..(282): Homolog of NCBI NO: 28278498 NR Description: Similar to nuclear matrix protein NMP200 related
  misc_feature (1)..(282): Homolog of NCBI NO: 17647459 NR Description: GTP-binding-protein CG5519-PA [Drosophila
  misc_feature (211)..(298): Homolog of NCBI NO: 25406791 NR Description: hypothetical protein [imported] - Arabidopsis
  misc_feature (1)..(171): Homolog of NCBI NO: 25406791 NR Description: hypothetical protein [imported] - Arabidopsis
  misc_feature (84)..(276): Homolog of NCBI NO: 25408261 NR Description: probable PRP19-like spliceosomal protein
  misc_feature (1)..(189): Homolog of NCBI NO: 25408261 NR Description: probable PRP19-like spliceosomal protein
  misc_feature (1)..(292): Homolog of NCBI NO: 37535206 NR Description: putative WD-repeat containing protein
  misc_feature (1)..(298): Homolog of NCBI NO: 18390401 NR Description: putative pre-mRNA splicing factor PRP19
  misc_feature (1)..(276): Homolog of NCBI NO: 30685653 NR Description: transducin / WD-40 repeat protein family
  misc_feature (1)..(276): Homolog of NCBI NO: 30685651 NR Description: transducin / WD-40 repeat protein family

SEQ ID NO: 50040 - DNA, 1739 bp, Arabidopsis thaliana
  misc_feature (1)..(1739): Ceres Seq. ID no. 13648393
  misc_feature: MA Experiment ID: 20000169 Result: Up-regulated in Transcription
  misc_feature: MA Experiment 20000169 PARAMETER Experiment Name: At_100uM_ABA_P Parameter: Age (day) Value: 14
  misc_feature: MA Experiment 20000169 PARAMETER Experiment Name: At_100uM_ABA_P Parameter: Organism Value: A. thaliana
  misc_feature: MA Experiment 20000169 PARAMETER Experiment Name: At_100uM_ABA_P Parameter: Plant Line Value: WS
  misc_feature: MA Experiment 20000169 PARAMETER Experiment Name: At_100uM_ABA_P Parameter: Timepoint (hr) Value: 6
  misc_feature: MA Experiment 20000169 PARAMETER Experiment Name: At_100uM_ABA_P Parameter: Tissue Value: Aerial
  misc_feature: MA Experiment 20000169 PARAMETER Experiment Name: At_100uM_ABA_P Parameter: Treatment Value: 100uM ABA vs. No Treatment
  misc_feature: MA Experiment ID: 20000171 Result: Down-regulated in Transcription
  misc_feature: MA Experiment 20000171 PARAMETER Experiment Name: At_42deg_Heat_P Parameter: Age (day) Value: 14
  misc_feature: MA Experiment 20000171 PARAMETER Experiment Name: At_42deg_Heat_P Parameter: Organism Value: A. thaliana
  misc_feature: MA Experiment 20000171 PARAMETER Experiment Name: At_42deg_Heat_P Parameter: Plant Line Value: WS
  misc_feature: MA Experiment 20000171 PARAMETER Experiment Name: At_42deg_Heat_P Parameter: Temperature (deg C) Value: 42 vs. 22
  misc_feature: MA Experiment 20000171 PARAMETER Experiment Name: At_42deg_Heat_P Parameter: Timepoint (hr) Value: 1
  misc_feature: MA Experiment 20000171 PARAMETER Experiment Name: At_42deg_Heat_P Parameter: Tissue Value: Aerial
  misc_feature: MA Experiment ID: 20000173 Result: Down-regulated in Transcription
  misc_feature: MA Experiment 20000173 PARAMETER Experiment Name: At_42deg_Heat_P Parameter: Age (day) Value: 14
  misc_feature: MA Experiment 20000173 PARAMETER Experiment Name: At_42deg_Heat_P Parameter: Organism Value: A. thaliana
  misc_feature: MA Experiment 20000173 PARAMETER Experiment Name: At_42deg_Heat_P Parameter: Plant Line Value: WS
  misc_feature: MA Experiment 20000173 PARAMETER Experiment Name: At_42deg_Heat_P Parameter: Temperature (deg C) Value: 42 vs. 22
  misc_feature: MA Experiment 20000173 PARAMETER Experiment Name: At_42deg_Heat_P Parameter: Timepoint (hr) Value: 6
  misc_feature: MA Experiment 20000173 PARAMETER Experiment Name: At_42deg_Heat_P Parameter: Tissue Value: Aerial
  misc_feature: MA Experiment ID: 20000227 Result: Down-regulated in Transcription
  misc_feature: MA Experiment 20000227 PARAMETER Experiment Name: At_Root-Tips-vs-Tops_P Parameter: Tissue Value: Root Tips vs. Root Tops
  misc_feature: MA Experiment ID: 20000264 Result: Up-regulated in Transcription
  misc_feature: MA Experiment 20000264 PARAMETER Experiment Name: At_Open_Flower_P Parameter: Age (day) Value: 21
  misc_feature: MA Experiment 20000264 PARAMETER Experiment Name: At_Open_Flower_P Parameter: Plant Line Value: WS
  misc_feature: MA Experiment 20000264 PARAMETER Experiment Name: At_Open_Flower_P Parameter: Tissue Value: Open Flower vs. Whole Plant
  misc_feature: MA Experiment ID: 20000265 Result: Up-regulated in Transcription
  misc_feature: MA Experiment 20000265 PARAMETER Experiment Name: At_Open_Flower_P Parameter: Age (day) Value: 21
  misc_feature: MA Experiment 20000265 PARAMETER Experiment Name: At_Open_Flower_P Parameter: Plant Line Value: WS
  misc_feature: MA Experiment 20000265 PARAMETER Experiment Name: At_Open_Flower_P Parameter: Tissue Value: Closed Flower vs. Whole Plant
  misc_feature: MA Experiment ID: 20000267 Result: Up-regulated in Transcription
  misc_feature: MA Experiment 20000267 PARAMETER Experiment Name: At_Drought_P Parameter: Age (day) Value: 7
  misc_feature: MA Experiment 20000267 PARAMETER Experiment Name: At_Drought_P Parameter: Organism Value: A. thaliana
  misc_feature: MA Experiment 20000267 PARAMETER Experiment Name: At_Drought_P Parameter: Plant Line Value: WS
  misc_feature: MA Experiment 20000267 PARAMETER Experiment Name: At_Drought_P Parameter: Timepoint (hr) Value: 6
  misc_feature: MA Experiment 20000267 PARAMETER Experiment Name: At_Drought_P Parameter: Tissue Value: Whole Plant
  misc_feature: MA Experiment 20000267 PARAMETER Experiment Name: At_Drought_P Parameter: Treatment Value: Drought vs. No Drought
  misc_feature: MA Experiment ID: 20000286 Result: Up-regulated in Transcription
  misc_feature: MA Experiment 20000286 PARAMETER Experiment Name: At_Open_Flower_P Parameter: Age (day) Value: 21
  misc_feature: MA Experiment 20000286 PARAMETER Experiment Name: At_Open_Flower_P Parameter: Plant Line Value: WS
  misc_feature: MA Experiment 20000286 PARAMETER Experiment Name: At_Open_Flower_P Parameter: Tissue Value: Half Open vs. Whole Plant
  misc_feature: MA Experiment ID: 20000308 Result: Up-regulated in Transcription
  misc_feature: MA Experiment 20000308 PARAMETER Experiment Name: At_100mM_NaCl__P Parameter: Age (day) Value: 17
  misc_feature: MA Experiment 20000308 PARAMETER Experiment Name: At_100mM_NaCl__P Parameter: Organism Value: A. thaliana
  misc_feature: MA Experiment 20000308 PARAMETER Experiment Name: At_100mM_NaCl__P Parameter: Plant Line Value: WS
  misc_feature: MA Experiment 20000308 PARAMETER Experiment Name: At_100mM_NaCl__P Parameter: Timepoint (hr) Value: 72
  misc_feature: MA Experiment 20000308 PARAMETER Experiment Name: At_100mM_NaCl__P Parameter: Tissue Value: Whole Plant
  misc_feature: MA Experiment 20000308 PARAMETER Experiment Name: At_100mM_NaCl__P Parameter: Treatment Value: 100mM NaCl vs. No Treatment
  misc_feature: MA Experiment ID: 20000437 Result: Up-regulated in Transcription
  misc_feature: MA Experiment 20000437 PARAMETER Experiment Name: At_Drought_P Parameter: Age (day) Value: 8
  misc_feature: MA Experiment 20000437 PARAMETER Experiment Name: At_Drought_P Parameter: Organism Value: A. thaliana
  misc_feature: MA Experiment 20000437 PARAMETER Experiment Name: At_Drought_P Parameter: Plant Line Value: WS
  misc_feature: MA Experiment 20000437 PARAMETER Experiment Name: At_Drought_P Parameter: Timepoint (hr) Value: 24
  misc_feature: MA Experiment 20000437 PARAMETER Experiment Name: At_Drought_P Parameter: Tissue Value: Whole Plant
  misc_feature: MA Experiment 20000437 PARAMETER Experiment Name: At_Drought_P Parameter: Treatment Value: Drought vs. No Drought
  misc_feature: MA Experiment ID: 20000438 Result: Up-regulated in Transcription
  misc_feature: MA Experiment 20000438 PARAMETER Experiment Name: At_Shoots__P Parameter: Age (day) Value: 14
  misc_feature: MA Experiment 20000438 PARAMETER Experiment Name: At_Shoots__P Parameter: Tissue Value: Shoots vs. Whole Plant
  misc_feature: MA Experiment ID: 20000439 Result: Up-regulated in Transcription
  misc_feature: MA Experiment 20000439 PARAMETER Experiment Name: At_Roots__P Parameter: Age (day) Value: 14 vs. 21
  misc_feature: MA Experiment 20000439 PARAMETER Experiment Name: At_Roots__P Parameter: Organism Value: A. thaliana
  misc_feature: MA Experiment 20000439 PARAMETER Experiment Name: At_Roots__P Parameter: Tissue Value: Roots vs. Whole Plant
  misc_feature: MA Experiment ID: 20000445 Result: Up-regulated in Transcription
  misc_feature: MA Experiment 20000445 PARAMETER Experiment Name: At_100uM_NAA__P Parameter: Age (day) Value: 14
  misc_feature: MA Experiment 20000445 PARAMETER Experiment Name: At_100uM_NAA__P Parameter: Organism Value: A. thaliana
  misc_feature: MA Experiment 20000445 PARAMETER Experiment Name: At_100uM_NAA__P Parameter: Plant Line Value: WS
  misc_feature: MA Experiment 20000445 PARAMETER Experiment Name: At_100uM_NAA__P Parameter: Timepoint (hr) Value: 6
  misc_feature: MA Experiment 20000445 PARAMETER Experiment Name: At_100uM_NAA__P Parameter: Tissue Value: Aerial
  misc_feature: MA Experiment 20000445 PARAMETER Experiment Name: At_100uM_NAA__P Parameter: Treatment Value: 100uM NAA vs. No Treatment
  misc_feature: MA Experiment ID: 20000452 Result: Up-regulated in Transcription
  misc_feature: MA Experiment 20000452 PARAMETER Experiment Name: At_CS6879_Shoots-Roots_P Parameter: Age (day) Value: 14
  misc_feature: MA Experiment 20000452 PARAMETER Experiment Name: At_CS6879_Shoots-Roots_P Parameter: Organism Value: A. thaliana
  misc_feature: MA Experiment 20000452 PARAMETER Experiment Name: At_CS6879_Shoots-Roots_P Parameter: Plant Line Value: CS6879 vs. WS
  misc_feature: MA Experiment 20000452 PARAMETER Experiment Name: At_CS6879_Shoots-Roots_P Parameter: Tissue Value: Shoots
  misc_feature: MA Experiment ID: 20000453 Result: Up-regulated in Transcription
  misc_feature: MA Experiment 20000453 PARAMETER Experiment Name: At_100uM_ABA_P Parameter: Age (day) Value: 15
  misc_feature: MA Experiment 20000453 PARAMETER Experiment Name: At_100uM_ABA_P Parameter: Organism Value: A. thaliana
  misc_feature: MA Experiment 20000453 PARAMETER Experiment Name: At_100uM_ABA_P Parameter: Plant Line Value: WS
  misc_feature: MA Experiment 20000453 PARAMETER Experiment Name: At_100uM_ABA_P Parameter: Timepoint (hr) Value: 24
  misc_feature: MA Experiment 20000453 PARAMETER Experiment Name: At_100uM_ABA_P Parameter: Tissue Value: Aerial
  misc_feature: MA Experiment 20000453 PARAMETER Experiment Name: At_100uM_ABA_P Parameter: Treatment Value: 100uM ABA vs. No Treatment
  misc_feature: MA Experiment ID: 20000455 Result: Up-regulated in Transcription
  misc_feature: MA Experiment 20000455 PARAMETER Experiment Name: At_100uM_ABA_P Parameter: Age (day) Value: 16
  misc_feature: MA Experiment 20000455 PARAMETER Experiment Name: At_100uM_ABA_P Parameter: Organism Value: A. thaliana
  misc_feature: MA Experiment 20000455 PARAMETER Experiment Name: At_100uM_ABA_P Parameter: Plant Line Value: WS
  misc_feature: MA Experiment 20000455 PARAMETER Experiment Name: At_100uM_ABA_P Parameter: Timepoint (hr) Value: 48
  misc_feature: MA Experiment 20000455 PARAMETER Experiment Name: At_100uM_ABA_P Parameter: Tissue Value: Aerial
  misc_feature: MA Experiment 20000455 PARAMETER Experiment Name: At_100uM_ABA_P Parameter: Treatment Value: 100uM ABA vs. No Treatment
  misc_feature: MA Experiment ID: 20000495 Result: Down-regulated in Transcription
  misc_feature: MA Experiment 20000495 PARAMETER Experiment Name: At_Guard_Cells_P Parameter: Harvest Date Value: 8/2/2002
  misc_feature: MA Experiment 20000495 PARAMETER Experiment Name: At_Guard_Cells_P Parameter: Organism Value: A. thaliana
  misc_feature: MA Experiment 20000495 PARAMETER Experiment Name: At_Guard_Cells_P Parameter: Tissue Value: Guard Cells vs. Leaves
  misc_feature: MA Experiment ID: 20000506 Result: Up-regulated in Transcription
  misc_feature: MA Experiment 20000506 PARAMETER Experiment Name: At_Wounding_P Parameter: Organism Value: A. thaliana
  misc_feature: MA Experiment 20000506 PARAMETER Experiment Name: At_Wounding_P Parameter: Plant Line Value: WS
  misc_feature: MA Experiment 20000506 PARAMETER Experiment Name: At_Wounding_P Parameter: Timepoint (hr) Value: 6
  misc_feature: MA Experiment 20000506 PARAMETER Experiment Name: At_Wounding_P Parameter: Tissue Value: Aerial
  misc_feature: MA Experiment 20000506 PARAMETER Experiment Name: At_Wounding_P Parameter: Treatment Value: Wounding vs. No Wounding
  misc_feature: MA Experiment ID: 20000573 Result: Down-regulated in Transcription
  misc_feature: MA Experiment 20000573 PARAMETER Experiment Name: At_100uM_ABA_Mutants__P Parameter: Organism Value: A. thaliana
  misc_feature: MA Experiment 20000573 PARAMETER Experiment Name: At_100uM_ABA_Mutants__P Parameter: Plant Line Value: CS22 vs. Ler wt
  misc_feature: MA Experiment 20000573 PARAMETER Experiment Name: At_100uM_ABA_Mutants__P Parameter: Timepoint (hr) Value: N/A
  misc_feature: MA Experiment 20000573 PARAMETER Experiment Name: At_100uM_ABA_Mutants__P Parameter: Tissue Value: Whole Plant
  misc_feature: MA Experiment 20000573 PARAMETER Experiment Name: At_100uM_ABA_Mutants__P Parameter: Treatment Value: None
  misc_feature: MA Experiment ID: 20000574 Result: Down-regulated in Transcription
  misc_feature: MA Experiment 20000574 PARAMETER Experiment Name: At_100uM_ABA_Mutants__P Parameter: Organism Value: A. thaliana
  misc_feature: MA Experiment 20000574 PARAMETER Experiment Name: At_100uM_ABA_Mutants__P Parameter: Plant Line Value: CS23 vs. Ler wt
  misc_feature: MA Experiment 20000574 PARAMETER Experiment Name: At_100uM_ABA_Mutants__P Parameter: Timepoint (hr) Value: N/A
  misc_feature: MA Experiment 20000574 PARAMETER Experiment Name: At_100uM_ABA_Mutants__P Parameter: Tissue Value: Whole Plant
  misc_feature: MA Experiment 20000574 PARAMETER Experiment Name: At_100uM_ABA_Mutants__P Parameter: Treatment Value: None
  misc_feature: MA Experiment ID: 20000575 Result: Up-regulated in Transcription
  misc_feature: MA Experiment 20000575 PARAMETER Experiment Name: At_100uM_ABA_Mutants__P Parameter: Organism Value: A. thaliana
  misc_feature: MA Experiment 20000575 PARAMETER Experiment Name: At_100uM_ABA_Mutants__P Parameter: Plant Line Value: CS22
  misc_feature: MA Experiment 20000575 PARAMETER Experiment Name: At_100uM_ABA_Mutants__P Parameter: Timepoint (hr) Value: 6
  misc_feature: MA Experiment 20000575 PARAMETER Experiment Name: At_100uM_ABA_Mutants__P Parameter: Tissue Value: Whole Plant
  misc_feature: MA Experiment 20000575 PARAMETER Experiment Name: At_100uM_ABA_Mutants__P Parameter: Treatment Value: 1uM ABA vs. No Treatment
  misc_feature: MA Experiment ID: 20000794 Result: Up-regulated in Transcription
  misc_feature: MA Experiment 20000794 PARAMETER Experiment Name: At_Petals_P Parameter: Age (day) Value: 23-25 days
  misc_feature: MA Experiment 20000794 PARAMETER Experiment Name: At_Petals_P Parameter: Plant Line Value: WS
  misc_feature: MA Experiment 20000794 PARAMETER Experiment Name: At_Petals_P Parameter: Tissue Value: Petals vs. Whole plant
  misc_feature: MA Experiment ID: 20001247 Result: Up-regulated in Transcription
  misc_feature: MA Experiment 20001247 PARAMETER Experiment Name: At_Far-red-induction_P Parameter: Age (day) Value: 7
  misc_feature: MA Experiment 20001247 PARAMETER Experiment Name: At_Far-red-induction_P Parameter: Light Value: Far-red vs. White
  misc_feature: MA Experiment 20001247 PARAMETER Experiment Name: At_Far-red-induction_P Parameter: Organism Value: A. thaliana
  misc_feature: MA Experiment 20001247 PARAMETER Experiment Name: At_Far-red-induction_P Parameter: Plant Line Value: Columbia
  misc_feature: MA Experiment 20001247 PARAMETER Experiment Name: At_Far-red-induction_P Parameter: Timepoint (hr) Value: 1
  misc_feature: MA Experiment 20001247 PARAMETER Experiment Name: At_Far-red-induction_P Parameter: Tissue Value: Whole Plant
  misc_feature: MA Experiment ID: 20001248 Result: Up-regulated in Transcription
  misc_feature: MA Experiment 20001248 PARAMETER Experiment Name: At_Far-red-induction_P Parameter: Age (day) Value: 7
  misc_feature: MA Experiment 20001248 PARAMETER Experiment Name: At_Far-red-induction_P Parameter: Light Value: Far-red vs. White
  misc_feature: MA Experiment 20001248 PARAMETER Experiment Name: At_Far-red-induction_P Parameter: Organism Value: A. thaliana
  misc_feature: MA Experiment 20001248 PARAMETER Experiment Name: At_Far-red-induction_P Parameter: Plant Line Value: Columbia
  misc_feature: MA Experiment 20001248 PARAMETER Experiment Name: At_Far-red-induction_P Parameter: Timepoint (hr) Value: 4
  misc_feature: MA Experiment 20001248 PARAMETER Experiment Name: At_Far-red-induction_P Parameter: Tissue Value: Whole Plant
  misc_feature: MA Experiment ID: 20001450 Result: Up-regulated in Transcription
  misc_feature: MA Experiment 20001450 PARAMETER Experiment Name: At_Far-red-induction_P Parameter: Age (day) Value: 7
  misc_feature: MA Experiment 20001450 PARAMETER Experiment Name: At_Far-red-induction_P Parameter: Light Value: Far-red vs. White
  misc_feature: MA Experiment 20001450 PARAMETER Experiment Name: At_Far-red-induction_P Parameter: Organism Value: A. thaliana
  misc_feature: MA Experiment 20001450 PARAMETER Experiment Name: At_Far-red-induction_P Parameter: Plant Line Value: Columbia
  misc_feature: MA Experiment 20001450 PARAMETER Experiment Name: At_Far-red-induction_P Parameter: Timepoint (hr) Value: 8
  misc_feature: MA Experiment 20001450 PARAMETER Experiment Name: At_Far-red-induction_P Parameter: Tissue Value: Whole Plant
  misc_feature: MA Experiment ID: 20001451 Result: Down-regulated in Transcription
  misc_feature: MA Experiment 20001451 PARAMETER Experiment Name: At_Far-red-induction_P Parameter: Age (day) Value: 7
  misc_feature: MA Experiment 20001451 PARAMETER Experiment Name: At_Far-red-induction_P Parameter: Light Value: Far-red vs. White
  misc_feature: MA Experiment 20001451 PARAMETER Experiment Name: At_Far-red-induction_P Parameter: Organism Value: A. thaliana
  misc_feature: MA Experiment 20001451 PARAMETER Experiment Name: At_Far-red-induction_P Parameter: Plant Line Value: Columbia
  misc_feature: MA Experiment 20001451 PARAMETER Experiment Name: At_Far-red-induction_P Parameter: Timepoint (hr) Value: 24
  misc_feature: MA Experiment 20001451 PARAMETER Experiment Name: At_Far-red-induction_P Parameter: Tissue Value: Whole Plant
  misc_feature: MA Experiment ID: 20001555 Result: Up-regulated in Transcription
  misc_feature: MA Experiment 20001555 PARAMETER Experiment Name: At_Drought_Soil_Dry_P Parameter: Age (day) Value: 24
  misc_feature: MA Experiment 20001555 PARAMETER Experiment Name: At_Drought_Soil_Dry_P Parameter: Organism Value: A. thaliana
  misc_feature: MA Experiment 20001555 PARAMETER Experiment Name: At_Drought_Soil_Dry_P Parameter: Plant Line Value: WS
  misc_feature: MA Experiment 20001555 PARAMETER Experiment Name: At_Drought_Soil_Dry_P Parameter: Post Timepoint (hr) Value: None
  misc_feature: MA Experiment 20001555 PARAMETER Experiment Name: At_Drought_Soil_Dry_P Parameter: Post-Treatment Value: None
  misc_feature: MA Experiment 20001555 PARAMETER Experiment Name: At_Drought_Soil_Dry_P Parameter: Timepoint (day) Value: 10
  misc_feature: MA Experiment 20001555 PARAMETER Experiment Name: At_Drought_Soil_Dry_P Parameter: Treatment Value: Drought vs. No Drought
  misc_feature: MA Experiment ID: 20001556 Result: Up-regulated in Transcription
  misc_feature: MA Experiment 20001556 PARAMETER Experiment Name: At_Drought_Soil_Dry_P Parameter: Age (day) Value: 26
  misc_feature: MA Experiment 20001556 PARAMETER Experiment Name: At_Drought_Soil_Dry_P Parameter: Organism Value: A. thaliana
  misc_feature: MA Experiment 20001556 PARAMETER Experiment Name: At_Drought_Soil_Dry_P Parameter: Plant Line Value: WS
  misc_feature: MA Experiment 20001556 PARAMETER Experiment Name: At_Drought_Soil_Dry_P Parameter: Post Timepoint (hr) Value: None
  misc_feature: MA Experiment 20001556 PARAMETER Experiment Name: At_Drought_Soil_Dry_P Parameter: Post-Treatment Value: None
  misc_feature: MA Experiment 20001556 PARAMETER Experiment Name: At_Drought_Soil_Dry_P Parameter: Timepoint (day) Value: 12
  misc_feature: MA Experiment 20001556 PARAMETER Experiment Name: At_Drought_Soil_Dry_P Parameter: Treatment Value: Drought vs. No Drought
  misc_feature: MA Experiment ID: 20001557 Result: Up-regulated in Transcription
  misc_feature: MA Experiment 20001557 PARAMETER Experiment Name: At_Drought_Soil_Dry_P Parameter: Age (day) Value: 27
  misc_feature: MA Experiment 20001557 PARAMETER Experiment Name: At_Drought_Soil_Dry_P Parameter: Organism Value: A. thaliana
  misc_feature: MA Experiment 20001557 PARAMETER Experiment Name: At_Drought_Soil_Dry_P Parameter: Plant Line Value: WS
  misc_feature: MA Experiment 20001557 PARAMETER Experiment Name: At_Drought_Soil_Dry_P Parameter: Post Timepoint (hr) Value: 3
  misc_feature: MA Experiment 20001557 PARAMETER Experiment Name: At_Drought_Soil_Dry_P Parameter: Post-Treatment Value: Re-Water vs. No Drought
  misc_feature: MA Experiment 20001557 PARAMETER Experiment Name: At_Drought_Soil_Dry_P Parameter: Timepoint (day) Value: 13
  misc_feature: MA Experiment 20001557 PARAMETER Experiment Name: At_Drought_Soil_Dry_P Parameter: Treatment Value: Drought vs. No Drought
  misc_feature: MA Experiment ID: 20001558 Result: Up-regulated in Transcription
  misc_feature: MA Experiment 20001558 PARAMETER Experiment Name: At_Drought_Soil_Dry_P Parameter: Age (day) Value: 27
  misc_feature: MA Experiment 20001558 PARAMETER Experiment Name: At_Drought_Soil_Dry_P Parameter: Organism Value: A. thaliana
  misc_feature: MA Experiment 20001558 PARAMETER Experiment Name: At_Drought_Soil_Dry_P Parameter: Plant Line Value: WS
  misc_feature: MA Experiment 20001558 PARAMETER Experiment Name: At_Drought_Soil_Dry_P Parameter: Post Timepoint (hr) Value: 6
  misc_feature: MA Experiment 20001558 PARAMETER Experiment Name: At_Drought_Soil_Dry_P Parameter: Post-Treatment Value: Re-Water vs. No Drought
  misc_feature: MA Experiment 20001558 PARAMETER Experiment Name: At_Drought_Soil_Dry_P Parameter: Timepoint (day) Value: 13
  misc_feature: MA Experiment 20001558 PARAMETER Experiment Name: At_Drought_Soil_Dry_P Parameter: Treatment Value: Drought vs. No Drought
  misc_feature: MA Experiment ID: 20001769 Result: Up-regulated in Transcription
  misc_feature: MA Experiment 20001769 PARAMETER Experiment Name: At_Far-red-enriched-adult_P Parameter: Age (day) Value: 28
  misc_feature: MA Experiment 20001769 PARAMETER Experiment Name: At_Far-red-enriched-adult_P Parameter: Light Value: Far-red enriched vs. White
  misc_feature: MA Experiment 20001769 PARAMETER Experiment Name: At_Far-red-enriched-adult_P Parameter: Organism Value: A. thaliana
  misc_feature: MA Experiment 20001769 PARAMETER Experiment Name: At_Far-red-enriched-adult_P Parameter: Plant Line Value: Columbia
  misc_feature: MA Experiment 20001769 PARAMETER Experiment Name: At_Far-red-enriched-adult_P Parameter: Timepoint (hr) Value: 4
  misc_feature: MA Experiment 20001769 PARAMETER Experiment Name: At_Far-red-enriched-adult_P Parameter: Tissue Value: Aerial
  misc_feature: MA Experiment ID: 20001770 Result: Up-regulated in Transcription
  misc_feature: MA Experiment 20001770 PARAMETER Experiment Name: At_Far-red-enriched-adult_P Parameter: Age (day) Value: 28
  misc_feature: MA Experiment 20001770 PARAMETER Experiment Name: At_Far-red-enriched-adult_P Parameter: Light Value: Far-red enriched vs. White
  misc_feature: MA Experiment 20001770 PARAMETER Experiment Name: At_Far-red-enriched-adult_P Parameter: Organism Value: A. thaliana
  misc_feature: MA Experiment 20001770 PARAMETER Experiment Name: At_Far-red-enriched-adult_P Parameter: Plant Line Value: Columbia
  misc_feature: MA Experiment 20001770 PARAMETER Experiment Name: At_Far-red-enriched-adult_P Parameter: Timepoint (hr) Value: 8
  misc_feature: MA Experiment 20001770 PARAMETER Experiment Name: At_Far-red-enriched-adult_P Parameter: Tissue Value: Aerial
  misc_feature: MA Experiment ID: 20001904 Result: Up-regulated in Transcription
  misc_feature: MA Experiment 20001904 PARAMETER Experiment Name: At_Drought_Reproduction_P Parameter: Age (day) Value: 37
  misc_feature: MA Experiment 20001904 PARAMETER Experiment Name: At_Drought_Reproduction_P Parameter: Organism Value: A. thaliana
  misc_feature: MA Experiment 20001904 PARAMETER Experiment Name: At_Drought_Reproduction_P Parameter: Plant Line Value: WS
  misc_feature: MA Experiment 20001904 PARAMETER Experiment Name: At_Drought_Reproduction_P Parameter: Timepoint (day) Value: 7
  misc_feature: MA Experiment 20001904 PARAMETER Experiment Name: At_Drought_Reproduction_P Parameter: Tissue Value: Rosettes
  misc_feature: MA Experiment 20001904 PARAMETER Experiment Name: At_Drought_Reproduction_P Parameter: Treatment Value: Drought vs. No Drought
  misc_feature: MA Experiment ID: 20001905 Result: Up-regulated in Transcription
  misc_feature: MA Experiment 20001905 PARAMETER Experiment Name: At_Drought_Reproduction_P Parameter: Age (day) Value: 40
  misc_feature: MA Experiment 20001905 PARAMETER Experiment Name: At_Drought_Reproduction_P Parameter: Organism Value: A. thaliana
  misc_feature: MA Experiment 20001905 PARAMETER Experiment Name: At_Drought_Reproduction_P Parameter: Plant Line Value: WS
  misc_feature: MA Experiment 20001905 PARAMETER Experiment Name: At_Drought_Reproduction_P Parameter: Timepoint (day) Value: 10
  misc_feature: MA Experiment 20001905 PARAMETER Experiment Name: At_Drought_Reproduction_P Parameter: Tissue Value: Rosettes
  misc_feature: MA Experiment 20001905 PARAMETER Experiment Name: At_Drought_Reproduction_P Parameter: Treatment Value: Drought vs. No Drought
  misc_feature: MA Experiment ID: 20001906 Result: Up-regulated in Transcription
  misc_feature: MA Experiment 20001906 PARAMETER Experiment Name: At_Drought_Reproduction_P Parameter: Age (day) Value: 35
  misc_feature: MA Experiment 20001906 PARAMETER Experiment Name: At_Drought_Reproduction_P Parameter: Organism Value: A. thaliana
  misc_feature: MA Experiment 20001906 PARAMETER Experiment Name: At_Drought_Reproduction_P Parameter: Plant Line Value: WS
  misc_feature: MA Experiment 20001906 PARAMETER Experiment Name: At_Drought_Reproduction_P Parameter: Timepoint (day) Value: 5
  misc_feature: MA Experiment 20001906 PARAMETER Experiment Name: At_Drought_Reproduction_P Parameter: Tissue Value: Siliques
  misc_feature: MA Experiment 20001906 PARAMETER Experiment Name: At_Drought_Reproduction_P Parameter: Treatment Value: Drought vs. No Drought
  misc_feature: MA Experiment ID: 20001908 Result: Up-regulated in Transcription
  misc_feature: MA Experiment 20001908 PARAMETER Experiment Name: At_Drought_Reproduction_P Parameter: Age (day) Value: 40
  misc_feature: MA Experiment 20001908 PARAMETER Experiment Name: At_Drought_Reproduction_P Parameter: Organism Value: A. thaliana
  misc_feature: MA Experiment 20001908 PARAMETER Experiment Name: At_Drought_Reproduction_P Parameter: Plant Line Value: WS
  misc_feature: MA Experiment 20001908 PARAMETER Experiment Name: At_Drought_Reproduction_P Parameter: Timepoint (day) Value: 10
  misc_feature: MA Experiment 20001908 PARAMETER Experiment Name: At_Drought_Reproduction_P Parameter: Tissue Value: Siliques
  misc_feature: MA Experiment 20001908 PARAMETER Experiment Name: At_Drought_Reproduction_P Parameter: Treatment Value: Drought vs. No Drought
  misc_feature: MA Experiment ID: 20001911 Result: Down-regulated in Transcription
  misc_feature: MA Experiment 20001911 PARAMETER Experiment Name: At_Drought_Reproduction_P Parameter: Age (day) Value: 40
  misc_feature: MA Experiment 20001911 PARAMETER Experiment Name: At_Drought_Reproduction_P Parameter: Organism Value: A. thaliana
  misc_feature: MA Experiment 20001911 PARAMETER Experiment Name: At_Drought_Reproduction_P Parameter: Plant Line Value: WS
  misc_feature: MA Experiment 20001911 PARAMETER Experiment Name: At_Drought_Reproduction_P Parameter: Timepoint (day) Value: 10
  misc_feature: MA Experiment 20001911 PARAMETER Experiment Name: At_Drought_Reproduction_P Parameter: Tissue Value: Flowers
  misc_feature: MA Experiment 20001911 PARAMETER Experiment Name: At_Drought_Reproduction_P Parameter: Treatment Value: Drought vs. No Drought
aggtgactcaataaaatcaagtcttttgtttccttttatccaaaaaaaaaaaaaaagtcttgtgtttctcttaggttggttgagaatcatttcatttcaatggaatccaattgtgttcaatttctcggtaacaagaccattctcatcacaggagctcctggttttcttgccaaggttttggtagagaaaatactaaggttgcaaccaaatgtgaagaagatataccttctgctgagagcttccgacgaaaaatcagccatgcaacgcctacgtagtgaggttatggagatcgacctttttaaagtgttgaggaacaatctaggtgaagacaatttgaatgccttggtgcgggaaaaaattgtgccggttccaggtgatatatcgatcgataatttgggattgaaagacaccgatctcatacaacgtatgtggagggagattgatatcataatcaacatcgcagccacaacaaatttcgatgaaagatatgatattggtcttggcatcaacacatttggagcccctgaatgttctcaacttcgccaaaaagtgtgttaaaggacaattgcttctccatgtctcaaccgcgtatrtaagcggtgaacaacctggattgttactagagaaacccattcaagatgggggagactctcagcggggatcgggaactagacatcaatatagaacatgatctaatgaaacaaaaattgaaagagcttcaagattgttctgatgaagagatctcgcaaacaatgaaagattttggaatggcaagggcaaagcttcatggatggccaaatacatatgtattcaccaaagcaatgggagagatgctaatgggaaaatacagagaaaatttgccacttgttatcatacgtccaacaatgattactagtactattgccgaaccattccccggttggattgaagggttgaaaacattagacagtgtgattgttgcatatggtaaaggaaggcttaaatgttttcttgcggattcaaactcagtctttgaccttataccggcagacatggtagtaaatgcgatggttgcagccgcgacagctcattcgggagacaccgggattcaggcaatatatcatgttggttcgtcttgtaagaatccagtcacgtttggacaacttcacgatttcacggctcgttacttcgctaaacgtcctttgattggtcggaatggctcgccaatcatagtggtcaaaggaaccattctgtccactatggctcaattcagcctctacatgacccttcgttacaagcttcctctacagatacttcgattgatcaatatagtttatccatggagtcacggagataactacagtgacctaagccgcaaaatcaagctagctatgcgactagttgagctttaccagccttacttactcttcaagggcatatttgatgatttaaataccgaaagactgcgaatgaaaagaaaggagaatatcaaagagttagatggatcgttcgagttcgatcccaagtccattgattgggacaattatatcacaaacacccacattcctggcctcatcacccatgtgcttaaacaataaattatgctggtaatatgtttggaactattgtgaatctcgtgtgtaatattattaaagaatacgattatatcattctaatcttgtaatttacagtttgtgttggcgtgtaatatcaaaataaataaaaaaaacttattccacaatggataagactttgaatcg

SEQ ID NO: 50041 - protein, 312 aa, Arabidopsis thaliana
  peptide (1)..(312): Ceres Seq. ID no. 15219550
  misc_feature (106)..(310): Pfam Name: Male sterility protein Pfam Description: Male sterility protein
  misc_feature (1)..(309): Homolog of NCBI NO: 7487952 NR Description: male sterility protein 2 homolog T16L1.280 -
  misc_feature (1)..(296): Homolog of NCBI NO: 15242233 NR Description: acyl CoA reductase-related protein [Arabidopsis
  misc_feature (1)..(309): Homolog of NCBI NO: 16323107 NR Description: AT4g33790/T16L1_280 [Arabidopsis thaliana]
  misc_feature (1)..(310): Homolog of NCBI NO: 5020215 NR Description: acyl CoA reductase [Simmondsia chinensis]
  misc_feature (229)..(312): Homolog of NCBI NO: 15229993 NR Description: acyl CoA reductase -related protein [Arabidopsis
  misc_feature (1)..(154): Homolog of NCBI NO: 15229993 NR Description: acyl CoA reductase -related protein [Arabidopsis
  misc_feature (1)..(219): Homolog of NCBI NO: 15229991 NR Description: acyl CoA reductase -related protein [Arabidopsis
  misc_feature (1)..(219): Homolog of NCBI NO: 30692171 NR Description: acyl CoA reductase - protein [Arabidopsis
  misc_feature (1)..(312): Homolog of NCBI NO: 11357157 NR Description: acyl CoA reductase-protein - Arabidopsis thaliana
  misc_feature (1)..(312): Homolog of NCBI NO: 15242260 NR Description: male sterility 2-related protein (emb|CAA68191.1)
MGETLSGDRELDINIEHDLMKQKLKELQDCSDEEISQTMKDFGMARAKLHGWPNTYVFTKAMGEMLMGKYRENLPLVIIRPTMITSTIAEPFPGWIEGLKTLDSVIVAYGKGRLKCFLADSNSVFDLIPADMVVNAMVAAATAHSGDTGIQAIYHVGSSCKNPVTFGQLHDFTARYFAKRPLIGRNGSPIIVVKGTILSTMAQFSLYMTLRYKLPLQILRLINIVYPWSHGDNYSDLSRKIKLAMRLVELYQPYLLFKGIFDDLNTERLRMKRKENIKELDGSFEFDPKSIDWDNYITNTHIPGLITHVLKQ

SEQ ID NO: 50042 - protein, 293 aa, Arabidopsis thaliana
  peptide (1)..(293): Ceres Seq. ID no. 15219551
  misc_feature (87)..(291): Pfam Name: Male sterility protein Pfam Description: Male sterility protein
  misc_feature (1)..(290): Homolog of NCBI NO: 7487952 NR Description: male sterility protein 2 homolog T16L1.280 -
  misc_feature (1)..(277): Homolog of NCBI NO: 15242233 NR Description: acyl CoA reductase-related protein [Arabidopsis
  misc_feature (1)..(290): Homolog of NCBI NO: 16323107 NR Description: AT4g33790/T16L1_280 [Arabidopsis thaliana]
  misc_feature (1)..(291): Homolog of NCBI NO: 5020215 NR Description: acyl CoA reductase [Simmondsia chinensis]
  misc_feature (210)..(293): Homolog of NCBI NO: 15229993 NR Description: acyl CoA reductase -related protein [Arabidopsis
  misc_feature (1)..(135): Homolog of NCBI NO: 15229993 NR Description: acyl CoA reductase -related protein [Arabidopsis
  misc_feature (1)..(200): Homolog of NCBI NO: 15229991 NR Description: acyl CoA reductase -related protein [Arabidopsis
  misc_feature (1)..(200): Homolog of NCBI NO: 30692171 NR Description: acyl CoA reductase - protein [Arabidopsis
  misc_feature (1)..(293): Homolog of NCBI NO: 11357157 NR Description: acyl CoA reductase-protein - Arabidopsis thaliana
  misc_feature (1)..(293): Homolog of NCBI NO: 15242260 NR Description: male sterility 2-related protein (emb|CAA68191.1)
MKQKLKELQDCSDEEISQTMKDFGMARAKLHGWPNTYVFTKAMGEMLMGKYRENLPLVIIRPTMITSTIAEPFPGWIEGLKTLDSVIVAYGKGRLKCFLADSNSVFDLIPADMVVNAMVAAATAHSGDTGIQAIYHVGSSCKNPVTFGQLHDFTARYFAKRPLIGRNGSPIIVVKGTILSTMAQFSLYMTLRYKLPLQILRLINIVYPWSHGDNYSDLSRKIKLAMRLVELYQPYLLFKGIFDDLNTERLRMKRKENIKELDGSFEFDPKSIDWDNYITNTHIPGLITHVLKQ

SEQ ID NO: 50043 - protein, 274 aa, Arabidopsis thaliana
  peptide (1)..(274): Ceres Seq. ID no. 15219552
  misc_feature (68)..(272): Pfam Name: Male sterility protein Pfam Description: Male sterility protein
  misc_feature (1)..(271): Homolog of NCBI NO: 7487952 NR Description: male sterility protein 2 homolog T16L1.280 -
  misc_feature (1)..(258): Homolog of NCBI NO: 15242233 NR Description: acyl CoA reductase-related protein [Arabidopsis
  misc_feature (1)..(271): Homolog of NCBI NO: 16323107 NR Description: AT4g33790/T16L1_280 [Arabidopsis thaliana]
  misc_feature (1)..(272): Homolog of NCBI NO: 5020215 NR Description: acyl CoA reductase [Simmondsia chinensis]
  misc_feature (191)..(274): Homolog of NCBI NO: 15229993 NR Description: acyl CoA reductase -related protein [Arabidopsis
  misc_feature (1)..(116): Homolog of NCBI NO: 15229993 NR Description: acyl CoA reductase -related protein [Arabidopsis
  misc_feature (1)..(181): Homolog of NCBI NO: 15229991 NR Description: acyl CoA reductase -related protein [Arabidopsis
  misc_feature (1)..(181): Homolog of NCBI NO: 30692171 NR Description: acyl CoA reductase - protein [Arabidopsis
  misc_feature (1)..(274): Homolog of NCBI NO: 11357157 NR Description: acyl CoA reductase-protein - Arabidopsis thaliana
  misc_feature (1)..(274): Homolog of NCBI NO: 15242260 NR Description: male sterility 2-related protein (emb|CAA68191.1)
MKDFGMARAKLHGWPNTYVFTKAMGEMLMGKYRENLPLVIIRPTMITSTIAEPFPGWIEGLKTLDSVIVAYGKGRLKCFLADSNSVFDLIPADMVVNAMVAAATAHSGDTGIQAIYHVGSSCKNPVTFGQLHDFTARYFAKRPLIGRNGSPIIVVKGTILSTMAQFSLYMTLRYKLPLQILRLINIVYPWSHGDNYSDLSRKIKLAMRLVELYQPYLLFKGIFDDLNTERLRMKRKENIKELDGSFEFDPKSIDWDNYITNTHIPGLITHVLKQ

SEQ ID NO: 50044 - DNA, 1835 bp, Arabidopsis thaliana; identical to SEQ ID NO: 40183
  misc_feature (1)..(1835): Ceres Seq. ID no. 13487232
  misc_feature: MA Experiment ID: 20000166 Result: Up-regulated in Transcription
  misc_feature: MA Experiment 20000166 PARAMETER Experiment Name: At_100uM_ABA_P Parameter: Age (day) Value: 14
  misc_feature: MA Experiment 20000166 PARAMETER Experiment Name: At_100uM_ABA_P Parameter: Organism Value: A. thaliana
  misc_feature: MA Experiment 20000166 PARAMETER Experiment Name: At_100uM_ABA_P Parameter: Plant Line Value: WS
  misc_feature: MA Experiment 20000166 PARAMETER Experiment Name: At_100uM_ABA_P Parameter: Timepoint (hr) Value: 1
  misc_feature: MA Experiment 20000166 PARAMETER Experiment Name: At_100uM_ABA_P Parameter: Tissue Value: Aerial
  misc_feature: MA Experiment 20000166 PARAMETER Experiment Name: At_100uM_ABA_P Parameter: Treatment Value: 100uM ABA vs. No Treatment
  misc_feature: MA Experiment ID: 20000169 Result: Up-regulated in Transcription
  misc_feature: MA Experiment 20000169 PARAMETER Experiment Name: At_100uM_ABA_P Parameter: Age (day) Value: 14
  misc_feature: MA Experiment 20000169 PARAMETER Experiment Name: At_100uM_ABA_P Parameter: Organism Value: A. thaliana
  misc_feature: MA Experiment 20000169 PARAMETER Experiment Name: At_100uM_ABA_P Parameter: Plant Line Value: WS
  misc_feature: MA Experiment 20000169 PARAMETER Experiment Name: At_100uM_ABA_P Parameter: Timepoint (hr) Value: 6
  misc_feature: MA Experiment 20000169 PARAMETER Experiment Name: At_100uM_ABA_P Parameter: Tissue Value: Aerial
  misc_feature: MA Experiment 20000169 PARAMETER Experiment Name: At_100uM_ABA_P Parameter: Treatment Value: 100uM ABA vs. No Treatment
  misc_feature: MA Experiment ID: 20000180 Result: Up-regulated in Transcription
  misc_feature: MA Experiment 20000180 PARAMETER Experiment Name: At_Germinating_Seeds_P Parameter: Age (hr) Value: 24 vs. 0
  misc_feature: MA Experiment 20000180 PARAMETER Experiment Name: At_Germinating_Seeds_P Parameter: Tissue Value: Germinating Seeds
  misc_feature: MA Experiment ID: 20000182 Result: Up-regulated in Transcription
  misc_feature: MA Experiment 20000182 PARAMETER Experiment Name: At_2mM_SA_P Parameter: Age (day) Value: 14
  misc_feature: MA Experiment 20000182 PARAMETER Experiment Name: At_2mM_SA_P Parameter: Organism Value: A. thaliana
  misc_feature: MA Experiment 20000182 PARAMETER Experiment Name: At_2mM_SA_P Parameter: Plant Line Value: WS
  misc_feature: MA Experiment 20000182 PARAMETER Experiment Name: At_2mM_SA_P Parameter: Timepoint (hr) Value: 6
  misc_feature: MA Experiment 20000182 PARAMETER Experiment Name: At_2mM_SA_P Parameter: Tissue Value: Aerial
  misc_feature: MA Experiment 20000182 PARAMETER Experiment Name: At_2mM_SA_P Parameter: Treatment Value: 2mM SA vs. No Treatment
  misc_feature: MA Experiment ID: 20000184 Result: Down-regulated in Transcription
  misc_feature: MA Experiment 20000184 PARAMETER Experiment Name: At_Shoots__P Parameter: Age (day) Value: 7
  misc_feature: MA Experiment 20000184 PARAMETER Experiment Name: At_Shoots__P Parameter: Tissue Value: Shoots vs. Whole Plant
  misc_feature: MA Experiment ID: 20000211 Result: Up-regulated in Transcription
  misc_feature: MA Experiment 20000211 PARAMETER Experiment Name: At_0.001percent_MeJA__P Parameter: Age (day) Value: 14
  misc_feature: MA Experiment 20000211 PARAMETER Experiment Name: At_0.001percent_MeJA__P Parameter: Organism Value: A. thaliana
  misc_feature: MA Experiment 20000211 PARAMETER Experiment Name: At_0.001percent_MeJA__P Parameter: Plant Line Value: WS
  misc_feature: MA Experiment 20000211 PARAMETER Experiment Name: At_0.001percent_MeJA__P Parameter: Timepoint (hr) Value: 1
  misc_feature: MA Experiment 20000211 PARAMETER Experiment Name: At_0.001percent_MeJA__P Parameter: Tissue Value: Aerial
  misc_feature: MA Experiment 20000211 PARAMETER Experiment Name: At_0.001percent_MeJA__P Parameter: Treatment Value: 0.001percent MeJA vs. No Treatment
  misc_feature: MA Experiment ID: 20000234 Result: Down-regulated in Transcription
  misc_feature: MA Experiment 20000234 PARAMETER Experiment Name: At_Siliques_P Parameter: Age (day) Value: 21
  misc_feature: MA Experiment 20000234 PARAMETER Experiment Name: At_Siliques_P Parameter: Organism Value: A. thaliana
  misc_feature: MA Experiment 20000234 PARAMETER Experiment Name: At_Siliques_P Parameter: Plant Line Value: WS
  misc_feature: MA Experiment 20000234 PARAMETER Experiment Name: At_Siliques_P Parameter: Tissue Value: Less Than 5mm Siliques vs. Whole Plant
  misc_feature: MA Experiment ID: 20000235 Result: Down-regulated in Transcription
  misc_feature: MA Experiment 20000235 PARAMETER Experiment Name: At_Siliques_P Parameter: Age (day) Value: 21
  misc_feature: MA Experiment 20000235 PARAMETER Experiment Name: At_Siliques_P Parameter: Organism Value: A. thaliana
  misc_feature: MA Experiment 20000235 PARAMETER Experiment Name: At_Siliques_P Parameter: Plant Line Value: WS
  misc_feature: MA Experiment 20000235 PARAMETER Experiment Name: At_Siliques_P Parameter: Tissue Value: 5-10mm Siliques vs. Whole Plant
  misc_feature: MA Experiment ID: 20000436 Result: Up-regulated in Transcription
  misc_feature: MA Experiment 20000436 PARAMETER Experiment Name: At_Drought_P Parameter: Age (day) Value: 7
  misc_feature: MA Experiment 20000436 PARAMETER Experiment Name: At_Drought_P Parameter: Organism Value: A. thaliana
  misc_feature: MA Experiment 20000436 PARAMETER Experiment Name: At_Drought_P Parameter: Plant Line Value: WS
  misc_feature: MA Experiment 20000436 PARAMETER Experiment Name: At_Drought_P Parameter: Timepoint (hr) Value: 12
  misc_feature: MA Experiment 20000436 PARAMETER Experiment Name: At_Drought_P Parameter: Tissue Value: Whole Plant
  misc_feature: MA Experiment 20000436 PARAMETER Experiment Name: At_Drought_P Parameter: Treatment Value: Drought vs. No Drought
  misc_feature: MA Experiment ID: 20000437 Result: Up-regulated in Transcription
  misc_feature: MA Experiment 20000437 PARAMETER Experiment Name: At_Drought_P Parameter: Age (day) Value: 8
  misc_feature: MA Experiment 20000437 PARAMETER Experiment Name: At_Drought_P Parameter: Organism Value: A. thaliana
  misc_feature: MA Experiment 20000437 PARAMETER Experiment Name: At_Drought_P Parameter: Plant Line Value: WS
  misc_feature: MA Experiment 20000437 PARAMETER Experiment Name: At_Drought_P Parameter: Timepoint (hr) Value: 24
  misc_feature: MA Experiment 20000437 PARAMETER Experiment Name: At_Drought_P Parameter: Tissue Value: Whole Plant
  misc_feature: MA Experiment 20000437 PARAMETER Experiment Name: At_Drought_P Parameter: Treatment Value: Drought vs. No Drought
  misc_feature: MA Experiment ID: 20000438 Result: Down-regulated in Transcription
  misc_feature: MA Experiment 20000438 PARAMETER Experiment Name: At_Shoots__P Parameter: Age (day) Value: 14
  misc_feature: MA Experiment 20000438 PARAMETER Experiment Name: At_Shoots__P Parameter: Tissue Value: Shoots vs. Whole Plant
  misc_feature: MA Experiment ID: 20000453 Result: Up-regulated in Transcription
  misc_feature: MA Experiment 20000453 PARAMETER Experiment Name: At_100uM_ABA_P Parameter: Age (day) Value: 15
  misc_feature: MA Experiment 20000453 PARAMETER Experiment Name: At_100uM_ABA_P Parameter: Organism Value: A. thaliana
  misc_feature: MA Experiment 20000453 PARAMETER Experiment Name: At_100uM_ABA_P Parameter: Plant Line Value: WS
  misc_feature: MA Experiment 20000453 PARAMETER Experiment Name: At_100uM_ABA_P Parameter: Timepoint (hr) Value: 24
  misc_feature: MA Experiment 20000453 PARAMETER Experiment Name: At_100uM_ABA_P Parameter: Tissue Value: Aerial
  misc_feature: MA Experiment 20000453 PARAMETER Experiment Name: At_100uM_ABA_P Parameter: Treatment Value: 100uM ABA vs. No Treatment
  misc_feature: MA Experiment ID: 20000495 Result: Down-regulated in Transcription
  misc_feature: MA Experiment 20000495 PARAMETER Experiment Name: At_Guard_Cells_P Parameter: Harvest Date Value: 8/2/2002
  misc_feature: MA Experiment 20000495 PARAMETER Experiment Name: At_Guard_Cells_P Parameter: Organism Value: A. thaliana
  misc_feature: MA Experiment 20000495 PARAMETER Experiment Name: At_Guard_Cells_P Parameter: Tissue Value: Guard Cells vs. Leaves
  misc_feature: MA Experiment ID: 20001247 Result: Up-regulated in Transcription
  misc_feature: MA Experiment 20001247 PARAMETER Experiment Name: At_Far-red-induction_P Parameter: Age (day) Value: 7
  misc_feature: MA Experiment 20001247 PARAMETER Experiment Name: At_Far-red-induction_P Parameter: Light Value: Far-red vs. White
  misc_feature: MA Experiment 20001247 PARAMETER Experiment Name: At_Far-red-induction_P Parameter: Organism Value: A. thaliana
  misc_feature: MA Experiment 20001247 PARAMETER Experiment Name: At_Far-red-induction_P Parameter: Plant Line Value: Columbia
  misc_feature: MA Experiment 20001247 PARAMETER Experiment Name: At_Far-red-induction_P Parameter: Timepoint (hr) Value: 1
  misc_feature: MA Experiment 20001247 PARAMETER Experiment Name: At_Far-red-induction_P Parameter: Tissue Value: Whole Plant
  misc_feature: MA Experiment ID: 20001248 Result: Up-regulated in Transcription
  misc_feature: MA Experiment 20001248 PARAMETER Experiment Name: At_Far-red-induction_P Parameter: Age (day) Value: 7
  misc_feature: MA Experiment 20001248 PARAMETER Experiment Name: At_Far-red-induction_P Parameter: Light Value: Far-red vs. White
  misc_feature: MA Experiment 20001248 PARAMETER Experiment Name: At_Far-red-induction_P Parameter: Organism Value: A. thaliana
  misc_feature: MA Experiment 20001248 PARAMETER Experiment Name: At_Far-red-induction_P Parameter: Plant Line Value: Columbia
  misc_feature: MA Experiment 20001248 PARAMETER Experiment Name: At_Far-red-induction_P Parameter: Timepoint (hr) Value: 4
  misc_feature: MA Experiment 20001248 PARAMETER Experiment Name: At_Far-red-induction_P Parameter: Tissue Value: Whole Plant
  misc_feature: MA Experiment ID: 20001450 Result: Up-regulated in Transcription
  misc_feature: MA Experiment 20001450 PARAMETER Experiment Name: At_Far-red-induction_P Parameter: Age (day) Value: 7
  misc_feature: MA Experiment 20001450 PARAMETER Experiment Name: At_Far-red-induction_P Parameter: Light Value: Far-red vs. White
  misc_feature: MA Experiment 20001450 PARAMETER Experiment Name: At_Far-red-induction_P Parameter: Organism Value: A. thaliana
  misc_feature: MA Experiment 20001450 PARAMETER Experiment Name: At_Far-red-induction_P Parameter: Plant Line Value: Columbia
  misc_feature: MA Experiment 20001450 PARAMETER Experiment Name: At_Far-red-induction_P Parameter: Timepoint (hr) Value: 8
  misc_feature: MA Experiment 20001450 PARAMETER Experiment Name: At_Far-red-induction_P Parameter: Tissue Value: Whole Plant
  misc_feature: MA Experiment ID: 20001451 Result: Up-regulated in Transcription
  misc_feature: MA Experiment 20001451 PARAMETER Experiment Name: At_Far-red-induction_P Parameter: Age (day) Value: 7
  misc_feature: MA Experiment 20001451 PARAMETER Experiment Name: At_Far-red-induction_P Parameter: Light Value: Far-red vs. White
  misc_feature: MA Experiment 20001451 PARAMETER Experiment Name: At_Far-red-induction_P Parameter: Organism Value: A. thaliana
  misc_feature: MA Experiment 20001451 PARAMETER Experiment Name: At_Far-red-induction_P Parameter: Plant Line Value: Columbia
  misc_feature: MA Experiment 20001451 PARAMETER Experiment Name: At_Far-red-induction_P Parameter: Timepoint (hr) Value: 24
  misc_feature: MA Experiment 20001451 PARAMETER Experiment Name: At_Far-red-induction_P Parameter: Tissue Value: Whole Plant
  misc_feature: MA Experiment ID: 20001905 Result: Up-regulated in Transcription
  misc_feature: MA Experiment 20001905 PARAMETER Experiment Name: At_Drought_Reproduction_P Parameter: Age (day) Value: 40
  misc_feature: MA Experiment 20001905 PARAMETER Experiment Name: At_Drought_Reproduction_P Parameter: Organism Value: A. thaliana
  misc_feature: MA Experiment 20001905 PARAMETER Experiment Name: At_Drought_Reproduction_P Parameter: Plant Line Value: WS
  misc_feature: MA Experiment 20001905 PARAMETER Experiment Name: At_Drought_Reproduction_P Parameter: Timepoint (day) Value: 10
  misc_feature: MA Experiment 20001905 PARAMETER Experiment Name: At_Drought_Reproduction_P Parameter: Tissue Value: Rosettes
  misc_feature: MA Experiment 20001905 PARAMETER Experiment Name: At_Drought_Reproduction_P Parameter: Treatment Value: Drought vs. No Drought
  misc_feature: MA Experiment ID: 20001906 Result: Down-regulated in Transcription
  misc_feature: MA Experiment 20001906 PARAMETER Experiment Name: At_Drought_Reproduction_P Parameter: Age (day) Value: 35
  misc_feature: MA Experiment 20001906 PARAMETER Experiment Name: At_Drought_Reproduction_P Parameter: Organism Value: A. thaliana
  misc_feature: MA Experiment 20001906 PARAMETER Experiment Name: At_Drought_Reproduction_P Parameter: Plant Line Value: WS
  misc_feature: MA Experiment 20001906 PARAMETER Experiment Name: At_Drought_Reproduction_P Parameter: Timepoint (day) Value: 5
  misc_feature: MA Experiment 20001906 PARAMETER Experiment Name: At_Drought_Reproduction_P Parameter: Tissue Value: Siliques
  misc_feature: MA Experiment 20001906 PARAMETER Experiment Name: At_Drought_Reproduction_P Parameter: Treatment Value: Drought vs. No Drought
  misc_feature: MA Experiment ID: 20001908 Result: Down-regulated in Transcription
  misc_feature: MA Experiment 20001908 PARAMETER Experiment Name: At_Drought_Reproduction_P Parameter: Age (day) Value: 40
  misc_feature: MA Experiment 20001908 PARAMETER Experiment Name: At_Drought_Reproduction_P Parameter: Organism Value: A. thaliana
  misc_feature: MA Experiment 20001908 PARAMETER Experiment Name: At_Drought_Reproduction_P Parameter: Plant Line Value: WS
  misc_feature: MA Experiment 20001908 PARAMETER Experiment Name: At_Drought_Reproduction_P Parameter: Timepoint (day) Value: 10
  misc_feature: MA Experiment 20001908 PARAMETER Experiment Name: At_Drought_Reproduction_P Parameter: Tissue Value: Siliques
  misc_feature: MA Experiment 20001908 PARAMETER Experiment Name: At_Drought_Reproduction_P Parameter: Treatment Value: Drought vs. No Drought

SEQ ID NO: 50045 - protein, 435 aa, Arabidopsis thaliana; identical to SEQ ID NO: 40184
  peptide (1)..(435): Ceres Seq. ID no. 13487233
  misc_feature (21)..(277): Pfam Name: Protein kinase domain Pfam Description: Protein kinase domain
  misc_feature (21)..(277): Pfam Name: Protein kinase domain Pfam Description: Protein kinase domain
  misc_feature (289)..(421): Homolog of NCBI NO: 15218854 NR Description: CBL-interacting protein kinase 18 [Arabidopsis
  misc_feature (289)..(421): Homolog of NCBI NO: 27549573 NR Description: calcineurin B-like-interacting protein kinase
  misc_feature (12)..(292): Homolog of NCBI NO: 27549573 NR Description: calcineurin B-like-interacting protein kinase
  misc_feature (1)..(300): Homolog of NCBI NO: 15218854 NR Description: CBL-interacting protein kinase 18 [Arabidopsis
  misc_feature (292)..(421): Homolog of NCBI NO: 15233981 NR Description: CBL-interacting protein kinase 12 [Arabidopsis
  misc_feature (289)..(421): Homolog of NCBI NO: 15218854 NR Description: CBL-interacting protein kinase 18 [Arabidopsis
  misc_feature (12)..(292): Homolog of NCBI NO: 27549573 NR Description: calcineurin B-like-interacting protein kinase
  misc_feature (292)..(421): Homolog of NCBI NO: 15233981 NR Description: CBL-interacting protein kinase 12 [Arabidopsis
  misc_feature (1)..(435): Homolog of NCBI NO: 15227739 NR Description: CBL-interacting protein kinase 11 [Arabidopsis
  misc_feature (1)..(371): Homolog of NCBI NO: 16226430 NR Description: At2g30360/T9D9.17 [Arabidopsis thaliana]
  misc_feature (17)..(422): Homolog of NCBI NO: 30013673 NR Description: Avr9/Cf-9 rapidly elicited protein 216 [Nicotiana
  misc_feature (17)..(428): Homolog of NCBI NO: 15241067 NR Description: CBL-interacting protein kinase 14 [Arabidopsis
  misc_feature (17)..(306): Homolog of NCBI NO: 15233981 NR Description: CBL-interacting protein kinase 12 [Arabidopsis
  misc_feature (1)..(300): Homolog of NCBI NO: 15218854 NR Description: CBL-interacting protein kinase 18 [Arabidopsis
  misc_feature (289)..(421): Homolog of NCBI NO: 27549573 NR Description: calcineurin B-like-interacting protein kinase
  misc_feature (17)..(306): Homolog of NCBI NO: 15233981 NR Description: CBL-interacting protein kinase 12 [Arabidopsis
  misc_feature (17)..(428): Homolog of NCBI NO: 15241067 NR Description: CBL-interacting protein kinase 14 [Arabidopsis
  misc_feature (17)..(422): Homolog of NCBI NO: 30013673 NR Description: Avr9/Cf-9 rapidly elicited protein 216 [Nicotiana
  misc_feature (1)..(371): Homolog of NCBI NO: 16226430 NR Description: At2g30360/T9D9.17 [Arabidopsis thaliana]
  misc_feature (1)..(435): Homolog of NCBI NO: 15227739 NR Description: CBL-interacting protein kinase 11 [Arabidopsis

SEQ ID NO: 50046 - protein, 362 aa, Arabidopsis thaliana; identical to SEQ ID NO: 40185
  peptide (1)..(362): Ceres Seq. ID no. 13487234
  misc_feature (1)..(204): Pfam Name: Protein kinase domain Pfam Description: Protein kinase domain
  misc_feature (1)..(204): Pfam Name: Protein kinase domain Pfam Description: Protein kinase domain
  misc_feature (216)..(348): Homolog of NCBI NO: 15218854 NR Description: CBL-interacting protein kinase 18 [Arabidopsis
  misc_feature (216)..(348): Homolog of NCBI NO: 27549573 NR Description: calcineurin B-like-interacting protein kinase
  misc_feature (1)..(219): Homolog of NCBI NO: 27549573 NR Description: calcineurin B-like-interacting protein kinase
  misc_feature (1)..(227): Homolog of NCBI NO: 15218854 NR Description: CBL-interacting protein kinase 18 [Arabidopsis
  misc_feature (219)..(348): Homolog of NCBI NO: 15233981 NR Description: CBL-interacting protein kinase 12 [Arabidopsis
  misc_feature (216)..(348): Homolog of NCBI NO: 15218854 NR Description: CBL-interacting protein kinase 18 [Arabidopsis
  misc_feature (1)..(219): Homolog of NCBI NO: 27549573 NR Description: calcineurin B-like-interacting protein kinase
  misc_feature (219)..(348): Homolog of NCBI NO: 15233981 NR Description: CBL-interacting protein kinase 12 [Arabidopsis
  misc_feature (1)..(362): Homolog of NCBI NO: 15227739 NR Description: CBL-interacting protein kinase 11 [Arabidopsis
  misc_feature (1)..(298): Homolog of NCBI NO: 16226430 NR Description: At2g30360/T9D9.17 [Arabidopsis thaliana]
  misc_feature (1)..(349): Homolog of NCBI NO: 30013673 NR Description: Avr9/Cf-9 rapidly elicited protein 216 [Nicotiana
  misc_feature (1)..(355): Homolog of NCBI NO: 15241067 NR Description: CBL-interacting protein kinase 14 [Arabidopsis
  misc_feature (1)..(233): Homolog of NCBI NO: 15233981 NR Description: CBL-interacting protein kinase 12 [Arabidopsis
  misc_feature (1)..(227): Homolog of NCBI NO: 15218854 NR Description: CBL-interacting protein kinase 18 [Arabidopsis
  misc_feature (216)..(348): Homolog of NCBI NO: 27549573 NR Description: calcineurin B-like-interacting protein kinase
  misc_feature (1)..(233): Homolog of NCBI NO: 15233981 NR Description: CBL-interacting protein kinase 12 [Arabidopsis
  misc_feature (1)..(355): Homolog of NCBI NO: 15241067 NR Description: CBL-interacting protein kinase 14 [Arabidopsis
  misc_feature (1)..(349): Homolog of NCBI NO: 30013673 NR Description: Avr9/Cf-9 rapidly elicited protein 216 [Nicotiana
  misc_feature (1)..(298): Homolog of NCBI NO: 16226430 NR Description: At2g30360/T9D9.17 [Arabidopsis thaliana]
  misc_feature (1)..(362): Homolog of NCBI NO: 15227739 NR Description: CBL-interacting protein kinase 11 [Arabidopsis

SEQ ID NO: 50047 - protein, 347 aa, Arabidopsis thaliana; identical to SEQ ID NO: 40186
  peptide (1)..(347): Ceres Seq. ID no. 13487235
  misc_feature (1)..(189): Pfam Name: Protein kinase domain Pfam Description: Protein kinase domain
  misc_feature (1)..(189): Pfam Name: Protein kinase domain Pfam Description: Protein kinase domain
  misc_feature (201)..(333): Homolog of NCBI NO: 15218854 NR Description: CBL-interacting protein kinase 18 [Arabidopsis
  misc_feature (201)..(333): Homolog of NCBI NO: 27549573 NR Description: calcineurin B-like-interacting protein kinase
  misc_feature (1)..(204): Homolog of NCBI NO: 27549573 NR Description: calcineurin B-like-interacting protein kinase
  misc_feature (1)..(212): Homolog of NCBI NO: 15218854 NR Description: CBL-interacting protein kinase 18 [Arabidopsis
  misc_feature (204)..(333): Homolog of NCBI NO: 15233981 NR Description: CBL-interacting protein kinase 12 [Arabidopsis
  misc_feature (201)..(333): Homolog of NCBI NO: 15218854 NR Description: CBL-interacting protein kinase 18 [Arabidopsis
  misc_feature (1)..(204): Homolog of NCBI NO: 27549573 NR Description: calcineurin B-like-interacting protein kinase
  misc_feature (204)..(333): Homolog of NCBI NO: 15233981 NR Description: CBL-interacting protein kinase 12 [Arabidopsis
  misc_feature (1)..(347): Homolog of NCBI NO: 15227739 NR Description: CBL-interacting protein kinase 11 [Arabidopsis
  misc_feature (1)..(283): Homolog of NCBI NO: 16226430 NR Description: At2g30360/T9D9.17 [Arabidopsis thaliana]
  misc_feature (1)..(334): Homolog of NCBI NO: 30013673 NR Description: Avr9/Cf-9 rapidly elicited protein 216 [Nicotiana
  misc_feature (1)..(340): Homolog of NCBI NO: 15241067 NR Description: CBL-interacting protein kinase 14 [Arabidopsis
  misc_feature (1)..(218): Homolog of NCBI NO: 15233981 NR Description: CBL-interacting protein kinase 12 [Arabidopsis
  misc_feature (1)..(212): Homolog of NCBI NO: 15218854 NR Description: CBL-interacting protein kinase 18 [Arabidopsis
  misc_feature (201)..(333): Homolog of NCBI NO: 27549573 NR Description: calcineurin B-like-interacting protein kinase
  misc_feature (1)..(218): Homolog of NCBI NO: 15233981 NR Description: CBL-interacting protein kinase 12 [Arabidopsis
  misc_feature (1)..(340): Homolog of NCBI NO: 15241067 NR Description: CBL-interacting protein kinase 14 [Arabidopsis
  misc_feature (1)..(334): Homolog of NCBI NO: 30013673 NR Description: Avr9/Cf-9 rapidly elicited protein 216 [Nicotiana
  misc_feature (1)..(283): Homolog of NCBI NO: 16226430 NR Description: At2g30360/T9D9.17 [Arabidopsis thaliana]
  misc_feature (1)..(347): Homolog of NCBI NO: 15227739 NR Description: CBL-interacting protein kinase 11 [Arabidopsis

SEQ ID NO: 50048 - DNA, 957 bp, Arabidopsis thaliana
  misc_feature (1)..(957): Ceres Seq. ID no. 13575346
  misc_feature: MA Experiment ID: 20000180 Result: Up-regulated in Transcription
  misc_feature: MA Experiment 20000180 PARAMETER Experiment Name: At_Germinating_Seeds_P Parameter: Age (hr) Value: 24 vs. 0
  misc_feature: MA Experiment 20000180 PARAMETER Experiment Name: At_Germinating_Seeds_P Parameter: Tissue Value: Germinating Seeds
  misc_feature: MA Experiment ID: 20000265 Result: Up-regulated in Transcription
  misc_feature: MA Experiment 20000265 PARAMETER Experiment Name: At_Open_Flower_P Parameter: Age (day) Value: 21
  misc_feature: MA Experiment 20000265 PARAMETER Experiment Name: At_Open_Flower_P Parameter: Plant Line Value: WS
  misc_feature: MA Experiment 20000265 PARAMETER Experiment Name: At_Open_Flower_P Parameter: Tissue Value: Closed Flower vs. Whole Plant
  misc_feature: MA Experiment ID: 20000436 Result: Down-regulated in Transcription
  misc_feature: MA Experiment 20000436 PARAMETER Experiment Name: At_Drought_P Parameter: Age (day) Value: 7
  misc_feature: MA Experiment 20000436 PARAMETER Experiment Name: At_Drought_P Parameter: Organism Value: A. thaliana
  misc_feature: MA Experiment 20000436 PARAMETER Experiment Name: At_Drought_P Parameter: Plant Line Value: WS
  misc_feature: MA Experiment 20000436 PARAMETER Experiment Name: At_Drought_P Parameter: Timepoint (hr) Value: 12
  misc_feature: MA Experiment 20000436 PARAMETER Experiment Name: At_Drought_P Parameter: Tissue Value: Whole Plant
  misc_feature: MA Experiment 20000436 PARAMETER Experiment Name: At_Drought_P Parameter: Treatment Value: Drought vs. No Drought
  misc_feature: MA Experiment ID: 20000438 Result: Up-regulated in Transcription
  misc_feature: MA Experiment 20000438 PARAMETER Experiment Name: At_Shoots__P Parameter: Age (day) Value: 14
  misc_feature: MA Experiment 20000438 PARAMETER Experiment Name: At_Shoots__P Parameter: Tissue Value: Shoots vs. Whole Plant
  misc_feature: MA Experiment ID: 20001248 Result: Down-regulated in Transcription
  misc_feature: MA Experiment 20001248 PARAMETER Experiment Name: At_Far-red-induction_P Parameter: Age (day) Value: 7
  misc_feature: MA Experiment 20001248 PARAMETER Experiment Name: At_Far-red-induction_P Parameter: Light Value: Far-red vs. White
  misc_feature: MA Experiment 20001248 PARAMETER Experiment Name: At_Far-red-induction_P Parameter: Organism Value: A. thaliana
  misc_feature: MA Experiment 20001248 PARAMETER Experiment Name: At_Far-red-induction_P Parameter: Plant Line Value: Columbia
  misc_feature: MA Experiment 20001248 PARAMETER Experiment Name: At_Far-red-induction_P Parameter: Timepoint (hr) Value: 4
  misc_feature: MA Experiment 20001248 PARAMETER Experiment Name: At_Far-red-induction_P Parameter: Tissue Value: Whole Plant
  misc_feature: MA Experiment ID: 20001450 Result: Down-regulated in Transcription
  misc_feature: MA Experiment 20001450 PARAMETER Experiment Name: At_Far-red-induction_P Parameter: Age (day) Value: 7
  misc_feature: MA Experiment 20001450 PARAMETER Experiment Name: At_Far-red-induction_P Parameter: Light Value: Far-red vs. White
  misc_feature: MA Experiment 20001450 PARAMETER Experiment Name: At_Far-red-induction_P Parameter: Organism Value: A. thaliana
  misc_feature: MA Experiment 20001450 PARAMETER Experiment Name: At_Far-red-induction_P Parameter: Plant Line Value: Columbia
  misc_feature: MA Experiment 20001450 PARAMETER Experiment Name: At_Far-red-induction_P Parameter: Timepoint (hr) Value: 8
  misc_feature: MA Experiment 20001450 PARAMETER Experiment Name: At_Far-red-induction_P Parameter: Tissue Value: Whole Plant
atgactttcctcttatcaagaacatttatttctctcactctcagaccttcttgttcgatttccatggcgaatttaacgacgaacgctaaaactcgcctgagaggtgttgtattcgatatggacggaaccctgactgttccggtcatcgatttcgccgcaatgtatagagctgttcttggtgaagatgcttacaagcgaatcaaagcagagagccctagtgggattgatattctgcatcatattgagtcgtggagtcctgataaacagcagaaggcgtatgaaatcattgctgattatgagaaacaaggaatagataagcttcaaatcatgcctggtactgctgaactatgtggcttccttgattccaaaaagataaagagggggctaattacacgcaatgttcaaaaggcaatcgacatcttccatcaacgttttgaggttatcttttctccagcactaggcagagagtttcgtccatataaaccaaacccagacccgctgttgcatatatgttctacatgggacatccaacctaatgaagtcatgatggttggtgacagcttaaaagatgatatagcatgtgggaaacgagctggagccttcacttgcttgctagatgaaaccggaaggtatggaccagacgatttttctgtttccggtctgcaacctgattttaaggttgattccttgtccaaaatccagaacctattggagacgaacttcgacctgaacccgtagtttttccaagttcctcatcttgtagtttcagtgaccaaattagtgtcctactcaacacagtatctgttcaggatagccataaatgtcaaaccacggaattctatgcactggctatctttaagttgcacaattgtgtccctgcatggtcgtctagcgaacatgtgtgtgagggcaaacattgttgtttgttaaatccaaaatttcaagatttttaatatc

SEQ ID NO: 50049 - protein, 245 aa, Arabidopsis thaliana
  peptide (1)..(245): Ceres Seq. ID no. 13575347
  misc_feature (33)..(208): Pfam Name: haloacid dehalogenase-like hydrolase Pfam Description: haloacid dehalogenase-like hydrolase
  misc_feature (37)..(214): Homolog of NCBI NO: 23104575 NR Description: hypothetical protein [Azotobacter vinelandii]
  misc_feature (37)..(239): Homolog of NCBI NO: 23056049 NR Description: hypothetical protein [Geobacter metallireducens]
  misc_feature (33)..(206): Homolog of NCBI NO: 23470846 NR Description: hypothetical protein [Pseudomonas syringae pv.
  misc_feature (22)..(215): Homolog of NCBI NO: 24375526 NR Description: hydrolase, haloacid dehalogenase-like family
  misc_feature (33)..(206): Homolog of NCBI NO: 26991442 NR Description: hydrolase, haloacid dehalogenase-like family
  misc_feature (37)..(238): Homolog of NCBI NO: 39995800 NR Description: HAD-superfamily hydrolase, subfamily IA, variant
  misc_feature (33)..(205): Homolog of NCBI NO: 6324705 NR Description: Hypothetical ORF; Yor131cp [Saccharomyces
  misc_feature (8)..(245): Homolog of NCBI NO: 25408252 NR Description: hypothetical protein At2g33250 [imported] -
  misc_feature (22)..(245): Homolog of NCBI NO: 30685622 NR Description: haloacid dehalogenase-like hydrolase family
  misc_feature (1)..(245): Homolog of NCBI NO: 20196855 NR Description: unknown protein [Arabidopsis thaliana]
MTFLLSRTFISLTLRPSCSISMANLTTNAKTRLRGVVFDMDGTLTVPVIDFAAMYRAVLGEDAYKRIKAESPSGIDILHHIESWSPDKQQKAYEIIADYEKQGIDKLQIMPGTAELCGFLDSKKIKRGLITRNVQKAIDIFHQRFEVIFSPALGREFRPYKPNPDPLLHICSTWDIQPNEVMMVGDSLKDDIACGKRAGAFTCLLDETGRYGPDDFSVSGLQPDFKVDSLSKIQNLLETNFDLNP

SEQ ID NO: 50050 - protein, 224 aa, Arabidopsis thaliana
  peptide (1)..(224): Ceres Seq. ID no. 13575348
  misc_feature (12)..(187): Pfam Name: haloacid dehalogenase-like hydrolase Pfam Description: haloacid dehalogenase-like hydrolase
  misc_feature (16)..(193): Homolog of NCBI NO: 23104575 NR Description: hypothetical protein [Azotobacter vinelandii]
  misc_feature (16)..(218): Homolog of NCBI NO: 23056049 NR Description: hypothetical protein [Geobacter metallireducens]
  misc_feature (12)..(185): Homolog of NCBI NO: 23470846 NR Description: hypothetical protein [Pseudomonas syringae pv.
  misc_feature (1)..(194): Homolog of NCBI NO: 24375526 NR Description: hydrolase, haloacid dehalogenase-like family
  misc_feature (12)..(185): Homolog of NCBI NO: 26991442 NR Description: hydrolase, haloacid dehalogenase-like family
  misc_feature (16)..(217): Homolog of NCBI NO: 39995800 NR Description: HAD-superfamily hydrolase, subfamily IA, variant
  misc_feature (12)..(184): Homolog of NCBI NO: 6324705 NR Description: Hypothetical ORF; Yor131cp [Saccharomyces
  misc_feature (1)..(224): Homolog of NCBI NO: 25408252 NR Description: hypothetical protein At2g33250 [imported] -
  misc_feature (1)..(224): Homolog of NCBI NO: 30685622 NR Description: haloacid dehalogenase-like hydrolase family
  misc_feature (1)..(224): Homolog of NCBI NO: 20196855 NR Description: unknown protein [Arabidopsis thaliana]
MANLTTNAKTRLRGVVFDMDGTLTVPVIDFAAMYRAVLGEDAYKRIKAESPSGIDILHHIESWSPDKQQKAYEIIADYEKQGIDKLQIMPGTAELCGFLDSKKIKRGLITRNVQKAIDIFHQRFEVIFSPALGREFRPYKPNPDPLLHICSTWDIQPNEVMMVGDSLKDDIACGKRAGAFTCLLDETGRYGPDDFSVSGLQPDFKVDSLSKIQNLLETNFDLNP

SEQ ID NO: 50051 - protein, 206 aa, Arabidopsis thaliana
  peptide (1)..(206): Ceres Seq. ID no. 13575349
  misc_feature (1)..(169): Pfam Name: haloacid dehalogenase-like hydrolase Pfam Description: haloacid dehalogenase-like hydrolase
  misc_feature (1)..(175): Homolog of NCBI NO: 23104575 NR Description: hypothetical protein [Azotobacter vinelandii]
  misc_feature (1)..(200): Homolog of NCBI NO: 23056049 NR Description: hypothetical protein [Geobacter metallireducens]
  misc_feature (1)..(167): Homolog of NCBI NO: 23470846 NR Description: hypothetical protein [Pseudomonas syringae pv.
  misc_feature (1)..(176): Homolog of NCBI NO: 24375526 NR Description: hydrolase, haloacid dehalogenase-like family
  misc_feature (1)..(167): Homolog of NCBI NO: 26991442 NR Description: hydrolase, haloacid dehalogenase-like family
  misc_feature (1)..(199): Homolog of NCBI NO: 39995800 NR Description: HAD-superfamily hydrolase, subfamily IA, variant
  misc_feature (1)..(166): Homolog of NCBI NO: 6324705 NR Description: Hypothetical ORF; Yor131cp [Saccharomyces
  misc_feature (1)..(206): Homolog of NCBI NO: 25408252 NR Description: hypothetical protein At2g33250 [imported] -
  misc_feature (1)..(206): Homolog of NCBI NO: 30685622 NR Description: haloacid dehalogenase-like hydrolase family
  misc_feature (1)..(206): Homolog of NCBI NO: 20196855 NR Description: unknown protein [Arabidopsis thaliana]
MDGTLTVPVIDFAAMYRAVLGEDAYKRIKAESPSGIDILHHIESWSPDKQQKAYEIIADYEKQGIDKLQIMPGTAELCGFLDSKKIKRGLITRNVQKAIDIFHQRFEVIFSPALGREFRPYKPNPDPLLHICSTWDIQPNEVMMVGDSLKDDIACGKRAGAFTCLLDETGRYGPDDFSVSGLQPDFKVDSLSKIQNLLETNFDLNP

SEQ ID NO: 50052 - DNA, 1516 bp, Arabidopsis thaliana
  misc_feature (1)..(1516): Ceres Seq. ID no. 13592681
  misc_feature: MA Experiment ID: 20000169 Result: Up-regulated in Transcription
  misc_feature: MA Experiment 20000169 PARAMETER Experiment Name: At_100uM_ABA_P Parameter: Age (day) Value: 14
  misc_feature: MA Experiment 20000169 PARAMETER Experiment Name: At_100uM_ABA_P Parameter: Organism Value: A. thaliana
  misc_feature: MA Experiment 20000169 PARAMETER Experiment Name: At_100uM_ABA_P Parameter: Plant Line Value: WS
  misc_feature: MA Experiment 20000169 PARAMETER Experiment Name: At_100uM_ABA_P Parameter: Timepoint (hr) Value: 6
  misc_feature: MA Experiment 20000169 PARAMETER Experiment Name: At_100uM_ABA_P Parameter: Tissue Value: Aerial
  misc_feature: MA Experiment 20000169 PARAMETER Experiment Name: At_100uM_ABA_P Parameter: Treatment Value: 100uM ABA vs. No Treatment
  misc_feature: MA Experiment ID: 20000179 Result: Down-regulated in Transcription
  misc_feature: MA Experiment 20000179 PARAMETER Experiment Name: At_Germinating_Seeds_P Parameter: Age (hr) Value: 6 vs. 0
  misc_feature: MA Experiment 20000179 PARAMETER Experiment Name: At_Germinating_Seeds_P Parameter: Tissue Value: Germinating Seeds
  misc_feature: MA Experiment ID: 20000180 Result: Down-regulated in Transcription
  misc_feature: MA Experiment 20000180 PARAMETER Experiment Name: At_Germinating_Seeds_P Parameter: Age (hr) Value: 24 vs. 0
  misc_feature: MA Experiment 20000180 PARAMETER Experiment Name: At_Germinating_Seeds_P Parameter: Tissue Value: Germinating Seeds
  misc_feature: MA Experiment ID: 20000182 Result: Up-regulated in Transcription
  misc_feature: MA Experiment 20000182 PARAMETER Experiment Name: At_2mM_SA_P Parameter: Age (day) Value: 14
  misc_feature: MA Experiment 20000182 PARAMETER Experiment Name: At_2mM_SA_P Parameter: Organism Value: A. thaliana
  misc_feature: MA Experiment 20000182 PARAMETER Experiment Name: At_2mM_SA_P Parameter: Plant Line Value: WS
  misc_feature: MA Experiment 20000182 PARAMETER Experiment Name: At_2mM_SA_P Parameter: Timepoint (hr) Value: 6
  misc_feature: MA Experiment 20000182 PARAMETER Experiment Name: At_2mM_SA_P Parameter: Tissue Value: Aerial
  misc_feature: MA Experiment 20000182 PARAMETER Experiment Name: At_2mM_SA_P Parameter: Treatment Value: 2mM SA vs. No Treatment
  misc_feature: MA Experiment ID: 20000227 Result: Up-regulated in Transcription
  misc_feature: MA Experiment 20000227 PARAMETER Experiment Name: At_Root-Tips-vs-Tops_P Parameter: Tissue Value: Root Tips vs. Root Tops
  misc_feature: MA Experiment ID: 20000234 Result: Down-regulated in Transcription
  misc_feature: MA Experiment 20000234 PARAMETER Experiment Name: At_Siliques_P Parameter: Age (day) Value: 21
  misc_feature: MA Experiment 20000234 PARAMETER Experiment Name: At_Siliques_P Parameter: Organism Value: A. thaliana
  misc_feature: MA Experiment 20000234 PARAMETER Experiment Name: At_Siliques_P Parameter: Plant Line Value: WS
  misc_feature: MA Experiment 20000234 PARAMETER Experiment Name: At_Siliques_P Parameter: Tissue Value: Less Than 5mm Siliques vs. Whole Plant
  misc_feature: MA Experiment ID: 20000265 Result: Down-regulated in Transcription
  misc_feature: MA Experiment 20000265 PARAMETER Experiment Name: At_Open_Flower_P Parameter: Age (day) Value: 21
  misc_feature: MA Experiment 20000265 PARAMETER Experiment Name: At_Open_Flower_P Parameter: Plant Line Value: WS
  misc_feature: MA Experiment 20000265 PARAMETER Experiment Name: At_Open_Flower_P Parameter: Tissue Value: Closed Flower vs. Whole Plant
  misc_feature: MA Experiment ID: 20000286 Result: Down-regulated in Transcription
  misc_feature: MA Experiment 20000286 PARAMETER Experiment Name: At_Open_Flower_P Parameter: Age (day) Value: 21
  misc_feature: MA Experiment 20000286 PARAMETER Experiment Name: At_Open_Flower_P Parameter: Plant Line Value: WS
  misc_feature: MA Experiment 20000286 PARAMETER Experiment Name: At_Open_Flower_P Parameter: Tissue Value: Half Open vs. Whole Plant
  misc_feature: MA Experiment ID: 20000436 Result: Up-regulated in Transcription
  misc_feature: MA Experiment 20000436 PARAMETER Experiment Name: At_Drought_P Parameter: Age (day) Value: 7
  misc_feature: MA Experiment 20000436 PARAMETER Experiment Name: At_Drought_P Parameter: Organism Value: A. thaliana
  misc_feature: MA Experiment 20000436 PARAMETER Experiment Name: At_Drought_P Parameter: Plant Line Value: WS
  misc_feature: MA Experiment 20000436 PARAMETER Experiment Name: At_Drought_P Parameter: Timepoint (hr) Value: 12
  misc_feature: MA Experiment 20000436 PARAMETER Experiment Name: At_Drought_P Parameter: Tissue Value: Whole Plant
  misc_feature: MA Experiment 20000436 PARAMETER Experiment Name: At_Drought_P Parameter: Treatment Value: Drought vs. No Drought
  misc_feature: MA Experiment ID: 20000438 Result: Down-regulated in Transcription
  misc_feature: MA Experiment 20000438 PARAMETER Experiment Name: At_Shoots__P Parameter: Age (day) Value: 14
  misc_feature: MA Experiment 20000438 PARAMETER Experiment Name: At_Shoots__P Parameter: Tissue Value: Shoots vs. Whole Plant
  misc_feature: MA Experiment ID: 20000439 Result: Down-regulated in Transcription
  misc_feature: MA Experiment 20000439 PARAMETER Experiment Name: At_Roots__P Parameter: Age (day) Value: 14 vs. 21
  misc_feature: MA Experiment 20000439 PARAMETER Experiment Name: At_Roots__P Parameter: Organism Value: A. thaliana
  misc_feature: MA Experiment 20000439 PARAMETER Experiment Name: At_Roots__P Parameter: Tissue Value: Roots vs. Whole Plant
  misc_feature: MA Experiment ID: 20000452 Result: Down-regulated in Transcription
  misc_feature: MA Experiment 20000452 PARAMETER Experiment Name: At_CS6879_Shoots-Roots_P Parameter: Age (day) Value: 14
  misc_feature: MA Experiment 20000452 PARAMETER Experiment Name: At_CS6879_Shoots-Roots_P Parameter: Organism Value: A. thaliana
  misc_feature: MA Experiment 20000452 PARAMETER Experiment Name: At_CS6879_Shoots-Roots_P Parameter: Plant Line Value: CS6879 vs. WS
  misc_feature: MA Experiment 20000452 PARAMETER Experiment Name: At_CS6879_Shoots-Roots_P Parameter: Tissue Value: Shoots
  misc_feature: MA Experiment ID: 20000574 Result: Up-regulated in Transcription
  misc_feature: MA Experiment 20000574 PARAMETER Experiment Name: At_100uM_ABA_Mutants__P Parameter: Organism Value: A. thaliana
  misc_feature: MA Experiment 20000574 PARAMETER Experiment Name: At_100uM_ABA_Mutants__P Parameter: Plant Line Value: CS23 vs. Ler wt
  misc_feature: MA Experiment 20000574 PARAMETER Experiment Name: At_100uM_ABA_Mutants__P Parameter: Timepoint (hr) Value: N/A
  misc_feature: MA Experiment 20000574 PARAMETER Experiment Name: At_100uM_ABA_Mutants__P Parameter: Tissue Value: Whole Plant
  misc_feature: MA Experiment 20000574 PARAMETER Experiment Name: At_100uM_ABA_Mutants__P Parameter: Treatment Value: None
  misc_feature: MA Experiment ID: 20001904 Result: Up-regulated in Transcription
  misc_feature: MA Experiment 20001904 PARAMETER Experiment Name: At_Drought_Reproduction_P Parameter: Age (day) Value: 37
  misc_feature: MA Experiment 20001904 PARAMETER Experiment Name: At_Drought_Reproduction_P Parameter: Organism Value: A. thaliana
  misc_feature: MA Experiment 20001904 PARAMETER Experiment Name: At_Drought_Reproduction_P Parameter: Plant Line Value: WS
  misc_feature: MA Experiment 20001904 PARAMETER Experiment Name: At_Drought_Reproduction_P Parameter: Timepoint (day) Value: 7
  misc_feature: MA Experiment 20001904 PARAMETER Experiment Name: At_Drought_Reproduction_P Parameter: Tissue Value: Rosettes
  misc_feature: MA Experiment 20001904 PARAMETER Experiment Name: At_Drought_Reproduction_P Parameter: Treatment Value: Drought vs. No Drought
  misc_feature: MA Experiment ID: 20001905 Result: Up-regulated in Transcription
  misc_feature: MA Experiment 20001905 PARAMETER Experiment Name: At_Drought_Reproduction_P Parameter: Age (day) Value: 40
  misc_feature: MA Experiment 20001905 PARAMETER Experiment Name: At_Drought_Reproduction_P Parameter: Organism Value: A. thaliana
  misc_feature: MA Experiment 20001905 PARAMETER Experiment Name: At_Drought_Reproduction_P Parameter: Plant Line Value: WS
  misc_feature: MA Experiment 20001905 PARAMETER Experiment Name: At_Drought_Reproduction_P Parameter: Timepoint (day) Value: 10
  misc_feature: MA Experiment 20001905 PARAMETER Experiment Name: At_Drought_Reproduction_P Parameter: Tissue Value: Rosettes
  misc_feature: MA Experiment 20001905 PARAMETER Experiment Name: At_Drought_Reproduction_P Parameter: Treatment Value: Drought vs. No Drought
  misc_feature: MA Experiment ID: 20001911 Result: Up-regulated in Transcription
  misc_feature: MA Experiment 20001911 PARAMETER Experiment Name: At_Drought_Reproduction_P Parameter: Age (day) Value: 40
  misc_feature: MA Experiment 20001911 PARAMETER Experiment Name: At_Drought_Reproduction_P Parameter: Organism Value: A. thaliana
  misc_feature: MA Experiment 20001911 PARAMETER Experiment Name: At_Drought_Reproduction_P Parameter: Plant Line Value: WS
  misc_feature: MA Experiment 20001911 PARAMETER Experiment Name: At_Drought_Reproduction_P Parameter: Timepoint (day) Value: 10
  misc_feature: MA Experiment 20001911 PARAMETER Experiment Name: At_Drought_Reproduction_P Parameter: Tissue Value: Flowers
  misc_feature: MA Experiment 20001911 PARAMETER Experiment Name: At_Drought_Reproduction_P Parameter: Treatment Value: Drought vs. No Drought
actactctcttcttcacctcctcaagtcacagtgaccaaaatcacacacttcacaagaaacaacctatggatccaaatgaatctccaccaaaccaatttcgccacgtggtggccatgccttatccaggtcgaggacacatcaaccctatgatgaacctctgcaaacgccttgtccgtcgataccctaaccttcacgtcaccttcgtcgtcacagaagaatggctcgggtttattggacccgacccgaaacccgaccggatccatttctccactctccctaatctcatcccttccgagcttgtcagggccaaagacttcataggcttcattgatgccgtctacacaagattggaagaaccattcgagaagcttcttgacagcctcaattcaccacctccgagtgtaatattcgccgacacttacgtcatttgggctgtgcgagtcggcagaaaaaggaatattccggtggtttctctctggaccatgtcagccacgattctctccttcttcctccactctgatctactcataagtcatggccatgctctgttcgaaccatcagaagaagaggttgttgattacgtccccggtttatctccgacgaaactccgagatttgccgccgatatttgacggttacagcgaccgagtcttcaagacagctaagttgtgtttcgatgaactaccaggagctaggtctttactcttcaccaccgcctatgagcttgaacacaaagctattgacgctttcacctccaagctcgatatcccggtctacgctattggtcctttaataccttttgaagaactttctgttcaaaatgataacaaggaacctaattacatccagtggcttgaggaacaaccggaaggctctgttctttacatatctcagggaagttttctttcggtctcggaagctcagatggaggaaatagtgaaaggactgagagaaagtggagtccggtttctttgggtggctcgtgggggcgagttaaagcttaaggaggctcttgaaggtagcttaggtgtagtggtgagctggtgtgatcagcttcgggtgctgtgtcacaaagctgtaggcgggttttggactcattgcgggtttaactcgacattggaagggatatattcaggagtaccaatgctagcgtttccgttgttttgggatcagattctgaacgctaagatgattgttgaggactggagagtcggaatgaggatcgagaggacgaaaaagaatgagttgttgatagggagagaggagatcaaggaagtagtgaagaggtttatggatagagagagtgaagaagggaaagagatgagaagaagggcttgtgaccttagtgaaatcagtcgaggagctgttgcgaaaagcggttcgtctaatgtaaacatcgatgagttcgttcggcatattaccaatacaaattaaggctcaaagaggttttattgtttcaatacaatgtaaggctcaatggcatgctcactaaatcatatgtatcttttgaatgact

SEQ ID NO: 50053 - protein, 477 aa, Arabidopsis thaliana
  peptide (1)..(477): Ceres Seq. ID no. 15221125
  misc_feature (34)..(477): Pfam Name: UDP-glucoronosyl and UDP-glucosyl transferase Pfam Description: UDP-glucoronosyl and UDP-glucosyl transferase
  misc_feature (34)..(471): Homolog of NCBI NO: 15240825 NR Description: glycosyltransferase family [Arabidopsis thaliana]
  misc_feature (87)..(470): Homolog of NCBI NO: 21537408 NR Description: putative glucosyltransferase [Arabidopsis
  misc_feature (87)..(470): Homolog of NCBI NO: 15226332 NR Description: glycosyltransferase family [Arabidopsis thaliana]
  misc_feature (87)..(475): Homolog of NCBI NO: 15228063 NR Description: UDP-glycosyltransferase family [Arabidopsis
  misc_feature (32)..(470): Homolog of NCBI NO: 7385017 NR Description: UDP-glucose:salicylic acid glucosyltransferase
  misc_feature (309)..(474): Homolog of NCBI NO: 22530984 NR Description: putative glucosyltransferase [Arabidopsis
  misc_feature (34)..(475): Homolog of NCBI NO: 34909046 NR Description: putative glucosyltransferase
  misc_feature (35)..(473): Homolog of NCBI NO: 34909048 NR Description: putative glucosyltransferase
  misc_feature (39)..(474): Homolog of NCBI NO: 15227717 NR Description: glycosyltransferase family [Arabidopsis thaliana]
  misc_feature (23)..(477): Homolog of NCBI NO: 15227716 NR Description: glycosyltransferase family [Arabidopsis thaliana]
TTLFFTSSSHSDQNHTLHKKQPMDPNESPPNQFRHVVAMPYPGRGHINPMMNLCKRLVRRYPNLHVTFVVTEEWLGFIGPDPKPDRIHFSTLPNLIPSELVRAKDFIGFIDAVYTRLEEPFEKLLDSLNSPPPSVIFADTYVIWAVRVGRKRNIPVVSLWTMSATILSFFLHSDLLISHGHALFEPSEEEVVDYVPGLSPTKLRDLPPIFDGYSDRVFKTAKLCFDELPGARSLLFTTAYELEHKAIDAFTSKLDIPVYAIGPLIPFEELSVQNDNKEPNYIQWLEEQPEGSVLYISQGSFLSVSEAQMEEIVKGLRESGVRFLWVARGGELKLKEALEGSLGVVVSWCDQLRVLCHKAVGGFWTHCGFNSTLEGIYSGVPMLAFPLFWDQILNAKMIVEDWRVGMRIERTKKNELLIGREEIKEVVKRFMDRESEEGKEMRRRACDLSEISRGAVAKSGSSNVNIDEFVRHITNTN

SEQ ID NO: 50054 - protein, 455 aa, Arabidopsis thaliana
  peptide (1)..(455): Ceres Seq. ID no. 15221126
  misc_feature (12)..(455): Pfam Name: UDP-glucoronosyl and UDP-glucosyl transferase Pfam Description: UDP-glucoronosyl and UDP-glucosyl transferase
  misc_feature (12)..(449): Homolog of NCBI NO: 15240825 NR Description: glycosyltransferase family [Arabidopsis thaliana]
  misc_feature (65)..(448): Homolog of NCBI NO: 21537408 NR Description: putative glucosyltransferase [Arabidopsis
  misc_feature (65)..(448): Homolog of NCBI NO: 15226332 NR Description: glycosyltransferase family [Arabidopsis thaliana]
  misc_feature (65)..(453): Homolog of NCBI NO: 15228063 NR Description: UDP-glycosyltransferase family [Arabidopsis
  misc_feature (10)..(448): Homolog of NCBI NO: 7385017 NR Description: UDP-glucose:salicylic acid glucosyltransferase
  misc_feature (287)..(452): Homolog of NCBI NO: 22530984 NR Description: putative glucosyltransferase [Arabidopsis
  misc_feature (12)..(453): Homolog of NCBI NO: 34909046 NR Description: putative glucosyltransferase
  misc_feature (13)..(451): Homolog of NCBI NO: 34909048 NR Description: putative glucosyltransferase
  misc_feature (17)..(452): Homolog of NCBI NO: 15227717 NR Description: glycosyltransferase family [Arabidopsis thaliana]
  misc_feature (1)..(455): Homolog of NCBI NO: 15227716 NR Description: glycosyltransferase family [Arabidopsis thaliana]
MDPNESPPNQFRHVVAMPYPGRGHINPMMNLCKRLVRRYPNLHVTFVVTEEWLGFIGPDPKPDRIHFSTLPNLIPSELVRAKDFIGFIDAVYTRLEEPFEKLLDSLNSPPPSVIFADTYVIWAVRVGRKRNIPVVSLWTMSATILSFFLHSDLLISHGHALFEPSEEEVVDYVPGLSPTKLRDLPPIFDGYSDRVFKTAKLCFDELPGARSLLFTTAYELEHKAIDAFTSKLDIPVYAIGPLIPFEELSVQNDNKEPNYIQWLEEQPEGSVLYISQGSFLSVSEAQMEEIVKGLRESGVRFLWVARGGELKLKEALEGSLGVVVSWCDQLRVLCHKAVGGFWTHCGFNSTLEGIYSGVPMLAFPLFWDQILNAKMIVEDWRVGMRIERTKKNELLIGREEIKEVVKRFMDRESEEGKEMRRRACDLSEISRGAVAKSGSSNVNIDEFVRHITNTN

SEQ ID NO: 50055 - protein, 439 aa, Arabidopsis thaliana
  peptide (1)..(439): Ceres Seq. ID no. 15221127
  misc_feature (1)..(439): Pfam Name: UDP-glucoronosyl and UDP-glucosyl transferase Pfam Description: UDP-glucoronosyl and UDP-glucosyl transferase
  misc_feature (1)..(433): Homolog of NCBI NO: 15240825 NR Description: glycosyltransferase family [Arabidopsis thaliana]
  misc_feature (49)..(432): Homolog of NCBI NO: 21537408 NR Description: putative glucosyltransferase [Arabidopsis
  misc_feature (49)..(432): Homolog of NCBI NO: 15226332 NR Description: glycosyltransferase family [Arabidopsis thaliana]
  misc_feature (49)..(437): Homolog of NCBI NO: 15228063 NR Description: UDP-glycosyltransferase family [Arabidopsis
  misc_feature (1)..(432): Homolog of NCBI NO: 7385017 NR Description: UDP-glucose:salicylic acid glucosyltransferase
  misc_feature (271)..(436): Homolog of NCBI NO: 22530984 NR Description: putative glucosyltransferase [Arabidopsis
  misc_feature (1)..(437): Homolog of NCBI NO: 34909046 NR Description: putative glucosyltransferase
  misc_feature (1)..(435): Homolog of NCBI NO: 34909048 NR Description: putative glucosyltransferase
  misc_feature (1)..(436): Homolog of NCBI NO: 15227717 NR Description: glycosyltransferase family [Arabidopsis thaliana]
  misc_feature (1)..(439): Homolog of NCBI NO: 15227716 NR Description: glycosyltransferase family [Arabidopsis thaliana]
MPYPGRGHINPMMNLCKRLVRRYPNLHVTFVVTEEWLGFIGPDPKPDRIHFSTLPNLIPSELVRAKDFIGFIDAVYTRLEEPFEKLLDSLNSPPPSVIFADTYVIWAVRVGRKRNIPVVSLWTMSATILSFFLHSDLLISHGHALFEPSEEEVVDYVPGLSPTKLRDLPPIFDGYSDRVFKTAKLCFDELPGARSLLFTTAYELEHKAIDAFTSKLDIPVYAIGPLIPFEELSVQNDNKEPNYIQWLEEQPEGSVLYISQGSFLSVSEAQMEEIVKGLRESGVRFLWVARGGELKLKEALEGSLGVVVSWCDQLRVLCHKAVGGFWTHCGFNSTLEGIYSGVPMLAFPLFWDQILNAKMIVEDWRVGMRIERTKKNELLIGREEIKEVVKRFMDRESEEGKEMRRRACDLSEISRGAVAKSGSSNVNIDEFVRHITNTN

SEQ ID NO: 50056 - DNA, 915 bp, Arabidopsis thaliana
  misc_feature (1)..(915): Ceres Seq. ID no. 13648346
  misc_feature: MA Experiment ID: 20000184 Result: Up-regulated in Transcription
  misc_feature: MA Experiment 20000184 PARAMETER Experiment Name: At_Shoots__P Parameter: Age (day) Value: 7
  misc_feature: MA Experiment 20000184 PARAMETER Experiment Name: At_Shoots__P Parameter: Tissue Value: Shoots vs. Whole Plant
  misc_feature: MA Experiment ID: 20000234 Result: Up-regulated in Transcription
  misc_feature: MA Experiment 20000234 PARAMETER Experiment Name: At_Siliques_P Parameter: Age (day) Value: 21
  misc_feature: MA Experiment 20000234 PARAMETER Experiment Name: At_Siliques_P Parameter: Organism Value: A. thaliana
  misc_feature: MA Experiment 20000234 PARAMETER Experiment Name: At_Siliques_P Parameter: Plant Line Value: WS
  misc_feature: MA Experiment 20000234 PARAMETER Experiment Name: At_Siliques_P Parameter: Tissue Value: Less Than 5mm Siliques vs. Whole Plant
  misc_feature: MA Experiment ID: 20000265 Result: Up-regulated in Transcription
  misc_feature: MA Experiment 20000265 PARAMETER Experiment Name: At_Open_Flower_P Parameter: Age (day) Value: 21
  misc_feature: MA Experiment 20000265 PARAMETER Experiment Name: At_Open_Flower_P Parameter: Plant Line Value: WS
  misc_feature: MA Experiment 20000265 PARAMETER Experiment Name: At_Open_Flower_P Parameter: Tissue Value: Closed Flower vs. Whole Plant
  misc_feature: MA Experiment ID: 20000286 Result: Up-regulated in Transcription
  misc_feature: MA Experiment 20000286 PARAMETER Experiment Name: At_Open_Flower_P Parameter: Age (day) Value: 21
  misc_feature: MA Experiment 20000286 PARAMETER Experiment Name: At_Open_Flower_P Parameter: Plant Line Value: WS
  misc_feature: MA Experiment 20000286 PARAMETER Experiment Name: At_Open_Flower_P Parameter: Tissue Value: Half Open vs. Whole Plant
  misc_feature: MA Experiment ID: 20000438 Result: Up-regulated in Transcription
  misc_feature: MA Experiment 20000438 PARAMETER Experiment Name: At_Shoots__P Parameter: Age (day) Value: 14
  misc_feature: MA Experiment 20000438 PARAMETER Experiment Name: At_Shoots__P Parameter: Tissue Value: Shoots vs. Whole Plant
  misc_feature: MA Experiment ID: 20000794 Result: Down-regulated in Transcription
  misc_feature: MA Experiment 20000794 PARAMETER Experiment Name: At_Petals_P Parameter: Age (day) Value: 23-25 days
  misc_feature: MA Experiment 20000794 PARAMETER Experiment Name: At_Petals_P Parameter: Plant Line Value: WS
  misc_feature: MA Experiment 20000794 PARAMETER Experiment Name: At_Petals_P Parameter: Tissue Value: Petals vs. Whole plant
  misc_feature: MA Experiment ID: 20001451 Result: Down-regulated in Transcription
  misc_feature: MA Experiment 20001451 PARAMETER Experiment Name: At_Far-red-induction_P Parameter: Age (day) Value: 7
  misc_feature: MA Experiment 20001451 PARAMETER Experiment Name: At_Far-red-induction_P Parameter: Light Value: Far-red vs. White
  misc_feature: MA Experiment 20001451 PARAMETER Experiment Name: At_Far-red-induction_P Parameter: Organism Value: A. thaliana
  misc_feature: MA Experiment 20001451 PARAMETER Experiment Name: At_Far-red-induction_P Parameter: Plant Line Value: Columbia
  misc_feature: MA Experiment 20001451 PARAMETER Experiment Name: At_Far-red-induction_P Parameter: Timepoint (hr) Value: 24
  misc_feature: MA Experiment 20001451 PARAMETER Experiment Name: At_Far-red-induction_P Parameter: Tissue Value: Whole Plant
  misc_feature: MA Experiment ID: 20001757 Result: Up-regulated in Transcription
  misc_feature: MA Experiment 20001757 PARAMETER Experiment Name: At_50mM_NH4NO3_L-to-H_P Parameter: Timepoint (hr) Value: 6
  misc_feature: MA Experiment 20001757 PARAMETER Experiment Name: At_50mM_NH4NO3_L-to-H_P Parameter: Tissue Value: Leaf
  misc_feature: MA Experiment 20001757 PARAMETER Experiment Name: At_50mM_NH4NO3_L-to-H_P Parameter: Treatment Value: 50mM NH4NO3 vs 100mM Mannitol
gaaaacctcaagtcacacactcttcacctaaacagcatcaatggcgacttctctctccgtttctagattcatgtcctcctccgccaccgttatctccgtcgctaagccgttactttcccccaccgtatccttcaccgcgccgctctccttcacacgctctctcgctcctaatctctctctcaaattccgcaaccgccgcaccaattccgcctccgccaccaccagatccttcgctacgacacccgtcaccgcctccatttccgtcggagacaagctcccagactccactctctcctacctcgatccatccaccggagacgtcaaaacagtaaccgtctcatccctaaccgccgggaagaaaacaatcctattcgccgttcccggcgcattcacaccaacatgctcacaaaaacacgtccctggattcgtatccaaagccggagaactcagatctaaaggcatcgatgtaatcgcatgtatctccgtcaacgacgcgttcgtgatggaagcgtggaggaaagatcttggaattaacgatgaggtaatgttgctatccgatggaaatggcgaattcacagggaagcttggtgttgaattggatttgagggataagcctgtgggacttggagttaggtcaaggagatatgcgattttggctgatgatggtgttgtgaaagttctgaatcttgaagaaggaggtgcttttactaatagtagtgctgaggatatgcttaaagctctctgattcttatgattttctcatcaatttcgtcttcttctctgttttgaattttctttactctgttttgtgttgctgtttctttaaatctacgaatcattatcggatttgtaatggaataatgaagttagaggttctgttgtttgtgaacattttagaaaagcgttgtgtttagt

SEQ ID NO: 50057 - protein, 234 aa, Arabidopsis thaliana
  peptide (1)..(234): Ceres Seq. ID no. 13648347
  misc_feature (75)..(232): Pfam Name: AhpC/TSA family Pfam Description: AhpC/TSA family
  misc_feature (71)..(234): Homolog of NCBI NO: 18654477 NR Description: thioredoxin peroxidase [Capsicum annuum]
  misc_feature (71)..(234): Homolog of NCBI NO: 21593881 NR Description: type 2 peroxiredoxin, putative [Arabidopsis
  misc_feature (71)..(234): Homolog of NCBI NO: 18406870 NR Description: peroxiredoxin -related [Arabidopsis thaliana]
  misc_feature (71)..(234): Homolog of NCBI NO: 15218876 NR Description: type 2 peroxiredoxin -related [Arabidopsis
  misc_feature (71)..(234): Homolog of NCBI NO: 4928472 NR Description: type 2 peroxiredoxin [Brassica rapa subsp.
  misc_feature (71)..(234): Homolog of NCBI NO: 30841938 NR Description: thioredoxin peroxidase 1 [Lycopersicon esculentum]
  misc_feature (71)..(234): Homolog of NCBI NO: 15218877 NR Description: type 2 peroxiredoxin -related [Arabidopsis
  misc_feature (28)..(234): Homolog of NCBI NO: 5441879 NR Description: ESTs AU070372(S13446),AU075541(S0353) correspond a region of the predicted gene.~Similar to Arabidopsis thaliana
  misc_feature (1)..(234): Homolog of NCBI NO: 15292893 NR Description: putative peroxiredoxin protein [Arabidopsis
  misc_feature (1)..(234): Homolog of NCBI NO: 15231718 NR Description: peroxiredoxin - like protein [Arabidopsis
MATSLSVSRFMSSSATVISVAKPLLSPTVSFTAPLSFTRSLAPNLSLKFRNRRTNSASATTRSFATTPVTASISVGDKLPDSTLSYLDPSTGDVKTVTVSSLTAGKKTILFAVPGAFTPTCSQKHVPGFVSKAGELRSKGIDVIACISVNDAFVMEAWRKDLGINDEVMLLSDGNGEFTGKLGVELDLRDKPVGLGVRSRRYAILADDGVVKVLNLEEGGAFTNSSAEDMLKAL

SEQ ID NO: 50058 - protein, 224 aa, Arabidopsis thaliana
  peptide (1)..(224): Ceres Seq. ID no. 13648348
  misc_feature (65)..(222): Pfam Name: AhpC/TSA family Pfam Description: AhpC/TSA family
  misc_feature (61)..(224): Homolog of NCBI NO: 18654477 NR Description: thioredoxin peroxidase [Capsicum annuum]
  misc_feature (61)..(224): Homolog of NCBI NO: 21593881 NR Description: type 2 peroxiredoxin, putative [Arabidopsis
  misc_feature (61)..(224): Homolog of NCBI NO: 18406870 NR Description: peroxiredoxin -related [Arabidopsis thaliana]
  misc_feature (61)..(224): Homolog of NCBI NO: 15218876 NR Description: type 2 peroxiredoxin -related [Arabidopsis
  misc_feature (61)..(224): Homolog of NCBI NO: 4928472 NR Description: type 2 peroxiredoxin [Brassica rapa subsp.
  misc_feature (61)..(224): Homolog of NCBI NO: 30841938 NR Description: thioredoxin peroxidase 1 [Lycopersicon esculentum]
  misc_feature (61)..(224): Homolog of NCBI NO: 15218877 NR Description: type 2 peroxiredoxin -related [Arabidopsis
  misc_feature (18)..(224): Homolog of NCBI NO: 5441879 NR Description: ESTs AU070372(S13446),AU075541(S0353) correspond a region of the predicted gene.~Similar to Arabidopsis thaliana
  misc_feature (1)..(224): Homolog of NCBI NO: 15292893 NR Description: putative peroxiredoxin protein [Arabidopsis
  misc_feature (1)..(224): Homolog of NCBI NO: 15231718 NR Description: peroxiredoxin - like protein [Arabidopsis
MSSSATVISVAKPLLSPTVSFTAPLSFTRSLAPNLSLKFRNRRTNSASATTRSFATTPVTASISVGDKLPDSTLSYLDPSTGDVKTVTVSSLTAGKKTILFAVPGAFTPTCSQKHVPGFVSKAGELRSKGIDVIACISVNDAFVMEAWRKDLGINDEVMLLSDGNGEFTGKLGVELDLRDKPVGLGVRSRRYAILADDGVVKVLNLEEGGAFTNSSAEDMLKAL

SEQ ID NO: 50059 - DNA, 1784 bp, Arabidopsis thaliana
  misc_feature (1)..(1784): Ceres Seq. ID no. 13646633
  misc_feature: MA Experiment ID: 20000179 Result: Up-regulated in Transcription
  misc_feature: MA Experiment 20000179 PARAMETER Experiment Name: At_Germinating_Seeds_P Parameter: Age (hr) Value: 6 vs. 0
  misc_feature: MA Experiment 20000179 PARAMETER Experiment Name: At_Germinating_Seeds_P Parameter: Tissue Value: Germinating Seeds
  misc_feature: MA Experiment ID: 20000184 Result: Down-regulated in Transcription
  misc_feature: MA Experiment 20000184 PARAMETER Experiment Name: At_Shoots__P Parameter: Age (day) Value: 7
  misc_feature: MA Experiment 20000184 PARAMETER Experiment Name: At_Shoots__P Parameter: Tissue Value: Shoots vs. Whole Plant
  misc_feature: MA Experiment ID: 20000213 Result: Down-regulated in Transcription
  misc_feature: MA Experiment 20000213 PARAMETER Experiment Name: At_4deg_Cold_P Parameter: Timepoint (hr) Value: 2
  misc_feature: MA Experiment ID: 20000286 Result: Down-regulated in Transcription
  misc_feature: MA Experiment 20000286 PARAMETER Experiment Name: At_Open_Flower_P Parameter: Age (day) Value: 21
  misc_feature: MA Experiment 20000286 PARAMETER Experiment Name: At_Open_Flower_P Parameter: Plant Line Value: WS
  misc_feature: MA Experiment 20000286 PARAMETER Experiment Name: At_Open_Flower_P Parameter: Tissue Value: Half Open vs. Whole Plant
  misc_feature: MA Experiment ID: 20000437 Result: Up-regulated in Transcription
  misc_feature: MA Experiment 20000437 PARAMETER Experiment Name: At_Drought_P Parameter: Age (day) Value: 8
  misc_feature: MA Experiment 20000437 PARAMETER Experiment Name: At_Drought_P Parameter: Organism Value: A. thaliana
  misc_feature: MA Experiment 20000437 PARAMETER Experiment Name: At_Drought_P Parameter: Plant Line Value: WS
  misc_feature: MA Experiment 20000437 PARAMETER Experiment Name: At_Drought_P Parameter: Timepoint (hr) Value: 24
  misc_feature: MA Experiment 20000437 PARAMETER Experiment Name: At_Drought_P Parameter: Tissue Value: Whole Plant
  misc_feature: MA Experiment 20000437 PARAMETER Experiment Name: At_Drought_P Parameter: Treatment Value: Drought vs. No Drought
  misc_feature: MA Experiment ID: 20000438 Result: Down-regulated in Transcription
  misc_feature: MA Experiment 20000438 PARAMETER Experiment Name: At_Shoots__P Parameter: Age (day) Value: 14
  misc_feature: MA Experiment 20000438 PARAMETER Experiment Name: At_Shoots__P Parameter: Tissue Value: Shoots vs. Whole Plant
  misc_feature: MA Experiment ID: 20000794 Result: Up-regulated in Transcription
  misc_feature: MA Experiment 20000794 PARAMETER Experiment Name: At_Petals_P Parameter: Age (day) Value: 23-25 days
  misc_feature: MA Experiment 20000794 PARAMETER Experiment Name: At_Petals_P Parameter: Plant Line Value: WS
  misc_feature: MA Experiment 20000794 PARAMETER Experiment Name: At_Petals_P Parameter: Tissue Value: Petals vs. Whole plant
  misc_feature: MA Experiment ID: 20001450 Result: Up-regulated in Transcription
  misc_feature: MA Experiment 20001450 PARAMETER Experiment Name: At_Far-red-induction_P Parameter: Age (day) Value: 7
  misc_feature: MA Experiment 20001450 PARAMETER Experiment Name: At_Far-red-induction_P Parameter: Light Value: Far-red vs. White
  misc_feature: MA Experiment 20001450 PARAMETER Experiment Name: At_Far-red-induction_P Parameter: Organism Value: A. thaliana
  misc_feature: MA Experiment 20001450 PARAMETER Experiment Name: At_Far-red-induction_P Parameter: Plant Line Value: Columbia
  misc_feature: MA Experiment 20001450 PARAMETER Experiment Name: At_Far-red-induction_P Parameter: Timepoint (hr) Value: 8
  misc_feature: MA Experiment 20001450 PARAMETER Experiment Name: At_Far-red-induction_P Parameter: Tissue Value: Whole Plant
  misc_feature: MA Experiment ID: 20001911 Result: Up-regulated in Transcription
  misc_feature: MA Experiment 20001911 PARAMETER Experiment Name: At_Drought_Reproduction_P Parameter: Age (day) Value: 40
  misc_feature: MA Experiment 20001911 PARAMETER Experiment Name: At_Drought_Reproduction_P Parameter: Organism Value: A. thaliana
  misc_feature: MA Experiment 20001911 PARAMETER Experiment Name: At_Drought_Reproduction_P Parameter: Plant Line Value: WS
  misc_feature: MA Experiment 20001911 PARAMETER Experiment Name: At_Drought_Reproduction_P Parameter: Timepoint (day) Value: 10
  misc_feature: MA Experiment 20001911 PARAMETER Experiment Name: At_Drought_Reproduction_P Parameter: Tissue Value: Flowers
  misc_feature: MA Experiment 20001911 PARAMETER Experiment Name: At_Drought_Reproduction_P Parameter: Treatment Value: Drought vs. No Drought
gaaacgatcattttctaggaaaacgaacgaacagaggacaaatatattagataaacagagggaaacaagaacaaaaacgtttgcttcattctctaatggcagccaccacgagacggttgctttactctgtgtccaaaagattctctaccgccggagtgcggcggagctatggcggtctgccacaatcgaattccaaatctcctccgtcttcttctcaacgattgatggaattggaatctgaattcagtgcccacaattaccatcctgttccggttgtgttttctcgcgcgaatggctcaactatatgggaccctgaaggaaagagatacattgattttcttgcagcttactctgcagttaatcagggacattgtcatcctaagatcatgaaggcattgcaggaacaagtggagaagctcactttaagttcacgagcgttttacaacgataaattcccggtatttgctgagcgtctcacaaacatgttcggttatgatatggtgcttcctatgaacacgggtgctgaaggtgtcgaaactgctttgaaactagcaagaaaatggggtcatgaaaagaaaaatattcccaaagacgaggctatcattgtctcttgttgtggctgctttcatggacgtacattagcaattgtttccatgagttgtgacaatgatgctactcgtggattcgggccattgttgccagggaatcttaaagttgattttggtgatgcggattcacttgagaaaatctttaaagaaaagggagatagaatagcgggatttctattcgagcctattcaaggcgaagctggagttattattcctcccgacggttacttgaaagctgttagagaactctgcacaaaatacaatgttttgatgatagcggatgaagtacaaagcggtctggctagatccgggaagatgctagcttgtgattgggaagaaattcgtcctgacatggtgatacttgggaaagcattaggtggaggagtaattccagtaagtgcagtgcttgctgataaagacgtgatgcttcatataaaacctggtcaacacggaagcacatttggtggtaaccctttagctagtgctgtagctatggcttctttagacgttatcgtggaagaaaaactcgttgaaagatcagcaagtcttggagaggaactgaggattcaattgaatgaaatcaagaaacagtttccgaagtacataaaggaagtacgaggaagaggcttgtttaatgcgattgagttcaatagcgaaagcttgtccccggtttcagcttacgatatttgcttgagcttgaaggagagaggagtcttggctaaacctactcacaacactattgtccggttaactccaccactctctataagctctgatgaactccgagatggatctgaggctcttcacgatgtactcgagctcgatcttccaaatctgctgaaaatcaattccggtaaaactccggtttctcatataaccgagtgtgatcgctgtggaagaaacctctatgcttgaaccggtttgaaacttgattaggttctggtataattagattctttgtatcttgtgatttccataggacacagcaccggtttggtataagaaatatattaaagtataaggccgaaccggattgtaccgagcttggtagaaataactctggtttatttctggtttggcattaaataaaaccaacataaaataatatgatgcctgttttcataggtgttatacatgatatctcaacaaacaaataaatgttacataacaatatgt

SEQ ID NO: 50060 - protein, 475 aa, Arabidopsis thaliana
  peptide (1)..(475): Ceres Seq. ID no. 13646634
  misc_feature (49)..(447): Pfam Name: Aminotransferase class-III Pfam Description: Aminotransferase class-III
  misc_feature (17)..(452): Homolog of NCBI NO: 32403334 NR Description: hypothetical protein [Neurospora crassa]
  misc_feature (39)..(443): Homolog of NCBI NO: 12642955 NR Description: ornithine aminotransferase [Xenopus laevis]
  misc_feature (39)..(443): Homolog of NCBI NO: 28278102 NR Description: Similar to ornithine aminotransferase [Xenopus
  misc_feature (38)..(450): Homolog of NCBI NO: 2492863 NR Description: Ornithine aminotransferase (Ornithine--oxo-acid
  misc_feature (38)..(450): Homolog of NCBI NO: 7434119 NR Description: probable ornithine-oxo-acid transaminase (EC
  misc_feature (38)..(450): Homolog of NCBI NO: 40745819 NR Description: OAT_EMENI Ornithine aminotransferase
  misc_feature (39)..(450): Homolog of NCBI NO: 19113380 NR Description: ornithine aminotransferase (EC 2.6.1.13)
  misc_feature (3)..(474): Homolog of NCBI NO: 27527063 NR Description: ornithine aminotransferase [Medicago truncatula]
  misc_feature (1)..(473): Homolog of NCBI NO: 9957234 NR Description: ornithine aminotransferase [Vitis vinifera]
  misc_feature (1)..(475): Homolog of NCBI NO: 15237392 NR Description: ornithine--oxo-acid aminotransferase (ornithine
MAATTRRLLYSVSKRFSTAGVRRSYGGLPQSNSKSPPSSSQRLMELESEFSAHNYHPVPVVFSRANGSTIWDPEGKRYIDFLAAYSAVNQGHCHPKIMKALQEQVEKLTLSSRAFYNDKFPVFAERLTNMFGYDMVLPMNTGAEGVETALKLARKWGHEKKNIPKDEAIIVSCCGCFHGRTLAIVSMSCDNDATRGFGPLLPGNLKVDFGDADSLEKIFKEKGDRIAGFLFEPIQGEAGVIIPPDGYLKAVRELCTKYNVLMIADEVQSGLARSGKMLACDWEEIRPDMVILGKALGGGVIPVSAVLADKDVMLHIKPGQHGSTFGGNPLASAVAMASLDVIVEEKLVERSASLGEELRIQLNEIKKQFPKYIKEVRGRGLFNAIEFNSESLSPVSAYDICLSLKERGVLAKPTHNTIVRLTPPLSISSDELRDGSEALHDVLELDLPNLLKINSGKTPVSHITECDRCGRNLYA

SEQ ID NO: 50061 - protein, 432 aa, Arabidopsis thaliana
  peptide (1)..(432): Ceres Seq. ID no. 13646635
  misc_feature (6)..(404): Pfam Name: Aminotransferase class-III Pfam Description: Aminotransferase class-III
  misc_feature (1)..(409): Homolog of NCBI NO: 32403334 NR Description: hypothetical protein [Neurospora crassa]
  misc_feature (1)..(400): Homolog of NCBI NO: 12642955 NR Description: ornithine aminotransferase [Xenopus laevis]
  misc_feature (1)..(400): Homolog of NCBI NO: 28278102 NR Description: Similar to ornithine aminotransferase [Xenopus
  misc_feature (1)..(407): Homolog of NCBI NO: 2492863 NR Description: Ornithine aminotransferase (Ornithine--oxo-acid
  misc_feature (1)..(407): Homolog of NCBI NO: 7434119 NR Description: probable ornithine-oxo-acid transaminase (EC
  misc_feature (1)..(407): Homolog of NCBI NO: 40745819 NR Description: OAT_EMENI Ornithine aminotransferase
  misc_feature (1)..(407): Homolog of NCBI NO: 19113380 NR Description: ornithine aminotransferase (EC 2.6.1.13)
  misc_feature (1)..(431): Homolog of NCBI NO: 27527063 NR Description: ornithine aminotransferase [Medicago truncatula]
  misc_feature (1)..(430): Homolog of NCBI NO: 9957234 NR Description: ornithine aminotransferase [Vitis vinifera]
  misc_feature (1)..(432): Homolog of NCBI NO: 15237392 NR Description: ornithine--oxo-acid aminotransferase (ornithine
MELESEFSAHNYHPVPVVFSRANGSTIWDPEGKRYIDFLAAYSAVNQGHCHPKIMKALQEQVEKLTLSSRAFYNDKFPVFAERLTNMFGYDMVLPMNTGAEGVETALKLARKWGHEKKNIPKDEAIIVSCCGCFHGRTLAIVSMSCDNDATRGFGPLLPGNLKVDFGDADSLEKIFKEKGDRIAGFLFEPIQGEAGVIIPPDGYLKAVRELCTKYNVLMIADEVQSGLARSGKMLACDWEEIRPDMVILGKALGGGVIPVSAVLADKDVMLHIKPGQHGSTFGGNPLASAVAMASLDVIVEEKLVERSASLGEELRIQLNEIKKQFPKYIKEVRGRGLFNAIEFNSESLSPVSAYDICLSLKERGVLAKPTHNTIVRLTPPLSISSDELRDGSEALHDVLELDLPNLLKINSGKTPVSHITECDRCGRNLYA

SEQ ID NO: 50062 - protein, 378 aa, Arabidopsis thaliana
  peptide (1)..(378): Ceres Seq. ID no. 13646636
  misc_feature (1)..(350): Pfam Name: Aminotransferase class-III Pfam Description: Aminotransferase class-III
  misc_feature (1)..(355): Homolog of NCBI NO: 32403334 NR Description: hypothetical protein [Neurospora crassa]
  misc_feature (1)..(346): Homolog of NCBI NO: 12642955 NR Description: ornithine aminotransferase [Xenopus laevis]
  misc_feature (1)..(346): Homolog of NCBI NO: 28278102 NR Description: Similar to ornithine aminotransferase [Xenopus
  misc_feature (1)..(353): Homolog of NCBI NO: 2492863 NR Description: Ornithine aminotransferase (Ornithine--oxo-acid
  misc_feature (1)..(353): Homolog of NCBI NO: 7434119 NR Description: probable ornithine-oxo-acid transaminase (EC
  misc_feature (1)..(353): Homolog of NCBI NO: 40745819 NR Description: OAT_EMENI Ornithine aminotransferase
  misc_feature (1)..(353): Homolog of NCBI NO: 19113380 NR Description: ornithine aminotransferase (EC 2.6.1.13)
  misc_feature (1)..(377): Homolog of NCBI NO: 27527063 NR Description: ornithine aminotransferase [Medicago truncatula]
  misc_feature (1)..(376): Homolog of NCBI NO: 9957234 NR Description: ornithine aminotransferase [Vitis vinifera]
  misc_feature (1)..(378): Homolog of NCBI NO: 15237392 NR Description: ornithine--oxo-acid aminotransferase (ornithine
MKALQEQVEKLTLSSRAFYNDKFPVFAERLTNMFGYDMVLPMNTGAEGVETALKLARKWGHEKKNIPKDEAIIVSCCGCFHGRTLAIVSMSCDNDATRGFGPLLPGNLKVDFGDADSLEKIFKEKGDRIAGFLFEPIQGEAGVIIPPDGYLKAVRELCTKYNVLMIADEVQSGLARSGKMLACDWEEIRPDMVILGKALGGGVIPVSAVLADKDVMLHIKPGQHGSTFGGNPLASAVAMASLDVIVEEKLVERSASLGEELRIQLNEIKKQFPKYIKEVRGRGLFNAIEFNSESLSPVSAYDICLSLKERGVLAKPTHNTIVRLTPPLSISSDELRDGSEALHDVLELDLPNLLKINSGKTPVSHITECDRCGRNLYA

SEQ ID NO: 50063 - DNA, 1653 bp, Arabidopsis thaliana
  misc_feature (1)..(1653): Ceres Seq. ID no. 13588110
  misc_feature: MA Experiment ID: 20000185 Result: Up-regulated in Transcription
  misc_feature: MA Experiment 20000185 PARAMETER Experiment Name: At_Roots__P Parameter: Age (day) Value: 7 vs. 21
  misc_feature: MA Experiment 20000185 PARAMETER Experiment Name: At_Roots__P Parameter: Organism Value: A. thaliana
  misc_feature: MA Experiment 20000185 PARAMETER Experiment Name: At_Roots__P Parameter: Tissue Value: Roots vs. Whole Plant
  misc_feature: MA Experiment ID: 20000211 Result: Up-regulated in Transcription
  misc_feature: MA Experiment 20000211 PARAMETER Experiment Name: At_0.001percent_MeJA__P Parameter: Age (day) Value: 14
  misc_feature: MA Experiment 20000211 PARAMETER Experiment Name: At_0.001percent_MeJA__P Parameter: Organism Value: A. thaliana
  misc_feature: MA Experiment 20000211 PARAMETER Experiment Name: At_0.001percent_MeJA__P Parameter: Plant Line Value: WS
  misc_feature: MA Experiment 20000211 PARAMETER Experiment Name: At_0.001percent_MeJA__P Parameter: Timepoint (hr) Value: 1
  misc_feature: MA Experiment 20000211 PARAMETER Experiment Name: At_0.001percent_MeJA__P Parameter: Tissue Value: Aerial
  misc_feature: MA Experiment 20000211 PARAMETER Experiment Name: At_0.001percent_MeJA__P Parameter: Treatment Value: 0.001percent MeJA vs. No Treatment
  misc_feature: MA Experiment ID: 20000234 Result: Down-regulated in Transcription
  misc_feature: MA Experiment 20000234 PARAMETER Experiment Name: At_Siliques_P Parameter: Age (day) Value: 21
  misc_feature: MA Experiment 20000234 PARAMETER Experiment Name: At_Siliques_P Parameter: Organism Value: A. thaliana
  misc_feature: MA Experiment 20000234 PARAMETER Experiment Name: At_Siliques_P Parameter: Plant Line Value: WS
  misc_feature: MA Experiment 20000234 PARAMETER Experiment Name: At_Siliques_P Parameter: Tissue Value: Less Than 5mm Siliques vs. Whole Plant
  misc_feature: MA Experiment ID: 20000264 Result: Down-regulated in Transcription
  misc_feature: MA Experiment 20000264 PARAMETER Experiment Name: At_Open_Flower_P Parameter: Age (day) Value: 21
  misc_feature: MA Experiment 20000264 PARAMETER Experiment Name: At_Open_Flower_P Parameter: Plant Line Value: WS
  misc_feature: MA Experiment 20000264 PARAMETER Experiment Name: At_Open_Flower_P Parameter: Tissue Value: Open Flower vs. Whole Plant
  misc_feature: MA Experiment ID: 20000265 Result: Down-regulated in Transcription
  misc_feature: MA Experiment 20000265 PARAMETER Experiment Name: At_Open_Flower_P Parameter: Age (day) Value: 21
  misc_feature: MA Experiment 20000265 PARAMETER Experiment Name: At_Open_Flower_P Parameter: Plant Line Value: WS
  misc_feature: MA Experiment 20000265 PARAMETER Experiment Name: At_Open_Flower_P Parameter: Tissue Value: Closed Flower vs. Whole Plant
  misc_feature: MA Experiment ID: 20000286 Result: Down-regulated in Transcription
  misc_feature: MA Experiment 20000286 PARAMETER Experiment Name: At_Open_Flower_P Parameter: Age (day) Value: 21
  misc_feature: MA Experiment 20000286 PARAMETER Experiment Name: At_Open_Flower_P Parameter: Plant Line Value: WS
  misc_feature: MA Experiment 20000286 PARAMETER Experiment Name: At_Open_Flower_P Parameter: Tissue Value: Half Open vs. Whole Plant
  misc_feature: MA Experiment ID: 20000438 Result: Down-regulated in Transcription
  misc_feature: MA Experiment 20000438 PARAMETER Experiment Name: At_Shoots__P Parameter: Age (day) Value: 14
  misc_feature: MA Experiment 20000438 PARAMETER Experiment Name: At_Shoots__P Parameter: Tissue Value: Shoots vs. Whole Plant
  misc_feature: MA Experiment ID: 20000495 Result: Down-regulated in Transcription
  misc_feature: MA Experiment 20000495 PARAMETER Experiment Name: At_Guard_Cells_P Parameter: Harvest Date Value: 8/2/2002
  misc_feature: MA Experiment 20000495 PARAMETER Experiment Name: At_Guard_Cells_P Parameter: Organism Value: A. thaliana
  misc_feature: MA Experiment 20000495 PARAMETER Experiment Name: At_Guard_Cells_P Parameter: Tissue Value: Guard Cells vs. Leaves
cagcttgcaagttctctctgaaccatagaactccaagcttgaactgtactctactcgtcgtttatatcttactcttttgtttcctcttaccagaaaaaataaataaacagcaattttttcatttttcgactcaaatcatgcaaaccatttcgcctgcgttctcgtgcgatctcaaatccgtaattcaaccgaatctaacggctaagaaagcgcgttactctcacgtaaatggaaagcgcgtgtctgttcgttgcagttacaggtctgagtcgtttagcttccctaacggtgttggctcaagccgagccgattggcaaagctcatgcgccatcttagccagtaaagtagtttcggctgagaattcaagctccgtcgccgtcgttaacggacacagtaacggctccgttgatttaagccttgttccgtcaaagtcgcagcacaacggaaagcctggattgattcagccgttaacgataacagatctatctcccgcgccgtctcatggatctactcttcgtgtcgcgtatcaaggagttccgggagcgtactccgaagcggccgccggaaaagcttacccaaactccgaagctattccttgtgatcaattcgacgttgcgtttcaggcggtggagctttggatcgccgatcgtgctgttctcccagttgagaactctctcggtggttcgattcatagaaattacgatcttctcctccgtcaccgtctccacatcgtcggagaagttcagatcccggttcaccactgtctcttagctcttcccggagttcgtacggattgcatcacgcgagtgatttcgcatcctcaagctctggctcagacggaaggatcgctcaacaaactcactccaaaagcagcgattgaagcgtttcacgacacagccgcggcggcggaatacatcgctgctaacaacctccacgacacggcggcggtagcgagcgcaagagcagctgagctctacggacttcagattctcgccgacgggatccaagacgacgcaggaaacgtcacgcgcttccttatgttggcgcgtgatccgatcattccccgtaccgatcgtccgtttaaaacgagtatcgttttcgcagctcaagaacataaaggaactagcgttttattcaaagtgctttccgcgtttgcgtttcgaaacattagtttgacgaaaatcgaatcgcggccgcatcagaattgtcccgttagagtcgtaggcgacgaaaacgttggaacatcgaagcactttgagtacacattctacgtcgacttcgaagcgtcgatggcggaggcgcgtgcacaaaacgcgttagcggaggtgcaagagtacacgtcattcctcagggtgctgggaagttacccaatggatatgacgccatggtccacgttacctagcgaagacgtatgacacaattaaaaaatttatctgaattttaaataacattatggtaaaattatcataagtaaaatacatggaaactaaagtagaatttgtagaactcgttttgcatgtgaagtgggaggataatattattttatttctcttaaaccaaatattttgtgtgtatgtatttgctactattggaacaagaccggtttgtagtttggttctgatgattacaattgaagatatttcttaagctaag

SEQ ID NO: 50064 - protein, 470 aa, Arabidopsis thaliana
  peptide (1)..(470): Ceres Seq. ID no. 15220851
  misc_feature (173)..(352): Pfam Name: Prephenate dehydratase Pfam Description: Prephenate dehydratase
  misc_feature (128)..(460): Homolog of NCBI NO: 15231489 NR Description: prephenate dehydratase family [Arabidopsis
  misc_feature (104)..(459): Homolog of NCBI NO: 14596233 NR Description: Unknown protein [Arabidopsis thaliana]
  misc_feature (127)..(460): Homolog of NCBI NO: 34394031 NR Description: putative prephenate dehydratase
  misc_feature (104)..(459): Homolog of NCBI NO: 15221096 NR Description: prephenate dehydratase family [Arabidopsis
  misc_feature (82)..(469): Homolog of NCBI NO: 38347597 NR Description: OSJNBa0042I15.10 [Oryza sativa (japonica
  misc_feature (121)..(467): Homolog of NCBI NO: 18390869 NR Description: prephenate dehydratase family [Arabidopsis
  misc_feature (78)..(463): Homolog of NCBI NO: 21593283 NR Description: putative chorismate mutase/prephenate dehydratase
  misc_feature (78)..(463): Homolog of NCBI NO: 15226259 NR Description: prephenate dehydratase family [Arabidopsis
  misc_feature (52)..(469): Homolog of NCBI NO: 15230489 NR Description: prephenate dehydratase family [Arabidopsis
  misc_feature (46)..(470): Homolog of NCBI NO: 15242928 NR Description: prephenate dehydratase family [Arabidopsis
ACKFSLNHRTPSLNCTLLVVYILLFCFLLPEKINKQQFFHFSTQIMQTISPAFSCDLKSVIQPNLTAKKARYSHVNGKRVSVRCSYRSESFSFPNGVGSSRADWQSSCAILASKVVSAENSSSVAVVNGHSNGSVDLSLVPSKSQHNGKPGLIQPLTITDLSPAPSHGSTLRVAYQGVPGAYSEAAAGKAYPNSEAIPCDQFDVAFQAVELWIADRAVLPVENSLGGSIHRNYDLLLRHRLHIVGEVQIPVHHCLLALPGVRTDCITRVISHPQALAQTEGSLNKLTPKAAIEAFHDTAAAAEYIAANNLHDTAAVASARAAELYGLQILADGIQDDAGNVTRFLMLARDPIIPRTDRPFKTSIVFAAQEHKGTSVLFKVLSAFAFRNISLTKIESRPHQNCPVRVVGDENVGTSKHFEYTFYVDFEASMAEARAQNALAEVQEYTSFLRVLGSYPMDMTPWSTLPSEDV

SEQ ID NO: 50065 - protein, 425 aa, Arabidopsis thaliana
  peptide (1)..(425): Ceres Seq. ID no. 15220852
  misc_feature (128)..(307): Pfam Name: Prephenate dehydratase Pfam Description: Prephenate dehydratase
  misc_feature (83)..(415): Homolog of NCBI NO: 15231489 NR Description: prephenate dehydratase family [Arabidopsis
  misc_feature (59)..(414): Homolog of NCBI NO: 14596233 NR Description: Unknown protein [Arabidopsis thaliana]
  misc_feature (82)..(415): Homolog of NCBI NO: 34394031 NR Description: putative prephenate dehydratase
  misc_feature (59)..(414): Homolog of NCBI NO: 15221096 NR Description: prephenate dehydratase family [Arabidopsis
  misc_feature (37)..(424): Homolog of NCBI NO: 38347597 NR Description: OSJNBa0042I15.10 [Oryza sativa (japonica
  misc_feature (76)..(422): Homolog of NCBI NO: 18390869 NR Description: prephenate dehydratase family [Arabidopsis
  misc_feature (33)..(418): Homolog of NCBI NO: 21593283 NR Description: putative chorismate mutase/prephenate dehydratase
  misc_feature (33)..(418): Homolog of NCBI NO: 15226259 NR Description: prephenate dehydratase family [Arabidopsis
  misc_feature (7)..(424): Homolog of NCBI NO: 15230489 NR Description: prephenate dehydratase family [Arabidopsis
  misc_feature (1)..(425): Homolog of NCBI NO: 15242928 NR Description: prephenate dehydratase family [Arabidopsis
MQTISPAFSCDLKSVIQPNLTAKKARYSHVNGKRVSVRCSYRSESFSFPNGVGSSRADWQSSCAILASKVVSAENSSSVAVVNGHSNGSVDLSLVPSKSQHNGKPGLIQPLTITDLSPAPSHGSTLRVAYQGVPGAYSEAAAGKAYPNSEAIPCDQFDVAFQAVELWIADRAVLPVENSLGGSIHRNYDLLLRHRLHIVGEVQIPVHHCLLALPGVRTDCITRVISHPQALAQTEGSLNKLTPKAAIEAFHDTAAAAEYIAANNLHDTAAVASARAAELYGLQILADGIQDDAGNVTRFLMLARDPIIPRTDRPFKTSIVFAAQEHKGTSVLFKVLSAFAFRNISLTKIESRPHQNCPVRVVGDENVGTSKHFEYTFYVDFEASMAEARAQNALAEVQEYTSFLRVLGSYPMDMTPWSTLPSEDV

SEQ ID NO: 50066 - DNA, 855 bp, Arabidopsis thaliana; identical to SEQ ID NO: 38540
  misc_feature (1)..(855): Ceres Seq. ID no. 13592318
  misc_feature: MA Experiment ID: 108668 Result: Down-regulated in Transcription
  misc_feature: MA Experiment 108668 PARAMETER Experiment Name: At_2mM_SA_cDNA_P Parameter: Plant Line Value: WS
  misc_feature: MA Experiment 108668 PARAMETER Experiment Name: At_2mM_SA_cDNA_P Parameter: Timepoint (hr) Value: 6
  misc_feature: MA Experiment 108668 PARAMETER Experiment Name: At_2mM_SA_cDNA_P Parameter: Treatment Value: 2mM SA vs. No Treatment
  misc_feature: MA Experiment ID: 20000184 Result: Up-regulated in Transcription
  misc_feature: MA Experiment 20000184 PARAMETER Experiment Name: At_Shoots__P Parameter: Age (day) Value: 7
  misc_feature: MA Experiment 20000184 PARAMETER Experiment Name: At_Shoots__P Parameter: Tissue Value: Shoots vs. Whole Plant
  misc_feature: MA Experiment ID: 20000227 Result: Up-regulated in Transcription
  misc_feature: MA Experiment 20000227 PARAMETER Experiment Name: At_Root-Tips-vs-Tops_P Parameter: Tissue Value: Root Tips vs. Root Tops
  misc_feature: MA Experiment ID: 20001759 Result: Down-regulated in Transcription
  misc_feature: MA Experiment 20001759 PARAMETER Experiment Name: At_50mM_NH4NO3_L-to-H_P Parameter: Timepoint (hr) Value: 1
  misc_feature: MA Experiment 20001759 PARAMETER Experiment Name: At_50mM_NH4NO3_L-to-H_P Parameter: Tissue Value: Siliques
  misc_feature: MA Experiment 20001759 PARAMETER Experiment Name: At_50mM_NH4NO3_L-to-H_P Parameter: Treatment Value: 50mM NH4NO3 vs 100mM Mannitol

SEQ ID NO: 50067 - protein, 187 aa, Arabidopsis thaliana; identical to SEQ ID NO: 38541
  peptide (1)..(187): Ceres Seq. ID no. 13592319
  misc_feature (14)..(171): Pfam Name: Formin Homology 2 Domain Pfam Description: Formin Homology 2 Domain
  misc_feature (14)..(171): Pfam Name: Formin Homology 2 Domain Pfam Description: Formin Homology 2 Domain
  misc_feature (19)..(164): Homolog of NCBI NO: 6523547 NR Description: hydroxyproline-rich glycoprotein DZ-HRGP
  misc_feature (23)..(164): Homolog of NCBI NO: 6523547 NR Description: hydroxyproline-rich glycoprotein DZ-HRGP
  misc_feature (22)..(164): Homolog of NCBI NO: 5917664 NR Description: extensin-like protein [Lycopersicon esculentum]
  misc_feature (7)..(180): Homolog of NCBI NO: 1084362 NR Description: extensin-like protein S3 - alfalfa
  misc_feature (26)..(183): Homolog of NCBI NO: 1084362 NR Description: extensin-like protein S3 - alfalfa
  misc_feature (19)..(164): Homolog of NCBI NO: 6523547 NR Description: hydroxyproline-rich glycoprotein DZ-HRGP
  misc_feature (22)..(164): Homolog of NCBI NO: 5917664 NR Description: extensin-like protein [Lycopersicon esculentum]
  misc_feature (26)..(183): Homolog of NCBI NO: 1084362 NR Description: extensin-like protein S3 - alfalfa
  misc_feature (1)..(187): Homolog of NCBI NO: 15226024 NR Description: arabinogalactan-protein (AGP9) [Arabidopsis
  misc_feature (1)..(187): Homolog of NCBI NO: 13265426 NR Description: At2g14890 [Arabidopsis thaliana]
  misc_feature (5)..(187): Homolog of NCBI NO: 7441828 NR Description: extensin-like cell wall protein - sea-island
  misc_feature (5)..(171): Homolog of NCBI NO: 7441829 NR Description: proline-rich cell wall protein - upland cotton
  misc_feature (19)..(187): Homolog of NCBI NO: 7441829 NR Description: proline-rich cell wall protein - upland cotton
  misc_feature (7)..(180): Homolog of NCBI NO: 1084362 NR Description: extensin-like protein S3 - alfalfa
  misc_feature (23)..(164): Homolog of NCBI NO: 6523547 NR Description: hydroxyproline-rich glycoprotein DZ-HRGP
  misc_feature (19)..(187): Homolog of NCBI NO: 7441829 NR Description: proline-rich cell wall protein - upland cotton
  misc_feature (5)..(171): Homolog of NCBI NO: 7441829 NR Description: proline-rich cell wall protein - upland cotton
  misc_feature (5)..(187): Homolog of NCBI NO: 7441828 NR Description: extensin-like cell wall protein - sea-island
  misc_feature (1)..(187): Homolog of NCBI NO: 13265426 NR Description: At2g14890 [Arabidopsis thaliana]
  misc_feature (1)..(187): Homolog of NCBI NO: 15226024 NR Description: arabinogalactan-protein (AGP9) [Arabidopsis

SEQ ID NO: 50068 - protein, 160 aa, Arabidopsis thaliana; identical to SEQ ID NO: 38542
  peptide (1)..(160): Ceres Seq. ID no. 13592320
  misc_feature (40)..(158): Pfam Name: Lipoprotein amino terminal region Pfam Description: Lipoprotein amino terminal region
  misc_feature (40)..(158): Pfam Name: Lipoprotein amino terminal region Pfam Description: Lipoprotein amino terminal region

SEQ ID NO: 50069 - DNA, 1840 bp, Arabidopsis thaliana
  misc_feature (1)..(1840): Ceres Seq. ID no. 14302931
  misc_feature: MA Experiment ID: 20000180 Result: Up-regulated in Transcription
  misc_feature: MA Experiment 20000180 PARAMETER Experiment Name: At_Germinating_Seeds_P Parameter: Age (hr) Value: 24 vs. 0
  misc_feature: MA Experiment 20000180 PARAMETER Experiment Name: At_Germinating_Seeds_P Parameter: Tissue Value: Germinating Seeds
  misc_feature: MA Experiment ID: 20000227 Result: Up-regulated in Transcription
  misc_feature: MA Experiment 20000227 PARAMETER Experiment Name: At_Root-Tips-vs-Tops_P Parameter: Tissue Value: Root Tips vs. Root Tops
  misc_feature: MA Experiment ID: 20000234 Result: Down-regulated in Transcription
  misc_feature: MA Experiment 20000234 PARAMETER Experiment Name: At_Siliques_P Parameter: Age (day) Value: 21
  misc_feature: MA Experiment 20000234 PARAMETER Experiment Name: At_Siliques_P Parameter: Organism Value: A. thaliana
  misc_feature: MA Experiment 20000234 PARAMETER Experiment Name: At_Siliques_P Parameter: Plant Line Value: WS
  misc_feature: MA Experiment 20000234 PARAMETER Experiment Name: At_Siliques_P Parameter: Tissue Value: Less Than 5mm Siliques vs. Whole Plant
  misc_feature: MA Experiment ID: 20000264 Result: Up-regulated in Transcription
  misc_feature: MA Experiment 20000264 PARAMETER Experiment Name: At_Open_Flower_P Parameter: Age (day) Value: 21
  misc_feature: MA Experiment 20000264 PARAMETER Experiment Name: At_Open_Flower_P Parameter: Plant Line Value: WS
  misc_feature: MA Experiment 20000264 PARAMETER Experiment Name: At_Open_Flower_P Parameter: Tissue Value: Open Flower vs. Whole Plant
  misc_feature: MA Experiment ID: 20000265 Result: Up-regulated in Transcription
  misc_feature: MA Experiment 20000265 PARAMETER Experiment Name: At_Open_Flower_P Parameter: Age (day) Value: 21
  misc_feature: MA Experiment 20000265 PARAMETER Experiment Name: At_Open_Flower_P Parameter: Plant Line Value: WS
  misc_feature: MA Experiment 20000265 PARAMETER Experiment Name: At_Open_Flower_P Parameter: Tissue Value: Closed Flower vs. Whole Plant
  misc_feature: MA Experiment ID: 20000286 Result: Up-regulated in Transcription
  misc_feature: MA Experiment 20000286 PARAMETER Experiment Name: At_Open_Flower_P Parameter: Age (day) Value: 21
  misc_feature: MA Experiment 20000286 PARAMETER Experiment Name: At_Open_Flower_P Parameter: Plant Line Value: WS
  misc_feature: MA Experiment 20000286 PARAMETER Experiment Name: At_Open_Flower_P Parameter: Tissue Value: Half Open vs. Whole Plant
  misc_feature: MA Experiment ID: 20000438 Result: Down-regulated in Transcription
  misc_feature: MA Experiment 20000438 PARAMETER Experiment Name: At_Shoots__P Parameter: Age (day) Value: 14
  misc_feature: MA Experiment 20000438 PARAMETER Experiment Name: At_Shoots__P Parameter: Tissue Value: Shoots vs. Whole Plant
  misc_feature: MA Experiment ID: 20000794 Result: Up-regulated in Transcription
  misc_feature: MA Experiment 20000794 PARAMETER Experiment Name: At_Petals_P Parameter: Age (day) Value: 23-25 days
  misc_feature: MA Experiment 20000794 PARAMETER Experiment Name: At_Petals_P Parameter: Plant Line Value: WS
  misc_feature: MA Experiment 20000794 PARAMETER Experiment Name: At_Petals_P Parameter: Tissue Value: Petals vs. Whole plant
  misc_feature: MA Experiment ID: 20001555 Result: Up-regulated in Transcription
  misc_feature: MA Experiment 20001555 PARAMETER Experiment Name: At_Drought_Soil_Dry_P Parameter: Age (day) Value: 24
  misc_feature: MA Experiment 20001555 PARAMETER Experiment Name: At_Drought_Soil_Dry_P Parameter: Organism Value: A. thaliana
  misc_feature: MA Experiment 20001555 PARAMETER Experiment Name: At_Drought_Soil_Dry_P Parameter: Plant Line Value: WS
  misc_feature: MA Experiment 20001555 PARAMETER Experiment Name: At_Drought_Soil_Dry_P Parameter: Post Timepoint (hr) Value: None
  misc_feature: MA Experiment 20001555 PARAMETER Experiment Name: At_Drought_Soil_Dry_P Parameter: Post-Treatment Value: None
  misc_feature: MA Experiment 20001555 PARAMETER Experiment Name: At_Drought_Soil_Dry_P Parameter: Timepoint (day) Value: 10
  misc_feature: MA Experiment 20001555 PARAMETER Experiment Name: At_Drought_Soil_Dry_P Parameter: Treatment Value: Drought vs. No Drought
  misc_feature: MA Experiment ID: 20001904 Result: Up-regulated in Transcription
  misc_feature: MA Experiment 20001904 PARAMETER Experiment Name: At_Drought_Reproduction_P Parameter: Age (day) Value: 37
  misc_feature: MA Experiment 20001904 PARAMETER Experiment Name: At_Drought_Reproduction_P Parameter: Organism Value: A. thaliana
  misc_feature: MA Experiment 20001904 PARAMETER Experiment Name: At_Drought_Reproduction_P Parameter: Plant Line Value: WS
  misc_feature: MA Experiment 20001904 PARAMETER Experiment Name: At_Drought_Reproduction_P Parameter: Timepoint (day) Value: 7
  misc_feature: MA Experiment 20001904 PARAMETER Experiment Name: At_Drought_Reproduction_P Parameter: Tissue Value: Rosettes
  misc_feature: MA Experiment 20001904 PARAMETER Experiment Name: At_Drought_Reproduction_P Parameter: Treatment Value: Drought vs. No Drought
  misc_feature: MA Experiment ID: 20001905 Result: Up-regulated in Transcription
  misc_feature: MA Experiment 20001905 PARAMETER Experiment Name: At_Drought_Reproduction_P Parameter: Age (day) Value: 40
  misc_feature: MA Experiment 20001905 PARAMETER Experiment Name: At_Drought_Reproduction_P Parameter: Organism Value: A. thaliana
  misc_feature: MA Experiment 20001905 PARAMETER Experiment Name: At_Drought_Reproduction_P Parameter: Plant Line Value: WS
  misc_feature: MA Experiment 20001905 PARAMETER Experiment Name: At_Drought_Reproduction_P Parameter: Timepoint (day) Value: 10
  misc_feature: MA Experiment 20001905 PARAMETER Experiment Name: At_Drought_Reproduction_P Parameter: Tissue Value: Rosettes
  misc_feature: MA Experiment 20001905 PARAMETER Experiment Name: At_Drought_Reproduction_P Parameter: Treatment Value: Drought vs. No Drought
  misc_feature: MA Experiment ID: 20001911 Result: Down-regulated in Transcription
  misc_feature: MA Experiment 20001911 PARAMETER Experiment Name: At_Drought_Reproduction_P Parameter: Age (day) Value: 40
  misc_feature: MA Experiment 20001911 PARAMETER Experiment Name: At_Drought_Reproduction_P Parameter: Organism Value: A. thaliana
  misc_feature: MA Experiment 20001911 PARAMETER Experiment Name: At_Drought_Reproduction_P Parameter: Plant Line Value: WS
  misc_feature: MA Experiment 20001911 PARAMETER Experiment Name: At_Drought_Reproduction_P Parameter: Timepoint (day) Value: 10
  misc_feature: MA Experiment 20001911 PARAMETER Experiment Name: At_Drought_Reproduction_P Parameter: Tissue Value: Flowers
  misc_feature: MA Experiment 20001911 PARAMETER Experiment Name: At_Drought_Reproduction_P Parameter: Treatment Value: Drought vs. No Drought
ccccccccccccgaacaactaaactaattgacatttgacaataaaaagctgaactttattatgtatctctaggttttttccttgagagtttctctctttgaagtcatttacgtatatatatataaacccttgcaccattcttcttcgtcttgttaagcttttaagaatctctactcacattttctctgtaaaaatgggaactaggttccaatcattcttgctcgtgttcttgctttcatgtttaatcctcatatcaactgcctcgtgtgagcgaaatggtgatggaacgattagaattggattgaagaagaggaaactagaccggagcaacaggctagcttctcagctttttttgaaaaaccgagggtctcattggtctcccaaacactattttcgcctgaacgatgaaaatgcggatatggttccgctgaaaaactatttggatgctcaatactatggtgacattaccattggtactcctcctcagaagttcactgtgatctttgatactggtagctccaatctctggataccatctactaaatgttacctatcggttgcttgttatttccactccaagtacaaggctagccagtcatcgtcatatagaaagaacggaaaacccgcgtctatccgctatgggacgggtgctatttctggttactttagcaatgatgatgttaaagttggtgatattgttgtgaaagagcaggaattcatagaggctactagtgagcctggtataacattcttgctagcaaagtttgatggtatcctcggtttgggtttcaaagagatttctgtaggaaactcaactccggtttggtataacatggtagaaaaaggtttagttaaggaaccgattttttcgttctggcttaaccgtaacccgaaagatccagaaggcggtgagattgttttcggtggagtcgacccgaagcacttcaaaggagagcatacttttgttcctgtgacacataaaggttactggcagtttgacatgggtgatctccaaattgctggcaaaccaaccggatattgtgctaaaggttgttctgctattgctgattccggaacttctctgctcaccggtccatcgactgtcatcacgatgatcaatcacgcgataggagcacaaggaattgtaagccgtgaatgcaaggccgtggtggatcaatacggaaaaaccatgttgaattctcttctagctcaggaggatccgaagaaagtatgctcacaaattggagtctgcgcttatgatggtacacagagtgtgagtatggggatccagtcagttgtagacgatggaacatcgggtcttttaaaccaagcgatgtgcagtgcttgcgaaatggcagccgtgtggatggagagcgaattgactcagaatcaaacacaagaacgcatactcgcttatgctgctgagctatgtgaccatataccaacccaaaaccaacaatcagcagtggactgtgggagggtttcgtcgatgcctatagtcacattctcaattggtggcagaagctttgatctaactcctcaagactatatattcaagatcggggaaggagttgagtctcagtgcaccagcggtttcacggcaatggatattgctccgcctcgtggacctctctggatcttgggtgatatcttcatgggaccataccacacagtgttcgattatgggaaaggaagagttggattcgccaaagctgcttaaacaatatctcttctttaataccctcgttttttatatgatgtttgtcaatgtgtttgtaataacttaaaacatattgctatcctagaatggtatcatcttaatacagatttttatttggtt

SEQ ID NO: 50070 - protein, 508 aa, Arabidopsis thaliana; identical to SEQ ID NO: 37267
  peptide (1)..(508): Ceres Seq. ID no. 14302932
  misc_feature (32)..(318): Pfam Name: Eukaryotic aspartyl protease Pfam Description: Eukaryotic aspartyl protease
  misc_feature (1)..(508): Homolog of NCBI NO: 7435838 NR Description: probable aspartic proteinase (EC 3.4.23.-) 1 -
  misc_feature (1)..(508): Homolog of NCBI NO: 21616053 NR Description: aspartic proteinase [Theobroma cacao]
  misc_feature (1)..(508): Homolog of NCBI NO: 15233518 NR Description: aspartic protease -related [Arabidopsis thaliana]

SEQ ID NO: 50071 - protein, 433 aa, Arabidopsis thaliana; identical to SEQ ID NO: 37268
  peptide (1)..(433): Ceres Seq. ID no. 14302933
  misc_feature (1)..(243): Pfam Name: Eukaryotic aspartyl protease Pfam Description: Eukaryotic aspartyl protease
  misc_feature (1)..(433): Homolog of NCBI NO: 7435838 NR Description: probable aspartic proteinase (EC 3.4.23.-) 1 -
  misc_feature (1)..(433): Homolog of NCBI NO: 21616053 NR Description: aspartic proteinase [Theobroma cacao]
  misc_feature (1)..(433): Homolog of NCBI NO: 15233518 NR Description: aspartic protease -related [Arabidopsis thaliana]

SEQ ID NO: 50072 - protein, 295 aa, Arabidopsis thaliana; identical to SEQ ID NO: 37269
  peptide (1)..(295): Ceres Seq. ID no. 14302934
  misc_feature (1)..(105): Pfam Name: Eukaryotic aspartyl protease Pfam Description: Eukaryotic aspartyl protease
  misc_feature (1)..(295): Homolog of NCBI NO: 7435838 NR Description: probable aspartic proteinase (EC 3.4.23.-) 1 -
  misc_feature (1)..(295): Homolog of NCBI NO: 21616053 NR Description: aspartic proteinase [Theobroma cacao]
  misc_feature (1)..(295): Homolog of NCBI NO: 15233518 NR Description: aspartic protease -related [Arabidopsis thaliana]

SEQ ID NO: 50073 - DNA, 1215 bp, Arabidopsis thaliana
  misc_feature (1)..(1215): Ceres Seq. ID no. 12605629
  misc_feature: MA Experiment ID: 20000166 Result: Up-regulated in Transcription
  misc_feature: MA Experiment 20000166 PARAMETER Experiment Name: At_100uM_ABA_P Parameter: Age (day) Value: 14
  misc_feature: MA Experiment 20000166 PARAMETER Experiment Name: At_100uM_ABA_P Parameter: Organism Value: A. thaliana
  misc_feature: MA Experiment 20000166 PARAMETER Experiment Name: At_100uM_ABA_P Parameter: Plant Line Value: WS
  misc_feature: MA Experiment 20000166 PARAMETER Experiment Name: At_100uM_ABA_P Parameter: Timepoint (hr) Value: 1
  misc_feature: MA Experiment 20000166 PARAMETER Experiment Name: At_100uM_ABA_P Parameter: Tissue Value: Aerial
  misc_feature: MA Experiment 20000166 PARAMETER Experiment Name: At_100uM_ABA_P Parameter: Treatment Value: 100uM ABA vs. No Treatment
  misc_feature: MA Experiment ID: 20000169 Result: Up-regulated in Transcription
  misc_feature: MA Experiment 20000169 PARAMETER Experiment Name: At_100uM_ABA_P Parameter: Age (day) Value: 14
  misc_feature: MA Experiment 20000169 PARAMETER Experiment Name: At_100uM_ABA_P Parameter: Organism Value: A. thaliana
  misc_feature: MA Experiment 20000169 PARAMETER Experiment Name: At_100uM_ABA_P Parameter: Plant Line Value: WS
  misc_feature: MA Experiment 20000169 PARAMETER Experiment Name: At_100uM_ABA_P Parameter: Timepoint (hr) Value: 6
  misc_feature: MA Experiment 20000169 PARAMETER Experiment Name: At_100uM_ABA_P Parameter: Tissue Value: Aerial
  misc_feature: MA Experiment 20000169 PARAMETER Experiment Name: At_100uM_ABA_P Parameter: Treatment Value: 100uM ABA vs. No Treatment
  misc_feature: MA Experiment ID: 20000182 Result: Up-regulated in Transcription
  misc_feature: MA Experiment 20000182 PARAMETER Experiment Name: At_2mM_SA_P Parameter: Age (day) Value: 14
  misc_feature: MA Experiment 20000182 PARAMETER Experiment Name: At_2mM_SA_P Parameter: Organism Value: A. thaliana
  misc_feature: MA Experiment 20000182 PARAMETER Experiment Name: At_2mM_SA_P Parameter: Plant Line Value: WS
  misc_feature: MA Experiment 20000182 PARAMETER Experiment Name: At_2mM_SA_P Parameter: Timepoint (hr) Value: 6
  misc_feature: MA Experiment 20000182 PARAMETER Experiment Name: At_2mM_SA_P Parameter: Tissue Value: Aerial
  misc_feature: MA Experiment 20000182 PARAMETER Experiment Name: At_2mM_SA_P Parameter: Treatment Value: 2mM SA vs. No Treatment
  misc_feature: MA Experiment ID: 20000227 Result: Down-regulated in Transcription
  misc_feature: MA Experiment 20000227 PARAMETER Experiment Name: At_Root-Tips-vs-Tops_P Parameter: Tissue Value: Root Tips vs. Root Tops
  misc_feature: MA Experiment ID: 20000234 Result: Down-regulated in Transcription
  misc_feature: MA Experiment 20000234 PARAMETER Experiment Name: At_Siliques_P Parameter: Age (day) Value: 21
  misc_feature: MA Experiment 20000234 PARAMETER Experiment Name: At_Siliques_P Parameter: Organism Value: A. thaliana
  misc_feature: MA Experiment 20000234 PARAMETER Experiment Name: At_Siliques_P Parameter: Plant Line Value: WS
  misc_feature: MA Experiment 20000234 PARAMETER Experiment Name: At_Siliques_P Parameter: Tissue Value: Less Than 5mm Siliques vs. Whole Plant
  misc_feature: MA Experiment ID: 20000235 Result: Down-regulated in Transcription
  misc_feature: MA Experiment 20000235 PARAMETER Experiment Name: At_Siliques_P Parameter: Age (day) Value: 21
  misc_feature: MA Experiment 20000235 PARAMETER Experiment Name: At_Siliques_P Parameter: Organism Value: A. thaliana
  misc_feature: MA Experiment 20000235 PARAMETER Experiment Name: At_Siliques_P Parameter: Plant Line Value: WS
  misc_feature: MA Experiment 20000235 PARAMETER Experiment Name: At_Siliques_P Parameter: Tissue Value: 5-10mm Siliques vs. Whole Plant
  misc_feature: MA Experiment ID: 20000264 Result: Down-regulated in Transcription
  misc_feature: MA Experiment 20000264 PARAMETER Experiment Name: At_Open_Flower_P Parameter: Age (day) Value: 21
  misc_feature: MA Experiment 20000264 PARAMETER Experiment Name: At_Open_Flower_P Parameter: Plant Line Value: WS
  misc_feature: MA Experiment 20000264 PARAMETER Experiment Name: At_Open_Flower_P Parameter: Tissue Value: Open Flower vs. Whole Plant
  misc_feature: MA Experiment ID: 20000265 Result: Down-regulated in Transcription
  misc_feature: MA Experiment 20000265 PARAMETER Experiment Name: At_Open_Flower_P Parameter: Age (day) Value: 21
  misc_feature: MA Experiment 20000265 PARAMETER Experiment Name: At_Open_Flower_P Parameter: Plant Line Value: WS
  misc_feature: MA Experiment 20000265 PARAMETER Experiment Name: At_Open_Flower_P Parameter: Tissue Value: Closed Flower vs. Whole Plant
  misc_feature: MA Experiment ID: 20000286 Result: Down-regulated in Transcription
  misc_feature: MA Experiment 20000286 PARAMETER Experiment Name: At_Open_Flower_P Parameter: Age (day) Value: 21
  misc_feature: MA Experiment 20000286 PARAMETER Experiment Name: At_Open_Flower_P Parameter: Plant Line Value: WS
  misc_feature: MA Experiment 20000286 PARAMETER Experiment Name: At_Open_Flower_P Parameter: Tissue Value: Half Open vs. Whole Plant
  misc_feature: MA Experiment ID: 20000438 Result: Down-regulated in Transcription
  misc_feature: MA Experiment 20000438 PARAMETER Experiment Name: At_Shoots__P Parameter: Age (day) Value: 14
  misc_feature: MA Experiment 20000438 PARAMETER Experiment Name: At_Shoots__P Parameter: Tissue Value: Shoots vs. Whole Plant
  misc_feature: MA Experiment ID: 20000452 Result: Up-regulated in Transcription
  misc_feature: MA Experiment 20000452 PARAMETER Experiment Name: At_CS6879_Shoots-Roots_P Parameter: Age (day) Value: 14
  misc_feature: MA Experiment 20000452 PARAMETER Experiment Name: At_CS6879_Shoots-Roots_P Parameter: Organism Value: A. thaliana
  misc_feature: MA Experiment 20000452 PARAMETER Experiment Name: At_CS6879_Shoots-Roots_P Parameter: Plant Line Value: CS6879 vs. WS
  misc_feature: MA Experiment 20000452 PARAMETER Experiment Name: At_CS6879_Shoots-Roots_P Parameter: Tissue Value: Shoots
  misc_feature: MA Experiment ID: 20000453 Result: Up-regulated in Transcription
  misc_feature: MA Experiment 20000453 PARAMETER Experiment Name: At_100uM_ABA_P Parameter: Age (day) Value: 15
  misc_feature: MA Experiment 20000453 PARAMETER Experiment Name: At_100uM_ABA_P Parameter: Organism Value: A. thaliana
  misc_feature: MA Experiment 20000453 PARAMETER Experiment Name: At_100uM_ABA_P Parameter: Plant Line Value: WS
  misc_feature: MA Experiment 20000453 PARAMETER Experiment Name: At_100uM_ABA_P Parameter: Timepoint (hr) Value: 24
  misc_feature: MA Experiment 20000453 PARAMETER Experiment Name: At_100uM_ABA_P Parameter: Tissue Value: Aerial
  misc_feature: MA Experiment 20000453 PARAMETER Experiment Name: At_100uM_ABA_P Parameter: Treatment Value: 100uM ABA vs. No Treatment
  misc_feature: MA Experiment ID: 20000527 Result: Down-regulated in Transcription
  misc_feature: MA Experiment 20000527 PARAMETER Experiment Name: At_10percent_PEG_P Parameter: Age (day) Value: 20
  misc_feature: MA Experiment 20000527 PARAMETER Experiment Name: At_10percent_PEG_P Parameter: Organism Value: A. thaliana
  misc_feature: MA Experiment 20000527 PARAMETER Experiment Name: At_10percent_PEG_P Parameter: Plant Line Value: WS
  misc_feature: MA Experiment 20000527 PARAMETER Experiment Name: At_10percent_PEG_P Parameter: Timepoint (day) Value: 20
  misc_feature: MA Experiment 20000527 PARAMETER Experiment Name: At_10percent_PEG_P Parameter: Tissue Value: Whole Plant
  misc_feature: MA Experiment 20000527 PARAMETER Experiment Name: At_10percent_PEG_P Parameter: Treatment Value: 10percent PEG vs. No Treatment
  misc_feature: MA Experiment ID: 20000709 Result: Up-regulated in Transcription
  misc_feature: MA Experiment 20000709 PARAMETER Experiment Name: At_15mM_NH4NO3_L-to-H_P Parameter: Age (hr) Value: 14
  misc_feature: MA Experiment 20000709 PARAMETER Experiment Name: At_15mM_NH4NO3_L-to-H_P Parameter: Organism Value: A. thaliana
  misc_feature: MA Experiment 20000709 PARAMETER Experiment Name: At_15mM_NH4NO3_L-to-H_P Parameter: Plant Line Value: WS
  misc_feature: MA Experiment 20000709 PARAMETER Experiment Name: At_15mM_NH4NO3_L-to-H_P Parameter: Timepoint (hr) Value: 4
  misc_feature: MA Experiment 20000709 PARAMETER Experiment Name: At_15mM_NH4NO3_L-to-H_P Parameter: Tissue Value: Aerial
  misc_feature: MA Experiment 20000709 PARAMETER Experiment Name: At_15mM_NH4NO3_L-to-H_P Parameter: Treatment Value: 15mM NH4NO3 vs. 30mM Mannitol
  misc_feature: MA Experiment ID: 20000794 Result: Down-regulated in Transcription
  misc_feature: MA Experiment 20000794 PARAMETER Experiment Name: At_Petals_P Parameter: Age (day) Value: 23-25 days
  misc_feature: MA Experiment 20000794 PARAMETER Experiment Name: At_Petals_P Parameter: Plant Line Value: WS
  misc_feature: MA Experiment 20000794 PARAMETER Experiment Name: At_Petals_P Parameter: Tissue Value: Petals vs. Whole plant
  misc_feature: MA Experiment ID: 20001450 Result: Up-regulated in Transcription
  misc_feature: MA Experiment 20001450 PARAMETER Experiment Name: At_Far-red-induction_P Parameter: Age (day) Value: 7
  misc_feature: MA Experiment 20001450 PARAMETER Experiment Name: At_Far-red-induction_P Parameter: Light Value: Far-red vs. White
  misc_feature: MA Experiment 20001450 PARAMETER Experiment Name: At_Far-red-induction_P Parameter: Organism Value: A. thaliana
  misc_feature: MA Experiment 20001450 PARAMETER Experiment Name: At_Far-red-induction_P Parameter: Plant Line Value: Columbia
  misc_feature: MA Experiment 20001450 PARAMETER Experiment Name: At_Far-red-induction_P Parameter: Timepoint (hr) Value: 8
  misc_feature: MA Experiment 20001450 PARAMETER Experiment Name: At_Far-red-induction_P Parameter: Tissue Value: Whole Plant
  misc_feature: MA Experiment ID: 20001451 Result: Up-regulated in Transcription
  misc_feature: MA Experiment 20001451 PARAMETER Experiment Name: At_Far-red-induction_P Parameter: Age (day) Value: 7
  misc_feature: MA Experiment 20001451 PARAMETER Experiment Name: At_Far-red-induction_P Parameter: Light Value: Far-red vs. White
  misc_feature: MA Experiment 20001451 PARAMETER Experiment Name: At_Far-red-induction_P Parameter: Organism Value: A. thaliana
  misc_feature: MA Experiment 20001451 PARAMETER Experiment Name: At_Far-red-induction_P Parameter: Plant Line Value: Columbia
  misc_feature: MA Experiment 20001451 PARAMETER Experiment Name: At_Far-red-induction_P Parameter: Timepoint (hr) Value: 24
  misc_feature: MA Experiment 20001451 PARAMETER Experiment Name: At_Far-red-induction_P Parameter: Tissue Value: Whole Plant
  misc_feature: MA Experiment ID: 20001560 Result: Down-regulated in Transcription
  misc_feature: MA Experiment 20001560 PARAMETER Experiment Name: At_Drought_Soil_Dry_P Parameter: Age (day) Value: 28
  misc_feature: MA Experiment 20001560 PARAMETER Experiment Name: At_Drought_Soil_Dry_P Parameter: Organism Value: A. thaliana
  misc_feature: MA Experiment 20001560 PARAMETER Experiment Name: At_Drought_Soil_Dry_P Parameter: Plant Line Value: WS
  misc_feature: MA Experiment 20001560 PARAMETER Experiment Name: At_Drought_Soil_Dry_P Parameter: Post Timepoint (hr) Value: None
  misc_feature: MA Experiment 20001560 PARAMETER Experiment Name: At_Drought_Soil_Dry_P Parameter: Post-Treatment Value: None
  misc_feature: MA Experiment 20001560 PARAMETER Experiment Name: At_Drought_Soil_Dry_P Parameter: Timepoint (day) Value: 14
  misc_feature: MA Experiment 20001560 PARAMETER Experiment Name: At_Drought_Soil_Dry_P Parameter: Treatment Value: Drought vs. No Drought
  misc_feature: MA Experiment ID: 20001905 Result: Up-regulated in Transcription
  misc_feature: MA Experiment 20001905 PARAMETER Experiment Name: At_Drought_Reproduction_P Parameter: Age (day) Value: 40
  misc_feature: MA Experiment 20001905 PARAMETER Experiment Name: At_Drought_Reproduction_P Parameter: Organism Value: A. thaliana
  misc_feature: MA Experiment 20001905 PARAMETER Experiment Name: At_Drought_Reproduction_P Parameter: Plant Line Value: WS
  misc_feature: MA Experiment 20001905 PARAMETER Experiment Name: At_Drought_Reproduction_P Parameter: Timepoint (day) Value: 10
  misc_feature: MA Experiment 20001905 PARAMETER Experiment Name: At_Drought_Reproduction_P Parameter: Tissue Value: Rosettes
  misc_feature: MA Experiment 20001905 PARAMETER Experiment Name: At_Drought_Reproduction_P Parameter: Treatment Value: Drought vs. No Drought
aaactcttaaaaaaagctctctttgtggatcacgaaactatacacaaattcacacataaaatttagaaaatatgggaggcacaaaattgacccatgtgaccaccactaaccctaataactccaacattcatggaccagtcgtagacgaagtagaaggccttattaaagtttacaaagatggccacgtggaacgatcccagctcttgccatgtgttgatccctcactacccctcgagctcggcgtgacttgctccgatgttgttatagacaagttgaccaacgtatgggcacgtctctatgtcccgatgaccacgaccaagtcgtcggtctctaagctccctttgattgtttacttccacggtggaggattctgcgtcggctcggcttcttggttgtgttaccacgagttcttggctagattgtccgctcgctcgcggtgcttggttatgtctgtaaattaccgtctagccccagagaaccctcttccagcagcttacgaagatggggtcaatgccattctttggctcaacaaagcaagaaacgataacttgtgggccaagcaatgtgactttggcagaatattcttggcaggagatagcgctggaggcaacatcgcgcagcaagtcgcggcaagattagcatcccccgaagatctagcactgaagatagaaggaaccatcctgatccaacctttctacagcggagaggagcgtacggagagtgagaggcgcgtggggaacgacaaaacagcggtgctgacactggcgtcgtccgacgcatggtggaggatgtctttgccacgtggtgcaaacagagagcatccttattgtaaacctgtgaagatgatcatcaagtcgtcgacggtgacaaggacgctggtgtgcgtggccgagatggatctgctcatggacagcaacatggagatgtgcgatggtaatgaggacgtgatcaagcgcgtgttgcacaaaggcgttggtcacgcgtttcatattctcggaaagtctcagcttgctcacaccacaactctggagatgttgtgccagatcgacgcttttatccaccactacgatcccttaaattagttctgtattagtatatattatttttcattgtagctcatagtatatgtttgtatcttaagtaccaaaaaggtttttgtgttgtatataatatagttactatactctttagggattcctacaagatgtaagtttt

SEQ ID NO: 50074 - protein, 336 aa, Arabidopsis thaliana
  peptide (1)..(336): Ceres Seq. ID no. 12605630
  misc_feature (76)..(134): Pfam Name: Carboxylesterase Pfam Description: Carboxylesterase
  misc_feature (23)..(335): Homolog of NCBI NO: 34393904 NR Description: putative cell death associated protein
  misc_feature (23)..(307): Homolog of NCBI NO: 542058 NR Description: HSR203J protein - common tobacco
  misc_feature (23)..(284): Homolog of NCBI NO: 15240090 NR Description: putative protein; protein id: At5g06570.1
  misc_feature (23)..(307): Homolog of NCBI NO: 7417008 NR Description: cell death associated protein [Nicotiana tabacum]
  misc_feature (23)..(307): Homolog of NCBI NO: 4190952 NR Description: similar to hsr203J [Lycopersicon esculentum]
  misc_feature (24)..(332): Homolog of NCBI NO: 26023941 NR Description: putative serine hydrolase [Vitis vinifera]
  misc_feature (23)..(333): Homolog of NCBI NO: 5487873 NR Description: PrMC3 [Pinus radiata]
  misc_feature (20)..(330): Homolog of NCBI NO: 21593215 NR Description: unknown [Arabidopsis thaliana]
  misc_feature (20)..(330): Homolog of NCBI NO: 15237267 NR Description: putative protein
  misc_feature (1)..(336): Homolog of NCBI NO: 18409077 NR Description: expressed protein
MGGTKLTHVTTTNPNNSNIHGPVVDEVEGLIKVYKDGHVERSQLLPCVDPSLPLELGVTCSDVVIDKLTNVWARLYVPMTTTKSSVSKLPLIVYFHGGGFCVGSASWLCYHEFLARLSARSRCLVMSVNYRLAPENPLPAAYEDGVNAILWLNKARNDNLWAKQCDFGRIFLAGDSAGGNIAQQVAARLASPEDLALKIEGTILIQPFYSGEERTESERRVGNDKTAVLTLASSDAWWRMSLPRGANREHPYCKPVKMIIKSSTVTRTLVCVAEMDLLMDSNMEMCDGNEDVIKRVLHKGVGHAFHILGKSQLAHTTTLEMLCQIDAFIHHYDPLN

SEQ ID NO: 50075 - protein, 258 aa, Arabidopsis thaliana
  peptide (1)..(258): Ceres Seq. ID no. 12605631
  misc_feature (1)..(56): Pfam Name: Carboxylesterase Pfam Description: Carboxylesterase
  misc_feature (1)..(257): Homolog of NCBI NO: 34393904 NR Description: putative cell death associated protein
  misc_feature (1)..(229): Homolog of NCBI NO: 542058 NR Description: HSR203J protein - common tobacco
  misc_feature (1)..(206): Homolog of NCBI NO: 15240090 NR Description: putative protein; protein id: At5g06570.1
  misc_feature (1)..(229): Homolog of NCBI NO: 7417008 NR Description: cell death associated protein [Nicotiana tabacum]
  misc_feature (1)..(229): Homolog of NCBI NO: 4190952 NR Description: similar to hsr203J [Lycopersicon esculentum]
  misc_feature (1)..(254): Homolog of NCBI NO: 26023941 NR Description: putative serine hydrolase [Vitis vinifera]
  misc_feature (1)..(255): Homolog of NCBI NO: 5487873 NR Description: PrMC3 [Pinus radiata]
  misc_feature (1)..(252): Homolog of NCBI NO: 21593215 NR Description: unknown [Arabidopsis thaliana]
  misc_feature (1)..(252): Homolog of NCBI NO: 15237267 NR Description: putative protein
  misc_feature (1)..(258): Homolog of NCBI NO: 18409077 NR Description: expressed protein
MTTTKSSVSKLPLIVYFHGGGFCVGSASWLCYHEFLARLSARSRCLVMSVNYRLAPENPLPAAYEDGVNAILWLNKARNDNLWAKQCDFGRIFLAGDSAGGNIAQQVAARLASPEDLALKIEGTILIQPFYSGEERTESERRVGNDKTAVLTLASSDAWWRMSLPRGANREHPYCKPVKMIIKSSTVTRTLVCVAEMDLLMDSNMEMCDGNEDVIKRVLHKGVGHAFHILGKSQLAHTTTLEMLCQIDAFIHHYDPLN

SEQ ID NO: 50076 - protein, 211 aa, Arabidopsis thaliana
  peptide (1)..(211): Ceres Seq. ID no. 12605632
  misc_feature (1)..(210): Homolog of NCBI NO: 34393904 NR Description: putative cell death associated protein
  misc_feature (1)..(182): Homolog of NCBI NO: 542058 NR Description: HSR203J protein - common tobacco
  misc_feature (1)..(159): Homolog of NCBI NO: 15240090 NR Description: putative protein; protein id: At5g06570.1
  misc_feature (1)..(182): Homolog of NCBI NO: 7417008 NR Description: cell death associated protein [Nicotiana tabacum]
  misc_feature (1)..(182): Homolog of NCBI NO: 4190952 NR Description: similar to hsr203J [Lycopersicon esculentum]
  misc_feature (1)..(207): Homolog of NCBI NO: 26023941 NR Description: putative serine hydrolase [Vitis vinifera]
  misc_feature (1)..(208): Homolog of NCBI NO: 5487873 NR Description: PrMC3 [Pinus radiata]
  misc_feature (1)..(205): Homolog of NCBI NO: 21593215 NR Description: unknown [Arabidopsis thaliana]
  misc_feature (1)..(205): Homolog of NCBI NO: 15237267 NR Description: putative protein
  misc_feature (1)..(211): Homolog of NCBI NO: 18409077 NR Description: expressed protein
MSVNYRLAPENPLPAAYEDGVNAILWLNKARNDNLWAKQCDFGRIFLAGDSAGGNIAQQVAARLASPEDLALKIEGTILIQPFYSGEERTESERRVGNDKTAVLTLASSDAWWRMSLPRGANREHPYCKPVKMIIKSSTVTRTLVCVAEMDLLMDSNMEMCDGNEDVIKRVLHKGVGHAFHILGKSQLAHTTTLEMLCQIDAFIHHYDPLN

SEQ ID NO: 50077 - DNA, 1095 bp, Arabidopsis thaliana
  misc_feature (1)..(1095): Ceres Seq. ID no. 13647906
  misc_feature: MA Experiment ID: 20000179 Result: Down-regulated in Transcription
  misc_feature: MA Experiment 20000179 PARAMETER Experiment Name: At_Germinating_Seeds_P Parameter: Age (hr) Value: 6 vs. 0
  misc_feature: MA Experiment 20000179 PARAMETER Experiment Name: At_Germinating_Seeds_P Parameter: Tissue Value: Germinating Seeds
  misc_feature: MA Experiment ID: 20000180 Result: Down-regulated in Transcription
  misc_feature: MA Experiment 20000180 PARAMETER Experiment Name: At_Germinating_Seeds_P Parameter: Age (hr) Value: 24 vs. 0
  misc_feature: MA Experiment 20000180 PARAMETER Experiment Name: At_Germinating_Seeds_P Parameter: Tissue Value: Germinating Seeds
  misc_feature: MA Experiment ID: 20000264 Result: Up-regulated in Transcription
  misc_feature: MA Experiment 20000264 PARAMETER Experiment Name: At_Open_Flower_P Parameter: Age (day) Value: 21
  misc_feature: MA Experiment 20000264 PARAMETER Experiment Name: At_Open_Flower_P Parameter: Plant Line Value: WS
  misc_feature: MA Experiment 20000264 PARAMETER Experiment Name: At_Open_Flower_P Parameter: Tissue Value: Open Flower vs. Whole Plant
  misc_feature: MA Experiment ID: 20000286 Result: Up-regulated in Transcription
  misc_feature: MA Experiment 20000286 PARAMETER Experiment Name: At_Open_Flower_P Parameter: Age (day) Value: 21
  misc_feature: MA Experiment 20000286 PARAMETER Experiment Name: At_Open_Flower_P Parameter: Plant Line Value: WS
  misc_feature: MA Experiment 20000286 PARAMETER Experiment Name: At_Open_Flower_P Parameter: Tissue Value: Half Open vs. Whole Plant
gaataaacaaaatttgaggtttcgattttgcgattcggcgatttgcttctccgatgtcaatcccaccatcttcaggttcttcttcttcatcttcctcgtctcagtacacatacgcagctaattcttactattccgctccgtatcagcctccacagccttacgcggcggcgccttcgcctgctgtaccggcgcctgtggcatccattcccggagctacggtctatcctcagcctgttggaccggttcctgccgtctacgcttaccctcagtaccaacaggcacatcaattgttccaaagagatgcacagacaattacaccagaagctcttgagaatgtaaaagctgctttggcaagtagtgaaaccgaacacaaagcagaaactaaaaagagagccattcctcgtaaagctgctggacagtcttgggaggatcctactctttcagaatggccagaaaatgactatcgtctgttctgtggtgatcttgggaacgaagtgaatgatgatgttctttccaaagcatttgctagattccccaccttcaatatggccaaggtcattagagataagcggactggtaaaaccaagggttatgggtttgtgagtttcttaaatcctgcggatctagcagcagccttaaaagaaatgaatggtaagtatgttggaaatcgtccgataaaactacgaaagagtagctggaaagagagaacagatcaggaggctgctgaaagacaaaagcatcacagcaataagaagcaaaaaactgtgaagaagagcatacttcacaagtgacgatctcttttatttttgtggcttaaaatttccaaacctgttactcataaatataaatgaacaaacattatcattagttttgttgaaaacggtatggttatgtattgttgggctgctatgtttagctttagccccaaccggtggtatttactttatgaaaacgtgtgtccacaataggctcgagcacaaacttttcttacatctttttcactccattaaaacgttcaagtggtctgagcatattacaagaaaatcaatattactatttaaggatcgattataagaaagaagatgtatactatcc

SEQ ID NO: 50078 - protein, 245 aa, Arabidopsis thaliana
  peptide (1)..(245): Ceres Seq. ID no. 13647907
  misc_feature (139)..(210): Pfam Name: RNA recognition motif. (a.k.a. RRM, RBD, or RNP domain) Pfam Description: RNA recognition motif. (a.k.a. RRM, RBD, or RNP
  misc_feature (1)..(228): Homolog of NCBI NO: 21357051 NR Description: CG2931-PA [Drosophila melanogaster]
  misc_feature (29)..(228): Homolog of NCBI NO: 39582665 NR Description: Hypothetical protein CBG21313 [Caenorhabditis
  misc_feature (30)..(228): Homolog of NCBI NO: 17556216 NR Description: RNA recognition motif containing protein
  misc_feature (91)..(228): Homolog of NCBI NO: 34855705 NR Description: similar to RIKEN cDNA 3100004P22 [Rattus
  misc_feature (91)..(228): Homolog of NCBI NO: 21594922 NR Description: hypothetical protein MGC10433 [Homo sapiens]
  misc_feature (91)..(228): Homolog of NCBI NO: 21359951 NR Description: hypothetical protein MGC10433 [Homo sapiens]
  misc_feature (91)..(228): Homolog of NCBI NO: 12804031 NR Description: Unknown (protein for MGC:10433) [Homo sapiens]
  misc_feature (91)..(228): Homolog of NCBI NO: 19526864 NR Description: RIKEN cDNA 3100004P22 [Mus musculus]
  misc_feature (91)..(228): Homolog of NCBI NO: 2098575 NR Description: F25451_2 [Homo sapiens]
  misc_feature (1)..(245): Homolog of NCBI NO: 15229308 NR Description: RNA recognition motif (RRM)-containing protein
MSIPPSSGSSSSSSSSQYTYAANSYYSAPYQPPQPYAAAPSPAVPAPVASIPGATVYPQPVGPVPAVYAYPQYQQAHQLFQRDAQTITPEALENVKAALASSETEHKAETKKRAIPRKAAGQSWEDPTLSEWPENDYRLFCGDLGNEVNDDVLSKAFARFPTFNMAKVIRDKRTGKTKGYGFVSFLNPADLAAALKEMNGKYVGNRPIKLRKSSWKERTDQEAAERQKHHSNKKQKTVKKSILHK

SEQ ID NO: 50079 - DNA, 2490 bp, Arabidopsis thaliana
  misc_feature (1)..(2490): Ceres Seq. ID no. 12592510
  misc_feature: MA Experiment ID: 20000180 Result: Down-regulated in Transcription
  misc_feature: MA Experiment 20000180 PARAMETER Experiment Name: At_Germinating_Seeds_P Parameter: Age (hr) Value: 24 vs. 0
  misc_feature: MA Experiment 20000180 PARAMETER Experiment Name: At_Germinating_Seeds_P Parameter: Tissue Value: Germinating Seeds
  misc_feature: MA Experiment ID: 20000185 Result: Up-regulated in Transcription
  misc_feature: MA Experiment 20000185 PARAMETER Experiment Name: At_Roots__P Parameter: Age (day) Value: 7 vs. 21
  misc_feature: MA Experiment 20000185 PARAMETER Experiment Name: At_Roots__P Parameter: Organism Value: A. thaliana
  misc_feature: MA Experiment 20000185 PARAMETER Experiment Name: At_Roots__P Parameter: Tissue Value: Roots vs. Whole Plant
  misc_feature: MA Experiment ID: 20000227 Result: Down-regulated in Transcription
  misc_feature: MA Experiment 20000227 PARAMETER Experiment Name: At_Root-Tips-vs-Tops_P Parameter: Tissue Value: Root Tips vs. Root Tops
  misc_feature: MA Experiment ID: 20001554 Result: Up-regulated in Transcription
  misc_feature: MA Experiment 20001554 PARAMETER Experiment Name: At_Drought_Soil_Dry_P Parameter: Age (day) Value: 21
  misc_feature: MA Experiment 20001554 PARAMETER Experiment Name: At_Drought_Soil_Dry_P Parameter: Organism Value: A. thaliana
  misc_feature: MA Experiment 20001554 PARAMETER Experiment Name: At_Drought_Soil_Dry_P Parameter: Plant Line Value: WS
  misc_feature: MA Experiment 20001554 PARAMETER Experiment Name: At_Drought_Soil_Dry_P Parameter: Post Timepoint (hr) Value: None
  misc_feature: MA Experiment 20001554 PARAMETER Experiment Name: At_Drought_Soil_Dry_P Parameter: Post-Treatment Value: None
  misc_feature: MA Experiment 20001554 PARAMETER Experiment Name: At_Drought_Soil_Dry_P Parameter: Timepoint (day) Value: 7
  misc_feature: MA Experiment 20001554 PARAMETER Experiment Name: At_Drought_Soil_Dry_P Parameter: Treatment Value: Drought vs. No Drought
  misc_feature: MA Experiment ID: 20001558 Result: Down-regulated in Transcription
  misc_feature: MA Experiment 20001558 PARAMETER Experiment Name: At_Drought_Soil_Dry_P Parameter: Age (day) Value: 27
  misc_feature: MA Experiment 20001558 PARAMETER Experiment Name: At_Drought_Soil_Dry_P Parameter: Organism Value: A. thaliana
  misc_feature: MA Experiment 20001558 PARAMETER Experiment Name: At_Drought_Soil_Dry_P Parameter: Plant Line Value: WS
  misc_feature: MA Experiment 20001558 PARAMETER Experiment Name: At_Drought_Soil_Dry_P Parameter: Post Timepoint (hr) Value: 6
  misc_feature: MA Experiment 20001558 PARAMETER Experiment Name: At_Drought_Soil_Dry_P Parameter: Post-Treatment Value: Re-Water vs. No Drought
  misc_feature: MA Experiment 20001558 PARAMETER Experiment Name: At_Drought_Soil_Dry_P Parameter: Timepoint (day) Value: 13
  misc_feature: MA Experiment 20001558 PARAMETER Experiment Name: At_Drought_Soil_Dry_P Parameter: Treatment Value: Drought vs. No Drought
atgggtggtgaaaagtttggatttttgatttggattttatcgattccttgcttaatcttcctctgctatggatacgtaccagtggataattacctcatcaactgtggatcatcaaccaacgtcactgtcactagtcgagtgtttatctctgataaccttgcttcaaactttctaacctctcctaatgaaatcctcgccgccagtaatcgcaattcaaattcagatatttaccagacggcgagaatcttcaccggaatctctaagtacagattctccgttgctagaggccgtcactggattcgtctccatttcaatccttttcagtaccaaaacttccaaatggtctcagcaaaattctctgtttcttcagaaacacatgttcttttgagtgatttcactgtgagttccagagttatgaaggaatactctctgaatgtagctacggatcatctggagctcacgtttactccctcgggtgattcatttgcgtttctgaacgcgctcgaggttgtttcggttcctgatacgttgttcagtggtgatccttcctttgcaggcagtcctgggaagtttcagggcttgtcatggcaagctcttgagacggtttatagagtgaacatgggcggtccgcgtgttacgcctagtaacgatactctttcgagaatttgggagcctgattctgagtttctagttgagaagaatctagttaagagtgtgtctaagattgcatctgttgattatgttcctggttttgctacagaggagactgctcctagaactgtctatggtacttgcaccgagatgaattctgcggataacccgtctagcaacttcaatgtgacttgggatttcgatgttgacccgggttttcagtactttctacggtttcatttctgcgatatcgtgagtaaagctctaaaccagctttacttcaatctttatgtcgactctatggatgttgttgagaatcttgatctgagctcttatttatccaacactttgagtggtgcatacgcgatggattttgtcacaggatcagcaaaactgactaaaagaatccgtgtgagcatcggtcgatcgagtgttcacacggattaccctactgcgattctgaacggattagagatcatgaagatgaataactccaaaagtcagctcagtattggaacatttttgcccagtggttcaagttcaaccactaagaagaatgttggtatgatcattggtttaacgatcggctcattgcttgctttagtggttttaggaggtttctttgtgctgtacaagaaacgaggacgagaccaagatggtaattcaaagacttggattcctttgtcatccaatggaacaacttcatcctcaaatggaactacacttgcaagtatagcttccaattccagttatcgaattcctttggtagcagttaaagaggccacaaatagctttgatgagaatcgagcaattggagttggtggttttggtaaagtgtacaaaggagagcttcacgacggtacaaaagtagctgttaaaagagcgaatcctaagtctcagcaaggacttgcagagttcaggacagaaatcgaaatgttgtcacaattccgtcatcgccatttggtttctttgatcggatactgcgacgagaataacgagatgattctggtttacgaatatatggagaatggaacattgaagagtcacctttacggttcaggtcttcttagcttgagttggaagcaacgtcttgagatatgcattggatcagcaagaggattgcattatctccacaccggtgacgcgaaacccgtgattcacagagacgtcaaatccgccaacatattgcttgacgagaatctcatggctaaagttgcagactttggactgtctaagaccggaccggagatcgatcagactcatgtgagtaccgcggtcaaaggaagtttcggatatcttgatccagaatacttcagaagacaacagctcacagagaaatcagatgtttactcttttggagtggttatgttcgaggttctctgcgcgagacctgttatagacccgacacttactagagaaatggtgaatctagcggaatgggcaatgaaatggcagaagaaaggacagcttgaacacatcatcgacccgtcactgcggggtaagatcagacctgactcgcttagaaagttcggtgaaacaggggagaaatgtttagctgactatggagtcgatagaccatcaatgggagatgtgttgtggaatcttgaatacgctttgcagctacaagaagctgtcgttgatggtgatccagaagacagcacaaacatgatcggtgagttacctctacggttcaatgattacaaccatggagacacgagtgttaacttttctgtagctaaagagggacggtttgatgaagaagaatcgagtgttgatgatagttcaggtgtttccatgagtaaagttttctcgcagctgatcaaatctgagggacgttaa

SEQ ID NO: 50080 - protein, 829 aa, Arabidopsis thaliana
  peptide (1)..(829): Ceres Seq. ID no. 12592511
  misc_feature (135)..(445): Homolog of NCBI NO: 34895950 NR Description: putative receptor-like protein kinase
  misc_feature (437)..(829): Homolog of NCBI NO: 34895950 NR Description: putative receptor-like protein kinase
  misc_feature (37)..(829): Homolog of NCBI NO: 15226565 NR Description: putative protein kinase; protein id: At2g21480.1
  misc_feature (38)..(829): Homolog of NCBI NO: 15234944 NR Description: putative receptor-like protein kinase; protein
  misc_feature (449)..(789): Homolog of NCBI NO: 14488367 NR Description: putative protein kinase [Oryza sativa (japonica
  misc_feature (25)..(493): Homolog of NCBI NO: 14488367 NR Description: putative protein kinase [Oryza sativa (japonica
  misc_feature (18)..(769): Homolog of NCBI NO: 7488962 NR Description: receptor-like protein kinase (EC 2.7.1.-)
  misc_feature (318)..(829): Homolog of NCBI NO: 11346432 NR Description: receptor-like protein kinase homolog -
  misc_feature (387)..(829): Homolog of NCBI NO: 15239630 NR Description: receptor-protein kinase-like protein; protein id:
  misc_feature (9)..(467): Homolog of NCBI NO: 15239630 NR Description: receptor-protein kinase-like protein; protein id:
MGGEKFGFLIWILSIPCLIFLCYGYVPVDNYLINCGSSTNVTVTSRVFISDNLASNFLTSPNEILAASNRNSNSDIYQTARIFTGISKYRFSVARGRHWIRLHFNPFQYQNFQMVSAKFSVSSETHVLLSDFTVSSRVMKEYSLNVATDHLELTFTPSGDSFAFLNALEVVSVPDTLFSGDPSFAGSPGKFQGLSWQALETVYRVNMGGPRVTPSNDTLSRIWEPDSEFLVEKNLVKSVSKIASVDYVPGFATEETAPRTVYGTCTEMNSADNPSSNFNVTWDFDVDPGFQYFLRFHFCDIVSKALNQLYFNLYVDSMDVVENLDLSSYLSNTLSGAYAMDFVTGSAKLTKRIRVSIGRSSVHTDYPTAILNGLEIMKMNNSKSQLSIGTFLPSGSSSTTKKNVGMIIGLTIGSLLALVVLGGFFVLYKKRGRDQDGNSKTWIPLSSNGTTSSSNGTTLASIASNSSYRIPLVAVKEATNSFDENRAIGVGGFGKVYKGELHDGTKVAVKRANPKSQQGLAEFRTEIEMLSQFRHRHLVSLIGYCDENNEMILVYEYMENGTLKSHLYGSGLLSLSWKQRLEICIGSARGLHYLHTGDAKPVIHRDVKSANILLDENLMAKVADFGLSKTGPEIDQTHVSTAVKGSFGYLDPEYFRRQQLTEKSDVYSFGVVMFEVLCARPVIDPTLTREMVNLAEWAMKWQKKGQLEHIIDPSLRGKIRPDSLRKFGETGEKCLADYGVDRPSMGDVLWNLEYALQLQEAVVDGDPEDSTNMIGELPLRFNDYNHGDTSVNFSVAKEGRFDEEESSVDDSSGVSMSKVFSQLIKSEGR

SEQ ID NO: 50081 - protein, 716 aa, Arabidopsis thaliana
  peptide (1)..(716): Ceres Seq. ID no. 12592512
  misc_feature (22)..(332): Homolog of NCBI NO: 34895950 NR Description: putative receptor-like protein kinase
  misc_feature (324)..(716): Homolog of NCBI NO: 34895950 NR Description: putative receptor-like protein kinase
  misc_feature (1)..(716): Homolog of NCBI NO: 15226565 NR Description: putative protein kinase; protein id: At2g21480.1
  misc_feature (1)..(716): Homolog of NCBI NO: 15234944 NR Description: putative receptor-like protein kinase; protein
  misc_feature (336)..(676): Homolog of NCBI NO: 14488367 NR Description: putative protein kinase [Oryza sativa (japonica
  misc_feature (1)..(380): Homolog of NCBI NO: 14488367 NR Description: putative protein kinase [Oryza sativa (japonica
  misc_feature (1)..(656): Homolog of NCBI NO: 7488962 NR Description: receptor-like protein kinase (EC 2.7.1.-)
  misc_feature (205)..(716): Homolog of NCBI NO: 11346432 NR Description: receptor-like protein kinase homolog -
  misc_feature (274)..(716): Homolog of NCBI NO: 15239630 NR Description: receptor-protein kinase-like protein; protein id:
  misc_feature (1)..(354): Homolog of NCBI NO: 15239630 NR Description: receptor-protein kinase-like protein; protein id:
MVSAKFSVSSETHVLLSDFTVSSRVMKEYSLNVATDHLELTFTPSGDSFAFLNALEVVSVPDTLFSGDPSFAGSPGKFQGLSWQALETVYRVNMGGPRVTPSNDTLSRIWEPDSEFLVEKNLVKSVSKIASVDYVPGFATEETAPRTVYGTCTEMNSADNPSSNFNVTWDFDVDPGFQYFLRFHFCDIVSKALNQLYFNLYVDSMDVVENLDLSSYLSNTLSGAYAMDFVTGSAKLTKRIRVSIGRSSVHTDYPTAILNGLEIMKMNNSKSQLSIGTFLPSGSSSTTKKNVGMIIGLTIGSLLALVVLGGFFVLYKKRGRDQDGNSKTWIPLSSNGTTSSSNGTTLASIASNSSYRIPLVAVKEATNSFDENRAIGVGGFGKVYKGELHDGTKVAVKRANPKSQQGLAEFRTEIEMLSQFRHRHLVSLIGYCDENNEMILVYEYMENGTLKSHLYGSGLLSLSWKQRLEICIGSARGLHYLHTGDAKPVIHRDVKSANILLDENLMAKVADFGLSKTGPEIDQTHVSTAVKGSFGYLDPEYFRRQQLTEKSDVYSFGVVMFEVLCARPVIDPTLTREMVNLAEWAMKWQKKGQLEHIIDPSLRGKIRPDSLRKFGETGEKCLADYGVDRPSMGDVLWNLEYALQLQEAVVDGDPEDSTNMIGELPLRFNDYNHGDTSVNFSVAKEGRFDEEESSVDDSSGVSMSKVFSQLIKSEGR

SEQ ID NO: 50082 - protein, 691 aa, Arabidopsis thaliana
  peptide (1)..(691): Ceres Seq. ID no. 12592513
  misc_feature (1)..(307): Homolog of NCBI NO: 34895950 NR Description: putative receptor-like protein kinase
  misc_feature (299)..(691): Homolog of NCBI NO: 34895950 NR Description: putative receptor-like protein kinase
  misc_feature (1)..(691): Homolog of NCBI NO: 15226565 NR Description: putative protein kinase; protein id: At2g21480.1
  misc_feature (1)..(691): Homolog of NCBI NO: 15234944 NR Description: putative receptor-like protein kinase; protein
  misc_feature (311)..(651): Homolog of NCBI NO: 14488367 NR Description: putative protein kinase [Oryza sativa (japonica
  misc_feature (1)..(355): Homolog of NCBI NO: 14488367 NR Description: putative protein kinase [Oryza sativa (japonica
  misc_feature (1)..(631): Homolog of NCBI NO: 7488962 NR Description: receptor-like protein kinase (EC 2.7.1.-)
  misc_feature (180)..(691): Homolog of NCBI NO: 11346432 NR Description: receptor-like protein kinase homolog -
  misc_feature (249)..(691): Homolog of NCBI NO: 15239630 NR Description: receptor-protein kinase-like protein; protein id:
  misc_feature (1)..(329): Homolog of NCBI NO: 15239630 NR Description: receptor-protein kinase-like protein; protein id:
MKEYSLNVATDHLELTFTPSGDSFAFLNALEVVSVPDTLFSGDPSFAGSPGKFQGLSWQALETVYRVNMGGPRVTPSNDTLSRIWEPDSEFLVEKNLVKSVSKIASVDYVPGFATEETAPRTVYGTCTEMNSADNPSSNFNVTWDFDVDPGFQYFLRFHFCDIVSKALNQLYFNLYVDSMDVVENLDLSSYLSNTLSGAYAMDFVTGSAKLTKRIRVSIGRSSVHTDYPTAILNGLEIMKMNNSKSQLSIGTFLPSGSSSTTKKNVGMIIGLTIGSLLALVVLGGFFVLYKKRGRDQDGNSKTWIPLSSNGTTSSSNGTTLASIASNSSYRIPLVAVKEATNSFDENRAIGVGGFGKVYKGELHDGTKVAVKRANPKSQQGLAEFRTEIEMLSQFRHRHLVSLIGYCDENNEMILVYEYMENGTLKSHLYGSGLLSLSWKQRLEICIGSARGLHYLHTGDAKPVIHRDVKSANILLDENLMAKVADFGLSKTGPEIDQTHVSTAVKGSFGYLDPEYFRRQQLTEKSDVYSFGVVMFEVLCARPVIDPTLTREMVNLAEWAMKWQKKGQLEHIIDPSLRGKIRPDSLRKFGETGEKCLADYGVDRPSMGDVLWNLEYALQLQEAVVDGDPEDSTNMIGELPLRFNDYNHGDTSVNFSVAKEGRFDEEESSVDDSSGVSMSKVFSQLIKSEGR

SEQ ID NO: 50083 - DNA, 1084 bp, Arabidopsis thaliana
  misc_feature (1)..(1084): Ceres Seq. ID no. 13592597
  misc_feature: MA Experiment ID: 20000184 Result: Down-regulated in Transcription
  misc_feature: MA Experiment 20000184 PARAMETER Experiment Name: At_Shoots__P Parameter: Age (day) Value: 7
  misc_feature: MA Experiment 20000184 PARAMETER Experiment Name: At_Shoots__P Parameter: Tissue Value: Shoots vs. Whole Plant
aattctctttgaccaaaaaataatccaaagacttagaagaaaaacaagatcgggtctcgtcacggtccacggcgcagctttttcttcgtcttcttcaattattctattccctctgagagattctctctgcgtttcttagatcgagcgagggaagcgagagatcatggaaggtggagctgctctctacaatcctcgaactgtcgaagaagttttcaaggatttcaaaggtcgtcgtactgccattgtcaaagctctcaccaccgatgttcaagagttttaccaacaatgtgaccctgagaaggagaatctttgcttgtatgggttaccgaatgaagaatgggaagtgaatttaccagctgaagaagtgcctcctgagttaccagagccagctcttggtattaactttgctagggatgggctctctgaaaaggaatggctttcgcttgttgctattcacagtgacgcttggttactgtctgtctcgttttactttggctcaaggttttctttccacaaggaagagaggaagcgtttgttcaacatgatcaatgatgttcctactatatttgaagtagtgactggaatggctaaagcaaaggacaagtcatctgctgcaaatcaaaacggaaacaaatccaagtctaactctaaagttagaacttcagagggaaaaagctcaaagaccaagcagccaaaagaggaggacgaagaaatagatgaagatgatgaggatgaccacggggaaaccctttgtggagcctgtggagacagtgatggtgctgatgaattctggatctgctgtgacctttgtgagaagtggttccatggcaagtgtgtgaagatcactccagctagagctgagcatatcaaacaatacaagtgcccttcatgcagcaacaaaagagctcgagcttaaaaatgttgtattgtagagaatagcctgtagtgacaactctcactaccctcgatctgtctttatttggctagtcttttagctcgttattggccataacagcttgggcctatttctctgtataattggtttgattttgcaactgagaaaaaaaaggaaactctttaactg

SEQ ID NO: 50084 - protein, 250 aa, Arabidopsis thaliana
  peptide (1)..(250): Ceres Seq. ID no. 13592598
  misc_feature (196)..(246): Pfam Name: PHD-finger Pfam Description: PHD-finger
  misc_feature (196)..(246): Pfam Name: PHD-finger Pfam Description: PHD-finger
  misc_feature (10)..(249): Homolog of NCBI NO: 21593407 NR Description: putative PHD-type zinc finger protein
  misc_feature (3)..(250): Homolog of NCBI NO: 11281498 NR Description: nucleic acid binding protein [imported] - rice
  misc_feature (10)..(249): Homolog of NCBI NO: 15226967 NR Description: PHD-type zinc finger protein -related
  misc_feature (10)..(250): Homolog of NCBI NO: 15223786 NR Description: nucleic acid binding protein (alfin-1) -related
  misc_feature (1)..(250): Homolog of NCBI NO: 7486722 NR Description: hypothetical protein F9D12.13 - Arabidopsis
  misc_feature (10)..(249): Homolog of NCBI NO: 21593407 NR Description: putative PHD-type zinc finger protein
  misc_feature (10)..(249): Homolog of NCBI NO: 15226967 NR Description: PHD-type zinc finger protein -related
  misc_feature (1)..(250): Homolog of NCBI NO: 7486722 NR Description: hypothetical protein F9D12.13 - Arabidopsis
  misc_feature (1)..(250): Homolog of NCBI NO: 15229157 NR Description: nucleic acid binding protein-related [Arabidopsis
  misc_feature (1)..(249): Homolog of NCBI NO: 30687843 NR Description: zinc finger protein - like [Arabidopsis thaliana]
  misc_feature (1)..(250): Homolog of NCBI NO: 15239624 NR Description: nucleic acid binding protein - like [Arabidopsis
  misc_feature (3)..(250): Homolog of NCBI NO: 4091080 NR Description: nucleic acid binding protein [Oryza sativa]
  misc_feature (3)..(250): Homolog of NCBI NO: 34907474 NR Description: nucleic acid binding protein
  misc_feature (10)..(250): Homolog of NCBI NO: 15223786 NR Description: nucleic acid binding protein (alfin-1) -related
  misc_feature (3)..(250): Homolog of NCBI NO: 11281498 NR Description: nucleic acid binding protein [imported] - rice
  misc_feature (3)..(250): Homolog of NCBI NO: 34907474 NR Description: nucleic acid binding protein
  misc_feature (3)..(250): Homolog of NCBI NO: 4091080 NR Description: nucleic acid binding protein [Oryza sativa]
  misc_feature (1)..(250): Homolog of NCBI NO: 15239624 NR Description: nucleic acid binding protein - like [Arabidopsis
  misc_feature (1)..(249): Homolog of NCBI NO: 30687843 NR Description: zinc finger protein - like [Arabidopsis thaliana]
  misc_feature (1)..(250): Homolog of NCBI NO: 15229157 NR Description: nucleic acid binding protein-related [Arabidopsis
MEGGAALYNPRTVEEVFKDFKGRRTAIVKALTTDVQEFYQQCDPEKENLCLYGLPNEEWEVNLPAEEVPPELPEPALGINFARDGLSEKEWLSLVAIHSDAWLLSVSFYFGSRFSFHKEERKRLFNMINDVPTIFEVVTGMAKAKDKSSAANQNGNKSKSNSKVRTSEGKSSKTKQPKEEDEEIDEDDEDDHGETLCGACGDSDGADEFWICCDLCEKWFHGKCVKITPARAEHIKQYKCPSCSNKRARA

SEQ ID NO: 50085 - DNA, 1444 bp, Arabidopsis thaliana
  misc_feature (1)..(1444): Ceres Seq. ID no. 13592512
  misc_feature: MA Experiment ID: 20000227 Result: Up-regulated in Transcription
  misc_feature: MA Experiment 20000227 PARAMETER Experiment Name: At_Root-Tips-vs-Tops_P Parameter: Tissue Value: Root Tips vs. Root Tops
  misc_feature: MA Experiment ID: 20000437 Result: Down-regulated in Transcription
  misc_feature: MA Experiment 20000437 PARAMETER Experiment Name: At_Drought_P Parameter: Age (day) Value: 8
  misc_feature: MA Experiment 20000437 PARAMETER Experiment Name: At_Drought_P Parameter: Organism Value: A. thaliana
  misc_feature: MA Experiment 20000437 PARAMETER Experiment Name: At_Drought_P Parameter: Plant Line Value: WS
  misc_feature: MA Experiment 20000437 PARAMETER Experiment Name: At_Drought_P Parameter: Timepoint (hr) Value: 24
  misc_feature: MA Experiment 20000437 PARAMETER Experiment Name: At_Drought_P Parameter: Tissue Value: Whole Plant
  misc_feature: MA Experiment 20000437 PARAMETER Experiment Name: At_Drought_P Parameter: Treatment Value: Drought vs. No Drought
  misc_feature: MA Experiment ID: 20000495 Result: Down-regulated in Transcription
  misc_feature: MA Experiment 20000495 PARAMETER Experiment Name: At_Guard_Cells_P Parameter: Harvest Date Value: 8/2/2002
  misc_feature: MA Experiment 20000495 PARAMETER Experiment Name: At_Guard_Cells_P Parameter: Organism Value: A. thaliana
  misc_feature: MA Experiment 20000495 PARAMETER Experiment Name: At_Guard_Cells_P Parameter: Tissue Value: Guard Cells vs. Leaves
  misc_feature: MA Experiment ID: 20001248 Result: Down-regulated in Transcription
  misc_feature: MA Experiment 20001248 PARAMETER Experiment Name: At_Far-red-induction_P Parameter: Age (day) Value: 7
  misc_feature: MA Experiment 20001248 PARAMETER Experiment Name: At_Far-red-induction_P Parameter: Light Value: Far-red vs. White
  misc_feature: MA Experiment 20001248 PARAMETER Experiment Name: At_Far-red-induction_P Parameter: Organism Value: A. thaliana
  misc_feature: MA Experiment 20001248 PARAMETER Experiment Name: At_Far-red-induction_P Parameter: Plant Line Value: Columbia
  misc_feature: MA Experiment 20001248 PARAMETER Experiment Name: At_Far-red-induction_P Parameter: Timepoint (hr) Value: 4
  misc_feature: MA Experiment 20001248 PARAMETER Experiment Name: At_Far-red-induction_P Parameter: Tissue Value: Whole Plant
  misc_feature: MA Experiment ID: 20001450 Result: Down-regulated in Transcription
  misc_feature: MA Experiment 20001450 PARAMETER Experiment Name: At_Far-red-induction_P Parameter: Age (day) Value: 7
  misc_feature: MA Experiment 20001450 PARAMETER Experiment Name: At_Far-red-induction_P Parameter: Light Value: Far-red vs. White
  misc_feature: MA Experiment 20001450 PARAMETER Experiment Name: At_Far-red-induction_P Parameter: Organism Value: A. thaliana
  misc_feature: MA Experiment 20001450 PARAMETER Experiment Name: At_Far-red-induction_P Parameter: Plant Line Value: Columbia
  misc_feature: MA Experiment 20001450 PARAMETER Experiment Name: At_Far-red-induction_P Parameter: Timepoint (hr) Value: 8
  misc_feature: MA Experiment 20001450 PARAMETER Experiment Name: At_Far-red-induction_P Parameter: Tissue Value: Whole Plant
  misc_feature: MA Experiment ID: 20001451 Result: Down-regulated in Transcription
  misc_feature: MA Experiment 20001451 PARAMETER Experiment Name: At_Far-red-induction_P Parameter: Age (day) Value: 7
  misc_feature: MA Experiment 20001451 PARAMETER Experiment Name: At_Far-red-induction_P Parameter: Light Value: Far-red vs. White
  misc_feature: MA Experiment 20001451 PARAMETER Experiment Name: At_Far-red-induction_P Parameter: Organism Value: A. thaliana
  misc_feature: MA Experiment 20001451 PARAMETER Experiment Name: At_Far-red-induction_P Parameter: Plant Line Value: Columbia
  misc_feature: MA Experiment 20001451 PARAMETER Experiment Name: At_Far-red-induction_P Parameter: Timepoint (hr) Value: 24
  misc_feature: MA Experiment 20001451 PARAMETER Experiment Name: At_Far-red-induction_P Parameter: Tissue Value: Whole Plant
gattccctctattctcaatccacaccaaagactatatggcctcccattgctccatgagagtaatcctcctcagattctccaatggcgtctcttccagatccattctcaactccactaaccatcgtcttcttagtcttaccatgaccaacactctctcgtctctttcctcaatctctccccacactactacttcgcatttcacggctgcgtcacaacaatcagatgaccagaactgcttccgcaagcttcaactcagaaagatttcgatttcaactcctctttgtatgggtcgtcgttcttccaaaatcgctggtcgaaagggcgctcaagattcaaagaaggcgaagctatactgtagaattggcaaggaggttgtatctgctgtcaagaaagggggtccaaacccagtttcaaatacgactctagctactattcttgacaaagctaaagaactggatgtaccgaaagacattgtggagcgtaatattaagagggcttctgagaaggggcaagaagcttttatagagaagatttacgaggtatatggctacggtggtgttagtatggtagtcgaggtcttaacagacaaaattaatcgatcagtggcagctattagatcggttgttaaggattatgggggaaaaatggctgattcaggatctgtcatgttcaagtttaaaagagttagggtagtgaatataaaggtcaccgaagctgacaaagatcagctccttattattgctttagatgctggagcagaggatgttattgaacccccaacttatgaagatgatactgatgaagacagggaagagaggtactacaaaattgtaacttctaatgagaactactcaacaatattatcaaagctacgtgatgaaggagtgaacttcgagcctgacaatggctctgaactgctccctctgactacagttgaggtggatgatgaggccatggaattgaacaaagagctaatgcagaaactactagaacttgatgatgttgatgctgtttatatcgaccaaaaatgaaaagaatatacattacaggaagctccacttcaagatctgtgaattcacagctcacgagaaagttattatgtcaatctctgaactggttctgctgaactctgcatatattctgaagaaggaataatggtttttggtagacacttacatttcacttcttctagtttccagtttgaagccataaaatcaaaactattataaaagcccaaatcttataatgccgaagggtcttttaatctaaattttgggctgtttcgatttttgggaaattatgaatctaaacattattttagaaattatgagtgatactaggagtgattgtgggctactaccaaacgttattttagaaccacaaataaattcaaaacattattttagaaaaaaaaaaaaaaaaaaaactcgagggggggcccggt

SEQ ID NO: 50086 - protein, 342 aa, Arabidopsis thaliana
  peptide (1)..(342): Ceres Seq. ID no. 13592513
  misc_feature (97)..(342): Pfam Name: Domain of unknown function DUF28 Pfam Description: Domain of unknown function DUF28
  misc_feature (97)..(342): Pfam Name: Domain of unknown function DUF28 Pfam Description: Domain of unknown function DUF28
  misc_feature (100)..(338): Homolog of NCBI NO: 19704982 NR Description: Hypothetical cytosolic protein
  misc_feature (100)..(338): Homolog of NCBI NO: 23020845 NR Description: hypothetical protein [Clostridium thermocellum
  misc_feature (105)..(338): Homolog of NCBI NO: 29839936 NR Description: conserved hypothetical protein TIGR01033
  misc_feature (105)..(338): Homolog of NCBI NO: 15605184 NR Description: YebC family [Chlamydia trachomatis]
  misc_feature (102)..(338): Homolog of NCBI NO: 18310936 NR Description: conserved hypothetical protein [Clostridium
  misc_feature (100)..(338): Homolog of NCBI NO: 19704982 NR Description: Hypothetical cytosolic protein
  misc_feature (105)..(338): Homolog of NCBI NO: 29839936 NR Description: conserved hypothetical protein TIGR01033
  misc_feature (102)..(338): Homolog of NCBI NO: 18310936 NR Description: conserved hypothetical protein [Clostridium
  misc_feature (12)..(342): Homolog of NCBI NO: 18400953 NR Description: expressed protein [Arabidopsis thaliana]
  misc_feature (12)..(342): Homolog of NCBI NO: 15810383 NR Description: unknown protein [Arabidopsis thaliana]
  misc_feature (12)..(342): Homolog of NCBI NO: 25407817 NR Description: hypothetical protein At2g25830 [imported] -
  misc_feature (105)..(338): Homolog of NCBI NO: 15618484 NR Description: YebC family hypothetical protein
  misc_feature (105)..(338): Homolog of NCBI NO: 15835357 NR Description: conserved hypothetical protein [Chlamydia
  misc_feature (105)..(338): Homolog of NCBI NO: 15605184 NR Description: YebC family [Chlamydia trachomatis]
  misc_feature (100)..(338): Homolog of NCBI NO: 23020845 NR Description: hypothetical protein [Clostridium thermocellum
  misc_feature (105)..(338): Homolog of NCBI NO: 15835357 NR Description: conserved hypothetical protein [Chlamydia
  misc_feature (105)..(338): Homolog of NCBI NO: 15618484 NR Description: YebC family hypothetical protein
  misc_feature (12)..(342): Homolog of NCBI NO: 25407817 NR Description: hypothetical protein At2g25830 [imported] -
  misc_feature (12)..(342): Homolog of NCBI NO: 15810383 NR Description: unknown protein [Arabidopsis thaliana]
  misc_feature (12)..(342): Homolog of NCBI NO: 18400953 NR Description: expressed protein [Arabidopsis thaliana]
FPLFSIHTKDYMASHCSMRVILLRFSNGVSSRSILNSTNHRLLSLTMTNTLSSLSSISPHTTTSHFTAASQQSDDQNCFRKLQLRKISISTPLCMGRRSSKIAGRKGAQDSKKAKLYCRIGKEVVSAVKKGGPNPVSNTTLATILDKAKELDVPKDIVERNIKRASEKGQEAFIEKIYEVYGYGGVSMVVEVLTDKINRSVAAIRSVVKDYGGKMADSGSVMFKFKRVRVVNIKVTEADKDQLLIIALDAGAEDVIEPPTYEDDTDEDREERYYKIVTSNENYSTILSKLRDEGVNFEPDNGSELLPLTTVEVDDEAMELNKELMQKLLELDDVDAVYIDQK

SEQ ID NO: 50087 - protein, 331 aa, Arabidopsis thaliana
  peptide (1)..(331): Ceres Seq. ID no. 13592514
  misc_feature (86)..(331): Pfam Name: Domain of unknown function DUF28 Pfam Description: Domain of unknown function DUF28
  misc_feature (86)..(331): Pfam Name: Domain of unknown function DUF28 Pfam Description: Domain of unknown function DUF28
  misc_feature (89)..(327): Homolog of NCBI NO: 19704982 NR Description: Hypothetical cytosolic protein
  misc_feature (89)..(327): Homolog of NCBI NO: 23020845 NR Description: hypothetical protein [Clostridium thermocellum
  misc_feature (94)..(327): Homolog of NCBI NO: 29839936 NR Description: conserved hypothetical protein TIGR01033
  misc_feature (94)..(327): Homolog of NCBI NO: 15605184 NR Description: YebC family [Chlamydia trachomatis]
  misc_feature (91)..(327): Homolog of NCBI NO: 18310936 NR Description: conserved hypothetical protein [Clostridium
  misc_feature (89)..(327): Homolog of NCBI NO: 19704982 NR Description: Hypothetical cytosolic protein
  misc_feature (94)..(327): Homolog of NCBI NO: 29839936 NR Description: conserved hypothetical protein TIGR01033
  misc_feature (91)..(327): Homolog of NCBI NO: 18310936 NR Description: conserved hypothetical protein [Clostridium
  misc_feature (1)..(331): Homolog of NCBI NO: 18400953 NR Description: expressed protein [Arabidopsis thaliana]
  misc_feature (1)..(331): Homolog of NCBI NO: 15810383 NR Description: unknown protein [Arabidopsis thaliana]
  misc_feature (1)..(331): Homolog of NCBI NO: 25407817 NR Description: hypothetical protein At2g25830 [imported] -
  misc_feature (94)..(327): Homolog of NCBI NO: 15618484 NR Description: YebC family hypothetical protein
  misc_feature (94)..(327): Homolog of NCBI NO: 15835357 NR Description: conserved hypothetical protein [Chlamydia
  misc_feature (94)..(327): Homolog of NCBI NO: 15605184 NR Description: YebC family [Chlamydia trachomatis]
  misc_feature (89)..(327): Homolog of NCBI NO: 23020845 NR Description: hypothetical protein [Clostridium thermocellum
  misc_feature (94)..(327): Homolog of NCBI NO: 15835357 NR Description: conserved hypothetical protein [Chlamydia
  misc_feature (94)..(327): Homolog of NCBI NO: 15618484 NR Description: YebC family hypothetical protein
  misc_feature (1)..(331): Homolog of NCBI NO: 25407817 NR Description: hypothetical protein At2g25830 [imported] -
  misc_feature (1)..(331): Homolog of NCBI NO: 15810383 NR Description: unknown protein [Arabidopsis thaliana]
  misc_feature (1)..(331): Homolog of NCBI NO: 18400953 NR Description: expressed protein [Arabidopsis thaliana]
MASHCSMRVILLRFSNGVSSRSILNSTNHRLLSLTMTNTLSSLSSISPHTTTSHFTAASQQSDDQNCFRKLQLRKISISTPLCMGRRSSKIAGRKGAQDSKKAKLYCRIGKEVVSAVKKGGPNPVSNTTLATILDKAKELDVPKDIVERNIKRASEKGQEAFIEKIYEVYGYGGVSMVVEVLTDKINRSVAAIRSVVKDYGGKMADSGSVMFKFKRVRVVNIKVTEADKDQLLIIALDAGAEDVIEPPTYEDDTDEDREERYYKIVTSNENYSTILSKLRDEGVNFEPDNGSELLPLTTVEVDDEAMELNKELMQKLLELDDVDAVYIDQK

SEQ ID NO: 50088 - protein, 325 aa, Arabidopsis thaliana
  peptide (1)..(325): Ceres Seq. ID no. 13592515
  misc_feature (80)..(325): Pfam Name: Domain of unknown function DUF28 Pfam Description: Domain of unknown function DUF28
  misc_feature (80)..(325): Pfam Name: Domain of unknown function DUF28 Pfam Description: Domain of unknown function DUF28
  misc_feature (83)..(321): Homolog of NCBI NO: 19704982 NR Description: Hypothetical cytosolic protein
  misc_feature (83)..(321): Homolog of NCBI NO: 23020845 NR Description: hypothetical protein [Clostridium thermocellum
  misc_feature (88)..(321): Homolog of NCBI NO: 29839936 NR Description: conserved hypothetical protein TIGR01033
  misc_feature (88)..(321): Homolog of NCBI NO: 15605184 NR Description: YebC family [Chlamydia trachomatis]
  misc_feature (85)..(321): Homolog of NCBI NO: 18310936 NR Description: conserved hypothetical protein [Clostridium
  misc_feature (83)..(321): Homolog of NCBI NO: 19704982 NR Description: Hypothetical cytosolic protein
  misc_feature (88)..(321): Homolog of NCBI NO: 29839936 NR Description: conserved hypothetical protein TIGR01033
  misc_feature (85)..(321): Homolog of NCBI NO: 18310936 NR Description: conserved hypothetical protein [Clostridium
  misc_feature (1)..(325): Homolog of NCBI NO: 18400953 NR Description: expressed protein [Arabidopsis thaliana]
  misc_feature (1)..(325): Homolog of NCBI NO: 15810383 NR Description: unknown protein [Arabidopsis thaliana]
  misc_feature (1)..(325): Homolog of NCBI NO: 25407817 NR Description: hypothetical protein At2g25830 [imported] -
  misc_feature (88)..(321): Homolog of NCBI NO: 15618484 NR Description: YebC family hypothetical protein
  misc_feature (88)..(321): Homolog of NCBI NO: 15835357 NR Description: conserved hypothetical protein [Chlamydia
  misc_feature (88)..(321): Homolog of NCBI NO: 15605184 NR Description: YebC family [Chlamydia trachomatis]
  misc_feature (83)..(321): Homolog of NCBI NO: 23020845 NR Description: hypothetical protein [Clostridium thermocellum
  misc_feature (88)..(321): Homolog of NCBI NO: 15835357 NR Description: conserved hypothetical protein [Chlamydia
  misc_feature (88)..(321): Homolog of NCBI NO: 15618484 NR Description: YebC family hypothetical protein
  misc_feature (1)..(325): Homolog of NCBI NO: 25407817 NR Description: hypothetical protein At2g25830 [imported] -
  misc_feature (1)..(325): Homolog of NCBI NO: 15810383 NR Description: unknown protein [Arabidopsis thaliana]
  misc_feature (1)..(325): Homolog of NCBI NO: 18400953 NR Description: expressed protein [Arabidopsis thaliana]
MRVILLRFSNGVSSRSILNSTNHRLLSLTMTNTLSSLSSISPHTTTSHFTAASQQSDDQNCFRKLQLRKISISTPLCMGRRSSKIAGRKGAQDSKKAKLYCRIGKEVVSAVKKGGPNPVSNTTLATILDKAKELDVPKDIVERNIKRASEKGQEAFIEKIYEVYGYGGVSMVVEVLTDKINRSVAAIRSVVKDYGGKMADSGSVMFKFKRVRVVNIKVTEADKDQLLIIALDAGAEDVIEPPTYEDDTDEDREERYYKIVTSNENYSTILSKLRDEGVNFEPDNGSELLPLTTVEVDDEAMELNKELMQKLLELDDVDAVYIDQK

SEQ ID NO: 50089 - DNA, 1475 bp, Arabidopsis thaliana
  misc_feature (1)..(1475): Ceres Seq. ID no. 13592545
  misc_feature: MA Experiment ID: 20001451 Result: Down-regulated in Transcription
  misc_feature: MA Experiment 20001451 PARAMETER Experiment Name: At_Far-red-induction_P Parameter: Age (day) Value: 7
  misc_feature: MA Experiment 20001451 PARAMETER Experiment Name: At_Far-red-induction_P Parameter: Light Value: Far-red vs. White
  misc_feature: MA Experiment 20001451 PARAMETER Experiment Name: At_Far-red-induction_P Parameter: Organism Value: A. thaliana
  misc_feature: MA Experiment 20001451 PARAMETER Experiment Name: At_Far-red-induction_P Parameter: Plant Line Value: Columbia
  misc_feature: MA Experiment 20001451 PARAMETER Experiment Name: At_Far-red-induction_P Parameter: Timepoint (hr) Value: 24
  misc_feature: MA Experiment 20001451 PARAMETER Experiment Name: At_Far-red-induction_P Parameter: Tissue Value: Whole Plant
tcagctgctcgatctctctctgatcacaacaatcataagcgatgagaggagctagacccgatgaattcaattttagtacgaatccatcaacgccaaacactggtcagccgacaccgacgtaccccgccggtgttggcggcggcggcggtggaaggaaaaaaggcgttggcgtgaggacgtggttggtacttaactcgtcagggcaatcggagccgaaggaagaagggaaacactccatcatgcggcgaacgggattaccggcgcgtgatcttaggattctcgatccactgttgtcgtatccatctactgttttaggtagagagagagcgattgtcatcaatttggagcatatcaaggcaatcatcactgctcaagaagttttgttgcttaattccaaggatccttcggtctcaccctttattgatgagttgcagaggcggattctctgtcaccatcacgccactaaacctcaggaggagcagaactctgggggagagcctcatacgagggtagatcctgcccaaggagaagctggaacggaacaatcttctggggatcaagggagtgaagccaagaaggatgcgaagcaaagtcttgagaatcaagatggatcgaaggttcttccatttgagtttgttgctctggaagcctgtcttgaagctgcatcaagcagtttggaacatgaggccttaagattggagttagaggctcatccagccctggacaagcttacttccaagatcagtacccttaatttggagcgggttcgacagattaaaagcaggctggttgcaataactggacgtgttcagaaggtgagggatgagctagaacatctgctagacgatgatgaagatatggctgagatgtatcttacagagaagttagctcagaaacttgaggattcgtcaaattcctctatgaatgagagtgataccttcgaggttgatcttcctcaaggagatgaggatgacaggcatgctaacagagatggaaggtatcttcaagcaaatgatgctcacgagcttcttatgagtactcaaagtgcacttagcagaaatagccgtgggactcacacaagctcaacccggagtgccatgaccaacaaattagatgtggaagagcttgaaatgcttttggaagcatatttcgtgcagatcgatggtatactgaacaaactatcaacactaagggaatatgtggatgacacggaggactacatcaacataatgctagatgacaagcagaatcatcttctgcagatgggtgtgatgctaacaacagctactctggtgatgagcgcctttatcgcagttgctggtgtatttggtatgaatataaccatagagttgttcacggataataaacatggtccaagtagattcatttggactgtgattggaggttctatcggcagtatatgcctctacgttggtgccatcgggtggtgcaagtacaagcgccttcttgaatga

SEQ ID NO: 50090 - protein, 477 aa, Arabidopsis thaliana
  peptide (1)..(477): Ceres Seq. ID no. 13592546
  misc_feature (335)..(476): Homolog of NCBI NO: 40539050 NR Description: putative  CorA-like Mg2+ transporter protein
  misc_feature (28)..(135): Homolog of NCBI NO: 38345033 NR Description: OSJNBa0029H02.17 [Oryza sativa (japonica
  misc_feature (171)..(464): Homolog of NCBI NO: 38345033 NR Description: OSJNBa0029H02.17 [Oryza sativa (japonica
  misc_feature (36)..(134): Homolog of NCBI NO: 21553824 NR Description: unknown [Arabidopsis thaliana]
  misc_feature (36)..(134): Homolog of NCBI NO: 18412911 NR Description: expressed protein [Arabidopsis thaliana]
  misc_feature (176)..(454): Homolog of NCBI NO: 21553824 NR Description: unknown [Arabidopsis thaliana]
  misc_feature (176)..(454): Homolog of NCBI NO: 18412911 NR Description: expressed protein [Arabidopsis thaliana]
  misc_feature (36)..(134): Homolog of NCBI NO: 18394312 NR Description: expressed protein [Arabidopsis thaliana]
  misc_feature (173)..(454): Homolog of NCBI NO: 18394312 NR Description: expressed protein [Arabidopsis thaliana]
  misc_feature (1)..(477): Homolog of NCBI NO: 30685422 NR Description: expressed protein [Arabidopsis thaliana]
MRGARPDEFNFSTNPSTPNTGQPTPTYPAGVGGGGGGRKKGVGVRTWLVLNSSGQSEPKEEGKHSIMRRTGLPARDLRILDPLLSYPSTVLGRERAIVINLEHIKAIITAQEVLLLNSKDPSVSPFIDELQRRILCHHHATKPQEEQNSGGEPHTRVDPAQGEAGTEQSSGDQGSEAKKDAKQSLENQDGSKVLPFEFVALEACLEAASSSLEHEALRLELEAHPALDKLTSKISTLNLERVRQIKSRLVAITGRVQKVRDELEHLLDDDEDMAEMYLTEKLAQKLEDSSNSSMNESDTFEVDLPQGDEDDRHANRDGRYLQANDAHELLMSTQSALSRNSRGTHTSSTRSAMTNKLDVEELEMLLEAYFVQIDGILNKLSTLREYVDDTEDYINIMLDDKQNHLLQMGVMLTTATLVMSAFIAVAGVFGMNITIELFTDNKHGPSRFIWTVIGGSIGSICLYVGAIGWCKYKRLLE

SEQ ID NO: 50091 - protein, 411 aa, Arabidopsis thaliana
  peptide (1)..(411): Ceres Seq. ID no. 13592547
  misc_feature (269)..(410): Homolog of NCBI NO: 40539050 NR Description: putative  CorA-like Mg2+ transporter protein
  misc_feature (1)..(69): Homolog of NCBI NO: 38345033 NR Description: OSJNBa0029H02.17 [Oryza sativa (japonica
  misc_feature (105)..(398): Homolog of NCBI NO: 38345033 NR Description: OSJNBa0029H02.17 [Oryza sativa (japonica
  misc_feature (1)..(68): Homolog of NCBI NO: 21553824 NR Description: unknown [Arabidopsis thaliana]
  misc_feature (1)..(68): Homolog of NCBI NO: 18412911 NR Description: expressed protein [Arabidopsis thaliana]
  misc_feature (110)..(388): Homolog of NCBI NO: 21553824 NR Description: unknown [Arabidopsis thaliana]
  misc_feature (110)..(388): Homolog of NCBI NO: 18412911 NR Description: expressed protein [Arabidopsis thaliana]
  misc_feature (1)..(68): Homolog of NCBI NO: 18394312 NR Description: expressed protein [Arabidopsis thaliana]
  misc_feature (107)..(388): Homolog of NCBI NO: 18394312 NR Description: expressed protein [Arabidopsis thaliana]
  misc_feature (1)..(411): Homolog of NCBI NO: 30685422 NR Description: expressed protein [Arabidopsis thaliana]
MRRTGLPARDLRILDPLLSYPSTVLGRERAIVINLEHIKAIITAQEVLLLNSKDPSVSPFIDELQRRILCHHHATKPQEEQNSGGEPHTRVDPAQGEAGTEQSSGDQGSEAKKDAKQSLENQDGSKVLPFEFVALEACLEAASSSLEHEALRLELEAHPALDKLTSKISTLNLERVRQIKSRLVAITGRVQKVRDELEHLLDDDEDMAEMYLTEKLAQKLEDSSNSSMNESDTFEVDLPQGDEDDRHANRDGRYLQANDAHELLMSTQSALSRNSRGTHTSSTRSAMTNKLDVEELEMLLEAYFVQIDGILNKLSTLREYVDDTEDYINIMLDDKQNHLLQMGVMLTTATLVMSAFIAVAGVFGMNITIELFTDNKHGPSRFIWTVIGGSIGSICLYVGAIGWCKYKRLLE

SEQ ID NO: 50092 - DNA, 1980 bp, Arabidopsis thaliana; identical to SEQ ID NO: 49071
  misc_feature (1)..(1980): Ceres Seq. ID no. 13592092
  misc_feature: MA Experiment ID: 20000171 Result: Down-regulated in Transcription
  misc_feature: MA Experiment 20000171 PARAMETER Experiment Name: At_42deg_Heat_P Parameter: Age (day) Value: 14
  misc_feature: MA Experiment 20000171 PARAMETER Experiment Name: At_42deg_Heat_P Parameter: Organism Value: A. thaliana
  misc_feature: MA Experiment 20000171 PARAMETER Experiment Name: At_42deg_Heat_P Parameter: Plant Line Value: WS
  misc_feature: MA Experiment 20000171 PARAMETER Experiment Name: At_42deg_Heat_P Parameter: Temperature (deg C) Value: 42 vs. 22
  misc_feature: MA Experiment 20000171 PARAMETER Experiment Name: At_42deg_Heat_P Parameter: Timepoint (hr) Value: 1
  misc_feature: MA Experiment 20000171 PARAMETER Experiment Name: At_42deg_Heat_P Parameter: Tissue Value: Aerial
  misc_feature: MA Experiment ID: 20000180 Result: Up-regulated in Transcription
  misc_feature: MA Experiment 20000180 PARAMETER Experiment Name: At_Germinating_Seeds_P Parameter: Age (hr) Value: 24 vs. 0
  misc_feature: MA Experiment 20000180 PARAMETER Experiment Name: At_Germinating_Seeds_P Parameter: Tissue Value: Germinating Seeds
  misc_feature: MA Experiment ID: 20000182 Result: Down-regulated in Transcription
  misc_feature: MA Experiment 20000182 PARAMETER Experiment Name: At_2mM_SA_P Parameter: Age (day) Value: 14
  misc_feature: MA Experiment 20000182 PARAMETER Experiment Name: At_2mM_SA_P Parameter: Organism Value: A. thaliana
  misc_feature: MA Experiment 20000182 PARAMETER Experiment Name: At_2mM_SA_P Parameter: Plant Line Value: WS
  misc_feature: MA Experiment 20000182 PARAMETER Experiment Name: At_2mM_SA_P Parameter: Timepoint (hr) Value: 6
  misc_feature: MA Experiment 20000182 PARAMETER Experiment Name: At_2mM_SA_P Parameter: Tissue Value: Aerial
  misc_feature: MA Experiment 20000182 PARAMETER Experiment Name: At_2mM_SA_P Parameter: Treatment Value: 2mM SA vs. No Treatment
  misc_feature: MA Experiment ID: 20000184 Result: Up-regulated in Transcription
  misc_feature: MA Experiment 20000184 PARAMETER Experiment Name: At_Shoots__P Parameter: Age (day) Value: 7
  misc_feature: MA Experiment 20000184 PARAMETER Experiment Name: At_Shoots__P Parameter: Tissue Value: Shoots vs. Whole Plant
  misc_feature: MA Experiment ID: 20000185 Result: Up-regulated in Transcription
  misc_feature: MA Experiment 20000185 PARAMETER Experiment Name: At_Roots__P Parameter: Age (day) Value: 7 vs. 21
  misc_feature: MA Experiment 20000185 PARAMETER Experiment Name: At_Roots__P Parameter: Organism Value: A. thaliana
  misc_feature: MA Experiment 20000185 PARAMETER Experiment Name: At_Roots__P Parameter: Tissue Value: Roots vs. Whole Plant
  misc_feature: MA Experiment ID: 20000227 Result: Up-regulated in Transcription
  misc_feature: MA Experiment 20000227 PARAMETER Experiment Name: At_Root-Tips-vs-Tops_P Parameter: Tissue Value: Root Tips vs. Root Tops
  misc_feature: MA Experiment ID: 20000234 Result: Up-regulated in Transcription
  misc_feature: MA Experiment 20000234 PARAMETER Experiment Name: At_Siliques_P Parameter: Age (day) Value: 21
  misc_feature: MA Experiment 20000234 PARAMETER Experiment Name: At_Siliques_P Parameter: Organism Value: A. thaliana
  misc_feature: MA Experiment 20000234 PARAMETER Experiment Name: At_Siliques_P Parameter: Plant Line Value: WS
  misc_feature: MA Experiment 20000234 PARAMETER Experiment Name: At_Siliques_P Parameter: Tissue Value: Less Than 5mm Siliques vs. Whole Plant
  misc_feature: MA Experiment ID: 20000235 Result: Up-regulated in Transcription
  misc_feature: MA Experiment 20000235 PARAMETER Experiment Name: At_Siliques_P Parameter: Age (day) Value: 21
  misc_feature: MA Experiment 20000235 PARAMETER Experiment Name: At_Siliques_P Parameter: Organism Value: A. thaliana
  misc_feature: MA Experiment 20000235 PARAMETER Experiment Name: At_Siliques_P Parameter: Plant Line Value: WS
  misc_feature: MA Experiment 20000235 PARAMETER Experiment Name: At_Siliques_P Parameter: Tissue Value: 5-10mm Siliques vs. Whole Plant
  misc_feature: MA Experiment ID: 20000265 Result: Up-regulated in Transcription
  misc_feature: MA Experiment 20000265 PARAMETER Experiment Name: At_Open_Flower_P Parameter: Age (day) Value: 21
  misc_feature: MA Experiment 20000265 PARAMETER Experiment Name: At_Open_Flower_P Parameter: Plant Line Value: WS
  misc_feature: MA Experiment 20000265 PARAMETER Experiment Name: At_Open_Flower_P Parameter: Tissue Value: Closed Flower vs. Whole Plant
  misc_feature: MA Experiment ID: 20000286 Result: Up-regulated in Transcription
  misc_feature: MA Experiment 20000286 PARAMETER Experiment Name: At_Open_Flower_P Parameter: Age (day) Value: 21
  misc_feature: MA Experiment 20000286 PARAMETER Experiment Name: At_Open_Flower_P Parameter: Plant Line Value: WS
  misc_feature: MA Experiment 20000286 PARAMETER Experiment Name: At_Open_Flower_P Parameter: Tissue Value: Half Open vs. Whole Plant
  misc_feature: MA Experiment ID: 20000437 Result: Down-regulated in Transcription
  misc_feature: MA Experiment 20000437 PARAMETER Experiment Name: At_Drought_P Parameter: Age (day) Value: 8
  misc_feature: MA Experiment 20000437 PARAMETER Experiment Name: At_Drought_P Parameter: Organism Value: A. thaliana
  misc_feature: MA Experiment 20000437 PARAMETER Experiment Name: At_Drought_P Parameter: Plant Line Value: WS
  misc_feature: MA Experiment 20000437 PARAMETER Experiment Name: At_Drought_P Parameter: Timepoint (hr) Value: 24
  misc_feature: MA Experiment 20000437 PARAMETER Experiment Name: At_Drought_P Parameter: Tissue Value: Whole Plant
  misc_feature: MA Experiment 20000437 PARAMETER Experiment Name: At_Drought_P Parameter: Treatment Value: Drought vs. No Drought
  misc_feature: MA Experiment ID: 20000794 Result: Down-regulated in Transcription
  misc_feature: MA Experiment 20000794 PARAMETER Experiment Name: At_Petals_P Parameter: Age (day) Value: 23-25 days
  misc_feature: MA Experiment 20000794 PARAMETER Experiment Name: At_Petals_P Parameter: Plant Line Value: WS
  misc_feature: MA Experiment 20000794 PARAMETER Experiment Name: At_Petals_P Parameter: Tissue Value: Petals vs. Whole plant
  misc_feature: MA Experiment ID: 20001554 Result: Down-regulated in Transcription
  misc_feature: MA Experiment 20001554 PARAMETER Experiment Name: At_Drought_Soil_Dry_P Parameter: Age (day) Value: 21
  misc_feature: MA Experiment 20001554 PARAMETER Experiment Name: At_Drought_Soil_Dry_P Parameter: Organism Value: A. thaliana
  misc_feature: MA Experiment 20001554 PARAMETER Experiment Name: At_Drought_Soil_Dry_P Parameter: Plant Line Value: WS
  misc_feature: MA Experiment 20001554 PARAMETER Experiment Name: At_Drought_Soil_Dry_P Parameter: Post Timepoint (hr) Value: None
  misc_feature: MA Experiment 20001554 PARAMETER Experiment Name: At_Drought_Soil_Dry_P Parameter: Post-Treatment Value: None
  misc_feature: MA Experiment 20001554 PARAMETER Experiment Name: At_Drought_Soil_Dry_P Parameter: Timepoint (day) Value: 7
  misc_feature: MA Experiment 20001554 PARAMETER Experiment Name: At_Drought_Soil_Dry_P Parameter: Treatment Value: Drought vs. No Drought
  misc_feature: MA Experiment ID: 20001555 Result: Down-regulated in Transcription
  misc_feature: MA Experiment 20001555 PARAMETER Experiment Name: At_Drought_Soil_Dry_P Parameter: Age (day) Value: 24
  misc_feature: MA Experiment 20001555 PARAMETER Experiment Name: At_Drought_Soil_Dry_P Parameter: Organism Value: A. thaliana
  misc_feature: MA Experiment 20001555 PARAMETER Experiment Name: At_Drought_Soil_Dry_P Parameter: Plant Line Value: WS
  misc_feature: MA Experiment 20001555 PARAMETER Experiment Name: At_Drought_Soil_Dry_P Parameter: Post Timepoint (hr) Value: None
  misc_feature: MA Experiment 20001555 PARAMETER Experiment Name: At_Drought_Soil_Dry_P Parameter: Post-Treatment Value: None
  misc_feature: MA Experiment 20001555 PARAMETER Experiment Name: At_Drought_Soil_Dry_P Parameter: Timepoint (day) Value: 10
  misc_feature: MA Experiment 20001555 PARAMETER Experiment Name: At_Drought_Soil_Dry_P Parameter: Treatment Value: Drought vs. No Drought
  misc_feature: MA Experiment ID: 20001556 Result: Down-regulated in Transcription
  misc_feature: MA Experiment 20001556 PARAMETER Experiment Name: At_Drought_Soil_Dry_P Parameter: Age (day) Value: 26
  misc_feature: MA Experiment 20001556 PARAMETER Experiment Name: At_Drought_Soil_Dry_P Parameter: Organism Value: A. thaliana
  misc_feature: MA Experiment 20001556 PARAMETER Experiment Name: At_Drought_Soil_Dry_P Parameter: Plant Line Value: WS
  misc_feature: MA Experiment 20001556 PARAMETER Experiment Name: At_Drought_Soil_Dry_P Parameter: Post Timepoint (hr) Value: None
  misc_feature: MA Experiment 20001556 PARAMETER Experiment Name: At_Drought_Soil_Dry_P Parameter: Post-Treatment Value: None
  misc_feature: MA Experiment 20001556 PARAMETER Experiment Name: At_Drought_Soil_Dry_P Parameter: Timepoint (day) Value: 12
  misc_feature: MA Experiment 20001556 PARAMETER Experiment Name: At_Drought_Soil_Dry_P Parameter: Treatment Value: Drought vs. No Drought
  misc_feature: MA Experiment ID: 20001558 Result: Up-regulated in Transcription
  misc_feature: MA Experiment 20001558 PARAMETER Experiment Name: At_Drought_Soil_Dry_P Parameter: Age (day) Value: 27
  misc_feature: MA Experiment 20001558 PARAMETER Experiment Name: At_Drought_Soil_Dry_P Parameter: Organism Value: A. thaliana
  misc_feature: MA Experiment 20001558 PARAMETER Experiment Name: At_Drought_Soil_Dry_P Parameter: Plant Line Value: WS
  misc_feature: MA Experiment 20001558 PARAMETER Experiment Name: At_Drought_Soil_Dry_P Parameter: Post Timepoint (hr) Value: 6
  misc_feature: MA Experiment 20001558 PARAMETER Experiment Name: At_Drought_Soil_Dry_P Parameter: Post-Treatment Value: Re-Water vs. No Drought
  misc_feature: MA Experiment 20001558 PARAMETER Experiment Name: At_Drought_Soil_Dry_P Parameter: Timepoint (day) Value: 13
  misc_feature: MA Experiment 20001558 PARAMETER Experiment Name: At_Drought_Soil_Dry_P Parameter: Treatment Value: Drought vs. No Drought
  misc_feature: MA Experiment ID: 20001559 Result: Down-regulated in Transcription
  misc_feature: MA Experiment 20001559 PARAMETER Experiment Name: At_Drought_Soil_Dry_P Parameter: Age (day) Value: 28
  misc_feature: MA Experiment 20001559 PARAMETER Experiment Name: At_Drought_Soil_Dry_P Parameter: Organism Value: A. thaliana
  misc_feature: MA Experiment 20001559 PARAMETER Experiment Name: At_Drought_Soil_Dry_P Parameter: Plant Line Value: WS
  misc_feature: MA Experiment 20001559 PARAMETER Experiment Name: At_Drought_Soil_Dry_P Parameter: Post Timepoint (hr) Value: 29
  misc_feature: MA Experiment 20001559 PARAMETER Experiment Name: At_Drought_Soil_Dry_P Parameter: Post-Treatment Value: Re-Water vs. No Drought
  misc_feature: MA Experiment 20001559 PARAMETER Experiment Name: At_Drought_Soil_Dry_P Parameter: Timepoint (day) Value: 14
  misc_feature: MA Experiment 20001559 PARAMETER Experiment Name: At_Drought_Soil_Dry_P Parameter: Treatment Value: Drought vs. No Drought
  misc_feature: MA Experiment ID: 20001560 Result: Up-regulated in Transcription
  misc_feature: MA Experiment 20001560 PARAMETER Experiment Name: At_Drought_Soil_Dry_P Parameter: Age (day) Value: 28
  misc_feature: MA Experiment 20001560 PARAMETER Experiment Name: At_Drought_Soil_Dry_P Parameter: Organism Value: A. thaliana
  misc_feature: MA Experiment 20001560 PARAMETER Experiment Name: At_Drought_Soil_Dry_P Parameter: Plant Line Value: WS
  misc_feature: MA Experiment 20001560 PARAMETER Experiment Name: At_Drought_Soil_Dry_P Parameter: Post Timepoint (hr) Value: None
  misc_feature: MA Experiment 20001560 PARAMETER Experiment Name: At_Drought_Soil_Dry_P Parameter: Post-Treatment Value: None
  misc_feature: MA Experiment 20001560 PARAMETER Experiment Name: At_Drought_Soil_Dry_P Parameter: Timepoint (day) Value: 14
  misc_feature: MA Experiment 20001560 PARAMETER Experiment Name: At_Drought_Soil_Dry_P Parameter: Treatment Value: Drought vs. No Drought
  misc_feature: MA Experiment ID: 20001906 Result: Down-regulated in Transcription
  misc_feature: MA Experiment 20001906 PARAMETER Experiment Name: At_Drought_Reproduction_P Parameter: Age (day) Value: 35
  misc_feature: MA Experiment 20001906 PARAMETER Experiment Name: At_Drought_Reproduction_P Parameter: Organism Value: A. thaliana
  misc_feature: MA Experiment 20001906 PARAMETER Experiment Name: At_Drought_Reproduction_P Parameter: Plant Line Value: WS
  misc_feature: MA Experiment 20001906 PARAMETER Experiment Name: At_Drought_Reproduction_P Parameter: Timepoint (day) Value: 5
  misc_feature: MA Experiment 20001906 PARAMETER Experiment Name: At_Drought_Reproduction_P Parameter: Tissue Value: Siliques
  misc_feature: MA Experiment 20001906 PARAMETER Experiment Name: At_Drought_Reproduction_P Parameter: Treatment Value: Drought vs. No Drought
  misc_feature: MA Experiment ID: 20001911 Result: Down-regulated in Transcription
  misc_feature: MA Experiment 20001911 PARAMETER Experiment Name: At_Drought_Reproduction_P Parameter: Age (day) Value: 40
  misc_feature: MA Experiment 20001911 PARAMETER Experiment Name: At_Drought_Reproduction_P Parameter: Organism Value: A. thaliana
  misc_feature: MA Experiment 20001911 PARAMETER Experiment Name: At_Drought_Reproduction_P Parameter: Plant Line Value: WS
  misc_feature: MA Experiment 20001911 PARAMETER Experiment Name: At_Drought_Reproduction_P Parameter: Timepoint (day) Value: 10
  misc_feature: MA Experiment 20001911 PARAMETER Experiment Name: At_Drought_Reproduction_P Parameter: Tissue Value: Flowers
  misc_feature: MA Experiment 20001911 PARAMETER Experiment Name: At_Drought_Reproduction_P Parameter: Treatment Value: Drought vs. No Drought

SEQ ID NO: 50093 - protein, 541 aa, Arabidopsis thaliana; identical to SEQ ID NO: 49072
  peptide (1)..(541): Ceres Seq. ID no. 13592093
  misc_feature (22)..(525): Homolog of NCBI NO: 7432997 NR Description: pollen-specific protein homolog - tomato
  misc_feature (9)..(538): Homolog of NCBI NO: 15219118 NR Description: pectinesterase (pectin methylesterase), putative
  misc_feature (9)..(540): Homolog of NCBI NO: 25285550 NR Description: probable pectinesterase [imported] - Arabidopsis
  misc_feature (9)..(540): Homolog of NCBI NO: 18400509 NR Description: pectinesterase (pectin methylesterase) -related
  misc_feature (9)..(540): Homolog of NCBI NO: 16648889 NR Description: Unknown protein [Arabidopsis thaliana]
  misc_feature (1)..(540): Homolog of NCBI NO: 22531132 NR Description: pectinesterase, putative [Arabidopsis thaliana]
  misc_feature (1)..(540): Homolog of NCBI NO: 15982771 NR Description: At1g76160/T23E18_10 [Arabidopsis thaliana]
  misc_feature (7)..(540): Homolog of NCBI NO: 1255951 NR Description: PS60 [Nicotiana tabacum]
  misc_feature (1)..(540): Homolog of NCBI NO: 15222981 NR Description: pectinesterase (pectin methylesterase), putative
  misc_feature (1)..(541): Homolog of NCBI NO: 15234688 NR Description: pectinesterase (pectin methylesterase), putative
  misc_feature (22)..(525): Homolog of NCBI NO: 7432997 NR Description: pollen-specific protein homolog - tomato
  misc_feature (9)..(538): Homolog of NCBI NO: 15219118 NR Description: pectinesterase (pectin methylesterase), putative
  misc_feature (9)..(540): Homolog of NCBI NO: 25285550 NR Description: probable pectinesterase [imported] - Arabidopsis
  misc_feature (9)..(540): Homolog of NCBI NO: 18400509 NR Description: pectinesterase (pectin methylesterase) -related
  misc_feature (9)..(540): Homolog of NCBI NO: 16648889 NR Description: Unknown protein [Arabidopsis thaliana]
  misc_feature (1)..(540): Homolog of NCBI NO: 22531132 NR Description: pectinesterase, putative [Arabidopsis thaliana]
  misc_feature (1)..(540): Homolog of NCBI NO: 15982771 NR Description: At1g76160/T23E18_10 [Arabidopsis thaliana]
  misc_feature (7)..(540): Homolog of NCBI NO: 1255951 NR Description: PS60 [Nicotiana tabacum]
  misc_feature (1)..(540): Homolog of NCBI NO: 15222981 NR Description: pectinesterase (pectin methylesterase), putative
  misc_feature (1)..(541): Homolog of NCBI NO: 15234688 NR Description: pectinesterase (pectin methylesterase), putative

SEQ ID NO: 50094 - protein, 310 aa, Arabidopsis thaliana; identical to SEQ ID NO: 49073
  peptide (1)..(310): Ceres Seq. ID no. 13592094
  misc_feature (1)..(294): Homolog of NCBI NO: 7432997 NR Description: pollen-specific protein homolog - tomato
  misc_feature (1)..(307): Homolog of NCBI NO: 15219118 NR Description: pectinesterase (pectin methylesterase), putative
  misc_feature (1)..(309): Homolog of NCBI NO: 18400509 NR Description: pectinesterase (pectin methylesterase) -related
  misc_feature (1)..(309): Homolog of NCBI NO: 25285550 NR Description: probable pectinesterase [imported] - Arabidopsis
  misc_feature (1)..(309): Homolog of NCBI NO: 16648889 NR Description: Unknown protein [Arabidopsis thaliana]
  misc_feature (1)..(309): Homolog of NCBI NO: 22531132 NR Description: pectinesterase, putative [Arabidopsis thaliana]
  misc_feature (1)..(309): Homolog of NCBI NO: 15982771 NR Description: At1g76160/T23E18_10 [Arabidopsis thaliana]
  misc_feature (1)..(309): Homolog of NCBI NO: 1255951 NR Description: PS60 [Nicotiana tabacum]
  misc_feature (1)..(309): Homolog of NCBI NO: 15222981 NR Description: pectinesterase (pectin methylesterase), putative
  misc_feature (1)..(310): Homolog of NCBI NO: 15234688 NR Description: pectinesterase (pectin methylesterase), putative
  misc_feature (1)..(294): Homolog of NCBI NO: 7432997 NR Description: pollen-specific protein homolog - tomato
  misc_feature (1)..(307): Homolog of NCBI NO: 15219118 NR Description: pectinesterase (pectin methylesterase), putative
  misc_feature (1)..(309): Homolog of NCBI NO: 18400509 NR Description: pectinesterase (pectin methylesterase) -related
  misc_feature (1)..(309): Homolog of NCBI NO: 25285550 NR Description: probable pectinesterase [imported] - Arabidopsis
  misc_feature (1)..(309): Homolog of NCBI NO: 16648889 NR Description: Unknown protein [Arabidopsis thaliana]
  misc_feature (1)..(309): Homolog of NCBI NO: 22531132 NR Description: pectinesterase, putative [Arabidopsis thaliana]
  misc_feature (1)..(309): Homolog of NCBI NO: 15982771 NR Description: At1g76160/T23E18_10 [Arabidopsis thaliana]
  misc_feature (1)..(309): Homolog of NCBI NO: 1255951 NR Description: PS60 [Nicotiana tabacum]
  misc_feature (1)..(309): Homolog of NCBI NO: 15222981 NR Description: pectinesterase (pectin methylesterase), putative
  misc_feature (1)..(310): Homolog of NCBI NO: 15234688 NR Description: pectinesterase (pectin methylesterase), putative

SEQ ID NO: 50095 - DNA, 1712 bp, Arabidopsis thaliana
  misc_feature (1)..(1712): Ceres Seq. ID no. 13647719
  misc_feature: MA Experiment ID: 20000307 Result: Up-regulated in Transcription
  misc_feature: MA Experiment 20000307 PARAMETER Experiment Name: At_Germinating_Seeds_Sub_P Parameter: Age (hr) Value: 24 vs. 0
  misc_feature: MA Experiment 20000307 PARAMETER Experiment Name: At_Germinating_Seeds_Sub_P Parameter: Organism Value: A. thaliana
  misc_feature: MA Experiment 20000307 PARAMETER Experiment Name: At_Germinating_Seeds_Sub_P Parameter: Plant Line Value: WS
  misc_feature: MA Experiment 20000307 PARAMETER Experiment Name: At_Germinating_Seeds_Sub_P Parameter: Tissue Value: Germinating Seeds
  misc_feature: MA Experiment ID: 20000327 Result: Down-regulated in Transcription
  misc_feature: MA Experiment 20000327 PARAMETER Experiment Name: At_42deg_Heat_Sub_P Parameter: Age (day) Value: 14
  misc_feature: MA Experiment 20000327 PARAMETER Experiment Name: At_42deg_Heat_Sub_P Parameter: Organism Value: A. thaliana
  misc_feature: MA Experiment 20000327 PARAMETER Experiment Name: At_42deg_Heat_Sub_P Parameter: Plant Line Value: WS
  misc_feature: MA Experiment 20000327 PARAMETER Experiment Name: At_42deg_Heat_Sub_P Parameter: Temperature (deg C) Value: 42 vs. 22
  misc_feature: MA Experiment 20000327 PARAMETER Experiment Name: At_42deg_Heat_Sub_P Parameter: Timepoint (hr) Value: 1
  misc_feature: MA Experiment 20000327 PARAMETER Experiment Name: At_42deg_Heat_Sub_P Parameter: Tissue Value: Aerial
  misc_feature: MA Experiment ID: 20000328 Result: Down-regulated in Transcription
  misc_feature: MA Experiment 20000328 PARAMETER Experiment Name: At_42deg_Heat_Sub_P Parameter: Age (day) Value: 14
  misc_feature: MA Experiment 20000328 PARAMETER Experiment Name: At_42deg_Heat_Sub_P Parameter: Organism Value: A. thaliana
  misc_feature: MA Experiment 20000328 PARAMETER Experiment Name: At_42deg_Heat_Sub_P Parameter: Plant Line Value: WS
  misc_feature: MA Experiment 20000328 PARAMETER Experiment Name: At_42deg_Heat_Sub_P Parameter: Temperature (deg C) Value: 42 vs. 22
  misc_feature: MA Experiment 20000328 PARAMETER Experiment Name: At_42deg_Heat_Sub_P Parameter: Timepoint (hr) Value: 6
  misc_feature: MA Experiment 20000328 PARAMETER Experiment Name: At_42deg_Heat_Sub_P Parameter: Tissue Value: Aerial
  misc_feature: MA Experiment ID: 20000355 Result: Up-regulated in Transcription
  misc_feature: MA Experiment 20000355 PARAMETER Experiment Name: At_Siliques_Sub_P Parameter: Age (day) Value: 21
  misc_feature: MA Experiment 20000355 PARAMETER Experiment Name: At_Siliques_Sub_P Parameter: Organism Value: A. thaliana
  misc_feature: MA Experiment 20000355 PARAMETER Experiment Name: At_Siliques_Sub_P Parameter: Plant Line Value: WS
  misc_feature: MA Experiment 20000355 PARAMETER Experiment Name: At_Siliques_Sub_P Parameter: Tissue Value: Less Than 5mm Siliques vs. Whole Plant
  misc_feature: MA Experiment ID: 20000440 Result: Up-regulated in Transcription
  misc_feature: MA Experiment 20000440 PARAMETER Experiment Name: At_Closed-Flower__Sub_P Parameter: Tissue Value: Closed Flower vs. Whole Plant
ttttttttgactctcttcttcttcatcttcttcttcttcttcttcttcttcttcttcttcttcttcttcttcttcttcttcttcttcatattttccctatgatttggatctctaaaatcttcaatccccatgttctaatttaaaaaatcacaacactctctttatcatataccctattataaaccaaactttgatcctcgaatatattttattaaaaagataatattcgtgtttctcatgttggagtcataataaagaaacctttgtgttttaatttaatcccctccaagaaacctgaagattctaagaagctgccattaaaactaataaaggaagagagtccaaagaagaagaagaagaagagaaaatgtcacgtcttgacgacataccttcaagcccaggcaaattcaagatggagaaatcttcctacttgcatcgtctcagattccaatcttctctcacaaagtttgcatttttctccttcttcctcctctgtctcatctctctactcttcctccgatctccaccgtccattaacccttcttcaccgtccgatccatctcgccgttcactccgaaccaacacctacggaggaccagcttgggaaaaacgtctcagatcctcagctcgaatccgaacctcaacaaacaacggaatcacagttttagtaaccggagcagctggtttcgtcggaacacacgtctccgccgcattaaaacgccgcggagacggcgtaatcggcctcgacaacttcaacgattactacgatccatctctgaaacgagcaagacgagctttactcgagagaagtgggatcttcatcgtagaaggagacataaacgacgtcgaattactccgtaagctattcaagatcgtctccttcacacacgttatgcatttagcagctcaagctggtgtacggtacgcaatggaaaaccctagctcgtacgttcatagcaacatcgccggattcgtcaatctcctcgagatctgcaaatctgtgaatccacaacctgctatagtctgggcttcgtctagctccgtctacggactcaacaccaaagttccgttctcggagaaagataaaacagatcaaccggcgagtttatacgccgccactaaaaaagccggcgaagagatcgcacatacctacaaccacatctatggattatctctaaccggattaagatttttcaccgtgtatggaccttggggaagaccagacatggcgtatttcttcttcactaaagatattctaaaaggcaaatcgatttcgatattcgaatcggcgaatcacggaacggtggctagggatttcacttacatagacgatatagtgaagggatgtttagcggcgctagatacggcggagaagagtacagggagtggagggaagaagagaggtccggcgcaattgagagtgtttaacctcggaaacacgtcgccggtgccggtttcagatctggtgaggatattggagagacaattgaaagtgaaggcgaagaagaatttgattaagatgccacgaaacggtgacgttccgtttactcatgctaatattagtttagctcaacgtgagcttggttataaaccgactacggatttgcaaaccggtttgaagaagtttgtcagatggtatttgagttattactccggcgacaaaaaagccgccgctagatgatctttttttctggttgatgatgatcttttga

SEQ ID NO: 50096 - protein, 437 aa, Arabidopsis thaliana
  peptide (1)..(437): Ceres Seq. ID no. 13647720
  misc_feature (99)..(428): Pfam Name: NAD dependent epimerase/dehydratase family Pfam Description: NAD dependent epimerase/dehydratase family
  misc_feature (12)..(437): Homolog of NCBI NO: 29647497 NR Description: OJ1191_A10.21 [Oryza sativa (japonica
  misc_feature (15)..(428): Homolog of NCBI NO: 24417280 NR Description: unknown [Arabidopsis thaliana]
  misc_feature (15)..(428): Homolog of NCBI NO: 15229524 NR Description: NAD-dependent epimerase/dehydratase family
  misc_feature (1)..(434): Homolog of NCBI NO: 15234745 NR Description: nucleotide sugar epimerase family [Arabidopsis
  misc_feature (1)..(436): Homolog of NCBI NO: 15293119 NR Description: putative nucleotide sugar epimerase [Arabidopsis
  misc_feature (1)..(436): Homolog of NCBI NO: 15234486 NR Description: nucleotide sugar epimerase family [Arabidopsis
  misc_feature (16)..(436): Homolog of NCBI NO: 21536982 NR Description: nucleotide sugar epimerase, putative [Arabidopsis
  misc_feature (1)..(436): Homolog of NCBI NO: 15217591 NR Description: nucleotide sugar epimerase family [Arabidopsis
  misc_feature (1)..(436): Homolog of NCBI NO: 15236712 NR Description: nucleotide sugar epimerase family [Arabidopsis
  misc_feature (1)..(437): Homolog of NCBI NO: 15225451 NR Description: nucleotide sugar epimerase family [Arabidopsis
MSRLDDIPSSPGKFKMEKSSYLHRLRFQSSLTKFAFFSFFLLCLISLLFLRSPPSINPSSPSDPSRRSLRTNTYGGPAWEKRLRSSARIRTSTNNGITVLVTGAAGFVGTHVSAALKRRGDGVIGLDNFNDYYDPSLKRARRALLERSGIFIVEGDINDVELLRKLFKIVSFTHVMHLAAQAGVRYAMENPSSYVHSNIAGFVNLLEICKSVNPQPAIVWASSSSVYGLNTKVPFSEKDKTDQPASLYAATKKAGEEIAHTYNHIYGLSLTGLRFFTVYGPWGRPDMAYFFFTKDILKGKSISIFESANHGTVARDFTYIDDIVKGCLAALDTAEKSTGSGGKKRGPAQLRVFNLGNTSPVPVSDLVRILERQLKVKAKKNLIKMPRNGDVPFTHANISLAQRELGYKPTTDLQTGLKKFVRWYLSYYSGDKKAAAR

SEQ ID NO: 50097 - protein, 422 aa, Arabidopsis thaliana
  peptide (1)..(422): Ceres Seq. ID no. 13647721
  misc_feature (84)..(413): Pfam Name: NAD dependent epimerase/dehydratase family Pfam Description: NAD dependent epimerase/dehydratase family
  misc_feature (1)..(422): Homolog of NCBI NO: 29647497 NR Description: OJ1191_A10.21 [Oryza sativa (japonica
  misc_feature (1)..(413): Homolog of NCBI NO: 24417280 NR Description: unknown [Arabidopsis thaliana]
  misc_feature (1)..(413): Homolog of NCBI NO: 15229524 NR Description: NAD-dependent epimerase/dehydratase family
  misc_feature (1)..(419): Homolog of NCBI NO: 15234745 NR Description: nucleotide sugar epimerase family [Arabidopsis
  misc_feature (1)..(421): Homolog of NCBI NO: 15293119 NR Description: putative nucleotide sugar epimerase [Arabidopsis
  misc_feature (1)..(421): Homolog of NCBI NO: 15234486 NR Description: nucleotide sugar epimerase family [Arabidopsis
  misc_feature (1)..(421): Homolog of NCBI NO: 21536982 NR Description: nucleotide sugar epimerase, putative [Arabidopsis
  misc_feature (1)..(421): Homolog of NCBI NO: 15217591 NR Description: nucleotide sugar epimerase family [Arabidopsis
  misc_feature (1)..(421): Homolog of NCBI NO: 15236712 NR Description: nucleotide sugar epimerase family [Arabidopsis
  misc_feature (1)..(422): Homolog of NCBI NO: 15225451 NR Description: nucleotide sugar epimerase family [Arabidopsis
MEKSSYLHRLRFQSSLTKFAFFSFFLLCLISLLFLRSPPSINPSSPSDPSRRSLRTNTYGGPAWEKRLRSSARIRTSTNNGITVLVTGAAGFVGTHVSAALKRRGDGVIGLDNFNDYYDPSLKRARRALLERSGIFIVEGDINDVELLRKLFKIVSFTHVMHLAAQAGVRYAMENPSSYVHSNIAGFVNLLEICKSVNPQPAIVWASSSSVYGLNTKVPFSEKDKTDQPASLYAATKKAGEEIAHTYNHIYGLSLTGLRFFTVYGPWGRPDMAYFFFTKDILKGKSISIFESANHGTVARDFTYIDDIVKGCLAALDTAEKSTGSGGKKRGPAQLRVFNLGNTSPVPVSDLVRILERQLKVKAKKNLIKMPRNGDVPFTHANISLAQRELGYKPTTDLQTGLKKFVRWYLSYYSGDKKAAAR

SEQ ID NO: 50098 - protein, 262 aa, Arabidopsis thaliana
  peptide (1)..(262): Ceres Seq. ID no. 13647722
  misc_feature (1)..(253): Pfam Name: NAD dependent epimerase/dehydratase family Pfam Description: NAD dependent epimerase/dehydratase family
  misc_feature (1)..(262): Homolog of NCBI NO: 29647497 NR Description: OJ1191_A10.21 [Oryza sativa (japonica
  misc_feature (1)..(253): Homolog of NCBI NO: 24417280 NR Description: unknown [Arabidopsis thaliana]
  misc_feature (1)..(253): Homolog of NCBI NO: 15229524 NR Description: NAD-dependent epimerase/dehydratase family
  misc_feature (1)..(259): Homolog of NCBI NO: 15234745 NR Description: nucleotide sugar epimerase family [Arabidopsis
  misc_feature (1)..(261): Homolog of NCBI NO: 15293119 NR Description: putative nucleotide sugar epimerase [Arabidopsis
  misc_feature (1)..(261): Homolog of NCBI NO: 15234486 NR Description: nucleotide sugar epimerase family [Arabidopsis
  misc_feature (1)..(261): Homolog of NCBI NO: 21536982 NR Description: nucleotide sugar epimerase, putative [Arabidopsis
  misc_feature (1)..(261): Homolog of NCBI NO: 15217591 NR Description: nucleotide sugar epimerase family [Arabidopsis
  misc_feature (1)..(261): Homolog of NCBI NO: 15236712 NR Description: nucleotide sugar epimerase family [Arabidopsis
  misc_feature (1)..(262): Homolog of NCBI NO: 15225451 NR Description: nucleotide sugar epimerase family [Arabidopsis
MHLAAQAGVRYAMENPSSYVHSNIAGFVNLLEICKSVNPQPAIVWASSSSVYGLNTKVPFSEKDKTDQPASLYAATKKAGEEIAHTYNHIYGLSLTGLRFFTVYGPWGRPDMAYFFFTKDILKGKSISIFESANHGTVARDFTYIDDIVKGCLAALDTAEKSTGSGGKKRGPAQLRVFNLGNTSPVPVSDLVRILERQLKVKAKKNLIKMPRNGDVPFTHANISLAQRELGYKPTTDLQTGLKKFVRWYLSYYSGDKKAAAR

SEQ ID NO: 50099 - DNA, 1710 bp, Arabidopsis thaliana; identical to SEQ ID NO: 47155
  misc_feature (1)..(1710): Ceres Seq. ID no. 13592321
  misc_feature: MA Experiment ID: 20000355 Result: Up-regulated in Transcription
  misc_feature: MA Experiment 20000355 PARAMETER Experiment Name: At_Siliques_Sub_P Parameter: Age (day) Value: 21
  misc_feature: MA Experiment 20000355 PARAMETER Experiment Name: At_Siliques_Sub_P Parameter: Organism Value: A. thaliana
  misc_feature: MA Experiment 20000355 PARAMETER Experiment Name: At_Siliques_Sub_P Parameter: Plant Line Value: WS
  misc_feature: MA Experiment 20000355 PARAMETER Experiment Name: At_Siliques_Sub_P Parameter: Tissue Value: Less Than 5mm Siliques vs. Whole Plant
  misc_feature: MA Experiment ID: 20000440 Result: Up-regulated in Transcription
  misc_feature: MA Experiment 20000440 PARAMETER Experiment Name: At_Closed-Flower__Sub_P Parameter: Tissue Value: Closed Flower vs. Whole Plant

SEQ ID NO: 50100 - protein, 507 aa, Arabidopsis thaliana; identical to SEQ ID NO: 47156
  peptide (1)..(507): Ceres Seq. ID no. 13592322
  misc_feature (43)..(500): Pfam Name: Glycosyl hydrolase family 9 Pfam Description: Glycosyl hydrolase family 9
  misc_feature (43)..(500): Pfam Name: Glycosyl hydrolase family 9 Pfam Description: Glycosyl hydrolase family 9
  misc_feature (16)..(504): Homolog of NCBI NO: 16903351 NR Description: endo-beta-1,4-glucanase precursor [Nicotiana
  misc_feature (26)..(504): Homolog of NCBI NO: 7488978 NR Description: cellulase (EC 3.2.1.4) Cel2 precursor - tomato
  misc_feature (16)..(503): Homolog of NCBI NO: 3892180 NR Description: cellulase [Fragaria x ananassa]
  misc_feature (16)..(503): Homolog of NCBI NO: 4220423 NR Description: putative cellulase [Fragaria x ananassa]
  misc_feature (16)..(503): Homolog of NCBI NO: 4972234 NR Description: endo-beta-1,4-glucanase [Fragaria x ananassa]
  misc_feature (16)..(504): Homolog of NCBI NO: 16903351 NR Description: endo-beta-1,4-glucanase precursor [Nicotiana
  misc_feature (16)..(503): Homolog of NCBI NO: 3892180 NR Description: cellulase [Fragaria x ananassa]
  misc_feature (16)..(503): Homolog of NCBI NO: 4972234 NR Description: endo-beta-1,4-glucanase [Fragaria x ananassa]
  misc_feature (16)..(507): Homolog of NCBI NO: 15223222 NR Description: glycosyl hydrolase family 9
  misc_feature (16)..(507): Homolog of NCBI NO: 2440035 NR Description: endo-1,4-beta-glucanase [Arabidopsis thaliana]
  misc_feature (16)..(507): Homolog of NCBI NO: 2440033 NR Description: endo-1,4-beta-glucanase [Arabidopsis thaliana]
  misc_feature (16)..(503): Homolog of NCBI NO: 15220676 NR Description: glycosyl hydrolase family 9 [Arabidopsis
  misc_feature (16)..(503): Homolog of NCBI NO: 3549291 NR Description: endo-1,4-beta-glucanase precursor [Fragaria x
  misc_feature (16)..(503): Homolog of NCBI NO: 4220423 NR Description: putative cellulase [Fragaria x ananassa]
  misc_feature (26)..(504): Homolog of NCBI NO: 7488978 NR Description: cellulase (EC 3.2.1.4) Cel2 precursor - tomato
  misc_feature (16)..(503): Homolog of NCBI NO: 3549291 NR Description: endo-1,4-beta-glucanase precursor [Fragaria x
  misc_feature (16)..(503): Homolog of NCBI NO: 15220676 NR Description: glycosyl hydrolase family 9 [Arabidopsis
  misc_feature (16)..(507): Homolog of NCBI NO: 2440033 NR Description: endo-1,4-beta-glucanase [Arabidopsis thaliana]
  misc_feature (16)..(507): Homolog of NCBI NO: 2440035 NR Description: endo-1,4-beta-glucanase [Arabidopsis thaliana]
  misc_feature (16)..(507): Homolog of NCBI NO: 15223222 NR Description: glycosyl hydrolase family 9

SEQ ID NO: 50101 - protein, 492 aa, Arabidopsis thaliana; identical to SEQ ID NO: 47157
  peptide (1)..(492): Ceres Seq. ID no. 13592323
  misc_feature (28)..(485): Pfam Name: Glycosyl hydrolase family 9 Pfam Description: Glycosyl hydrolase family 9
  misc_feature (28)..(485): Pfam Name: Glycosyl hydrolase family 9 Pfam Description: Glycosyl hydrolase family 9
  misc_feature (1)..(489): Homolog of NCBI NO: 16903351 NR Description: endo-beta-1,4-glucanase precursor [Nicotiana
  misc_feature (11)..(489): Homolog of NCBI NO: 7488978 NR Description: cellulase (EC 3.2.1.4) Cel2 precursor - tomato
  misc_feature (1)..(488): Homolog of NCBI NO: 3892180 NR Description: cellulase [Fragaria x ananassa]
  misc_feature (1)..(488): Homolog of NCBI NO: 4220423 NR Description: putative cellulase [Fragaria x ananassa]
  misc_feature (1)..(488): Homolog of NCBI NO: 4972234 NR Description: endo-beta-1,4-glucanase [Fragaria x ananassa]
  misc_feature (1)..(489): Homolog of NCBI NO: 16903351 NR Description: endo-beta-1,4-glucanase precursor [Nicotiana
  misc_feature (1)..(488): Homolog of NCBI NO: 3892180 NR Description: cellulase [Fragaria x ananassa]
  misc_feature (1)..(488): Homolog of NCBI NO: 4972234 NR Description: endo-beta-1,4-glucanase [Fragaria x ananassa]
  misc_feature (1)..(492): Homolog of NCBI NO: 15223222 NR Description: glycosyl hydrolase family 9
  misc_feature (1)..(492): Homolog of NCBI NO: 2440035 NR Description: endo-1,4-beta-glucanase [Arabidopsis thaliana]
  misc_feature (1)..(492): Homolog of NCBI NO: 2440033 NR Description: endo-1,4-beta-glucanase [Arabidopsis thaliana]
  misc_feature (1)..(488): Homolog of NCBI NO: 15220676 NR Description: glycosyl hydrolase family 9 [Arabidopsis
  misc_feature (1)..(488): Homolog of NCBI NO: 3549291 NR Description: endo-1,4-beta-glucanase precursor [Fragaria x
  misc_feature (1)..(488): Homolog of NCBI NO: 4220423 NR Description: putative cellulase [Fragaria x ananassa]
  misc_feature (11)..(489): Homolog of NCBI NO: 7488978 NR Description: cellulase (EC 3.2.1.4) Cel2 precursor - tomato
  misc_feature (1)..(488): Homolog of NCBI NO: 3549291 NR Description: endo-1,4-beta-glucanase precursor [Fragaria x
  misc_feature (1)..(488): Homolog of NCBI NO: 15220676 NR Description: glycosyl hydrolase family 9 [Arabidopsis
  misc_feature (1)..(492): Homolog of NCBI NO: 2440033 NR Description: endo-1,4-beta-glucanase [Arabidopsis thaliana]
  misc_feature (1)..(492): Homolog of NCBI NO: 2440035 NR Description: endo-1,4-beta-glucanase [Arabidopsis thaliana]
  misc_feature (1)..(492): Homolog of NCBI NO: 15223222 NR Description: glycosyl hydrolase family 9

SEQ ID NO: 50102 - protein, 404 aa, Arabidopsis thaliana; identical to SEQ ID NO: 47158
  peptide (1)..(404): Ceres Seq. ID no. 13592324
  misc_feature (1)..(397): Pfam Name: Glycosyl hydrolase family 9 Pfam Description: Glycosyl hydrolase family 9
  misc_feature (1)..(397): Pfam Name: Glycosyl hydrolase family 9 Pfam Description: Glycosyl hydrolase family 9
  misc_feature (1)..(401): Homolog of NCBI NO: 16903351 NR Description: endo-beta-1,4-glucanase precursor [Nicotiana
  misc_feature (1)..(401): Homolog of NCBI NO: 7488978 NR Description: cellulase (EC 3.2.1.4) Cel2 precursor - tomato
  misc_feature (1)..(400): Homolog of NCBI NO: 3892180 NR Description: cellulase [Fragaria x ananassa]
  misc_feature (1)..(400): Homolog of NCBI NO: 4220423 NR Description: putative cellulase [Fragaria x ananassa]
  misc_feature (1)..(400): Homolog of NCBI NO: 4972234 NR Description: endo-beta-1,4-glucanase [Fragaria x ananassa]
  misc_feature (1)..(401): Homolog of NCBI NO: 16903351 NR Description: endo-beta-1,4-glucanase precursor [Nicotiana
  misc_feature (1)..(400): Homolog of NCBI NO: 3892180 NR Description: cellulase [Fragaria x ananassa]
  misc_feature (1)..(400): Homolog of NCBI NO: 4972234 NR Description: endo-beta-1,4-glucanase [Fragaria x ananassa]
  misc_feature (1)..(404): Homolog of NCBI NO: 15223222 NR Description: glycosyl hydrolase family 9
  misc_feature (1)..(404): Homolog of NCBI NO: 2440035 NR Description: endo-1,4-beta-glucanase [Arabidopsis thaliana]
  misc_feature (1)..(404): Homolog of NCBI NO: 2440033 NR Description: endo-1,4-beta-glucanase [Arabidopsis thaliana]
  misc_feature (1)..(400): Homolog of NCBI NO: 15220676 NR Description: glycosyl hydrolase family 9 [Arabidopsis
  misc_feature (1)..(400): Homolog of NCBI NO: 3549291 NR Description: endo-1,4-beta-glucanase precursor [Fragaria x
  misc_feature (1)..(400): Homolog of NCBI NO: 4220423 NR Description: putative cellulase [Fragaria x ananassa]
  misc_feature (1)..(401): Homolog of NCBI NO: 7488978 NR Description: cellulase (EC 3.2.1.4) Cel2 precursor - tomato
  misc_feature (1)..(400): Homolog of NCBI NO: 3549291 NR Description: endo-1,4-beta-glucanase precursor [Fragaria x
  misc_feature (1)..(400): Homolog of NCBI NO: 15220676 NR Description: glycosyl hydrolase family 9 [Arabidopsis
  misc_feature (1)..(404): Homolog of NCBI NO: 2440033 NR Description: endo-1,4-beta-glucanase [Arabidopsis thaliana]
  misc_feature (1)..(404): Homolog of NCBI NO: 2440035 NR Description: endo-1,4-beta-glucanase [Arabidopsis thaliana]
  misc_feature (1)..(404): Homolog of NCBI NO: 15223222 NR Description: glycosyl hydrolase family 9

SEQ ID NO: 50103 - DNA, 1766 bp, Arabidopsis thaliana
  misc_feature (1)..(1766): Ceres Seq. ID no. 13648522
  misc_feature: MA Experiment ID: 20000179 Result: Down-regulated in Transcription
  misc_feature: MA Experiment 20000179 PARAMETER Experiment Name: At_Germinating_Seeds_P Parameter: Age (hr) Value: 6 vs. 0
  misc_feature: MA Experiment 20000179 PARAMETER Experiment Name: At_Germinating_Seeds_P Parameter: Tissue Value: Germinating Seeds
  misc_feature: MA Experiment ID: 20000182 Result: Up-regulated in Transcription
  misc_feature: MA Experiment 20000182 PARAMETER Experiment Name: At_2mM_SA_P Parameter: Age (day) Value: 14
  misc_feature: MA Experiment 20000182 PARAMETER Experiment Name: At_2mM_SA_P Parameter: Organism Value: A. thaliana
  misc_feature: MA Experiment 20000182 PARAMETER Experiment Name: At_2mM_SA_P Parameter: Plant Line Value: WS
  misc_feature: MA Experiment 20000182 PARAMETER Experiment Name: At_2mM_SA_P Parameter: Timepoint (hr) Value: 6
  misc_feature: MA Experiment 20000182 PARAMETER Experiment Name: At_2mM_SA_P Parameter: Tissue Value: Aerial
  misc_feature: MA Experiment 20000182 PARAMETER Experiment Name: At_2mM_SA_P Parameter: Treatment Value: 2mM SA vs. No Treatment
  misc_feature: MA Experiment ID: 20000184 Result: Up-regulated in Transcription
  misc_feature: MA Experiment 20000184 PARAMETER Experiment Name: At_Shoots__P Parameter: Age (day) Value: 7
  misc_feature: MA Experiment 20000184 PARAMETER Experiment Name: At_Shoots__P Parameter: Tissue Value: Shoots vs. Whole Plant
  misc_feature: MA Experiment ID: 20000185 Result: Up-regulated in Transcription
  misc_feature: MA Experiment 20000185 PARAMETER Experiment Name: At_Roots__P Parameter: Age (day) Value: 7 vs. 21
  misc_feature: MA Experiment 20000185 PARAMETER Experiment Name: At_Roots__P Parameter: Organism Value: A. thaliana
  misc_feature: MA Experiment 20000185 PARAMETER Experiment Name: At_Roots__P Parameter: Tissue Value: Roots vs. Whole Plant
  misc_feature: MA Experiment ID: 20000213 Result: Down-regulated in Transcription
  misc_feature: MA Experiment 20000213 PARAMETER Experiment Name: At_4deg_Cold_P Parameter: Timepoint (hr) Value: 2
  misc_feature: MA Experiment ID: 20000227 Result: Down-regulated in Transcription
  misc_feature: MA Experiment 20000227 PARAMETER Experiment Name: At_Root-Tips-vs-Tops_P Parameter: Tissue Value: Root Tips vs. Root Tops
  misc_feature: MA Experiment ID: 20000234 Result: Down-regulated in Transcription
  misc_feature: MA Experiment 20000234 PARAMETER Experiment Name: At_Siliques_P Parameter: Age (day) Value: 21
  misc_feature: MA Experiment 20000234 PARAMETER Experiment Name: At_Siliques_P Parameter: Organism Value: A. thaliana
  misc_feature: MA Experiment 20000234 PARAMETER Experiment Name: At_Siliques_P Parameter: Plant Line Value: WS
  misc_feature: MA Experiment 20000234 PARAMETER Experiment Name: At_Siliques_P Parameter: Tissue Value: Less Than 5mm Siliques vs. Whole Plant
  misc_feature: MA Experiment ID: 20000235 Result: Down-regulated in Transcription
  misc_feature: MA Experiment 20000235 PARAMETER Experiment Name: At_Siliques_P Parameter: Age (day) Value: 21
  misc_feature: MA Experiment 20000235 PARAMETER Experiment Name: At_Siliques_P Parameter: Organism Value: A. thaliana
  misc_feature: MA Experiment 20000235 PARAMETER Experiment Name: At_Siliques_P Parameter: Plant Line Value: WS
  misc_feature: MA Experiment 20000235 PARAMETER Experiment Name: At_Siliques_P Parameter: Tissue Value: 5-10mm Siliques vs. Whole Plant
  misc_feature: MA Experiment ID: 20000438 Result: Up-regulated in Transcription
  misc_feature: MA Experiment 20000438 PARAMETER Experiment Name: At_Shoots__P Parameter: Age (day) Value: 14
  misc_feature: MA Experiment 20000438 PARAMETER Experiment Name: At_Shoots__P Parameter: Tissue Value: Shoots vs. Whole Plant
  misc_feature: MA Experiment ID: 20000439 Result: Up-regulated in Transcription
  misc_feature: MA Experiment 20000439 PARAMETER Experiment Name: At_Roots__P Parameter: Age (day) Value: 14 vs. 21
  misc_feature: MA Experiment 20000439 PARAMETER Experiment Name: At_Roots__P Parameter: Organism Value: A. thaliana
  misc_feature: MA Experiment 20000439 PARAMETER Experiment Name: At_Roots__P Parameter: Tissue Value: Roots vs. Whole Plant
  misc_feature: MA Experiment ID: 20000495 Result: Down-regulated in Transcription
  misc_feature: MA Experiment 20000495 PARAMETER Experiment Name: At_Guard_Cells_P Parameter: Harvest Date Value: 8/2/2002
  misc_feature: MA Experiment 20000495 PARAMETER Experiment Name: At_Guard_Cells_P Parameter: Organism Value: A. thaliana
  misc_feature: MA Experiment 20000495 PARAMETER Experiment Name: At_Guard_Cells_P Parameter: Tissue Value: Guard Cells vs. Leaves
  misc_feature: MA Experiment ID: 20000709 Result: Up-regulated in Transcription
  misc_feature: MA Experiment 20000709 PARAMETER Experiment Name: At_15mM_NH4NO3_L-to-H_P Parameter: Age (hr) Value: 14
  misc_feature: MA Experiment 20000709 PARAMETER Experiment Name: At_15mM_NH4NO3_L-to-H_P Parameter: Organism Value: A. thaliana
  misc_feature: MA Experiment 20000709 PARAMETER Experiment Name: At_15mM_NH4NO3_L-to-H_P Parameter: Plant Line Value: WS
  misc_feature: MA Experiment 20000709 PARAMETER Experiment Name: At_15mM_NH4NO3_L-to-H_P Parameter: Timepoint (hr) Value: 4
  misc_feature: MA Experiment 20000709 PARAMETER Experiment Name: At_15mM_NH4NO3_L-to-H_P Parameter: Tissue Value: Aerial
  misc_feature: MA Experiment 20000709 PARAMETER Experiment Name: At_15mM_NH4NO3_L-to-H_P Parameter: Treatment Value: 15mM NH4NO3 vs. 30mM Mannitol
  misc_feature: MA Experiment ID: 20000794 Result: Up-regulated in Transcription
  misc_feature: MA Experiment 20000794 PARAMETER Experiment Name: At_Petals_P Parameter: Age (day) Value: 23-25 days
  misc_feature: MA Experiment 20000794 PARAMETER Experiment Name: At_Petals_P Parameter: Plant Line Value: WS
  misc_feature: MA Experiment 20000794 PARAMETER Experiment Name: At_Petals_P Parameter: Tissue Value: Petals vs. Whole plant
  misc_feature: MA Experiment ID: 20001247 Result: Up-regulated in Transcription
  misc_feature: MA Experiment 20001247 PARAMETER Experiment Name: At_Far-red-induction_P Parameter: Age (day) Value: 7
  misc_feature: MA Experiment 20001247 PARAMETER Experiment Name: At_Far-red-induction_P Parameter: Light Value: Far-red vs. White
  misc_feature: MA Experiment 20001247 PARAMETER Experiment Name: At_Far-red-induction_P Parameter: Organism Value: A. thaliana
  misc_feature: MA Experiment 20001247 PARAMETER Experiment Name: At_Far-red-induction_P Parameter: Plant Line Value: Columbia
  misc_feature: MA Experiment 20001247 PARAMETER Experiment Name: At_Far-red-induction_P Parameter: Timepoint (hr) Value: 1
  misc_feature: MA Experiment 20001247 PARAMETER Experiment Name: At_Far-red-induction_P Parameter: Tissue Value: Whole Plant
  misc_feature: MA Experiment ID: 20001554 Result: Up-regulated in Transcription
  misc_feature: MA Experiment 20001554 PARAMETER Experiment Name: At_Drought_Soil_Dry_P Parameter: Age (day) Value: 21
  misc_feature: MA Experiment 20001554 PARAMETER Experiment Name: At_Drought_Soil_Dry_P Parameter: Organism Value: A. thaliana
  misc_feature: MA Experiment 20001554 PARAMETER Experiment Name: At_Drought_Soil_Dry_P Parameter: Plant Line Value: WS
  misc_feature: MA Experiment 20001554 PARAMETER Experiment Name: At_Drought_Soil_Dry_P Parameter: Post Timepoint (hr) Value: None
  misc_feature: MA Experiment 20001554 PARAMETER Experiment Name: At_Drought_Soil_Dry_P Parameter: Post-Treatment Value: None
  misc_feature: MA Experiment 20001554 PARAMETER Experiment Name: At_Drought_Soil_Dry_P Parameter: Timepoint (day) Value: 7
  misc_feature: MA Experiment 20001554 PARAMETER Experiment Name: At_Drought_Soil_Dry_P Parameter: Treatment Value: Drought vs. No Drought
  misc_feature: MA Experiment ID: 20001555 Result: Up-regulated in Transcription
  misc_feature: MA Experiment 20001555 PARAMETER Experiment Name: At_Drought_Soil_Dry_P Parameter: Age (day) Value: 24
  misc_feature: MA Experiment 20001555 PARAMETER Experiment Name: At_Drought_Soil_Dry_P Parameter: Organism Value: A. thaliana
  misc_feature: MA Experiment 20001555 PARAMETER Experiment Name: At_Drought_Soil_Dry_P Parameter: Plant Line Value: WS
  misc_feature: MA Experiment 20001555 PARAMETER Experiment Name: At_Drought_Soil_Dry_P Parameter: Post Timepoint (hr) Value: None
  misc_feature: MA Experiment 20001555 PARAMETER Experiment Name: At_Drought_Soil_Dry_P Parameter: Post-Treatment Value: None
  misc_feature: MA Experiment 20001555 PARAMETER Experiment Name: At_Drought_Soil_Dry_P Parameter: Timepoint (day) Value: 10
  misc_feature: MA Experiment 20001555 PARAMETER Experiment Name: At_Drought_Soil_Dry_P Parameter: Treatment Value: Drought vs. No Drought
  misc_feature: MA Experiment ID: 20001905 Result: Up-regulated in Transcription
  misc_feature: MA Experiment 20001905 PARAMETER Experiment Name: At_Drought_Reproduction_P Parameter: Age (day) Value: 40
  misc_feature: MA Experiment 20001905 PARAMETER Experiment Name: At_Drought_Reproduction_P Parameter: Organism Value: A. thaliana
  misc_feature: MA Experiment 20001905 PARAMETER Experiment Name: At_Drought_Reproduction_P Parameter: Plant Line Value: WS
  misc_feature: MA Experiment 20001905 PARAMETER Experiment Name: At_Drought_Reproduction_P Parameter: Timepoint (day) Value: 10
  misc_feature: MA Experiment 20001905 PARAMETER Experiment Name: At_Drought_Reproduction_P Parameter: Tissue Value: Rosettes
  misc_feature: MA Experiment 20001905 PARAMETER Experiment Name: At_Drought_Reproduction_P Parameter: Treatment Value: Drought vs. No Drought
  misc_feature: MA Experiment ID: 20001906 Result: Up-regulated in Transcription
  misc_feature: MA Experiment 20001906 PARAMETER Experiment Name: At_Drought_Reproduction_P Parameter: Age (day) Value: 35
  misc_feature: MA Experiment 20001906 PARAMETER Experiment Name: At_Drought_Reproduction_P Parameter: Organism Value: A. thaliana
  misc_feature: MA Experiment 20001906 PARAMETER Experiment Name: At_Drought_Reproduction_P Parameter: Plant Line Value: WS
  misc_feature: MA Experiment 20001906 PARAMETER Experiment Name: At_Drought_Reproduction_P Parameter: Timepoint (day) Value: 5
  misc_feature: MA Experiment 20001906 PARAMETER Experiment Name: At_Drought_Reproduction_P Parameter: Tissue Value: Siliques
  misc_feature: MA Experiment 20001906 PARAMETER Experiment Name: At_Drought_Reproduction_P Parameter: Treatment Value: Drought vs. No Drought
  misc_feature: MA Experiment ID: 20001908 Result: Up-regulated in Transcription
  misc_feature: MA Experiment 20001908 PARAMETER Experiment Name: At_Drought_Reproduction_P Parameter: Age (day) Value: 40
  misc_feature: MA Experiment 20001908 PARAMETER Experiment Name: At_Drought_Reproduction_P Parameter: Organism Value: A. thaliana
  misc_feature: MA Experiment 20001908 PARAMETER Experiment Name: At_Drought_Reproduction_P Parameter: Plant Line Value: WS
  misc_feature: MA Experiment 20001908 PARAMETER Experiment Name: At_Drought_Reproduction_P Parameter: Timepoint (day) Value: 10
  misc_feature: MA Experiment 20001908 PARAMETER Experiment Name: At_Drought_Reproduction_P Parameter: Tissue Value: Siliques
  misc_feature: MA Experiment 20001908 PARAMETER Experiment Name: At_Drought_Reproduction_P Parameter: Treatment Value: Drought vs. No Drought
  misc_feature: MA Experiment ID: 20001911 Result: Up-regulated in Transcription
  misc_feature: MA Experiment 20001911 PARAMETER Experiment Name: At_Drought_Reproduction_P Parameter: Age (day) Value: 40
  misc_feature: MA Experiment 20001911 PARAMETER Experiment Name: At_Drought_Reproduction_P Parameter: Organism Value: A. thaliana
  misc_feature: MA Experiment 20001911 PARAMETER Experiment Name: At_Drought_Reproduction_P Parameter: Plant Line Value: WS
  misc_feature: MA Experiment 20001911 PARAMETER Experiment Name: At_Drought_Reproduction_P Parameter: Timepoint (day) Value: 10
  misc_feature: MA Experiment 20001911 PARAMETER Experiment Name: At_Drought_Reproduction_P Parameter: Tissue Value: Flowers
  misc_feature: MA Experiment 20001911 PARAMETER Experiment Name: At_Drought_Reproduction_P Parameter: Treatment Value: Drought vs. No Drought
atctctcgtcttcaccattcttctcacttcttcttttctccttatatttcatttcttccacataactaaaaaaaaaggaattagcgatgaggggaggtgatggagaagaaggatcggagtcaagagttgcactgttgaaaagtcctcacacggcggaggaagacggtgaaggattgaaggatagaattttggttgagacaaaaaagctatggcaaatagttggtccggccatattcagtcgagtaacgacatattcgatgcttgtaatcactcaagctttcgctggtcatctcggcgatcttgaactcgccgccatatccatcgttaataacgtcaccgttggcttcaactttggcctcttgcttggaatggcgagtgcgttggaaacgctgtgtggacaagcgtttggagcgaagaaatatcatatgttgggagtttatatgcagcgttcttggattgttctcttcttttgctgtgtcttgttattaccaacttatattttcactactccggttcttaaatttcttggtcaaccggacgatatcgctgagctgtccggtgttgtcgccatttgggtcataccgcttcatttcgccttcactttgtcttttccccttcaacgtttccttcagtgccagctcaaaaaccgagtgactgcgtatgcggcagcggttgcattggtggttcatattttagtgtgttggttgttcgtggacgggcttaaactaggagtcgtggggactgtagctacgattagtatctcgtggtgggtcaatgttcttattctgttagtttactctacttgtggtggttgtccgcttacttggaccggcttatcctctgaagccttaaccggactttgggaattccttaaactctctgcttcttcaggcgtcatgctctgtttggagaattggtattatcggattttgattataatgactgggaatcttcaaaatgctcgaatcgccgttgactccttgtccatatgcatggcgataaatggttgggagatgatgatacctctcgctttcttcgccggaaccggtgtccgtgtggcgaacgaattaggagctggtaatggtaaaggagcaagatttgcgacgattgtatcggtaacacaatcgttgataatcggattgtttttttgggtgctaataatgcttctccataaccaaatcgcatggatcttctcttcgagtgtagccgtcttagacgccgtcaataaactctcacttctgctagctttcaccgttcttcttaacagcgttcaaccggttctttccggtgtggcggttggatcgggttggcaatcgtacgtggcatatataaacttgggatgttactattgcattggtgttccacttgggtttctcatgggctggggttttaaactcggtgtcatgggaatttggggtggtatgatttttggaggaaccgctgttcaaaccatgatcttaagttttatcacaatgagatgtgactgggaaaaagaggcgcagaaagcaagtgctcgtattaacaaatggtccaacacaataaaatgattcaagattttgttgaatcaactattaaataattttgcagcataatatggttttggaaaactggtgtatgttttgtatccaaatgtgatacaacatatttagagccggttcatagattacataggatcgctgcaattactgcaaaatggcctttgtgattttctttttatagcatgccttgtaatattattagataaaactgctttattttaatttagt

SEQ ID NO: 50104 - protein, 486 aa, Arabidopsis thaliana
  peptide (1)..(486): Ceres Seq. ID no. 13648523
  misc_feature (37)..(484): Homolog of NCBI NO: 15220246 NR Description: ripening regulated protein, putative [Arabidopsis
  misc_feature (8)..(481): Homolog of NCBI NO: 15223391 NR Description: MATE efflux protein family [Arabidopsis thaliana]
  misc_feature (8)..(481): Homolog of NCBI NO: 22329916 NR Description: MATE efflux protein family [Arabidopsis thaliana]
  misc_feature (115)..(482): Homolog of NCBI NO: 34902422 NR Description: Putative ripening regulated protein
  misc_feature (1)..(481): Homolog of NCBI NO: 15223402 NR Description: MATE efflux protein family [Arabidopsis thaliana]
  misc_feature (23)..(454): Homolog of NCBI NO: 12231296 NR Description: ripening regulated protein DDTFR18 [Lycopersicon
  misc_feature (372)..(470): Homolog of NCBI NO: 15238161 NR Description: ripening regulated protein, putative [Arabidopsis
  misc_feature (2)..(347): Homolog of NCBI NO: 15238161 NR Description: ripening regulated protein, putative [Arabidopsis
  misc_feature (5)..(482): Homolog of NCBI NO: 15240080 NR Description: MATE efflux protein family [Arabidopsis thaliana]
  misc_feature (1)..(486): Homolog of NCBI NO: 15238439 NR Description: ripening regulated protein, putative [Arabidopsis
MRGGDGEEGSESRVALLKSPHTAEEDGEGLKDRILVETKKLWQIVGPAIFSRVTTYSMLVITQAFAGHLGDLELAAISIVNNVTVGFNFGLLLGMASALETLCGQAFGAKKYHMLGVYMQRSWIVLFFCCVLLLPTYIFTTPVLKFLGQPDDIAELSGVVAIWVIPLHFAFTLSFPLQRFLQCQLKNRVTAYAAAVALVVHILVCWLFVDGLKLGVVGTVATISISWWVNVLILLVYSTCGGCPLTWTGLSSEALTGLWEFLKLSASSGVMLCLENWYYRILIIMTGNLQNARIAVDSLSICMAINGWEMMIPLAFFAGTGVRVANELGAGNGKGARFATIVSVTQSLIIGLFFWVLIMLLHNQIAWIFSSSVAVLDAVNKLSLLLAFTVLLNSVQPVLSGVAVGSGWQSYVAYINLGCYYCIGVPLGFLMGWGFKLGVMGIWGGMIFGGTAVQTMILSFITMRCDWEKEAQKASARINKWSNTIK

SEQ ID NO: 50105 - protein, 429 aa, Arabidopsis thaliana
  peptide (1)..(429): Ceres Seq. ID no. 13648524
  misc_feature (1)..(427): Homolog of NCBI NO: 15220246 NR Description: ripening regulated protein, putative [Arabidopsis
  misc_feature (1)..(424): Homolog of NCBI NO: 15223391 NR Description: MATE efflux protein family [Arabidopsis thaliana]
  misc_feature (1)..(424): Homolog of NCBI NO: 22329916 NR Description: MATE efflux protein family [Arabidopsis thaliana]
  misc_feature (58)..(425): Homolog of NCBI NO: 34902422 NR Description: Putative ripening regulated protein
  misc_feature (1)..(424): Homolog of NCBI NO: 15223402 NR Description: MATE efflux protein family [Arabidopsis thaliana]
  misc_feature (1)..(397): Homolog of NCBI NO: 12231296 NR Description: ripening regulated protein DDTFR18 [Lycopersicon
  misc_feature (315)..(413): Homolog of NCBI NO: 15238161 NR Description: ripening regulated protein, putative [Arabidopsis
  misc_feature (1)..(290): Homolog of NCBI NO: 15238161 NR Description: ripening regulated protein, putative [Arabidopsis
  misc_feature (1)..(425): Homolog of NCBI NO: 15240080 NR Description: MATE efflux protein family [Arabidopsis thaliana]
  misc_feature (1)..(429): Homolog of NCBI NO: 15238439 NR Description: ripening regulated protein, putative [Arabidopsis
MLVITQAFAGHLGDLELAAISIVNNVTVGFNFGLLLGMASALETLCGQAFGAKKYHMLGVYMQRSWIVLFFCCVLLLPTYIFTTPVLKFLGQPDDIAELSGVVAIWVIPLHFAFTLSFPLQRFLQCQLKNRVTAYAAAVALVVHILVCWLFVDGLKLGVVGTVATISISWWVNVLILLVYSTCGGCPLTWTGLSSEALTGLWEFLKLSASSGVMLCLENWYYRILIIMTGNLQNARIAVDSLSICMAINGWEMMIPLAFFAGTGVRVANELGAGNGKGARFATIVSVTQSLIIGLFFWVLIMLLHNQIAWIFSSSVAVLDAVNKLSLLLAFTVLLNSVQPVLSGVAVGSGWQSYVAYINLGCYYCIGVPLGFLMGWGFKLGVMGIWGGMIFGGTAVQTMILSFITMRCDWEKEAQKASARINKWSNTIK

SEQ ID NO: 50106 - protein, 392 aa, Arabidopsis thaliana
  peptide (1)..(392): Ceres Seq. ID no. 13648525
  misc_feature (1)..(390): Homolog of NCBI NO: 15220246 NR Description: ripening regulated protein, putative [Arabidopsis
  misc_feature (1)..(387): Homolog of NCBI NO: 15223391 NR Description: MATE efflux protein family [Arabidopsis thaliana]
  misc_feature (1)..(387): Homolog of NCBI NO: 22329916 NR Description: MATE efflux protein family [Arabidopsis thaliana]
  misc_feature (21)..(388): Homolog of NCBI NO: 34902422 NR Description: Putative ripening regulated protein
  misc_feature (1)..(387): Homolog of NCBI NO: 15223402 NR Description: MATE efflux protein family [Arabidopsis thaliana]
  misc_feature (1)..(360): Homolog of NCBI NO: 12231296 NR Description: ripening regulated protein DDTFR18 [Lycopersicon
  misc_feature (278)..(376): Homolog of NCBI NO: 15238161 NR Description: ripening regulated protein, putative [Arabidopsis
  misc_feature (1)..(253): Homolog of NCBI NO: 15238161 NR Description: ripening regulated protein, putative [Arabidopsis
  misc_feature (1)..(388): Homolog of NCBI NO: 15240080 NR Description: MATE efflux protein family [Arabidopsis thaliana]
  misc_feature (1)..(392): Homolog of NCBI NO: 15238439 NR Description: ripening regulated protein, putative [Arabidopsis
MASALETLCGQAFGAKKYHMLGVYMQRSWIVLFFCCVLLLPTYIFTTPVLKFLGQPDDIAELSGVVAIWVIPLHFAFTLSFPLQRFLQCQLKNRVTAYAAAVALVVHILVCWLFVDGLKLGVVGTVATISISWWVNVLILLVYSTCGGCPLTWTGLSSEALTGLWEFLKLSASSGVMLCLENWYYRILIIMTGNLQNARIAVDSLSICMAINGWEMMIPLAFFAGTGVRVANELGAGNGKGARFATIVSVTQSLIIGLFFWVLIMLLHNQIAWIFSSSVAVLDAVNKLSLLLAFTVLLNSVQPVLSGVAVGSGWQSYVAYINLGCYYCIGVPLGFLMGWGFKLGVMGIWGGMIFGGTAVQTMILSFITMRCDWEKEAQKASARINKWSNTIK

SEQ ID NO: 50107 - DNA, 1746 bp, Arabidopsis thaliana
  misc_feature (1)..(1746): Ceres Seq. ID no. 13647702
  misc_feature: MA Experiment ID: 20000182 Result: Up-regulated in Transcription
  misc_feature: MA Experiment 20000182 PARAMETER Experiment Name: At_2mM_SA_P Parameter: Age (day) Value: 14
  misc_feature: MA Experiment 20000182 PARAMETER Experiment Name: At_2mM_SA_P Parameter: Organism Value: A. thaliana
  misc_feature: MA Experiment 20000182 PARAMETER Experiment Name: At_2mM_SA_P Parameter: Plant Line Value: WS
  misc_feature: MA Experiment 20000182 PARAMETER Experiment Name: At_2mM_SA_P Parameter: Timepoint (hr) Value: 6
  misc_feature: MA Experiment 20000182 PARAMETER Experiment Name: At_2mM_SA_P Parameter: Tissue Value: Aerial
  misc_feature: MA Experiment 20000182 PARAMETER Experiment Name: At_2mM_SA_P Parameter: Treatment Value: 2mM SA vs. No Treatment
  misc_feature: MA Experiment ID: 20000184 Result: Down-regulated in Transcription
  misc_feature: MA Experiment 20000184 PARAMETER Experiment Name: At_Shoots__P Parameter: Age (day) Value: 7
  misc_feature: MA Experiment 20000184 PARAMETER Experiment Name: At_Shoots__P Parameter: Tissue Value: Shoots vs. Whole Plant
  misc_feature: MA Experiment ID: 20000185 Result: Down-regulated in Transcription
  misc_feature: MA Experiment 20000185 PARAMETER Experiment Name: At_Roots__P Parameter: Age (day) Value: 7 vs. 21
  misc_feature: MA Experiment 20000185 PARAMETER Experiment Name: At_Roots__P Parameter: Organism Value: A. thaliana
  misc_feature: MA Experiment 20000185 PARAMETER Experiment Name: At_Roots__P Parameter: Tissue Value: Roots vs. Whole Plant
  misc_feature: MA Experiment ID: 20000265 Result: Down-regulated in Transcription
  misc_feature: MA Experiment 20000265 PARAMETER Experiment Name: At_Open_Flower_P Parameter: Age (day) Value: 21
  misc_feature: MA Experiment 20000265 PARAMETER Experiment Name: At_Open_Flower_P Parameter: Plant Line Value: WS
  misc_feature: MA Experiment 20000265 PARAMETER Experiment Name: At_Open_Flower_P Parameter: Tissue Value: Closed Flower vs. Whole Plant
  misc_feature: MA Experiment ID: 20000438 Result: Down-regulated in Transcription
  misc_feature: MA Experiment 20000438 PARAMETER Experiment Name: At_Shoots__P Parameter: Age (day) Value: 14
  misc_feature: MA Experiment 20000438 PARAMETER Experiment Name: At_Shoots__P Parameter: Tissue Value: Shoots vs. Whole Plant
  misc_feature: MA Experiment ID: 20000441 Result: Up-regulated in Transcription
  misc_feature: MA Experiment 20000441 PARAMETER Experiment Name: At_1uM_BR-BRZ__P Parameter: Tissue Value: Shoot Apices
  misc_feature: MA Experiment 20000441 PARAMETER Experiment Name: At_1uM_BR-BRZ__P Parameter: Treatment Value: 1uM BR vs. No Treatment
  misc_feature: MA Experiment ID: 20001248 Result: Up-regulated in Transcription
  misc_feature: MA Experiment 20001248 PARAMETER Experiment Name: At_Far-red-induction_P Parameter: Age (day) Value: 7
  misc_feature: MA Experiment 20001248 PARAMETER Experiment Name: At_Far-red-induction_P Parameter: Light Value: Far-red vs. White
  misc_feature: MA Experiment 20001248 PARAMETER Experiment Name: At_Far-red-induction_P Parameter: Organism Value: A. thaliana
  misc_feature: MA Experiment 20001248 PARAMETER Experiment Name: At_Far-red-induction_P Parameter: Plant Line Value: Columbia
  misc_feature: MA Experiment 20001248 PARAMETER Experiment Name: At_Far-red-induction_P Parameter: Timepoint (hr) Value: 4
  misc_feature: MA Experiment 20001248 PARAMETER Experiment Name: At_Far-red-induction_P Parameter: Tissue Value: Whole Plant
  misc_feature: MA Experiment ID: 20001554 Result: Down-regulated in Transcription
  misc_feature: MA Experiment 20001554 PARAMETER Experiment Name: At_Drought_Soil_Dry_P Parameter: Age (day) Value: 21
  misc_feature: MA Experiment 20001554 PARAMETER Experiment Name: At_Drought_Soil_Dry_P Parameter: Organism Value: A. thaliana
  misc_feature: MA Experiment 20001554 PARAMETER Experiment Name: At_Drought_Soil_Dry_P Parameter: Plant Line Value: WS
  misc_feature: MA Experiment 20001554 PARAMETER Experiment Name: At_Drought_Soil_Dry_P Parameter: Post Timepoint (hr) Value: None
  misc_feature: MA Experiment 20001554 PARAMETER Experiment Name: At_Drought_Soil_Dry_P Parameter: Post-Treatment Value: None
  misc_feature: MA Experiment 20001554 PARAMETER Experiment Name: At_Drought_Soil_Dry_P Parameter: Timepoint (day) Value: 7
  misc_feature: MA Experiment 20001554 PARAMETER Experiment Name: At_Drought_Soil_Dry_P Parameter: Treatment Value: Drought vs. No Drought
  misc_feature: MA Experiment ID: 20001555 Result: Down-regulated in Transcription
  misc_feature: MA Experiment 20001555 PARAMETER Experiment Name: At_Drought_Soil_Dry_P Parameter: Age (day) Value: 24
  misc_feature: MA Experiment 20001555 PARAMETER Experiment Name: At_Drought_Soil_Dry_P Parameter: Organism Value: A. thaliana
  misc_feature: MA Experiment 20001555 PARAMETER Experiment Name: At_Drought_Soil_Dry_P Parameter: Plant Line Value: WS
  misc_feature: MA Experiment 20001555 PARAMETER Experiment Name: At_Drought_Soil_Dry_P Parameter: Post Timepoint (hr) Value: None
  misc_feature: MA Experiment 20001555 PARAMETER Experiment Name: At_Drought_Soil_Dry_P Parameter: Post-Treatment Value: None
  misc_feature: MA Experiment 20001555 PARAMETER Experiment Name: At_Drought_Soil_Dry_P Parameter: Timepoint (day) Value: 10
  misc_feature: MA Experiment 20001555 PARAMETER Experiment Name: At_Drought_Soil_Dry_P Parameter: Treatment Value: Drought vs. No Drought
  misc_feature: MA Experiment ID: 20001556 Result: Down-regulated in Transcription
  misc_feature: MA Experiment 20001556 PARAMETER Experiment Name: At_Drought_Soil_Dry_P Parameter: Age (day) Value: 26
  misc_feature: MA Experiment 20001556 PARAMETER Experiment Name: At_Drought_Soil_Dry_P Parameter: Organism Value: A. thaliana
  misc_feature: MA Experiment 20001556 PARAMETER Experiment Name: At_Drought_Soil_Dry_P Parameter: Plant Line Value: WS
  misc_feature: MA Experiment 20001556 PARAMETER Experiment Name: At_Drought_Soil_Dry_P Parameter: Post Timepoint (hr) Value: None
  misc_feature: MA Experiment 20001556 PARAMETER Experiment Name: At_Drought_Soil_Dry_P Parameter: Post-Treatment Value: None
  misc_feature: MA Experiment 20001556 PARAMETER Experiment Name: At_Drought_Soil_Dry_P Parameter: Timepoint (day) Value: 12
  misc_feature: MA Experiment 20001556 PARAMETER Experiment Name: At_Drought_Soil_Dry_P Parameter: Treatment Value: Drought vs. No Drought
  misc_feature: MA Experiment ID: 20001908 Result: Down-regulated in Transcription
  misc_feature: MA Experiment 20001908 PARAMETER Experiment Name: At_Drought_Reproduction_P Parameter: Age (day) Value: 40
  misc_feature: MA Experiment 20001908 PARAMETER Experiment Name: At_Drought_Reproduction_P Parameter: Organism Value: A. thaliana
  misc_feature: MA Experiment 20001908 PARAMETER Experiment Name: At_Drought_Reproduction_P Parameter: Plant Line Value: WS
  misc_feature: MA Experiment 20001908 PARAMETER Experiment Name: At_Drought_Reproduction_P Parameter: Timepoint (day) Value: 10
  misc_feature: MA Experiment 20001908 PARAMETER Experiment Name: At_Drought_Reproduction_P Parameter: Tissue Value: Siliques
  misc_feature: MA Experiment 20001908 PARAMETER Experiment Name: At_Drought_Reproduction_P Parameter: Treatment Value: Drought vs. No Drought
ggttagtctactcattaatcctcacaactctctatctctctctccccattctctatcataatgacaggtgccacaccggaaaaccgaacggccccgtcgccaccaccgatgaaacatgtgccggagtcagttctgccggctaaaccaccaaagaggaacaattatgcattcgcgtgtgctatcttagcttccatgacttctatcctccttggttatgatataggagtgatgagtggagcaatgatttatataaagagagatttgaagattaatgatttacaaatcgggattctcgctggaagcctcaacatctattcacttataggatcttgcgccgccggaagaacctctgactggattggtcggcgttacactatcgtgttggctggagccatattcttcgccggagctatccttatgggattgtcccctaactacgctttcctcatgttcggaaggttcatcgccggtatcggcgtcggatatgctctcatgatcgcaccagtttataccgccgaagtctctccggcatcttcccgcggcttcctcaattccttccccgaggtgtttatcaacgccggaattatgctcgggtacgtatcaaatctggctttctcgaacttgccgttgaaggtaggatggagactgatgctcggaatcggagccgtaccttccgtgatactcgctatcggcgttctcgctatgccggaatctccacggtggctcgttatgcaaggccgtctcggtgatgccaagcgcgttctggacaaaacctctgattcccccaccgaagcaactctccgtctcgaagacatcaaacacgccgctggtattcccgccgattgccacgacgacgtcgttcaggtgtcgaggaggaacagtcatggagaaggagtttggagagagcttttaatccgaccaacaccagccgtgcgtcgtgttatgatcgccgcaatcggaatccatttcttccagcaagcttccggtatcgacgcggtggttctcttctcaccgcgaattttcaaaaccgccggactcaaaaccgatcaccaacagcttctagcgactgtagcagtaggagtagtgaagacatcattcatactagtcgccactttcttactcgacagaatcgggagaagaccattgcttctaaccagcgtaggaggaatggtactatctctagcagcgttagggacttctctaacgattatagaccagtcagagaagaaagtgatgtgggctgtggttgtagctatagctacggtgatgacttatgtagctacgttttcgataggagctggaccgataacttgggtttatagctcggagatattcccgttgaggttgagatcacagggctcgagtatgggtgtggtggtgaacagagtgactagtggtgtgatctcgatatcgtttcttccaatgtcgaaagcgatgactactggtggagcgttttacttgtttggagggattgcgactgtggcttgggttttcttttacactttcttgccggagacgcaagggaggatgcttgaggatatggatgagcttttcagtggtttcaggtggagagattccaagagtaagcctaagggtaaccccgagaagacggtaccgaatcccgaggttgagattggatcaaacaagcagtggaaggaaggagacacacaaagttcgtaggaaatttgatcagatatgtaatttgtatggtatgtgggtttaatgataaaacgaacaaattagcgt

SEQ ID NO: 50108 - protein, 539 aa, Arabidopsis thaliana
  peptide (1)..(539): Ceres Seq. ID no. 13647703
  misc_feature (39)..(498): Pfam Name: Sugar (and other) transporter Pfam Description: Sugar (and other) transporter
  misc_feature (45)..(504): Homolog of NCBI NO: 29691859 NR Description: sorbitol transporter [Malus x domestica]
  misc_feature (6)..(516): Homolog of NCBI NO: 16118827 NR Description: putative sugar transporter [Oryza sativa]
  misc_feature (24)..(501): Homolog of NCBI NO: 15226696 NR Description: mannitol transporter, putative [Arabidopsis
  misc_feature (24)..(513): Homolog of NCBI NO: 15226682 NR Description: mannitol transporter, putative [Arabidopsis
  misc_feature (45)..(508): Homolog of NCBI NO: 29691878 NR Description: sorbitol transporter [Malus x domestica]
  misc_feature (28)..(505): Homolog of NCBI NO: 28316433 NR Description: sorbitol transporter [Prunus cerasus]
  misc_feature (8)..(539): Homolog of NCBI NO: 1778095 NR Description: putative sugar transporter
  misc_feature (8)..(539): Homolog of NCBI NO: 7484647 NR Description: probable sugar transport protein 205 - beet
  misc_feature (1)..(530): Homolog of NCBI NO: 30025133 NR Description: putative sorbitol transporter [Prunus cerasus]
  misc_feature (1)..(539): Homolog of NCBI NO: 15230212 NR Description: mannitol transporter, putative [Arabidopsis
MTGATPENRTAPSPPPMKHVPESVLPAKPPKRNNYAFACAILASMTSILLGYDIGVMSGAMIYIKRDLKINDLQIGILAGSLNIYSLIGSCAAGRTSDWIGRRYTIVLAGAIFFAGAILMGLSPNYAFLMFGRFIAGIGVGYALMIAPVYTAEVSPASSRGFLNSFPEVFINAGIMLGYVSNLAFSNLPLKVGWRLMLGIGAVPSVILAIGVLAMPESPRWLVMQGRLGDAKRVLDKTSDSPTEATLRLEDIKHAAGIPADCHDDVVQVSRRNSHGEGVWRELLIRPTPAVRRVMIAAIGIHFFQQASGIDAVVLFSPRIFKTAGLKTDHQQLLATVAVGVVKTSFILVATFLLDRIGRRPLLLTSVGGMVLSLAALGTSLTIIDQSEKKVMWAVVVAIATVMTYVATFSIGAGPITWVYSSEIFPLRLRSQGSSMGVVVNRVTSGVISISFLPMSKAMTTGGAFYLFGGIATVAWVFFYTFLPETQGRMLEDMDELFSGFRWRDSKSKPKGNPEKTVPNPEVEIGSNKQWKEGDTQSS

SEQ ID NO: 50109 - protein, 523 aa, Arabidopsis thaliana
  peptide (1)..(523): Ceres Seq. ID no. 13647704
  misc_feature (23)..(482): Pfam Name: Sugar (and other) transporter Pfam Description: Sugar (and other) transporter
  misc_feature (29)..(488): Homolog of NCBI NO: 29691859 NR Description: sorbitol transporter [Malus x domestica]
  misc_feature (1)..(500): Homolog of NCBI NO: 16118827 NR Description: putative sugar transporter [Oryza sativa]
  misc_feature (8)..(485): Homolog of NCBI NO: 15226696 NR Description: mannitol transporter, putative [Arabidopsis
  misc_feature (8)..(497): Homolog of NCBI NO: 15226682 NR Description: mannitol transporter, putative [Arabidopsis
  misc_feature (29)..(492): Homolog of NCBI NO: 29691878 NR Description: sorbitol transporter [Malus x domestica]
  misc_feature (12)..(489): Homolog of NCBI NO: 28316433 NR Description: sorbitol transporter [Prunus cerasus]
  misc_feature (1)..(523): Homolog of NCBI NO: 1778095 NR Description: putative sugar transporter
  misc_feature (1)..(523): Homolog of NCBI NO: 7484647 NR Description: probable sugar transport protein 205 - beet
  misc_feature (1)..(514): Homolog of NCBI NO: 30025133 NR Description: putative sorbitol transporter [Prunus cerasus]
  misc_feature (1)..(523): Homolog of NCBI NO: 15230212 NR Description: mannitol transporter, putative [Arabidopsis
MKHVPESVLPAKPPKRNNYAFACAILASMTSILLGYDIGVMSGAMIYIKRDLKINDLQIGILAGSLNIYSLIGSCAAGRTSDWIGRRYTIVLAGAIFFAGAILMGLSPNYAFLMFGRFIAGIGVGYALMIAPVYTAEVSPASSRGFLNSFPEVFINAGIMLGYVSNLAFSNLPLKVGWRLMLGIGAVPSVILAIGVLAMPESPRWLVMQGRLGDAKRVLDKTSDSPTEATLRLEDIKHAAGIPADCHDDVVQVSRRNSHGEGVWRELLIRPTPAVRRVMIAAIGIHFFQQASGIDAVVLFSPRIFKTAGLKTDHQQLLATVAVGVVKTSFILVATFLLDRIGRRPLLLTSVGGMVLSLAALGTSLTIIDQSEKKVMWAVVVAIATVMTYVATFSIGAGPITWVYSSEIFPLRLRSQGSSMGVVVNRVTSGVISISFLPMSKAMTTGGAFYLFGGIATVAWVFFYTFLPETQGRMLEDMDELFSGFRWRDSKSKPKGNPEKTVPNPEVEIGSNKQWKEGDTQSS

SEQ ID NO: 50110 - protein, 495 aa, Arabidopsis thaliana
  peptide (1)..(495): Ceres Seq. ID no. 13647705
  misc_feature (1)..(454): Pfam Name: Sugar (and other) transporter Pfam Description: Sugar (and other) transporter
  misc_feature (1)..(460): Homolog of NCBI NO: 29691859 NR Description: sorbitol transporter [Malus x domestica]
  misc_feature (1)..(472): Homolog of NCBI NO: 16118827 NR Description: putative sugar transporter [Oryza sativa]
  misc_feature (1)..(457): Homolog of NCBI NO: 15226696 NR Description: mannitol transporter, putative [Arabidopsis
  misc_feature (1)..(469): Homolog of NCBI NO: 15226682 NR Description: mannitol transporter, putative [Arabidopsis
  misc_feature (1)..(464): Homolog of NCBI NO: 29691878 NR Description: sorbitol transporter [Malus x domestica]
  misc_feature (1)..(461): Homolog of NCBI NO: 28316433 NR Description: sorbitol transporter [Prunus cerasus]
  misc_feature (1)..(495): Homolog of NCBI NO: 1778095 NR Description: putative sugar transporter
  misc_feature (1)..(495): Homolog of NCBI NO: 7484647 NR Description: probable sugar transport protein 205 - beet
  misc_feature (1)..(486): Homolog of NCBI NO: 30025133 NR Description: putative sorbitol transporter [Prunus cerasus]
  misc_feature (1)..(495): Homolog of NCBI NO: 15230212 NR Description: mannitol transporter, putative [Arabidopsis
MTSILLGYDIGVMSGAMIYIKRDLKINDLQIGILAGSLNIYSLIGSCAAGRTSDWIGRRYTIVLAGAIFFAGAILMGLSPNYAFLMFGRFIAGIGVGYALMIAPVYTAEVSPASSRGFLNSFPEVFINAGIMLGYVSNLAFSNLPLKVGWRLMLGIGAVPSVILAIGVLAMPESPRWLVMQGRLGDAKRVLDKTSDSPTEATLRLEDIKHAAGIPADCHDDVVQVSRRNSHGEGVWRELLIRPTPAVRRVMIAAIGIHFFQQASGIDAVVLFSPRIFKTAGLKTDHQQLLATVAVGVVKTSFILVATFLLDRIGRRPLLLTSVGGMVLSLAALGTSLTIIDQSEKKVMWAVVVAIATVMTYVATFSIGAGPITWVYSSEIFPLRLRSQGSSMGVVVNRVTSGVISISFLPMSKAMTTGGAFYLFGGIATVAWVFFYTFLPETQGRMLEDMDELFSGFRWRDSKSKPKGNPEKTVPNPEVEIGSNKQWKEGDTQSS

SEQ ID NO: 50111 - DNA, 1822 bp, Arabidopsis thaliana
  misc_feature (1)..(1822): Ceres Seq. ID no. 13588449
  misc_feature: MA Experiment ID: 20000314 Result: Down-regulated in Transcription
  misc_feature: MA Experiment 20000314 PARAMETER Experiment Name: At_14day_Shoots-Roots_Sub_P Parameter: Age (day) Value: 14
  misc_feature: MA Experiment 20000314 PARAMETER Experiment Name: At_14day_Shoots-Roots_Sub_P Parameter: Organism Value: A. thaliana
  misc_feature: MA Experiment 20000314 PARAMETER Experiment Name: At_14day_Shoots-Roots_Sub_P Parameter: Plant Line Value: WS
  misc_feature: MA Experiment 20000314 PARAMETER Experiment Name: At_14day_Shoots-Roots_Sub_P Parameter: Tissue Value: Roots vs. Whole Plant
  misc_feature: MA Experiment ID: 20000315 Result: Down-regulated in Transcription
  misc_feature: MA Experiment 20000315 PARAMETER Experiment Name: At_14day_Shoots-Roots_Sub_P Parameter: Age (day) Value: 14
  misc_feature: MA Experiment 20000315 PARAMETER Experiment Name: At_14day_Shoots-Roots_Sub_P Parameter: Organism Value: A. thaliana
  misc_feature: MA Experiment 20000315 PARAMETER Experiment Name: At_14day_Shoots-Roots_Sub_P Parameter: Plant Line Value: WS
  misc_feature: MA Experiment 20000315 PARAMETER Experiment Name: At_14day_Shoots-Roots_Sub_P Parameter: Tissue Value: Shoots vs. Whole Plant
  misc_feature: MA Experiment ID: 20000327 Result: Down-regulated in Transcription
  misc_feature: MA Experiment 20000327 PARAMETER Experiment Name: At_42deg_Heat_Sub_P Parameter: Age (day) Value: 14
  misc_feature: MA Experiment 20000327 PARAMETER Experiment Name: At_42deg_Heat_Sub_P Parameter: Organism Value: A. thaliana
  misc_feature: MA Experiment 20000327 PARAMETER Experiment Name: At_42deg_Heat_Sub_P Parameter: Plant Line Value: WS
  misc_feature: MA Experiment 20000327 PARAMETER Experiment Name: At_42deg_Heat_Sub_P Parameter: Temperature (deg C) Value: 42 vs. 22
  misc_feature: MA Experiment 20000327 PARAMETER Experiment Name: At_42deg_Heat_Sub_P Parameter: Timepoint (hr) Value: 1
  misc_feature: MA Experiment 20000327 PARAMETER Experiment Name: At_42deg_Heat_Sub_P Parameter: Tissue Value: Aerial
  misc_feature: MA Experiment ID: 20000328 Result: Down-regulated in Transcription
  misc_feature: MA Experiment 20000328 PARAMETER Experiment Name: At_42deg_Heat_Sub_P Parameter: Age (day) Value: 14
  misc_feature: MA Experiment 20000328 PARAMETER Experiment Name: At_42deg_Heat_Sub_P Parameter: Organism Value: A. thaliana
  misc_feature: MA Experiment 20000328 PARAMETER Experiment Name: At_42deg_Heat_Sub_P Parameter: Plant Line Value: WS
  misc_feature: MA Experiment 20000328 PARAMETER Experiment Name: At_42deg_Heat_Sub_P Parameter: Temperature (deg C) Value: 42 vs. 22
  misc_feature: MA Experiment 20000328 PARAMETER Experiment Name: At_42deg_Heat_Sub_P Parameter: Timepoint (hr) Value: 6
  misc_feature: MA Experiment 20000328 PARAMETER Experiment Name: At_42deg_Heat_Sub_P Parameter: Tissue Value: Aerial
  misc_feature: MA Experiment ID: 20000329 Result: Up-regulated in Transcription
  misc_feature: MA Experiment 20000329 PARAMETER Experiment Name: At_4deg_Cold_Sub_P Parameter: Age (day) Value: 14
  misc_feature: MA Experiment 20000329 PARAMETER Experiment Name: At_4deg_Cold_Sub_P Parameter: Organism Value: A. thaliana
  misc_feature: MA Experiment 20000329 PARAMETER Experiment Name: At_4deg_Cold_Sub_P Parameter: Plant Line Value: WS
  misc_feature: MA Experiment 20000329 PARAMETER Experiment Name: At_4deg_Cold_Sub_P Parameter: Temperature (deg C) Value: 4 vs. 22
  misc_feature: MA Experiment 20000329 PARAMETER Experiment Name: At_4deg_Cold_Sub_P Parameter: Timepoint (hr) Value: 6
  misc_feature: MA Experiment 20000329 PARAMETER Experiment Name: At_4deg_Cold_Sub_P Parameter: Tissue Value: Aerial
  misc_feature: MA Experiment ID: 20000347 Result: Up-regulated in Transcription
  misc_feature: MA Experiment 20000347 PARAMETER Experiment Name: At_2mM_SA_Sub_P Parameter: Age (day) Value: 14
  misc_feature: MA Experiment 20000347 PARAMETER Experiment Name: At_2mM_SA_Sub_P Parameter: Organism Value: A. thaliana
  misc_feature: MA Experiment 20000347 PARAMETER Experiment Name: At_2mM_SA_Sub_P Parameter: Plant Line Value: WS
  misc_feature: MA Experiment 20000347 PARAMETER Experiment Name: At_2mM_SA_Sub_P Parameter: Timepoint (hr) Value: 6
  misc_feature: MA Experiment 20000347 PARAMETER Experiment Name: At_2mM_SA_Sub_P Parameter: Tissue Value: Aerial
  misc_feature: MA Experiment 20000347 PARAMETER Experiment Name: At_2mM_SA_Sub_P Parameter: Treatment Value: 2mM SA vs. No Treatment
  misc_feature: MA Experiment ID: 20000440 Result: Down-regulated in Transcription
  misc_feature: MA Experiment 20000440 PARAMETER Experiment Name: At_Closed-Flower__Sub_P Parameter: Tissue Value: Closed Flower vs. Whole Plant
gaatgcaatttcaaaaatttccaaatcctttgtaattaaattgagtgtaccaatctggagaaaagatacgagactctgttgcagagaaccaaatatgaagccaatcttcgatatcaacgaaacttttgagaagcagctgaaggatttaacttcaaatgtgaagtctatacaagacaacttgttagaggagatcatcacacccaacaccaaaacagagtacctccaacgttttctcatcgataggttcgacaaagagctcttcaagaaaaacgtaccgatcgtgtcatatgaagatattaagccttatctcgaccgtgtcgttaatggagagtcatccgatgttatatcggcccgaactatcactggattcttgctaagttctggaacttctggaggagcacaaaagatgatgccatggaacaacaagtacttggacaatttgacattcatctacgatcttcgtatgcaagttataaccaagcatgtgaaaggtgtggaagaaggaaaagggatgatgtttcttttcactaaacaagaatccatgactccttctggcttgcctgctcgagtcgcaaccagcagctatttcaagagtgactatttcaagaaccgtccatcgaactggtattactcgtacaccagccctgatgaagtcatcttatgccctaacaacaccgaaagtctatactgccatttgctctgtggcttagtccaaagagacgaggttgtgaggacgggttccatctttgcttcagtcatggtccgagctatcgaggtccttaagaattcttgggaggagttgtgttcaaacatccgatcgggccatctcagtaactgggtcacagacttgggttgtcaaaactctgtttctttggttcttggagggccacgtcctgaattagcagacactattgaagaaatatgcaaccaaaattcttggaaaggtatagtcaaaagactttggccaaacaccaaatatatcgaaaccgttgtcactggttcaatgggacagtacgttcccatgttgaactactattgtaacgacttgcctctcgtttcaacaacttacggttcttcggagactacctttgggatcaatctagatcctctgtgcaaacctgaagatgtttcttacactttcatgcccaacatgtcttactttgagttcataccaatggatggaggagacaagaacgatgtggttgacctagaagatgtgaaacttgggtgcacttatgaacccgttgtcacaaatttcgctggcttgtataggatgagagtgggagatattgttttggtgactggtttctacaacaacgcgcctcagtttaagtttgtaagaagagaaaacgtcgtcttaagcatcgattccgataaaactaacgaagaagatctgtttaaggctgtgagtcaagcgaagctcgtactcgagtcatcaggtctcgatctgaaagacttcaccagttatgctgacacctcaacatttccaggtcactacgtggtttacttggaagtagataccaaagagggagaggagaaggagacggcacagtttgagctcgatgaagaggcactctccacgtgttgtttggtaatggaggagtcgcttgataatgtttacaagagatgtcgattcaaagacggatcgatcgggcctctcgagataagagtggtgcgtcaaggaacgtttgattctctcatggacttcttcatctcacaaggtgcttccaccggtcaatacaagactcctagatgcattaagtcagggaaagccttgcaagtattggagacatgtgtggtagccaaattcttcagtatttga

SEQ ID NO: 50112 - protein, 606 aa, Arabidopsis thaliana
  peptide (1)..(606): Ceres Seq. ID no. 13588450
  misc_feature (44)..(594): Pfam Name: GH3 auxin-responsive promoter Pfam Description: GH3 auxin-responsive promoter
  misc_feature (32)..(605): Homolog of NCBI NO: 30684377 NR Description: auxin reponsive - like protein [Arabidopsis
  misc_feature (44)..(605): Homolog of NCBI NO: 15235538 NR Description: auxin-responsive GH3 - like protein [Arabidopsis
  misc_feature (46)..(187): Homolog of NCBI NO: 15221934 NR Description: Nt-gh3 deduced protein -related [Arabidopsis
  misc_feature (239)..(605): Homolog of NCBI NO: 15221934 NR Description: Nt-gh3 deduced protein -related [Arabidopsis
  misc_feature (393)..(605): Homolog of NCBI NO: 15217844 NR Description: auxin-regulated GH3 protein -related [Arabidopsis
  misc_feature (32)..(398): Homolog of NCBI NO: 15217844 NR Description: auxin-regulated GH3 protein -related [Arabidopsis
  misc_feature (44)..(605): Homolog of NCBI NO: 15221933 NR Description: Nt-gh3 deduced protein -related [Arabidopsis
  misc_feature (37)..(605): Homolog of NCBI NO: 15242095 NR Description: auxin-responsive GH3-related protein [Arabidopsis
  misc_feature (44)..(605): Homolog of NCBI NO: 15220661 NR Description: GH3-related auxin-regulated protein [Arabidopsis
  misc_feature (32)..(606): Homolog of NCBI NO: 15240601 NR Description: auxin-responsive - like protein [Arabidopsis
NAISKISKSFVIKLSVPIWRKDTRLCCREPNMKPIFDINETFEKQLKDLTSNVKSIQDNLLEEIITPNTKTEYLQRFLIDRFDKELFKKNVPIVSYEDIKPYLDRVVNGESSDVISARTITGFLLSSGTSGGAQKMMPWNNKYLDNLTFIYDLRMQVITKHVKGVEEGKGMMFLFTKQESMTPSGLPARVATSSYFKSDYFKNRPSNWYYSYTSPDEVILCPNNTESLYCHLLCGLVQRDEVVRTGSIFASVMVRAIEVLKNSWEELCSNIRSGHLSNWVTDLGCQNSVSLVLGGPRPELADTIEEICNQNSWKGIVKRLWPNTKYIETVVTGSMGQYVPMLNYYCNDLPLVSTTYGSSETTFGINLDPLCKPEDVSYTFMPNMSYFEFIPMDGGDKNDVVDLEDVKLGCTYEPVVTNFAGLYRMRVGDIVLVTGFYNNAPQFKFVRRENVVLSIDSDKTNEEDLFKAVSQAKLVLESSGLDLKDFTSYADTSTFPGHYVVYLEVDTKEGEEKETAQFELDEEALSTCCLVMEESLDNVYKRCRFKDGSIGPLEIRVVRQGTFDSLMDFFISQGASTGQYKTPRCIKSGKALQVLETCVVAKFFSI

SEQ ID NO: 50113 - protein, 575 aa, Arabidopsis thaliana
  peptide (1)..(575): Ceres Seq. ID no. 13588451
  misc_feature (13)..(563): Pfam Name: GH3 auxin-responsive promoter Pfam Description: GH3 auxin-responsive promoter
  misc_feature (1)..(574): Homolog of NCBI NO: 30684377 NR Description: auxin reponsive - like protein [Arabidopsis
  misc_feature (13)..(574): Homolog of NCBI NO: 15235538 NR Description: auxin-responsive GH3 - like protein [Arabidopsis
  misc_feature (15)..(156): Homolog of NCBI NO: 15221934 NR Description: Nt-gh3 deduced protein -related [Arabidopsis
  misc_feature (208)..(574): Homolog of NCBI NO: 15221934 NR Description: Nt-gh3 deduced protein -related [Arabidopsis
  misc_feature (362)..(574): Homolog of NCBI NO: 15217844 NR Description: auxin-regulated GH3 protein -related [Arabidopsis
  misc_feature (1)..(367): Homolog of NCBI NO: 15217844 NR Description: auxin-regulated GH3 protein -related [Arabidopsis
  misc_feature (13)..(574): Homolog of NCBI NO: 15221933 NR Description: Nt-gh3 deduced protein -related [Arabidopsis
  misc_feature (6)..(574): Homolog of NCBI NO: 15242095 NR Description: auxin-responsive GH3-related protein [Arabidopsis
  misc_feature (13)..(574): Homolog of NCBI NO: 15220661 NR Description: GH3-related auxin-regulated protein [Arabidopsis
  misc_feature (1)..(575): Homolog of NCBI NO: 15240601 NR Description: auxin-responsive - like protein [Arabidopsis
MKPIFDINETFEKQLKDLTSNVKSIQDNLLEEIITPNTKTEYLQRFLIDRFDKELFKKNVPIVSYEDIKPYLDRVVNGESSDVISARTITGFLLSSGTSGGAQKMMPWNNKYLDNLTFIYDLRMQVITKHVKGVEEGKGMMFLFTKQESMTPSGLPARVATSSYFKSDYFKNRPSNWYYSYTSPDEVILCPNNTESLYCHLLCGLVQRDEVVRTGSIFASVMVRAIEVLKNSWEELCSNIRSGHLSNWVTDLGCQNSVSLVLGGPRPELADTIEEICNQNSWKGIVKRLWPNTKYIETVVTGSMGQYVPMLNYYCNDLPLVSTTYGSSETTFGINLDPLCKPEDVSYTFMPNMSYFEFIPMDGGDKNDVVDLEDVKLGCTYEPVVTNFAGLYRMRVGDIVLVTGFYNNAPQFKFVRRENVVLSIDSDKTNEEDLFKAVSQAKLVLESSGLDLKDFTSYADTSTFPGHYVVYLEVDTKEGEEKETAQFELDEEALSTCCLVMEESLDNVYKRCRFKDGSIGPLEIRVVRQGTFDSLMDFFISQGASTGQYKTPRCIKSGKALQVLETCVVAKFFSI

SEQ ID NO: 50114 - protein, 471 aa, Arabidopsis thaliana
  peptide (1)..(471): Ceres Seq. ID no. 13588452
  misc_feature (1)..(459): Pfam Name: GH3 auxin-responsive promoter Pfam Description: GH3 auxin-responsive promoter
  misc_feature (1)..(470): Homolog of NCBI NO: 30684377 NR Description: auxin reponsive - like protein [Arabidopsis
  misc_feature (1)..(470): Homolog of NCBI NO: 15235538 NR Description: auxin-responsive GH3 - like protein [Arabidopsis
  misc_feature (1)..(52): Homolog of NCBI NO: 15221934 NR Description: Nt-gh3 deduced protein -related [Arabidopsis
  misc_feature (104)..(470): Homolog of NCBI NO: 15221934 NR Description: Nt-gh3 deduced protein -related [Arabidopsis
  misc_feature (258)..(470): Homolog of NCBI NO: 15217844 NR Description: auxin-regulated GH3 protein -related [Arabidopsis
  misc_feature (1)..(263): Homolog of NCBI NO: 15217844 NR Description: auxin-regulated GH3 protein -related [Arabidopsis
  misc_feature (1)..(470): Homolog of NCBI NO: 15221933 NR Description: Nt-gh3 deduced protein -related [Arabidopsis
  misc_feature (1)..(470): Homolog of NCBI NO: 15242095 NR Description: auxin-responsive GH3-related protein [Arabidopsis
  misc_feature (1)..(470): Homolog of NCBI NO: 15220661 NR Description: GH3-related auxin-regulated protein [Arabidopsis
  misc_feature (1)..(471): Homolog of NCBI NO: 15240601 NR Description: auxin-responsive - like protein [Arabidopsis
MMPWNNKYLDNLTFIYDLRMQVITKHVKGVEEGKGMMFLFTKQESMTPSGLPARVATSSYFKSDYFKNRPSNWYYSYTSPDEVILCPNNTESLYCHLLCGLVQRDEVVRTGSIFASVMVRAIEVLKNSWEELCSNIRSGHLSNWVTDLGCQNSVSLVLGGPRPELADTIEEICNQNSWKGIVKRLWPNTKYIETVVTGSMGQYVPMLNYYCNDLPLVSTTYGSSETTFGINLDPLCKPEDVSYTFMPNMSYFEFIPMDGGDKNDVVDLEDVKLGCTYEPVVTNFAGLYRMRVGDIVLVTGFYNNAPQFKFVRRENVVLSIDSDKTNEEDLFKAVSQAKLVLESSGLDLKDFTSYADTSTFPGHYVVYLEVDTKEGEEKETAQFELDEEALSTCCLVMEESLDNVYKRCRFKDGSIGPLEIRVVRQGTFDSLMDFFISQGASTGQYKTPRCIKSGKALQVLETCVVAKFFSI

SEQ ID NO: 50115 - DNA, 1534 bp, Arabidopsis thaliana
  misc_feature (1)..(1534): Ceres Seq. ID no. 13588453
  misc_feature: MA Experiment ID: 20000171 Result: Up-regulated in Transcription
  misc_feature: MA Experiment 20000171 PARAMETER Experiment Name: At_42deg_Heat_P Parameter: Age (day) Value: 14
  misc_feature: MA Experiment 20000171 PARAMETER Experiment Name: At_42deg_Heat_P Parameter: Organism Value: A. thaliana
  misc_feature: MA Experiment 20000171 PARAMETER Experiment Name: At_42deg_Heat_P Parameter: Plant Line Value: WS
  misc_feature: MA Experiment 20000171 PARAMETER Experiment Name: At_42deg_Heat_P Parameter: Temperature (deg C) Value: 42 vs. 22
  misc_feature: MA Experiment 20000171 PARAMETER Experiment Name: At_42deg_Heat_P Parameter: Timepoint (hr) Value: 1
  misc_feature: MA Experiment 20000171 PARAMETER Experiment Name: At_42deg_Heat_P Parameter: Tissue Value: Aerial
  misc_feature: MA Experiment ID: 20000173 Result: Up-regulated in Transcription
  misc_feature: MA Experiment 20000173 PARAMETER Experiment Name: At_42deg_Heat_P Parameter: Age (day) Value: 14
  misc_feature: MA Experiment 20000173 PARAMETER Experiment Name: At_42deg_Heat_P Parameter: Organism Value: A. thaliana
  misc_feature: MA Experiment 20000173 PARAMETER Experiment Name: At_42deg_Heat_P Parameter: Plant Line Value: WS
  misc_feature: MA Experiment 20000173 PARAMETER Experiment Name: At_42deg_Heat_P Parameter: Temperature (deg C) Value: 42 vs. 22
  misc_feature: MA Experiment 20000173 PARAMETER Experiment Name: At_42deg_Heat_P Parameter: Timepoint (hr) Value: 6
  misc_feature: MA Experiment 20000173 PARAMETER Experiment Name: At_42deg_Heat_P Parameter: Tissue Value: Aerial
  misc_feature: MA Experiment ID: 20000234 Result: Up-regulated in Transcription
  misc_feature: MA Experiment 20000234 PARAMETER Experiment Name: At_Siliques_P Parameter: Age (day) Value: 21
  misc_feature: MA Experiment 20000234 PARAMETER Experiment Name: At_Siliques_P Parameter: Organism Value: A. thaliana
  misc_feature: MA Experiment 20000234 PARAMETER Experiment Name: At_Siliques_P Parameter: Plant Line Value: WS
  misc_feature: MA Experiment 20000234 PARAMETER Experiment Name: At_Siliques_P Parameter: Tissue Value: Less Than 5mm Siliques vs. Whole Plant
  misc_feature: MA Experiment ID: 20000495 Result: Up-regulated in Transcription
  misc_feature: MA Experiment 20000495 PARAMETER Experiment Name: At_Guard_Cells_P Parameter: Harvest Date Value: 8/2/2002
  misc_feature: MA Experiment 20000495 PARAMETER Experiment Name: At_Guard_Cells_P Parameter: Organism Value: A. thaliana
  misc_feature: MA Experiment 20000495 PARAMETER Experiment Name: At_Guard_Cells_P Parameter: Tissue Value: Guard Cells vs. Leaves
  misc_feature: MA Experiment ID: 20001905 Result: Up-regulated in Transcription
  misc_feature: MA Experiment 20001905 PARAMETER Experiment Name: At_Drought_Reproduction_P Parameter: Age (day) Value: 40
  misc_feature: MA Experiment 20001905 PARAMETER Experiment Name: At_Drought_Reproduction_P Parameter: Organism Value: A. thaliana
  misc_feature: MA Experiment 20001905 PARAMETER Experiment Name: At_Drought_Reproduction_P Parameter: Plant Line Value: WS
  misc_feature: MA Experiment 20001905 PARAMETER Experiment Name: At_Drought_Reproduction_P Parameter: Timepoint (day) Value: 10
  misc_feature: MA Experiment 20001905 PARAMETER Experiment Name: At_Drought_Reproduction_P Parameter: Tissue Value: Rosettes
  misc_feature: MA Experiment 20001905 PARAMETER Experiment Name: At_Drought_Reproduction_P Parameter: Treatment Value: Drought vs. No Drought
gagaaagctacgaaagaaaaaaaaaacaatctagcaacagaagaagcttcgagaagacgatggcgacggagacgaacgagaatctgataaactccttcatcgagatcacttcttcatcaagagaagaagctaatttcttcctcgaaagtcacacttggaatctagacgctgccgtttcaactttcctcgataacgatgccgccgcagccgccgaaccaaaccctaccgggccaccaccaccttcttctactattgccggtgcacaatctccttctcaatctcactctcccgattacactccgtctgaaacctctccctctccttcccgatcacgatctgcttctccgtcttctcgcgctgctccctacggtctccgatcgagaggcggtgctggagagaataaagaaactgagaatccgtcgggaattcggagttctaggagtcgtcaacacgctgggaatatccgtacattcgccgatctgaaccgttctccggctgatggcgagggcagtgattcggatgaagctaatgagtattataccggtggacaaaagagtgggatgatggtacaagatcctaagaaagtgaaagatgttgatgaactttttgaccaagctaggcagtcagctgtagacagacctgttgaaccatcaagatcagcttctacaagcttcactggagctgcgcgtttgttgtctggtgaagctgtttcgtcttctcctcagcaacaacagcaagagcagcctcaaaggattatgcacaccatcactttctggttgaatggtttcactgttaatgatggtccgttaagagggttcagtgaccctgaaaacgcagcctttatgaatagcatctcaaggtcagagtgccccagcgaactcgaaccagcagataagaagatccctgttcatgtcgatctggtcaggcgtggagaaaatttcaccgaaccaccaaagcctaaaaatccattccaaggtgtaggaagaaccctaggagccagcggatctggttcaagttcagcaccacaagcttcatctgccccaatgaacgtagcaccagcaccatcaagagggctagttgtagatccagcagcaccgacaacctctatccagctcagattagcagacggaacacgccttgtctccaggttcaacaaccaccacactgtcagagatgtacgtgggtttatcgacgcttctagacccggtggctccaaagagtaccagttgctaaccatggggttccctcctaaacaattgacagaattggaccaaaccatcgagcaagctggtatagctaatgccgtcgtcatccagaaattctagacttacataactcatcccttcgatttatgtctctctttttttttttttgcttttgtgtttttgaacctgatcgttgactttagtctctaactatctggtcaacgctctagaggctttggattttcgtagatttatcaaactcttttcttcagatttattaataactttagcagtttagcttttgcataatttatttatttcttcaatcg

SEQ ID NO: 50116 - protein, 440 aa, Arabidopsis thaliana
  peptide (1)..(440): Ceres Seq. ID no. 13588454
  misc_feature (361)..(440): Pfam Name: UBX domain Pfam Description: UBX domain
  misc_feature (227)..(315): Homolog of NCBI NO: 15233121 NR Description: ubiquitin-regulatory protein -related
  misc_feature (328)..(440): Homolog of NCBI NO: 15233121 NR Description: ubiquitin-regulatory protein -related
  misc_feature (152)..(440): Homolog of NCBI NO: 15234731 NR Description: expressed protein [Arabidopsis thaliana]
  misc_feature (143)..(440): Homolog of NCBI NO: 7487458 NR Description: hypothetical protein T27D20.10 - Arabidopsis
  misc_feature (143)..(440): Homolog of NCBI NO: 18412499 NR Description: membrane trafficking factor -related [Arabidopsis
  misc_feature (95)..(439): Homolog of NCBI NO: 13123659 NR Description: phosphatase-like protein Psc923 [Pisum sativum]
  misc_feature (63)..(439): Homolog of NCBI NO: 13123657 NR Description: phosphatase-like protein Mtc923 [Medicago
  misc_feature (20)..(436): Homolog of NCBI NO: 7485149 NR Description: hypothetical protein - Arabidopsis thaliana
  misc_feature (20)..(440): Homolog of NCBI NO: 15292665 NR Description: putative phosphatase [Arabidopsis thaliana]
  misc_feature (20)..(440): Homolog of NCBI NO: 18414442 NR Description: phosphatase like protein [Arabidopsis thaliana]
ESYERKKKQSSNRRSFEKTMATETNENLINSFIEITSSSREEANFFLESHTWNLDAAVSTFLDNDAAAAAEPNPTGPPPPSSTIAGAQSPSQSHSPDYTPSETSPSPSRSRSASPSSRAAPYGLRSRGGAGENKETENPSGIRSSRSRQHAGNIRTFADLNRSPADGEGSDSDEANEYYTGGQKSGMMVQDPKKVKDVDELFDQARQSAVDRPVEPSRSASTSFTGAARLLSGEAVSSSPQQQQQEQPQRIMHTITFWLNGFTVNDGPLRGFSDPENAAFMNSISRSECPSELEPADKKIPVHVDLVRRGENFTEPPKPKNPFQGVGRTLGASGSGSSSAPQASSAPMNVAPAPSRGLVVDPAAPTTSIQLRLADGTRLVSRFNNHHTVRDVRGFIDASRPGGSKEYQLLTMGFPPKQLTELDQTIEQAGIANAVVIQKF

SEQ ID NO: 50117 - protein, 421 aa, Arabidopsis thaliana
  peptide (1)..(421): Ceres Seq. ID no. 13588455
  misc_feature (342)..(421): Pfam Name: UBX domain Pfam Description: UBX domain
  misc_feature (208)..(296): Homolog of NCBI NO: 15233121 NR Description: ubiquitin-regulatory protein -related
  misc_feature (309)..(421): Homolog of NCBI NO: 15233121 NR Description: ubiquitin-regulatory protein -related
  misc_feature (133)..(421): Homolog of NCBI NO: 15234731 NR Description: expressed protein [Arabidopsis thaliana]
  misc_feature (124)..(421): Homolog of NCBI NO: 7487458 NR Description: hypothetical protein T27D20.10 - Arabidopsis
  misc_feature (124)..(421): Homolog of NCBI NO: 18412499 NR Description: membrane trafficking factor -related [Arabidopsis
  misc_feature (76)..(420): Homolog of NCBI NO: 13123659 NR Description: phosphatase-like protein Psc923 [Pisum sativum]
  misc_feature (44)..(420): Homolog of NCBI NO: 13123657 NR Description: phosphatase-like protein Mtc923 [Medicago
  misc_feature (1)..(417): Homolog of NCBI NO: 7485149 NR Description: hypothetical protein - Arabidopsis thaliana
  misc_feature (1)..(421): Homolog of NCBI NO: 15292665 NR Description: putative phosphatase [Arabidopsis thaliana]
  misc_feature (1)..(421): Homolog of NCBI NO: 18414442 NR Description: phosphatase like protein [Arabidopsis thaliana]
MATETNENLINSFIEITSSSREEANFFLESHTWNLDAAVSTFLDNDAAAAAEPNPTGPPPPSSTIAGAQSPSQSHSPDYTPSETSPSPSRSRSASPSSRAAPYGLRSRGGAGENKETENPSGIRSSRSRQHAGNIRTFADLNRSPADGEGSDSDEANEYYTGGQKSGMMVQDPKKVKDVDELFDQARQSAVDRPVEPSRSASTSFTGAARLLSGEAVSSSPQQQQQEQPQRIMHTITFWLNGFTVNDGPLRGFSDPENAAFMNSISRSECPSELEPADKKIPVHVDLVRRGENFTEPPKPKNPFQGVGRTLGASGSGSSSAPQASSAPMNVAPAPSRGLVVDPAAPTTSIQLRLADGTRLVSRFNNHHTVRDVRGFIDASRPGGSKEYQLLTMGFPPKQLTELDQTIEQAGIANAVVIQKF

SEQ ID NO: 50118 - protein, 254 aa, Arabidopsis thaliana
  peptide (1)..(254): Ceres Seq. ID no. 13588456
  misc_feature (175)..(254): Pfam Name: UBX domain Pfam Description: UBX domain
  misc_feature (41)..(129): Homolog of NCBI NO: 15233121 NR Description: ubiquitin-regulatory protein -related
  misc_feature (142)..(254): Homolog of NCBI NO: 15233121 NR Description: ubiquitin-regulatory protein -related
  misc_feature (1)..(254): Homolog of NCBI NO: 15234731 NR Description: expressed protein [Arabidopsis thaliana]
  misc_feature (1)..(254): Homolog of NCBI NO: 7487458 NR Description: hypothetical protein T27D20.10 - Arabidopsis
  misc_feature (1)..(254): Homolog of NCBI NO: 18412499 NR Description: membrane trafficking factor -related [Arabidopsis
  misc_feature (1)..(253): Homolog of NCBI NO: 13123659 NR Description: phosphatase-like protein Psc923 [Pisum sativum]
  misc_feature (1)..(253): Homolog of NCBI NO: 13123657 NR Description: phosphatase-like protein Mtc923 [Medicago
  misc_feature (1)..(250): Homolog of NCBI NO: 7485149 NR Description: hypothetical protein - Arabidopsis thaliana
  misc_feature (1)..(254): Homolog of NCBI NO: 15292665 NR Description: putative phosphatase [Arabidopsis thaliana]
  misc_feature (1)..(254): Homolog of NCBI NO: 18414442 NR Description: phosphatase like protein [Arabidopsis thaliana]
MMVQDPKKVKDVDELFDQARQSAVDRPVEPSRSASTSFTGAARLLSGEAVSSSPQQQQQEQPQRIMHTITFWLNGFTVNDGPLRGFSDPENAAFMNSISRSECPSELEPADKKIPVHVDLVRRGENFTEPPKPKNPFQGVGRTLGASGSGSSSAPQASSAPMNVAPAPSRGLVVDPAAPTTSIQLRLADGTRLVSRFNNHHTVRDVRGFIDASRPGGSKEYQLLTMGFPPKQLTELDQTIEQAGIANAVVIQKF

SEQ ID NO: 50119 - DNA, 1606 bp, Arabidopsis thaliana; identical to SEQ ID NO: 46930
  misc_feature (1)..(1606): Ceres Seq. ID no. 13592120
  misc_feature: MA Experiment ID: 108462 Result: Up-regulated in Transcription
  misc_feature: MA Experiment 108462 PARAMETER Experiment Name: At_Germinating_Seeds_cDNA_P Parameter: Age (day) Value: 2 vs. 0
  misc_feature: MA Experiment 108462 PARAMETER Experiment Name: At_Germinating_Seeds_cDNA_P Parameter: Tissue Value: Germinating Seeds
  misc_feature: MA Experiment ID: 108463 Result: Up-regulated in Transcription
  misc_feature: MA Experiment 108463 PARAMETER Experiment Name: At_Germinating_Seeds_cDNA_P Parameter: Age (day) Value: 3 vs. 0
  misc_feature: MA Experiment 108463 PARAMETER Experiment Name: At_Germinating_Seeds_cDNA_P Parameter: Tissue Value: Germinating Seeds
  misc_feature: MA Experiment ID: 108464 Result: Up-regulated in Transcription
  misc_feature: MA Experiment 108464 PARAMETER Experiment Name: At_Germinating_Seeds_cDNA_P Parameter: Age (day) Value: 4 vs. 0
  misc_feature: MA Experiment 108464 PARAMETER Experiment Name: At_Germinating_Seeds_cDNA_P Parameter: Tissue Value: Germinating Seeds
  misc_feature: MA Experiment ID: 108469 Result: Down-regulated in Transcription
  misc_feature: MA Experiment ID: 108577 Result: Up-regulated in Transcription
  misc_feature: MA Experiment 108577 PARAMETER Experiment Name: At_42deg_Heat_cDNA_P Parameter: Temperature (deg C) Value: 42 vs. 22
  misc_feature: MA Experiment 108577 PARAMETER Experiment Name: At_42deg_Heat_cDNA_P Parameter: Timepoint (hr) Value: 6
  misc_feature: MA Experiment 108577 PARAMETER Experiment Name: At_42deg_Heat_cDNA_P Parameter: Tissue Value: Aerial
  misc_feature: MA Experiment ID: 20000087 Result: Down-regulated in Transcription
  misc_feature: MA Experiment 20000087 PARAMETER Experiment Name: At_100uM_ABA_Mutants_cDNA_P Parameter: Plant Line Value: WS
  misc_feature: MA Experiment 20000087 PARAMETER Experiment Name: At_100uM_ABA_Mutants_cDNA_P Parameter: Timepoint (hr) Value: 6
  misc_feature: MA Experiment 20000087 PARAMETER Experiment Name: At_100uM_ABA_Mutants_cDNA_P Parameter: Tissue Value: Aerial
  misc_feature: MA Experiment 20000087 PARAMETER Experiment Name: At_100uM_ABA_Mutants_cDNA_P Parameter: Treatment Value: 100uM ABA vs. No Treatment
  misc_feature: MA Experiment ID: 20000179 Result: Up-regulated in Transcription
  misc_feature: MA Experiment 20000179 PARAMETER Experiment Name: At_Germinating_Seeds_P Parameter: Age (hr) Value: 6 vs. 0
  misc_feature: MA Experiment 20000179 PARAMETER Experiment Name: At_Germinating_Seeds_P Parameter: Tissue Value: Germinating Seeds
  misc_feature: MA Experiment ID: 20000180 Result: Up-regulated in Transcription
  misc_feature: MA Experiment 20000180 PARAMETER Experiment Name: At_Germinating_Seeds_P Parameter: Age (hr) Value: 24 vs. 0
  misc_feature: MA Experiment 20000180 PARAMETER Experiment Name: At_Germinating_Seeds_P Parameter: Tissue Value: Germinating Seeds
  misc_feature: MA Experiment ID: 20000794 Result: Down-regulated in Transcription
  misc_feature: MA Experiment 20000794 PARAMETER Experiment Name: At_Petals_P Parameter: Age (day) Value: 23-25 days
  misc_feature: MA Experiment 20000794 PARAMETER Experiment Name: At_Petals_P Parameter: Plant Line Value: WS
  misc_feature: MA Experiment 20000794 PARAMETER Experiment Name: At_Petals_P Parameter: Tissue Value: Petals vs. Whole plant
  misc_feature: MA Experiment ID: 20001451 Result: Down-regulated in Transcription
  misc_feature: MA Experiment 20001451 PARAMETER Experiment Name: At_Far-red-induction_P Parameter: Age (day) Value: 7
  misc_feature: MA Experiment 20001451 PARAMETER Experiment Name: At_Far-red-induction_P Parameter: Light Value: Far-red vs. White
  misc_feature: MA Experiment 20001451 PARAMETER Experiment Name: At_Far-red-induction_P Parameter: Organism Value: A. thaliana
  misc_feature: MA Experiment 20001451 PARAMETER Experiment Name: At_Far-red-induction_P Parameter: Plant Line Value: Columbia
  misc_feature: MA Experiment 20001451 PARAMETER Experiment Name: At_Far-red-induction_P Parameter: Timepoint (hr) Value: 24
  misc_feature: MA Experiment 20001451 PARAMETER Experiment Name: At_Far-red-induction_P Parameter: Tissue Value: Whole Plant

SEQ ID NO: 50120 - protein, 433 aa, Arabidopsis thaliana; identical to SEQ ID NO: 46931
  peptide (1)..(433): Ceres Seq. ID no. 13592121
  misc_feature (161)..(318): Pfam Name: CRAL/TRIO domain Pfam Description: CRAL/TRIO domain
  misc_feature (161)..(318): Pfam Name: CRAL/TRIO domain Pfam Description: CRAL/TRIO domain
  misc_feature (12)..(432): Homolog of NCBI NO: 14334978 NR Description: unknown protein [Arabidopsis thaliana]
  misc_feature (12)..(432): Homolog of NCBI NO: 18397616 NR Description: expressed protein [Arabidopsis thaliana]
  misc_feature (12)..(433): Homolog of NCBI NO: 34907288 NR Description: contains ESTs
  misc_feature (82)..(423): Homolog of NCBI NO: 8894548 NR Description: hypothetical protein [Cicer arietinum]
  misc_feature (350)..(427): Homolog of NCBI NO: 25407487 NR Description: hypothetical protein AT4g09160 [imported] -
  misc_feature (12)..(432): Homolog of NCBI NO: 14334978 NR Description: unknown protein [Arabidopsis thaliana]
  misc_feature (12)..(433): Homolog of NCBI NO: 34907288 NR Description: contains ESTs
  misc_feature (350)..(427): Homolog of NCBI NO: 25407487 NR Description: hypothetical protein AT4g09160 [imported] -
  misc_feature (25)..(433): Homolog of NCBI NO: 15230555 NR Description: expressed protein [Arabidopsis thaliana]
  misc_feature (15)..(427): Homolog of NCBI NO: 15218383 NR Description: cytosolic factor -related [Arabidopsis thaliana]
  misc_feature (57)..(427): Homolog of NCBI NO: 30680992 NR Description: expressed protein [Arabidopsis thaliana]
  misc_feature (50)..(427): Homolog of NCBI NO: 15081614 NR Description: At1g72160/T9N14_8 [Arabidopsis thaliana]
  misc_feature (57)..(342): Homolog of NCBI NO: 25407487 NR Description: hypothetical protein AT4g09160 [imported] -
  misc_feature (82)..(423): Homolog of NCBI NO: 8894548 NR Description: hypothetical protein [Cicer arietinum]
  misc_feature (12)..(432): Homolog of NCBI NO: 18397616 NR Description: expressed protein [Arabidopsis thaliana]
  misc_feature (57)..(342): Homolog of NCBI NO: 25407487 NR Description: hypothetical protein AT4g09160 [imported] -
  misc_feature (50)..(427): Homolog of NCBI NO: 15081614 NR Description: At1g72160/T9N14_8 [Arabidopsis thaliana]
  misc_feature (57)..(427): Homolog of NCBI NO: 30680992 NR Description: expressed protein [Arabidopsis thaliana]
  misc_feature (15)..(427): Homolog of NCBI NO: 15218383 NR Description: cytosolic factor -related [Arabidopsis thaliana]
  misc_feature (25)..(433): Homolog of NCBI NO: 15230555 NR Description: expressed protein [Arabidopsis thaliana]

SEQ ID NO: 50121 - protein, 409 aa, Arabidopsis thaliana; identical to SEQ ID NO: 46932
  peptide (1)..(409): Ceres Seq. ID no. 13592122
  misc_feature (137)..(294): Pfam Name: CRAL/TRIO domain Pfam Description: CRAL/TRIO domain
  misc_feature (137)..(294): Pfam Name: CRAL/TRIO domain Pfam Description: CRAL/TRIO domain
  misc_feature (1)..(408): Homolog of NCBI NO: 14334978 NR Description: unknown protein [Arabidopsis thaliana]
  misc_feature (1)..(408): Homolog of NCBI NO: 18397616 NR Description: expressed protein [Arabidopsis thaliana]
  misc_feature (1)..(409): Homolog of NCBI NO: 34907288 NR Description: contains ESTs
  misc_feature (58)..(399): Homolog of NCBI NO: 8894548 NR Description: hypothetical protein [Cicer arietinum]
  misc_feature (326)..(403): Homolog of NCBI NO: 25407487 NR Description: hypothetical protein AT4g09160 [imported] -
  misc_feature (1)..(408): Homolog of NCBI NO: 14334978 NR Description: unknown protein [Arabidopsis thaliana]
  misc_feature (1)..(409): Homolog of NCBI NO: 34907288 NR Description: contains ESTs
  misc_feature (326)..(403): Homolog of NCBI NO: 25407487 NR Description: hypothetical protein AT4g09160 [imported] -
  misc_feature (1)..(409): Homolog of NCBI NO: 15230555 NR Description: expressed protein [Arabidopsis thaliana]
  misc_feature (1)..(403): Homolog of NCBI NO: 15218383 NR Description: cytosolic factor -related [Arabidopsis thaliana]
  misc_feature (33)..(403): Homolog of NCBI NO: 30680992 NR Description: expressed protein [Arabidopsis thaliana]
  misc_feature (26)..(403): Homolog of NCBI NO: 15081614 NR Description: At1g72160/T9N14_8 [Arabidopsis thaliana]
  misc_feature (33)..(318): Homolog of NCBI NO: 25407487 NR Description: hypothetical protein AT4g09160 [imported] -
  misc_feature (58)..(399): Homolog of NCBI NO: 8894548 NR Description: hypothetical protein [Cicer arietinum]
  misc_feature (1)..(408): Homolog of NCBI NO: 18397616 NR Description: expressed protein [Arabidopsis thaliana]
  misc_feature (33)..(318): Homolog of NCBI NO: 25407487 NR Description: hypothetical protein AT4g09160 [imported] -
  misc_feature (26)..(403): Homolog of NCBI NO: 15081614 NR Description: At1g72160/T9N14_8 [Arabidopsis thaliana]
  misc_feature (33)..(403): Homolog of NCBI NO: 30680992 NR Description: expressed protein [Arabidopsis thaliana]
  misc_feature (1)..(403): Homolog of NCBI NO: 15218383 NR Description: cytosolic factor -related [Arabidopsis thaliana]
  misc_feature (1)..(409): Homolog of NCBI NO: 15230555 NR Description: expressed protein [Arabidopsis thaliana]

SEQ ID NO: 50122 - protein, 341 aa, Arabidopsis thaliana; identical to SEQ ID NO: 46933
  peptide (1)..(341): Ceres Seq. ID no. 13592123
  misc_feature (69)..(226): Pfam Name: CRAL/TRIO domain Pfam Description: CRAL/TRIO domain
  misc_feature (69)..(226): Pfam Name: CRAL/TRIO domain Pfam Description: CRAL/TRIO domain
  misc_feature (1)..(340): Homolog of NCBI NO: 14334978 NR Description: unknown protein [Arabidopsis thaliana]
  misc_feature (1)..(340): Homolog of NCBI NO: 18397616 NR Description: expressed protein [Arabidopsis thaliana]
  misc_feature (1)..(341): Homolog of NCBI NO: 34907288 NR Description: contains ESTs
  misc_feature (1)..(331): Homolog of NCBI NO: 8894548 NR Description: hypothetical protein [Cicer arietinum]
  misc_feature (258)..(335): Homolog of NCBI NO: 25407487 NR Description: hypothetical protein AT4g09160 [imported] -
  misc_feature (1)..(340): Homolog of NCBI NO: 14334978 NR Description: unknown protein [Arabidopsis thaliana]
  misc_feature (1)..(341): Homolog of NCBI NO: 34907288 NR Description: contains ESTs
  misc_feature (258)..(335): Homolog of NCBI NO: 25407487 NR Description: hypothetical protein AT4g09160 [imported] -
  misc_feature (1)..(341): Homolog of NCBI NO: 15230555 NR Description: expressed protein [Arabidopsis thaliana]
  misc_feature (1)..(335): Homolog of NCBI NO: 15218383 NR Description: cytosolic factor -related [Arabidopsis thaliana]
  misc_feature (1)..(335): Homolog of NCBI NO: 30680992 NR Description: expressed protein [Arabidopsis thaliana]
  misc_feature (1)..(335): Homolog of NCBI NO: 15081614 NR Description: At1g72160/T9N14_8 [Arabidopsis thaliana]
  misc_feature (1)..(250): Homolog of NCBI NO: 25407487 NR Description: hypothetical protein AT4g09160 [imported] -
  misc_feature (1)..(331): Homolog of NCBI NO: 8894548 NR Description: hypothetical protein [Cicer arietinum]
  misc_feature (1)..(340): Homolog of NCBI NO: 18397616 NR Description: expressed protein [Arabidopsis thaliana]
  misc_feature (1)..(250): Homolog of NCBI NO: 25407487 NR Description: hypothetical protein AT4g09160 [imported] -
  misc_feature (1)..(335): Homolog of NCBI NO: 15081614 NR Description: At1g72160/T9N14_8 [Arabidopsis thaliana]
  misc_feature (1)..(335): Homolog of NCBI NO: 30680992 NR Description: expressed protein [Arabidopsis thaliana]
  misc_feature (1)..(335): Homolog of NCBI NO: 15218383 NR Description: cytosolic factor -related [Arabidopsis thaliana]
  misc_feature (1)..(341): Homolog of NCBI NO: 15230555 NR Description: expressed protein [Arabidopsis thaliana]

SEQ ID NO: 50123 - DNA, 1643 bp, Arabidopsis thaliana
  misc_feature (1)..(1643): Ceres Seq. ID no. 12591906
  misc_feature: MA Experiment ID: 20000166 Result: Up-regulated in Transcription
  misc_feature: MA Experiment 20000166 PARAMETER Experiment Name: At_100uM_ABA_P Parameter: Age (day) Value: 14
  misc_feature: MA Experiment 20000166 PARAMETER Experiment Name: At_100uM_ABA_P Parameter: Organism Value: A. thaliana
  misc_feature: MA Experiment 20000166 PARAMETER Experiment Name: At_100uM_ABA_P Parameter: Plant Line Value: WS
  misc_feature: MA Experiment 20000166 PARAMETER Experiment Name: At_100uM_ABA_P Parameter: Timepoint (hr) Value: 1
  misc_feature: MA Experiment 20000166 PARAMETER Experiment Name: At_100uM_ABA_P Parameter: Tissue Value: Aerial
  misc_feature: MA Experiment 20000166 PARAMETER Experiment Name: At_100uM_ABA_P Parameter: Treatment Value: 100uM ABA vs. No Treatment
  misc_feature: MA Experiment ID: 20000169 Result: Up-regulated in Transcription
  misc_feature: MA Experiment 20000169 PARAMETER Experiment Name: At_100uM_ABA_P Parameter: Age (day) Value: 14
  misc_feature: MA Experiment 20000169 PARAMETER Experiment Name: At_100uM_ABA_P Parameter: Organism Value: A. thaliana
  misc_feature: MA Experiment 20000169 PARAMETER Experiment Name: At_100uM_ABA_P Parameter: Plant Line Value: WS
  misc_feature: MA Experiment 20000169 PARAMETER Experiment Name: At_100uM_ABA_P Parameter: Timepoint (hr) Value: 6
  misc_feature: MA Experiment 20000169 PARAMETER Experiment Name: At_100uM_ABA_P Parameter: Tissue Value: Aerial
  misc_feature: MA Experiment 20000169 PARAMETER Experiment Name: At_100uM_ABA_P Parameter: Treatment Value: 100uM ABA vs. No Treatment
  misc_feature: MA Experiment ID: 20000171 Result: Up-regulated in Transcription
  misc_feature: MA Experiment 20000171 PARAMETER Experiment Name: At_42deg_Heat_P Parameter: Age (day) Value: 14
  misc_feature: MA Experiment 20000171 PARAMETER Experiment Name: At_42deg_Heat_P Parameter: Organism Value: A. thaliana
  misc_feature: MA Experiment 20000171 PARAMETER Experiment Name: At_42deg_Heat_P Parameter: Plant Line Value: WS
  misc_feature: MA Experiment 20000171 PARAMETER Experiment Name: At_42deg_Heat_P Parameter: Temperature (deg C) Value: 42 vs. 22
  misc_feature: MA Experiment 20000171 PARAMETER Experiment Name: At_42deg_Heat_P Parameter: Timepoint (hr) Value: 1
  misc_feature: MA Experiment 20000171 PARAMETER Experiment Name: At_42deg_Heat_P Parameter: Tissue Value: Aerial
  misc_feature: MA Experiment ID: 20000173 Result: Up-regulated in Transcription
  misc_feature: MA Experiment 20000173 PARAMETER Experiment Name: At_42deg_Heat_P Parameter: Age (day) Value: 14
  misc_feature: MA Experiment 20000173 PARAMETER Experiment Name: At_42deg_Heat_P Parameter: Organism Value: A. thaliana
  misc_feature: MA Experiment 20000173 PARAMETER Experiment Name: At_42deg_Heat_P Parameter: Plant Line Value: WS
  misc_feature: MA Experiment 20000173 PARAMETER Experiment Name: At_42deg_Heat_P Parameter: Temperature (deg C) Value: 42 vs. 22
  misc_feature: MA Experiment 20000173 PARAMETER Experiment Name: At_42deg_Heat_P Parameter: Timepoint (hr) Value: 6
  misc_feature: MA Experiment 20000173 PARAMETER Experiment Name: At_42deg_Heat_P Parameter: Tissue Value: Aerial
  misc_feature: MA Experiment ID: 20000179 Result: Down-regulated in Transcription
  misc_feature: MA Experiment 20000179 PARAMETER Experiment Name: At_Germinating_Seeds_P Parameter: Age (hr) Value: 6 vs. 0
  misc_feature: MA Experiment 20000179 PARAMETER Experiment Name: At_Germinating_Seeds_P Parameter: Tissue Value: Germinating Seeds
  misc_feature: MA Experiment ID: 20000180 Result: Down-regulated in Transcription
  misc_feature: MA Experiment 20000180 PARAMETER Experiment Name: At_Germinating_Seeds_P Parameter: Age (hr) Value: 24 vs. 0
  misc_feature: MA Experiment 20000180 PARAMETER Experiment Name: At_Germinating_Seeds_P Parameter: Tissue Value: Germinating Seeds
  misc_feature: MA Experiment ID: 20000182 Result: Up-regulated in Transcription
  misc_feature: MA Experiment 20000182 PARAMETER Experiment Name: At_2mM_SA_P Parameter: Age (day) Value: 14
  misc_feature: MA Experiment 20000182 PARAMETER Experiment Name: At_2mM_SA_P Parameter: Organism Value: A. thaliana
  misc_feature: MA Experiment 20000182 PARAMETER Experiment Name: At_2mM_SA_P Parameter: Plant Line Value: WS
  misc_feature: MA Experiment 20000182 PARAMETER Experiment Name: At_2mM_SA_P Parameter: Timepoint (hr) Value: 6
  misc_feature: MA Experiment 20000182 PARAMETER Experiment Name: At_2mM_SA_P Parameter: Tissue Value: Aerial
  misc_feature: MA Experiment 20000182 PARAMETER Experiment Name: At_2mM_SA_P Parameter: Treatment Value: 2mM SA vs. No Treatment
  misc_feature: MA Experiment ID: 20000185 Result: Up-regulated in Transcription
  misc_feature: MA Experiment 20000185 PARAMETER Experiment Name: At_Roots__P Parameter: Age (day) Value: 7 vs. 21
  misc_feature: MA Experiment 20000185 PARAMETER Experiment Name: At_Roots__P Parameter: Organism Value: A. thaliana
  misc_feature: MA Experiment 20000185 PARAMETER Experiment Name: At_Roots__P Parameter: Tissue Value: Roots vs. Whole Plant
  misc_feature: MA Experiment ID: 20000268 Result: Up-regulated in Transcription
  misc_feature: MA Experiment 20000268 PARAMETER Experiment Name: At_100mM_NaCl__P Parameter: Age (day) Value: 14
  misc_feature: MA Experiment 20000268 PARAMETER Experiment Name: At_100mM_NaCl__P Parameter: Organism Value: A. thaliana
  misc_feature: MA Experiment 20000268 PARAMETER Experiment Name: At_100mM_NaCl__P Parameter: Plant Line Value: WS
  misc_feature: MA Experiment 20000268 PARAMETER Experiment Name: At_100mM_NaCl__P Parameter: Timepoint (hr) Value: 6
  misc_feature: MA Experiment 20000268 PARAMETER Experiment Name: At_100mM_NaCl__P Parameter: Tissue Value: Whole Plant
  misc_feature: MA Experiment 20000268 PARAMETER Experiment Name: At_100mM_NaCl__P Parameter: Treatment Value: 100mM NaCl vs. No Treatment
  misc_feature: MA Experiment ID: 20000436 Result: Up-regulated in Transcription
  misc_feature: MA Experiment 20000436 PARAMETER Experiment Name: At_Drought_P Parameter: Age (day) Value: 7
  misc_feature: MA Experiment 20000436 PARAMETER Experiment Name: At_Drought_P Parameter: Organism Value: A. thaliana
  misc_feature: MA Experiment 20000436 PARAMETER Experiment Name: At_Drought_P Parameter: Plant Line Value: WS
  misc_feature: MA Experiment 20000436 PARAMETER Experiment Name: At_Drought_P Parameter: Timepoint (hr) Value: 12
  misc_feature: MA Experiment 20000436 PARAMETER Experiment Name: At_Drought_P Parameter: Tissue Value: Whole Plant
  misc_feature: MA Experiment 20000436 PARAMETER Experiment Name: At_Drought_P Parameter: Treatment Value: Drought vs. No Drought
  misc_feature: MA Experiment ID: 20000439 Result: Up-regulated in Transcription
  misc_feature: MA Experiment 20000439 PARAMETER Experiment Name: At_Roots__P Parameter: Age (day) Value: 14 vs. 21
  misc_feature: MA Experiment 20000439 PARAMETER Experiment Name: At_Roots__P Parameter: Organism Value: A. thaliana
  misc_feature: MA Experiment 20000439 PARAMETER Experiment Name: At_Roots__P Parameter: Tissue Value: Roots vs. Whole Plant
  misc_feature: MA Experiment ID: 20000453 Result: Up-regulated in Transcription
  misc_feature: MA Experiment 20000453 PARAMETER Experiment Name: At_100uM_ABA_P Parameter: Age (day) Value: 15
  misc_feature: MA Experiment 20000453 PARAMETER Experiment Name: At_100uM_ABA_P Parameter: Organism Value: A. thaliana
  misc_feature: MA Experiment 20000453 PARAMETER Experiment Name: At_100uM_ABA_P Parameter: Plant Line Value: WS
  misc_feature: MA Experiment 20000453 PARAMETER Experiment Name: At_100uM_ABA_P Parameter: Timepoint (hr) Value: 24
  misc_feature: MA Experiment 20000453 PARAMETER Experiment Name: At_100uM_ABA_P Parameter: Tissue Value: Aerial
  misc_feature: MA Experiment 20000453 PARAMETER Experiment Name: At_100uM_ABA_P Parameter: Treatment Value: 100uM ABA vs. No Treatment
  misc_feature: MA Experiment ID: 20000455 Result: Up-regulated in Transcription
  misc_feature: MA Experiment 20000455 PARAMETER Experiment Name: At_100uM_ABA_P Parameter: Age (day) Value: 16
  misc_feature: MA Experiment 20000455 PARAMETER Experiment Name: At_100uM_ABA_P Parameter: Organism Value: A. thaliana
  misc_feature: MA Experiment 20000455 PARAMETER Experiment Name: At_100uM_ABA_P Parameter: Plant Line Value: WS
  misc_feature: MA Experiment 20000455 PARAMETER Experiment Name: At_100uM_ABA_P Parameter: Timepoint (hr) Value: 48
  misc_feature: MA Experiment 20000455 PARAMETER Experiment Name: At_100uM_ABA_P Parameter: Tissue Value: Aerial
  misc_feature: MA Experiment 20000455 PARAMETER Experiment Name: At_100uM_ABA_P Parameter: Treatment Value: 100uM ABA vs. No Treatment
  misc_feature: MA Experiment ID: 20000606 Result: Down-regulated in Transcription
  misc_feature: MA Experiment 20000606 PARAMETER Experiment Name: At_CS8548_Mutant_P Parameter: Age (day) Value: 14
  misc_feature: MA Experiment 20000606 PARAMETER Experiment Name: At_CS8548_Mutant_P Parameter: Plant Line Value: CS8548 vs. wt
  misc_feature: MA Experiment 20000606 PARAMETER Experiment Name: At_CS8548_Mutant_P Parameter: Tissue Value: Whole Plant
  misc_feature: MA Experiment ID: 20000709 Result: Up-regulated in Transcription
  misc_feature: MA Experiment 20000709 PARAMETER Experiment Name: At_15mM_NH4NO3_L-to-H_P Parameter: Age (hr) Value: 14
  misc_feature: MA Experiment 20000709 PARAMETER Experiment Name: At_15mM_NH4NO3_L-to-H_P Parameter: Organism Value: A. thaliana
  misc_feature: MA Experiment 20000709 PARAMETER Experiment Name: At_15mM_NH4NO3_L-to-H_P Parameter: Plant Line Value: WS
  misc_feature: MA Experiment 20000709 PARAMETER Experiment Name: At_15mM_NH4NO3_L-to-H_P Parameter: Timepoint (hr) Value: 4
  misc_feature: MA Experiment 20000709 PARAMETER Experiment Name: At_15mM_NH4NO3_L-to-H_P Parameter: Tissue Value: Aerial
  misc_feature: MA Experiment 20000709 PARAMETER Experiment Name: At_15mM_NH4NO3_L-to-H_P Parameter: Treatment Value: 15mM NH4NO3 vs. 30mM Mannitol
  misc_feature: MA Experiment ID: 20000794 Result: Up-regulated in Transcription
  misc_feature: MA Experiment 20000794 PARAMETER Experiment Name: At_Petals_P Parameter: Age (day) Value: 23-25 days
  misc_feature: MA Experiment 20000794 PARAMETER Experiment Name: At_Petals_P Parameter: Plant Line Value: WS
  misc_feature: MA Experiment 20000794 PARAMETER Experiment Name: At_Petals_P Parameter: Tissue Value: Petals vs. Whole plant
  misc_feature: MA Experiment ID: 20001553 Result: Up-regulated in Transcription
  misc_feature: MA Experiment 20001553 PARAMETER Experiment Name: At_Drought_Soil_Dry_P Parameter: Age (day) Value: 19
  misc_feature: MA Experiment 20001553 PARAMETER Experiment Name: At_Drought_Soil_Dry_P Parameter: Organism Value: A. thaliana
  misc_feature: MA Experiment 20001553 PARAMETER Experiment Name: At_Drought_Soil_Dry_P Parameter: Plant Line Value: WS
  misc_feature: MA Experiment 20001553 PARAMETER Experiment Name: At_Drought_Soil_Dry_P Parameter: Post Timepoint (hr) Value: None
  misc_feature: MA Experiment 20001553 PARAMETER Experiment Name: At_Drought_Soil_Dry_P Parameter: Post-Treatment Value: None
  misc_feature: MA Experiment 20001553 PARAMETER Experiment Name: At_Drought_Soil_Dry_P Parameter: Timepoint (day) Value: 5
  misc_feature: MA Experiment 20001553 PARAMETER Experiment Name: At_Drought_Soil_Dry_P Parameter: Treatment Value: Drought vs. No Drought
  misc_feature: MA Experiment ID: 20001554 Result: Up-regulated in Transcription
  misc_feature: MA Experiment 20001554 PARAMETER Experiment Name: At_Drought_Soil_Dry_P Parameter: Age (day) Value: 21
  misc_feature: MA Experiment 20001554 PARAMETER Experiment Name: At_Drought_Soil_Dry_P Parameter: Organism Value: A. thaliana
  misc_feature: MA Experiment 20001554 PARAMETER Experiment Name: At_Drought_Soil_Dry_P Parameter: Plant Line Value: WS
  misc_feature: MA Experiment 20001554 PARAMETER Experiment Name: At_Drought_Soil_Dry_P Parameter: Post Timepoint (hr) Value: None
  misc_feature: MA Experiment 20001554 PARAMETER Experiment Name: At_Drought_Soil_Dry_P Parameter: Post-Treatment Value: None
  misc_feature: MA Experiment 20001554 PARAMETER Experiment Name: At_Drought_Soil_Dry_P Parameter: Timepoint (day) Value: 7
  misc_feature: MA Experiment 20001554 PARAMETER Experiment Name: At_Drought_Soil_Dry_P Parameter: Treatment Value: Drought vs. No Drought
  misc_feature: MA Experiment ID: 20001555 Result: Up-regulated in Transcription
  misc_feature: MA Experiment 20001555 PARAMETER Experiment Name: At_Drought_Soil_Dry_P Parameter: Age (day) Value: 24
  misc_feature: MA Experiment 20001555 PARAMETER Experiment Name: At_Drought_Soil_Dry_P Parameter: Organism Value: A. thaliana
  misc_feature: MA Experiment 20001555 PARAMETER Experiment Name: At_Drought_Soil_Dry_P Parameter: Plant Line Value: WS
  misc_feature: MA Experiment 20001555 PARAMETER Experiment Name: At_Drought_Soil_Dry_P Parameter: Post Timepoint (hr) Value: None
  misc_feature: MA Experiment 20001555 PARAMETER Experiment Name: At_Drought_Soil_Dry_P Parameter: Post-Treatment Value: None
  misc_feature: MA Experiment 20001555 PARAMETER Experiment Name: At_Drought_Soil_Dry_P Parameter: Timepoint (day) Value: 10
  misc_feature: MA Experiment 20001555 PARAMETER Experiment Name: At_Drought_Soil_Dry_P Parameter: Treatment Value: Drought vs. No Drought
  misc_feature: MA Experiment ID: 20001904 Result: Up-regulated in Transcription
  misc_feature: MA Experiment 20001904 PARAMETER Experiment Name: At_Drought_Reproduction_P Parameter: Age (day) Value: 37
  misc_feature: MA Experiment 20001904 PARAMETER Experiment Name: At_Drought_Reproduction_P Parameter: Organism Value: A. thaliana
  misc_feature: MA Experiment 20001904 PARAMETER Experiment Name: At_Drought_Reproduction_P Parameter: Plant Line Value: WS
  misc_feature: MA Experiment 20001904 PARAMETER Experiment Name: At_Drought_Reproduction_P Parameter: Timepoint (day) Value: 7
  misc_feature: MA Experiment 20001904 PARAMETER Experiment Name: At_Drought_Reproduction_P Parameter: Tissue Value: Rosettes
  misc_feature: MA Experiment 20001904 PARAMETER Experiment Name: At_Drought_Reproduction_P Parameter: Treatment Value: Drought vs. No Drought
  misc_feature: MA Experiment ID: 20001905 Result: Up-regulated in Transcription
  misc_feature: MA Experiment 20001905 PARAMETER Experiment Name: At_Drought_Reproduction_P Parameter: Age (day) Value: 40
  misc_feature: MA Experiment 20001905 PARAMETER Experiment Name: At_Drought_Reproduction_P Parameter: Organism Value: A. thaliana
  misc_feature: MA Experiment 20001905 PARAMETER Experiment Name: At_Drought_Reproduction_P Parameter: Plant Line Value: WS
  misc_feature: MA Experiment 20001905 PARAMETER Experiment Name: At_Drought_Reproduction_P Parameter: Timepoint (day) Value: 10
  misc_feature: MA Experiment 20001905 PARAMETER Experiment Name: At_Drought_Reproduction_P Parameter: Tissue Value: Rosettes
  misc_feature: MA Experiment 20001905 PARAMETER Experiment Name: At_Drought_Reproduction_P Parameter: Treatment Value: Drought vs. No Drought
  misc_feature: MA Experiment ID: 20001911 Result: Up-regulated in Transcription
  misc_feature: MA Experiment 20001911 PARAMETER Experiment Name: At_Drought_Reproduction_P Parameter: Age (day) Value: 40
  misc_feature: MA Experiment 20001911 PARAMETER Experiment Name: At_Drought_Reproduction_P Parameter: Organism Value: A. thaliana
  misc_feature: MA Experiment 20001911 PARAMETER Experiment Name: At_Drought_Reproduction_P Parameter: Plant Line Value: WS
  misc_feature: MA Experiment 20001911 PARAMETER Experiment Name: At_Drought_Reproduction_P Parameter: Timepoint (day) Value: 10
  misc_feature: MA Experiment 20001911 PARAMETER Experiment Name: At_Drought_Reproduction_P Parameter: Tissue Value: Flowers
  misc_feature: MA Experiment 20001911 PARAMETER Experiment Name: At_Drought_Reproduction_P Parameter: Treatment Value: Drought vs. No Drought
actcatcacaatagcgggaaactcatccggcttctggaaatttccgttttatccgattcgttctcacgagatgatggctcgttaccacaggagatcgatgatcttgtgcttagttctgctctcattaagcatatcgccgagccaaggcttcctagggacagaggaaaagatcaaatccgctgtcttttactcaccaaaacttgtgatgaatccaggatcagttgcaaatccttacttattcgacatcgatttcccaagaggtcatatcggcctcaaagctttcgatgctgaagtggttgacgaagcgggcaaacccgttcctctacacgagacctatctccaccattggattgtcgagccatactatgtacgtaaaggttccaagcttccacagagagaaatgttcaggaatcatggattttccagggaagatcctgaaagcaatcttgattccaagtcagatattattcttgtgaaaaatggagggttgtgcaggagtttaacactcagacatttctttggtttaggatcagaaacccgcgaaacctcgacgtatgttcctgatccctacgctattgaaatcggtaatcctgaggaaacacctgatggttatgaattcaaatggcttcttaacattcacgcgatagacaccagaggtgtggaagataagaaaggatgcatagaatgtttgtgtgatctgtataatgttaccattgatgagtatggtcgagctataaggcctggatacaaaggaggtttatactgctgctatgataagactcaatgtcgggtgaaaagcggatttgacaatggggagaaaacaagaactctgtatttgaagtataccgtgagatgggttgattgggacagctcggttttgcccgctaaggtttatattttcgatgttacagattcttgggaaagatcaaaaggagatagccaagaacatatttgccatgtggaatacgaggtgaaaccgtgcaaaaccaatggcgatggatgcgttgacgttaagaaaaagagcttagtgatgccatttgatgggtatattgtctacggggtagctcaccagcacgctggtggtatcggtggtgctctataccgagagaacggtgaagggatatgcgcttcaatgccgaagtatggcaatggagatgaacctggaaacgaagctggttacattgttggaatgtcgtcttgttatccagctgatccagtgaaagtgagctatggagagacattgactttggaatctaattacagtaatgccgttggtcataccggagttatgggactcttttacatcctcgttgctcagcagctgccggaaccagatagctccttgcctaataaacaacattttgaggcacctgcgagaagcttgagctttttagccatttttgcagtgacggtagttgtggctgttgtggttttaatagccgccgtgatataccggagacagaaacgggaagatggttaccaatcacttagtacttaaaaaagagcaaaaaccatgtcgactctatatatgtcttcaaagtgaattctgtttgtatacatagaataaaagattattttgttgtcatcttcctctgatgtgatatctctgtaatagttacgtgtaagaagaacttttctttctc

SEQ ID NO: 50124 - protein, 498 aa, Arabidopsis thaliana
  peptide (1)..(498): Ceres Seq. ID no. 12591907
  misc_feature (34)..(144): Homolog of NCBI NO: 2598589 NR Description: MtN19 [Medicago truncatula]
  misc_feature (126)..(442): Homolog of NCBI NO: 2598589 NR Description: MtN19 [Medicago truncatula]
  misc_feature (30)..(143): Homolog of NCBI NO: 38175553 NR Description: putative MtN19 [Oryza sativa (japonica
  misc_feature (156)..(448): Homolog of NCBI NO: 38175553 NR Description: putative MtN19 [Oryza sativa (japonica
  misc_feature (24)..(498): Homolog of NCBI NO: 19698869 NR Description: putative protein [Arabidopsis thaliana]
  misc_feature (24)..(498): Homolog of NCBI NO: 22328003 NR Description: putative protein
  misc_feature (19)..(455): Homolog of NCBI NO: 10176875 NR Description: MtN19-like protein [Arabidopsis thaliana]
LITIAGNSSGFWKFPFYPIRSHEMMARYHRRSMILCLVLLSLSISPSQGFLGTEEKIKSAVFYSPKLVMNPGSVANPYLFDIDFPRGHIGLKAFDAEVVDEAGKPVPLHETYLHHWIVEPYYVRKGSKLPQREMFRNHGFSREDPESNLDSKSDIILVKNGGLCRSLTLRHFFGLGSETRETSTYVPDPYAIEIGNPEETPDGYEFKWLLNIHAIDTRGVEDKKGCIECLCDLYNVTIDEYGRAIRPGYKGGLYCCYDKTQCRVKSGFDNGEKTRTLYLKYTVRWVDWDSSVLPAKVYIFDVTDSWERSKGDSQEHICHVEYEVKPCKTNGDGCVDVKKKSLVMPFDGYIVYGVAHQHAGGIGGALYRENGEGICASMPKYGNGDEPGNEAGYIVGMSSCYPADPVKVSYGETLTLESNYSNAVGHTGVMGLFYILVAQQLPEPDSSLPNKQHFEAPARSLSFLAIFAVTVVVAVVVLIAAVIYRRQKREDGYQSLST

SEQ ID NO: 50125 - protein, 475 aa, Arabidopsis thaliana
  peptide (1)..(475): Ceres Seq. ID no. 12591908
  misc_feature (11)..(121): Homolog of NCBI NO: 2598589 NR Description: MtN19 [Medicago truncatula]
  misc_feature (103)..(419): Homolog of NCBI NO: 2598589 NR Description: MtN19 [Medicago truncatula]
  misc_feature (7)..(120): Homolog of NCBI NO: 38175553 NR Description: putative MtN19 [Oryza sativa (japonica
  misc_feature (133)..(425): Homolog of NCBI NO: 38175553 NR Description: putative MtN19 [Oryza sativa (japonica
  misc_feature (1)..(475): Homolog of NCBI NO: 19698869 NR Description: putative protein [Arabidopsis thaliana]
  misc_feature (1)..(475): Homolog of NCBI NO: 22328003 NR Description: putative protein
  misc_feature (1)..(432): Homolog of NCBI NO: 10176875 NR Description: MtN19-like protein [Arabidopsis thaliana]
MMARYHRRSMILCLVLLSLSISPSQGFLGTEEKIKSAVFYSPKLVMNPGSVANPYLFDIDFPRGHIGLKAFDAEVVDEAGKPVPLHETYLHHWIVEPYYVRKGSKLPQREMFRNHGFSREDPESNLDSKSDIILVKNGGLCRSLTLRHFFGLGSETRETSTYVPDPYAIEIGNPEETPDGYEFKWLLNIHAIDTRGVEDKKGCIECLCDLYNVTIDEYGRAIRPGYKGGLYCCYDKTQCRVKSGFDNGEKTRTLYLKYTVRWVDWDSSVLPAKVYIFDVTDSWERSKGDSQEHICHVEYEVKPCKTNGDGCVDVKKKSLVMPFDGYIVYGVAHQHAGGIGGALYRENGEGICASMPKYGNGDEPGNEAGYIVGMSSCYPADPVKVSYGETLTLESNYSNAVGHTGVMGLFYILVAQQLPEPDSSLPNKQHFEAPARSLSFLAIFAVTVVVAVVVLIAAVIYRRQKREDGYQSLST

SEQ ID NO: 50126 - protein, 474 aa, Arabidopsis thaliana
  peptide (1)..(474): Ceres Seq. ID no. 12591909
  misc_feature (10)..(120): Homolog of NCBI NO: 2598589 NR Description: MtN19 [Medicago truncatula]
  misc_feature (102)..(418): Homolog of NCBI NO: 2598589 NR Description: MtN19 [Medicago truncatula]
  misc_feature (6)..(119): Homolog of NCBI NO: 38175553 NR Description: putative MtN19 [Oryza sativa (japonica
  misc_feature (132)..(424): Homolog of NCBI NO: 38175553 NR Description: putative MtN19 [Oryza sativa (japonica
  misc_feature (1)..(474): Homolog of NCBI NO: 19698869 NR Description: putative protein [Arabidopsis thaliana]
  misc_feature (1)..(474): Homolog of NCBI NO: 22328003 NR Description: putative protein
  misc_feature (1)..(431): Homolog of NCBI NO: 10176875 NR Description: MtN19-like protein [Arabidopsis thaliana]
MARYHRRSMILCLVLLSLSISPSQGFLGTEEKIKSAVFYSPKLVMNPGSVANPYLFDIDFPRGHIGLKAFDAEVVDEAGKPVPLHETYLHHWIVEPYYVRKGSKLPQREMFRNHGFSREDPESNLDSKSDIILVKNGGLCRSLTLRHFFGLGSETRETSTYVPDPYAIEIGNPEETPDGYEFKWLLNIHAIDTRGVEDKKGCIECLCDLYNVTIDEYGRAIRPGYKGGLYCCYDKTQCRVKSGFDNGEKTRTLYLKYTVRWVDWDSSVLPAKVYIFDVTDSWERSKGDSQEHICHVEYEVKPCKTNGDGCVDVKKKSLVMPFDGYIVYGVAHQHAGGIGGALYRENGEGICASMPKYGNGDEPGNEAGYIVGMSSCYPADPVKVSYGETLTLESNYSNAVGHTGVMGLFYILVAQQLPEPDSSLPNKQHFEAPARSLSFLAIFAVTVVVAVVVLIAAVIYRRQKREDGYQSLST

SEQ ID NO: 50127 - DNA, 1413 bp, Arabidopsis thaliana
  misc_feature (1)..(1413): Ceres Seq. ID no. 13588758
  misc_feature: MA Experiment ID: 20000306 Result: Up-regulated in Transcription
  misc_feature: MA Experiment 20000306 PARAMETER Experiment Name: At_Germinating_Seeds_Sub_P Parameter: Age (hr) Value: 6 vs. 0
  misc_feature: MA Experiment 20000306 PARAMETER Experiment Name: At_Germinating_Seeds_Sub_P Parameter: Organism Value: A. thaliana
  misc_feature: MA Experiment 20000306 PARAMETER Experiment Name: At_Germinating_Seeds_Sub_P Parameter: Plant Line Value: WS
  misc_feature: MA Experiment 20000306 PARAMETER Experiment Name: At_Germinating_Seeds_Sub_P Parameter: Tissue Value: Germinating Seeds
  misc_feature: MA Experiment ID: 20000307 Result: Up-regulated in Transcription
  misc_feature: MA Experiment 20000307 PARAMETER Experiment Name: At_Germinating_Seeds_Sub_P Parameter: Age (hr) Value: 24 vs. 0
  misc_feature: MA Experiment 20000307 PARAMETER Experiment Name: At_Germinating_Seeds_Sub_P Parameter: Organism Value: A. thaliana
  misc_feature: MA Experiment 20000307 PARAMETER Experiment Name: At_Germinating_Seeds_Sub_P Parameter: Plant Line Value: WS
  misc_feature: MA Experiment 20000307 PARAMETER Experiment Name: At_Germinating_Seeds_Sub_P Parameter: Tissue Value: Germinating Seeds
  misc_feature: MA Experiment ID: 20000314 Result: Up-regulated in Transcription
  misc_feature: MA Experiment 20000314 PARAMETER Experiment Name: At_14day_Shoots-Roots_Sub_P Parameter: Age (day) Value: 14
  misc_feature: MA Experiment 20000314 PARAMETER Experiment Name: At_14day_Shoots-Roots_Sub_P Parameter: Organism Value: A. thaliana
  misc_feature: MA Experiment 20000314 PARAMETER Experiment Name: At_14day_Shoots-Roots_Sub_P Parameter: Plant Line Value: WS
  misc_feature: MA Experiment 20000314 PARAMETER Experiment Name: At_14day_Shoots-Roots_Sub_P Parameter: Tissue Value: Roots vs. Whole Plant
  misc_feature: MA Experiment ID: 20000315 Result: Up-regulated in Transcription
  misc_feature: MA Experiment 20000315 PARAMETER Experiment Name: At_14day_Shoots-Roots_Sub_P Parameter: Age (day) Value: 14
  misc_feature: MA Experiment 20000315 PARAMETER Experiment Name: At_14day_Shoots-Roots_Sub_P Parameter: Organism Value: A. thaliana
  misc_feature: MA Experiment 20000315 PARAMETER Experiment Name: At_14day_Shoots-Roots_Sub_P Parameter: Plant Line Value: WS
  misc_feature: MA Experiment 20000315 PARAMETER Experiment Name: At_14day_Shoots-Roots_Sub_P Parameter: Tissue Value: Shoots vs. Whole Plant
  misc_feature: MA Experiment ID: 20000329 Result: Down-regulated in Transcription
  misc_feature: MA Experiment 20000329 PARAMETER Experiment Name: At_4deg_Cold_Sub_P Parameter: Age (day) Value: 14
  misc_feature: MA Experiment 20000329 PARAMETER Experiment Name: At_4deg_Cold_Sub_P Parameter: Organism Value: A. thaliana
  misc_feature: MA Experiment 20000329 PARAMETER Experiment Name: At_4deg_Cold_Sub_P Parameter: Plant Line Value: WS
  misc_feature: MA Experiment 20000329 PARAMETER Experiment Name: At_4deg_Cold_Sub_P Parameter: Temperature (deg C) Value: 4 vs. 22
  misc_feature: MA Experiment 20000329 PARAMETER Experiment Name: At_4deg_Cold_Sub_P Parameter: Timepoint (hr) Value: 6
  misc_feature: MA Experiment 20000329 PARAMETER Experiment Name: At_4deg_Cold_Sub_P Parameter: Tissue Value: Aerial
  misc_feature: MA Experiment ID: 20000332 Result: Down-regulated in Transcription
  misc_feature: MA Experiment 20000332 PARAMETER Experiment Name: At_4deg_Cold_Sub_P Parameter: Age (day) Value: 14
  misc_feature: MA Experiment 20000332 PARAMETER Experiment Name: At_4deg_Cold_Sub_P Parameter: Organism Value: A. thaliana
  misc_feature: MA Experiment 20000332 PARAMETER Experiment Name: At_4deg_Cold_Sub_P Parameter: Plant Line Value: WS
  misc_feature: MA Experiment 20000332 PARAMETER Experiment Name: At_4deg_Cold_Sub_P Parameter: Temperature (deg C) Value: 4 vs. 22
  misc_feature: MA Experiment 20000332 PARAMETER Experiment Name: At_4deg_Cold_Sub_P Parameter: Timepoint (hr) Value: 2
  misc_feature: MA Experiment 20000332 PARAMETER Experiment Name: At_4deg_Cold_Sub_P Parameter: Tissue Value: Aerial
  misc_feature: MA Experiment ID: 20000352 Result: Down-regulated in Transcription
  misc_feature: MA Experiment 20000352 PARAMETER Experiment Name: At_Drought_Sub_P Parameter: Age (day) Value: 7
  misc_feature: MA Experiment 20000352 PARAMETER Experiment Name: At_Drought_Sub_P Parameter: Organism Value: A. thaliana
  misc_feature: MA Experiment 20000352 PARAMETER Experiment Name: At_Drought_Sub_P Parameter: Plant Line Value: WS
  misc_feature: MA Experiment 20000352 PARAMETER Experiment Name: At_Drought_Sub_P Parameter: Timepoint (hr) Value: 6
  misc_feature: MA Experiment 20000352 PARAMETER Experiment Name: At_Drought_Sub_P Parameter: Tissue Value: Whole Plant
  misc_feature: MA Experiment 20000352 PARAMETER Experiment Name: At_Drought_Sub_P Parameter: Treatment Value: Drought vs. No Drought
  misc_feature: MA Experiment ID: 20000440 Result: Up-regulated in Transcription
  misc_feature: MA Experiment 20000440 PARAMETER Experiment Name: At_Closed-Flower__Sub_P Parameter: Tissue Value: Closed Flower vs. Whole Plant
atggagacaagaaaagacgacatggagaaaaggaacgacaaatccgagccgttgctgctgccggagaatggatccgacgtctcagaagaagcatcatggatggtttatctaagcacgatcattgccgtttgcggttcctacgagtttggaacatgcgtgggatactccgctccaacacagtttgggattatggaagagcttaatttatcatattcccagttttcggttttcggatcgatattgaatatgggagcagtgctcggcgccattacatcggggaagatttctgatttcatcggtcggaaaggggccatgcggttgtcttcagtgatctctgccatcggctggctgataatttacttggccaagggtaacgtacctttggatttcggaagatttctaacgggttatggttgcggtaccctttcctttgtggtaccggtcttcatcgccgaaattagtccgagaaaattgagaggagccttagcgacgcttaaccagctctttatcgtaatcggattagcttctatgttcctcataggcgccgttgtaaattggagaactcttgcactaaccggagttgcaccgtgcgtggttctattctttgggacttggttcatccctgaatcacccagatggctggaaatggttggccgccacagtgattttgaaattgcgttgcaaaaactgaggggtcctcaggccaatatcacaagagaagccggggaaattcaggagtacttagcgagtcttgctcacctcccgaaagccacattgatggaccttattgacaaaaagaatattcgatttgtgatagttggagttggtttgatgtttttccaacaattcgttggaattaatggcgttatcttctacgcacaacaaatattcgtatcagcaggagcatccccaactcttggaagcattctatactcgatcgaacaagtcgttctcacagcactaggcgcaacattgctaattgatcggcttggaagaaggccacttcttatggcttcagctgttgggatgctgattggatgtttgctcatcggaaattcatttcttttgaaggctcatggtttagcacttgacatcattccggctctggcagttagtggtgtcttggtctacatcggttcgttctctattggaatgggtgcaatcccatgggttataatgtctgagatatttccaataaatttgaaaggaactgccggaggacttgtcactgtagtaaattggctaagttcatggcttgtctcattcactttcaactttctcatgatttggagccctcatggtacattttatgtgtatggtggggtatgtgtattggctattatcttcatagcaaaacttgttcctgaaactaaaggcagaaccttggaagagattcaagcaatgatgatgtaa

SEQ ID NO: 50128 - protein, 470 aa, Arabidopsis thaliana
  peptide (1)..(470): Ceres Seq. ID no. 13588759
  misc_feature (38)..(469): Pfam Name: Sugar (and other) transporter Pfam Description: Sugar (and other) transporter
  misc_feature (335)..(466): Homolog of NCBI NO: 25405762 NR Description: hypothetical protein T22H22.15 [imported] -
  misc_feature (2)..(316): Homolog of NCBI NO: 25405762 NR Description: hypothetical protein T22H22.15 [imported] -
  misc_feature (5)..(466): Homolog of NCBI NO: 30695810 NR Description: sugar transporter, putative [Arabidopsis thaliana]
  misc_feature (22)..(467): Homolog of NCBI NO: 23504385 NR Description: putative sugar transporter [Lycopersicon
  misc_feature (8)..(469): Homolog of NCBI NO: 21536914 NR Description: putative sugar transporter [Arabidopsis thaliana]
  misc_feature (8)..(469): Homolog of NCBI NO: 18407508 NR Description: sugar transporter, putative [Arabidopsis
  misc_feature (4)..(467): Homolog of NCBI NO: 21592787 NR Description: sugar transporter-like protein [Arabidopsis
  misc_feature (4)..(467): Homolog of NCBI NO: 18419741 NR Description: sugar transporter, putative [Arabidopsis
  misc_feature (8)..(470): Homolog of NCBI NO: 6729025 NR Description: putative sugar transporter [Arabidopsis thaliana]
  misc_feature (1)..(470): Homolog of NCBI NO: 30679397 NR Description: sugar transporter family [Arabidopsis thaliana]
METRKDDMEKRNDKSEPLLLPENGSDVSEEASWMVYLSTIIAVCGSYEFGTCVGYSAPTQFGIMEELNLSYSQFSVFGSILNMGAVLGAITSGKISDFIGRKGAMRLSSVISAIGWLIIYLAKGNVPLDFGRFLTGYGCGTLSFVVPVFIAEISPRKLRGALATLNQLFIVIGLASMFLIGAVVNWRTLALTGVAPCVVLFFGTWFIPESPRWLEMVGRHSDFEIALQKLRGPQANITREAGEIQEYLASLAHLPKATLMDLIDKKNIRFVIVGVGLMFFQQFVGINGVIFYAQQIFVSAGASPTLGSILYSIEQVVLTALGATLLIDRLGRRPLLMASAVGMLIGCLLIGNSFLLKAHGLALDIIPALAVSGVLVYIGSFSIGMGAIPWVIMSEIFPINLKGTAGGLVTVVNWLSSWLVSFTFNFLMIWSPHGTFYVYGGVCVLAIIFIAKLVPETKGRTLEEIQAMMM

SEQ ID NO: 50129 - protein, 463 aa, Arabidopsis thaliana
  peptide (1)..(463): Ceres Seq. ID no. 13588760
  misc_feature (31)..(462): Pfam Name: Sugar (and other) transporter Pfam Description: Sugar (and other) transporter
  misc_feature (328)..(459): Homolog of NCBI NO: 25405762 NR Description: hypothetical protein T22H22.15 [imported] -
  misc_feature (1)..(309): Homolog of NCBI NO: 25405762 NR Description: hypothetical protein T22H22.15 [imported] -
  misc_feature (1)..(459): Homolog of NCBI NO: 30695810 NR Description: sugar transporter, putative [Arabidopsis thaliana]
  misc_feature (15)..(460): Homolog of NCBI NO: 23504385 NR Description: putative sugar transporter [Lycopersicon
  misc_feature (1)..(462): Homolog of NCBI NO: 21536914 NR Description: putative sugar transporter [Arabidopsis thaliana]
  misc_feature (1)..(462): Homolog of NCBI NO: 18407508 NR Description: sugar transporter, putative [Arabidopsis
  misc_feature (1)..(460): Homolog of NCBI NO: 21592787 NR Description: sugar transporter-like protein [Arabidopsis
  misc_feature (1)..(460): Homolog of NCBI NO: 18419741 NR Description: sugar transporter, putative [Arabidopsis
  misc_feature (1)..(463): Homolog of NCBI NO: 6729025 NR Description: putative sugar transporter [Arabidopsis thaliana]
  misc_feature (1)..(463): Homolog of NCBI NO: 30679397 NR Description: sugar transporter family [Arabidopsis thaliana]
MEKRNDKSEPLLLPENGSDVSEEASWMVYLSTIIAVCGSYEFGTCVGYSAPTQFGIMEELNLSYSQFSVFGSILNMGAVLGAITSGKISDFIGRKGAMRLSSVISAIGWLIIYLAKGNVPLDFGRFLTGYGCGTLSFVVPVFIAEISPRKLRGALATLNQLFIVIGLASMFLIGAVVNWRTLALTGVAPCVVLFFGTWFIPESPRWLEMVGRHSDFEIALQKLRGPQANITREAGEIQEYLASLAHLPKATLMDLIDKKNIRFVIVGVGLMFFQQFVGINGVIFYAQQIFVSAGASPTLGSILYSIEQVVLTALGATLLIDRLGRRPLLMASAVGMLIGCLLIGNSFLLKAHGLALDIIPALAVSGVLVYIGSFSIGMGAIPWVIMSEIFPINLKGTAGGLVTVVNWLSSWLVSFTFNFLMIWSPHGTFYVYGGVCVLAIIFIAKLVPETKGRTLEEIQAMMM

SEQ ID NO: 50130 - protein, 437 aa, Arabidopsis thaliana
  peptide (1)..(437): Ceres Seq. ID no. 13588761
  misc_feature (5)..(436): Pfam Name: Sugar (and other) transporter Pfam Description: Sugar (and other) transporter
  misc_feature (302)..(433): Homolog of NCBI NO: 25405762 NR Description: hypothetical protein T22H22.15 [imported] -
  misc_feature (1)..(283): Homolog of NCBI NO: 25405762 NR Description: hypothetical protein T22H22.15 [imported] -
  misc_feature (1)..(433): Homolog of NCBI NO: 30695810 NR Description: sugar transporter, putative [Arabidopsis thaliana]
  misc_feature (1)..(434): Homolog of NCBI NO: 23504385 NR Description: putative sugar transporter [Lycopersicon
  misc_feature (1)..(436): Homolog of NCBI NO: 21536914 NR Description: putative sugar transporter [Arabidopsis thaliana]
  misc_feature (1)..(436): Homolog of NCBI NO: 18407508 NR Description: sugar transporter, putative [Arabidopsis
  misc_feature (1)..(434): Homolog of NCBI NO: 21592787 NR Description: sugar transporter-like protein [Arabidopsis
  misc_feature (1)..(434): Homolog of NCBI NO: 18419741 NR Description: sugar transporter, putative [Arabidopsis
  misc_feature (1)..(437): Homolog of NCBI NO: 6729025 NR Description: putative sugar transporter [Arabidopsis thaliana]
  misc_feature (1)..(437): Homolog of NCBI NO: 30679397 NR Description: sugar transporter family [Arabidopsis thaliana]
MVYLSTIIAVCGSYEFGTCVGYSAPTQFGIMEELNLSYSQFSVFGSILNMGAVLGAITSGKISDFIGRKGAMRLSSVISAIGWLIIYLAKGNVPLDFGRFLTGYGCGTLSFVVPVFIAEISPRKLRGALATLNQLFIVIGLASMFLIGAVVNWRTLALTGVAPCVVLFFGTWFIPESPRWLEMVGRHSDFEIALQKLRGPQANITREAGEIQEYLASLAHLPKATLMDLIDKKNIRFVIVGVGLMFFQQFVGINGVIFYAQQIFVSAGASPTLGSILYSIEQVVLTALGATLLIDRLGRRPLLMASAVGMLIGCLLIGNSFLLKAHGLALDIIPALAVSGVLVYIGSFSIGMGAIPWVIMSEIFPINLKGTAGGLVTVVNWLSSWLVSFTFNFLMIWSPHGTFYVYGGVCVLAIIFIAKLVPETKGRTLEEIQAMMM

SEQ ID NO: 50131 - DNA, 1439 bp, Arabidopsis thaliana
  misc_feature (1)..(1439): Ceres Seq. ID no. 13592666
  misc_feature: MA Experiment ID: 20000437 Result: Up-regulated in Transcription
  misc_feature: MA Experiment 20000437 PARAMETER Experiment Name: At_Drought_P Parameter: Age (day) Value: 8
  misc_feature: MA Experiment 20000437 PARAMETER Experiment Name: At_Drought_P Parameter: Organism Value: A. thaliana
  misc_feature: MA Experiment 20000437 PARAMETER Experiment Name: At_Drought_P Parameter: Plant Line Value: WS
  misc_feature: MA Experiment 20000437 PARAMETER Experiment Name: At_Drought_P Parameter: Timepoint (hr) Value: 24
  misc_feature: MA Experiment 20000437 PARAMETER Experiment Name: At_Drought_P Parameter: Tissue Value: Whole Plant
  misc_feature: MA Experiment 20000437 PARAMETER Experiment Name: At_Drought_P Parameter: Treatment Value: Drought vs. No Drought
  misc_feature: MA Experiment ID: 20001905 Result: Up-regulated in Transcription
  misc_feature: MA Experiment 20001905 PARAMETER Experiment Name: At_Drought_Reproduction_P Parameter: Age (day) Value: 40
  misc_feature: MA Experiment 20001905 PARAMETER Experiment Name: At_Drought_Reproduction_P Parameter: Organism Value: A. thaliana
  misc_feature: MA Experiment 20001905 PARAMETER Experiment Name: At_Drought_Reproduction_P Parameter: Plant Line Value: WS
  misc_feature: MA Experiment 20001905 PARAMETER Experiment Name: At_Drought_Reproduction_P Parameter: Timepoint (day) Value: 10
  misc_feature: MA Experiment 20001905 PARAMETER Experiment Name: At_Drought_Reproduction_P Parameter: Tissue Value: Rosettes
  misc_feature: MA Experiment 20001905 PARAMETER Experiment Name: At_Drought_Reproduction_P Parameter: Treatment Value: Drought vs. No Drought
gatatttcaaaaagttagctggttcttcgtcataaatttctccagttttgtcaaaaacgaagaccacagcgagccctaaatcttgtcgggcgttgaatcttacaaatttgcaagtgattctcgtcatacctgtatcttcttcttcttcttcgttcttcttctggatttgattggtggacaaaggtagctgaatcagcttcagaattgaatttgatctttgtttgagacaagaagcattggtgtttggagcatttctgaggagttatgggatatctgaattctgttttgtcatcttcgagccaggttcactccgacgatggacctgttagcggtggtggcctcagtcagaacgggaagttcagctatggatatgcaagctctcccggtaaaagatcttctatggaggacttctatgaaactaggatcgacggcgttgaaggggaaatagttggtctatttggagtctttgatggacatggaggtgcacgtgcagctgaatatgtgaagcaaaatctcttcagtaacctgatcaggcatccaaagttcatctctgataccacagctgcaatagctgatgcatacaaccaaacagactcagagtttcttaaatcagaaaatagtcagaacagagatgctggttcaacggcgtcaacagccatcttagttggtgaccgtttacttgttgcaaatgtaggggactctagagctgtaatatgcagaggtggcaatgctattgctgtatcccgagatcacaagcctgatcaaagtgacgagcgccaaagaattgaggatgcaggaggatttgtcatgtgggctggaacatggagagttggaggagttcttgctgtttctcgtgcatttggcgataggttgttgaagcagtatgttgttgctgatccggagatacaggaggaaaaagttgatagctctctcgagtttctcattcttgcaagtgatggtctctgggacgttgtatctaacgaggaagccgtaggcatgatcaaggcgatagaagatcccgaggaaggtgcaaagagactgatgatggaagcttaccaaagaggaagtgcagacaacataacttgtgtcgtcgtacgtttcttttcagaccaagcaggaggaataggttccagcagcaccaatatcccaatagatcatggtatcgtacctgaccgaatctccggtgactcatcaacctagttctaacattggtaacatccttttcgggtttcgtgatctcaaaacaagtgaatctgggagattatatattgttataaaaaggtgaaaggttttcaagaatatacaaacaaaactctcacacgaacgttttttgctgtgtcgtgtatcttttgttgttgttatacatttgttacttgggtatgtagctatagagagaataaatgtattagtacaagttctgattcattctacattgtgtc

SEQ ID NO: 50132 - protein, 311 aa, Arabidopsis thaliana
  peptide (1)..(311): Ceres Seq. ID no. 13592667
  misc_feature (32)..(272): Pfam Name: Protein phosphatase 2C Pfam Description: Protein phosphatase 2C
  misc_feature (10)..(279): Homolog of NCBI NO: 30693757 NR Description: protein phosphatase 2C (PP2C), putative
  misc_feature (46)..(288): Homolog of NCBI NO: 19387276 NR Description: putative protein phosphatase 2C
  misc_feature (1)..(292): Homolog of NCBI NO: 11358728 NR Description: protein phosphatase 2C-like protein - Arabidopsis
  misc_feature (1)..(288): Homolog of NCBI NO: 38345197 NR Description: OSJNBa0015K02.7 [Oryza sativa (japonica
  misc_feature (1)..(292): Homolog of NCBI NO: 18416366 NR Description: protein phosphatase 2C (PP2C) -related
  misc_feature (1)..(309): Homolog of NCBI NO: 15238651 NR Description: protein phosphatase 2C (PP2C), putative
  misc_feature (1)..(311): Homolog of NCBI NO: 20146110 NR Description: protein phosphatase 2C [Mesembryanthemum
  misc_feature (204)..(311): Homolog of NCBI NO: 7486331 NR Description: hypothetical protein F28M20.60 - Arabidopsis
  misc_feature (27)..(215): Homolog of NCBI NO: 7486331 NR Description: hypothetical protein F28M20.60 - Arabidopsis
  misc_feature (1)..(311): Homolog of NCBI NO: 30689144 NR Description: protein phosphatase 2C (PP2C), putative
MGYLNSVLSSSSQVHSDDGPVSGGGLSQNGKFSYGYASSPGKRSSMEDFYETRIDGVEGEIVGLFGVFDGHGGARAAEYVKQNLFSNLIRHPKFISDTTAAIADAYNQTDSEFLKSENSQNRDAGSTASTAILVGDRLLVANVGDSRAVICRGGNAIAVSRDHKPDQSDERQRIEDAGGFVMWAGTWRVGGVLAVSRAFGDRLLKQYVVADPEIQEEKVDSSLEFLILASDGLWDVVSNEEAVGMIKAIEDPEEGAKRLMMEAYQRGSADNITCVVVRFFSDQAGGIGSSSTNIPIDHGIVPDRISGDSST

SEQ ID NO: 50133 - protein, 266 aa, Arabidopsis thaliana
  peptide (1)..(266): Ceres Seq. ID no. 13592668
  misc_feature (1)..(227): Pfam Name: Protein phosphatase 2C Pfam Description: Protein phosphatase 2C
  misc_feature (1)..(234): Homolog of NCBI NO: 30693757 NR Description: protein phosphatase 2C (PP2C), putative
  misc_feature (1)..(243): Homolog of NCBI NO: 19387276 NR Description: putative protein phosphatase 2C
  misc_feature (1)..(247): Homolog of NCBI NO: 11358728 NR Description: protein phosphatase 2C-like protein - Arabidopsis
  misc_feature (1)..(243): Homolog of NCBI NO: 38345197 NR Description: OSJNBa0015K02.7 [Oryza sativa (japonica
  misc_feature (1)..(247): Homolog of NCBI NO: 18416366 NR Description: protein phosphatase 2C (PP2C) -related
  misc_feature (1)..(264): Homolog of NCBI NO: 15238651 NR Description: protein phosphatase 2C (PP2C), putative
  misc_feature (1)..(266): Homolog of NCBI NO: 20146110 NR Description: protein phosphatase 2C [Mesembryanthemum
  misc_feature (159)..(266): Homolog of NCBI NO: 7486331 NR Description: hypothetical protein F28M20.60 - Arabidopsis
  misc_feature (1)..(170): Homolog of NCBI NO: 7486331 NR Description: hypothetical protein F28M20.60 - Arabidopsis
  misc_feature (1)..(266): Homolog of NCBI NO: 30689144 NR Description: protein phosphatase 2C (PP2C), putative
MEDFYETRIDGVEGEIVGLFGVFDGHGGARAAEYVKQNLFSNLIRHPKFISDTTAAIADAYNQTDSEFLKSENSQNRDAGSTASTAILVGDRLLVANVGDSRAVICRGGNAIAVSRDHKPDQSDERQRIEDAGGFVMWAGTWRVGGVLAVSRAFGDRLLKQYVVADPEIQEEKVDSSLEFLILASDGLWDVVSNEEAVGMIKAIEDPEEGAKRLMMEAYQRGSADNITCVVVRFFSDQAGGIGSSSTNIPIDHGIVPDRISGDSST

SEQ ID NO: 50134 - DNA, 1790 bp, Arabidopsis thaliana; identical to SEQ ID NO: 49263
  misc_feature (1)..(1790): Ceres Seq. ID no. 13592250
  misc_feature: MA Experiment ID: 20000179 Result: Up-regulated in Transcription
  misc_feature: MA Experiment 20000179 PARAMETER Experiment Name: At_Germinating_Seeds_P Parameter: Age (hr) Value: 6 vs. 0
  misc_feature: MA Experiment 20000179 PARAMETER Experiment Name: At_Germinating_Seeds_P Parameter: Tissue Value: Germinating Seeds
  misc_feature: MA Experiment ID: 20000180 Result: Up-regulated in Transcription
  misc_feature: MA Experiment 20000180 PARAMETER Experiment Name: At_Germinating_Seeds_P Parameter: Age (hr) Value: 24 vs. 0
  misc_feature: MA Experiment 20000180 PARAMETER Experiment Name: At_Germinating_Seeds_P Parameter: Tissue Value: Germinating Seeds
  misc_feature: MA Experiment ID: 20000286 Result: Up-regulated in Transcription
  misc_feature: MA Experiment 20000286 PARAMETER Experiment Name: At_Open_Flower_P Parameter: Age (day) Value: 21
  misc_feature: MA Experiment 20000286 PARAMETER Experiment Name: At_Open_Flower_P Parameter: Plant Line Value: WS
  misc_feature: MA Experiment 20000286 PARAMETER Experiment Name: At_Open_Flower_P Parameter: Tissue Value: Half Open vs. Whole Plant
  misc_feature: MA Experiment ID: 20000437 Result: Down-regulated in Transcription
  misc_feature: MA Experiment 20000437 PARAMETER Experiment Name: At_Drought_P Parameter: Age (day) Value: 8
  misc_feature: MA Experiment 20000437 PARAMETER Experiment Name: At_Drought_P Parameter: Organism Value: A. thaliana
  misc_feature: MA Experiment 20000437 PARAMETER Experiment Name: At_Drought_P Parameter: Plant Line Value: WS
  misc_feature: MA Experiment 20000437 PARAMETER Experiment Name: At_Drought_P Parameter: Timepoint (hr) Value: 24
  misc_feature: MA Experiment 20000437 PARAMETER Experiment Name: At_Drought_P Parameter: Tissue Value: Whole Plant
  misc_feature: MA Experiment 20000437 PARAMETER Experiment Name: At_Drought_P Parameter: Treatment Value: Drought vs. No Drought
  misc_feature: MA Experiment ID: 20001451 Result: Down-regulated in Transcription
  misc_feature: MA Experiment 20001451 PARAMETER Experiment Name: At_Far-red-induction_P Parameter: Age (day) Value: 7
  misc_feature: MA Experiment 20001451 PARAMETER Experiment Name: At_Far-red-induction_P Parameter: Light Value: Far-red vs. White
  misc_feature: MA Experiment 20001451 PARAMETER Experiment Name: At_Far-red-induction_P Parameter: Organism Value: A. thaliana
  misc_feature: MA Experiment 20001451 PARAMETER Experiment Name: At_Far-red-induction_P Parameter: Plant Line Value: Columbia
  misc_feature: MA Experiment 20001451 PARAMETER Experiment Name: At_Far-red-induction_P Parameter: Timepoint (hr) Value: 24
  misc_feature: MA Experiment 20001451 PARAMETER Experiment Name: At_Far-red-induction_P Parameter: Tissue Value: Whole Plant
  misc_feature: MA Experiment ID: 20001905 Result: Down-regulated in Transcription
  misc_feature: MA Experiment 20001905 PARAMETER Experiment Name: At_Drought_Reproduction_P Parameter: Age (day) Value: 40
  misc_feature: MA Experiment 20001905 PARAMETER Experiment Name: At_Drought_Reproduction_P Parameter: Organism Value: A. thaliana
  misc_feature: MA Experiment 20001905 PARAMETER Experiment Name: At_Drought_Reproduction_P Parameter: Plant Line Value: WS
  misc_feature: MA Experiment 20001905 PARAMETER Experiment Name: At_Drought_Reproduction_P Parameter: Timepoint (day) Value: 10
  misc_feature: MA Experiment 20001905 PARAMETER Experiment Name: At_Drought_Reproduction_P Parameter: Tissue Value: Rosettes
  misc_feature: MA Experiment 20001905 PARAMETER Experiment Name: At_Drought_Reproduction_P Parameter: Treatment Value: Drought vs. No Drought
  misc_feature: MA Experiment ID: 20001911 Result: Down-regulated in Transcription
  misc_feature: MA Experiment 20001911 PARAMETER Experiment Name: At_Drought_Reproduction_P Parameter: Age (day) Value: 40
  misc_feature: MA Experiment 20001911 PARAMETER Experiment Name: At_Drought_Reproduction_P Parameter: Organism Value: A. thaliana
  misc_feature: MA Experiment 20001911 PARAMETER Experiment Name: At_Drought_Reproduction_P Parameter: Plant Line Value: WS
  misc_feature: MA Experiment 20001911 PARAMETER Experiment Name: At_Drought_Reproduction_P Parameter: Timepoint (day) Value: 10
  misc_feature: MA Experiment 20001911 PARAMETER Experiment Name: At_Drought_Reproduction_P Parameter: Tissue Value: Flowers
  misc_feature: MA Experiment 20001911 PARAMETER Experiment Name: At_Drought_Reproduction_P Parameter: Treatment Value: Drought vs. No Drought

SEQ ID NO: 50135 - protein, 422 aa, Arabidopsis thaliana; identical to SEQ ID NO: 49264
  peptide (1)..(422): Ceres Seq. ID no. 13592251
  misc_feature (186)..(380): Pfam Name: Arabidopsis proteins of unknown function Pfam Description: Arabidopsis proteins of unknown function
  misc_feature (186)..(380): Pfam Name: Arabidopsis proteins of unknown function Pfam Description: Arabidopsis proteins of unknown function
  misc_feature (43)..(421): Homolog of NCBI NO: 15238835 NR Description: expressed protein [Arabidopsis thaliana]
  misc_feature (31)..(422): Homolog of NCBI NO: 18406483 NR Description: expressed protein [Arabidopsis thaliana]
  misc_feature (31)..(422): Homolog of NCBI NO: 30103019 NR Description: unknown protein [Oryza sativa (japonica
  misc_feature (31)..(422): Homolog of NCBI NO: 34393299 NR Description: putative DD1A protein [Oryza sativa (japonica
  misc_feature (10)..(422): Homolog of NCBI NO: 34393554 NR Description: putative carboxyl-terminal proteinase
  misc_feature (43)..(421): Homolog of NCBI NO: 15238835 NR Description: expressed protein [Arabidopsis thaliana]
  misc_feature (31)..(422): Homolog of NCBI NO: 30103019 NR Description: unknown protein [Oryza sativa (japonica
  misc_feature (10)..(422): Homolog of NCBI NO: 34393554 NR Description: putative carboxyl-terminal proteinase
  misc_feature (1)..(422): Homolog of NCBI NO: 15222707 NR Description: expressed protein [Arabidopsis thaliana]
  misc_feature (1)..(422): Homolog of NCBI NO: 27311623 NR Description: unknown protein [Arabidopsis thaliana]
  misc_feature (3)..(422): Homolog of NCBI NO: 21593294 NR Description: putative carboxyl-terminal peptidase [Arabidopsis
  misc_feature (3)..(422): Homolog of NCBI NO: 18400044 NR Description: expressed protein [Arabidopsis thaliana]
  misc_feature (6)..(421): Homolog of NCBI NO: 15241244 NR Description: expressed protein [Arabidopsis thaliana]
  misc_feature (31)..(422): Homolog of NCBI NO: 34393299 NR Description: putative DD1A protein [Oryza sativa (japonica
  misc_feature (31)..(422): Homolog of NCBI NO: 18406483 NR Description: expressed protein [Arabidopsis thaliana]
  misc_feature (6)..(421): Homolog of NCBI NO: 15241244 NR Description: expressed protein [Arabidopsis thaliana]
  misc_feature (3)..(422): Homolog of NCBI NO: 18400044 NR Description: expressed protein [Arabidopsis thaliana]
  misc_feature (3)..(422): Homolog of NCBI NO: 21593294 NR Description: putative carboxyl-terminal peptidase [Arabidopsis
  misc_feature (1)..(422): Homolog of NCBI NO: 27311623 NR Description: unknown protein [Arabidopsis thaliana]
  misc_feature (1)..(422): Homolog of NCBI NO: 15222707 NR Description: expressed protein [Arabidopsis thaliana]

SEQ ID NO: 50136 - protein, 334 aa, Arabidopsis thaliana; identical to SEQ ID NO: 49265
  peptide (1)..(334): Ceres Seq. ID no. 13592252
  misc_feature (98)..(292): Pfam Name: Arabidopsis proteins of unknown function Pfam Description: Arabidopsis proteins of unknown function
  misc_feature (98)..(292): Pfam Name: Arabidopsis proteins of unknown function Pfam Description: Arabidopsis proteins of unknown function
  misc_feature (1)..(333): Homolog of NCBI NO: 15238835 NR Description: expressed protein [Arabidopsis thaliana]
  misc_feature (1)..(334): Homolog of NCBI NO: 18406483 NR Description: expressed protein [Arabidopsis thaliana]
  misc_feature (1)..(334): Homolog of NCBI NO: 30103019 NR Description: unknown protein [Oryza sativa (japonica
  misc_feature (1)..(334): Homolog of NCBI NO: 34393299 NR Description: putative DD1A protein [Oryza sativa (japonica
  misc_feature (1)..(334): Homolog of NCBI NO: 34393554 NR Description: putative carboxyl-terminal proteinase
  misc_feature (1)..(333): Homolog of NCBI NO: 15238835 NR Description: expressed protein [Arabidopsis thaliana]
  misc_feature (1)..(334): Homolog of NCBI NO: 30103019 NR Description: unknown protein [Oryza sativa (japonica
  misc_feature (1)..(334): Homolog of NCBI NO: 34393554 NR Description: putative carboxyl-terminal proteinase
  misc_feature (1)..(334): Homolog of NCBI NO: 15222707 NR Description: expressed protein [Arabidopsis thaliana]
  misc_feature (1)..(334): Homolog of NCBI NO: 27311623 NR Description: unknown protein [Arabidopsis thaliana]
  misc_feature (1)..(334): Homolog of NCBI NO: 21593294 NR Description: putative carboxyl-terminal peptidase [Arabidopsis
  misc_feature (1)..(334): Homolog of NCBI NO: 18400044 NR Description: expressed protein [Arabidopsis thaliana]
  misc_feature (1)..(333): Homolog of NCBI NO: 15241244 NR Description: expressed protein [Arabidopsis thaliana]
  misc_feature (1)..(334): Homolog of NCBI NO: 34393299 NR Description: putative DD1A protein [Oryza sativa (japonica
  misc_feature (1)..(334): Homolog of NCBI NO: 18406483 NR Description: expressed protein [Arabidopsis thaliana]
  misc_feature (1)..(333): Homolog of NCBI NO: 15241244 NR Description: expressed protein [Arabidopsis thaliana]
  misc_feature (1)..(334): Homolog of NCBI NO: 18400044 NR Description: expressed protein [Arabidopsis thaliana]
  misc_feature (1)..(334): Homolog of NCBI NO: 21593294 NR Description: putative carboxyl-terminal peptidase [Arabidopsis
  misc_feature (1)..(334): Homolog of NCBI NO: 27311623 NR Description: unknown protein [Arabidopsis thaliana]
  misc_feature (1)..(334): Homolog of NCBI NO: 15222707 NR Description: expressed protein [Arabidopsis thaliana]

SEQ ID NO: 50137 - protein, 290 aa, Arabidopsis thaliana; identical to SEQ ID NO: 49266
  peptide (1)..(290): Ceres Seq. ID no. 13592253
  misc_feature (54)..(248): Pfam Name: Arabidopsis proteins of unknown function Pfam Description: Arabidopsis proteins of unknown function
  misc_feature (54)..(248): Pfam Name: Arabidopsis proteins of unknown function Pfam Description: Arabidopsis proteins of unknown function
  misc_feature (1)..(289): Homolog of NCBI NO: 15238835 NR Description: expressed protein [Arabidopsis thaliana]
  misc_feature (1)..(290): Homolog of NCBI NO: 18406483 NR Description: expressed protein [Arabidopsis thaliana]
  misc_feature (1)..(290): Homolog of NCBI NO: 30103019 NR Description: unknown protein [Oryza sativa (japonica
  misc_feature (1)..(290): Homolog of NCBI NO: 34393299 NR Description: putative DD1A protein [Oryza sativa (japonica
  misc_feature (1)..(290): Homolog of NCBI NO: 34393554 NR Description: putative carboxyl-terminal proteinase
  misc_feature (1)..(289): Homolog of NCBI NO: 15238835 NR Description: expressed protein [Arabidopsis thaliana]
  misc_feature (1)..(290): Homolog of NCBI NO: 30103019 NR Description: unknown protein [Oryza sativa (japonica
  misc_feature (1)..(290): Homolog of NCBI NO: 34393554 NR Description: putative carboxyl-terminal proteinase
  misc_feature (1)..(290): Homolog of NCBI NO: 15222707 NR Description: expressed protein [Arabidopsis thaliana]
  misc_feature (1)..(290): Homolog of NCBI NO: 27311623 NR Description: unknown protein [Arabidopsis thaliana]
  misc_feature (1)..(290): Homolog of NCBI NO: 21593294 NR Description: putative carboxyl-terminal peptidase [Arabidopsis
  misc_feature (1)..(290): Homolog of NCBI NO: 18400044 NR Description: expressed protein [Arabidopsis thaliana]
  misc_feature (1)..(289): Homolog of NCBI NO: 15241244 NR Description: expressed protein [Arabidopsis thaliana]
  misc_feature (1)..(290): Homolog of NCBI NO: 34393299 NR Description: putative DD1A protein [Oryza sativa (japonica
  misc_feature (1)..(290): Homolog of NCBI NO: 18406483 NR Description: expressed protein [Arabidopsis thaliana]
  misc_feature (1)..(289): Homolog of NCBI NO: 15241244 NR Description: expressed protein [Arabidopsis thaliana]
  misc_feature (1)..(290): Homolog of NCBI NO: 18400044 NR Description: expressed protein [Arabidopsis thaliana]
  misc_feature (1)..(290): Homolog of NCBI NO: 21593294 NR Description: putative carboxyl-terminal peptidase [Arabidopsis
  misc_feature (1)..(290): Homolog of NCBI NO: 27311623 NR Description: unknown protein [Arabidopsis thaliana]
  misc_feature (1)..(290): Homolog of NCBI NO: 15222707 NR Description: expressed protein [Arabidopsis thaliana]

SEQ ID NO: 50138 - DNA, 1344 bp, Arabidopsis thaliana
  misc_feature (1)..(1344): Ceres Seq. ID no. 13647921
  misc_feature: MA Experiment ID: 20000180 Result: Down-regulated in Transcription
  misc_feature: MA Experiment 20000180 PARAMETER Experiment Name: At_Germinating_Seeds_P Parameter: Age (hr) Value: 24 vs. 0
  misc_feature: MA Experiment 20000180 PARAMETER Experiment Name: At_Germinating_Seeds_P Parameter: Tissue Value: Germinating Seeds
  misc_feature: MA Experiment ID: 20000184 Result: Down-regulated in Transcription
  misc_feature: MA Experiment 20000184 PARAMETER Experiment Name: At_Shoots__P Parameter: Age (day) Value: 7
  misc_feature: MA Experiment 20000184 PARAMETER Experiment Name: At_Shoots__P Parameter: Tissue Value: Shoots vs. Whole Plant
  misc_feature: MA Experiment ID: 20001557 Result: Up-regulated in Transcription
  misc_feature: MA Experiment 20001557 PARAMETER Experiment Name: At_Drought_Soil_Dry_P Parameter: Age (day) Value: 27
  misc_feature: MA Experiment 20001557 PARAMETER Experiment Name: At_Drought_Soil_Dry_P Parameter: Organism Value: A. thaliana
  misc_feature: MA Experiment 20001557 PARAMETER Experiment Name: At_Drought_Soil_Dry_P Parameter: Plant Line Value: WS
  misc_feature: MA Experiment 20001557 PARAMETER Experiment Name: At_Drought_Soil_Dry_P Parameter: Post Timepoint (hr) Value: 3
  misc_feature: MA Experiment 20001557 PARAMETER Experiment Name: At_Drought_Soil_Dry_P Parameter: Post-Treatment Value: Re-Water vs. No Drought
  misc_feature: MA Experiment 20001557 PARAMETER Experiment Name: At_Drought_Soil_Dry_P Parameter: Timepoint (day) Value: 13
  misc_feature: MA Experiment 20001557 PARAMETER Experiment Name: At_Drought_Soil_Dry_P Parameter: Treatment Value: Drought vs. No Drought
  misc_feature: MA Experiment ID: 20001558 Result: Up-regulated in Transcription
  misc_feature: MA Experiment 20001558 PARAMETER Experiment Name: At_Drought_Soil_Dry_P Parameter: Age (day) Value: 27
  misc_feature: MA Experiment 20001558 PARAMETER Experiment Name: At_Drought_Soil_Dry_P Parameter: Organism Value: A. thaliana
  misc_feature: MA Experiment 20001558 PARAMETER Experiment Name: At_Drought_Soil_Dry_P Parameter: Plant Line Value: WS
  misc_feature: MA Experiment 20001558 PARAMETER Experiment Name: At_Drought_Soil_Dry_P Parameter: Post Timepoint (hr) Value: 6
  misc_feature: MA Experiment 20001558 PARAMETER Experiment Name: At_Drought_Soil_Dry_P Parameter: Post-Treatment Value: Re-Water vs. No Drought
  misc_feature: MA Experiment 20001558 PARAMETER Experiment Name: At_Drought_Soil_Dry_P Parameter: Timepoint (day) Value: 13
  misc_feature: MA Experiment 20001558 PARAMETER Experiment Name: At_Drought_Soil_Dry_P Parameter: Treatment Value: Drought vs. No Drought
atctgagtcccggagaaatcgatcgtagctctctgtgcccttcgcttaaaaaaatatcgcttctctcgagaggggaaggaaagttcatttctttttgtccaattctttcaacttctcgttccaatcccctcaattctccgtttcaccgaacgcacttcgaacccttaattgctttttgcgggtcaagtttcgattcgagcgttttagggtttcgtatctgaatcggtcgacaagataaacccttttgtgggggtttcctctagatttcgaaaaaagagggatagctttcgtttggatggaaattctctgaaactaaactacatagtgatatggagacacaaattcatcaacttgagcaggaagcatataccgctgttttaagggcttttaaagcgcagtctgatgcgatttcttgggaaaaagaaagcttgataaccgaattgcgtaaagaattgagagtatctgatgatgaacatcgagagcttctcagtagggtcaataaggatgatactatccagaggataagagattggagacagggaggcgcaagccaaattactagacatgcaactattcagccttttgatgttcttcctagtcccactttctcagctgcccgaaagaaacagaaaacatttccatcttataatccatcaattggtgcgactggaaataggtcattcaataatcgtctggtatccagtggcatatcaggaaatgaatctgctgaagctctgatcggaagaaaagtgtggacaaaatggcctgaagataaccacttctatgaagcaattataacccagtacaatgcagatgagggtcggcatgctttggtgtatgatatacacgcagctaatgaaacgtgggaatgggttgatctcaaggagataccaccggaagacataagatgggatggggaggagagtggggtagctttaaacattggacatggaagtgcatccttccgtggcaacagaagaggccaaatccatggtggtagagggagaggaccaagaattcatcaaccaagaagggaacttgtaccgccaccaacacaacagaatggtagtggtgggcggagaacttcctctgatgatattgagttgttcaacacagactcgcttgtgaaggaggtggagagagttttcgattctacgcatcctgatccactcgagctcgacaaggccaagaaaatgctcaaggaacatgaacaggcactcattgctgccattgcaaggcttgctgatacttcggatggcgaaatggatggagatccaccatattcgcatgatcatccaatgccacagggatgagagaaaagctgtatgttactcaggattctgt

SEQ ID NO: 50139 - protein, 327 aa, Arabidopsis thaliana
  peptide (1)..(327): Ceres Seq. ID no. 13647922
  misc_feature (1)..(74): Pfam Name: ENT domain Pfam Description: ENT domain
  misc_feature (1)..(66): Homolog of NCBI NO: 15224878 NR Description: hypothetical protein [Arabidopsis thaliana]
  misc_feature (91)..(215): Homolog of NCBI NO: 15224878 NR Description: hypothetical protein [Arabidopsis thaliana]
  misc_feature (29)..(311): Homolog of NCBI NO: 30684221 NR Description: expressed protein [Arabidopsis thaliana]
  misc_feature (29)..(313): Homolog of NCBI NO: 11358228 NR Description: hypothetical protein T24H18.190 - Arabidopsis
  misc_feature (1)..(109): Homolog of NCBI NO: 38637206 NR Description: unknown protein [Oryza sativa (japonica
  misc_feature (109)..(321): Homolog of NCBI NO: 38637206 NR Description: unknown protein [Oryza sativa (japonica
  misc_feature (1)..(327): Homolog of NCBI NO: 21553685 NR Description: unknown [Arabidopsis thaliana]
  misc_feature (1)..(327): Homolog of NCBI NO: 15240146 NR Description: expressed protein [Arabidopsis thaliana]
  misc_feature (1)..(312): Homolog of NCBI NO: 9294111 NR Description: emb|CAB88266.1~gene_id:T23B7.8~similar to unknown
  misc_feature (1)..(327): Homolog of NCBI NO: 15229958 NR Description: expressed protein [Arabidopsis thaliana]
METQIHQLEQEAYTAVLRAFKAQSDAISWEKESLITELRKELRVSDDEHRELLSRVNKDDTIQRIRDWRQGGASQITRHATIQPFDVLPSPTFSAARKKQKTFPSYNPSIGATGNRSFNNRLVSSGISGNESAEALIGRKVWTKWPEDNHFYEAIITQYNADEGRHALVYDIHAANETWEWVDLKEIPPEDIRWDGEESGVALNIGHGSASFRGNRRGQIHGGRGRGPRIHQPRRELVPPPTQQNGSGGRRTSSDDIELFNTDSLVKEVERVFDSTHPDPLELDKAKKMLKEHEQALIAAIARLADTSDGEMDGDPPYSHDHPMPQG

SEQ ID NO: 50140 - DNA, 5086 bp, Arabidopsis thaliana
  misc_feature (1)..(5086): Ceres Seq. ID no. 13609961
  misc_feature: MA Experiment ID: 108573 Result: Up-regulated in Transcription
  misc_feature: MA Experiment 108573 PARAMETER Experiment Name: At_Drought_cDNA_P Parameter: Timepoint (hr) Value: 6
  misc_feature: MA Experiment 108573 PARAMETER Experiment Name: At_Drought_cDNA_P Parameter: Tissue Value: Aerial
  misc_feature: MA Experiment 108573 PARAMETER Experiment Name: At_Drought_cDNA_P Parameter: Treatment Value: Drought vs. No Drought
  misc_feature: MA Experiment ID: 108579 Result: Down-regulated in Transcription
  misc_feature: MA Experiment 108579 PARAMETER Experiment Name: At_4deg_Cold_cDNA_P Parameter: Temperature (deg C) Value: 4 vs. 22
  misc_feature: MA Experiment 108579 PARAMETER Experiment Name: At_4deg_Cold_cDNA_P Parameter: Timepoint (hr) Value: 6
  misc_feature: MA Experiment 108579 PARAMETER Experiment Name: At_4deg_Cold_cDNA_P Parameter: Tissue Value: Aerial
  misc_feature: MA Experiment ID: 20000184 Result: Down-regulated in Transcription
  misc_feature: MA Experiment 20000184 PARAMETER Experiment Name: At_Shoots__P Parameter: Age (day) Value: 7
  misc_feature: MA Experiment 20000184 PARAMETER Experiment Name: At_Shoots__P Parameter: Tissue Value: Shoots vs. Whole Plant
  misc_feature: MA Experiment ID: 20000265 Result: Up-regulated in Transcription
  misc_feature: MA Experiment 20000265 PARAMETER Experiment Name: At_Open_Flower_P Parameter: Age (day) Value: 21
  misc_feature: MA Experiment 20000265 PARAMETER Experiment Name: At_Open_Flower_P Parameter: Plant Line Value: WS
  misc_feature: MA Experiment 20000265 PARAMETER Experiment Name: At_Open_Flower_P Parameter: Tissue Value: Closed Flower vs. Whole Plant
  misc_feature: MA Experiment ID: 20000437 Result: Up-regulated in Transcription
  misc_feature: MA Experiment 20000437 PARAMETER Experiment Name: At_Drought_P Parameter: Age (day) Value: 8
  misc_feature: MA Experiment 20000437 PARAMETER Experiment Name: At_Drought_P Parameter: Organism Value: A. thaliana
  misc_feature: MA Experiment 20000437 PARAMETER Experiment Name: At_Drought_P Parameter: Plant Line Value: WS
  misc_feature: MA Experiment 20000437 PARAMETER Experiment Name: At_Drought_P Parameter: Timepoint (hr) Value: 24
  misc_feature: MA Experiment 20000437 PARAMETER Experiment Name: At_Drought_P Parameter: Tissue Value: Whole Plant
  misc_feature: MA Experiment 20000437 PARAMETER Experiment Name: At_Drought_P Parameter: Treatment Value: Drought vs. No Drought
  misc_feature: MA Experiment ID: 20000495 Result: Up-regulated in Transcription
  misc_feature: MA Experiment 20000495 PARAMETER Experiment Name: At_Guard_Cells_P Parameter: Harvest Date Value: 8/2/2002
  misc_feature: MA Experiment 20000495 PARAMETER Experiment Name: At_Guard_Cells_P Parameter: Organism Value: A. thaliana
  misc_feature: MA Experiment 20000495 PARAMETER Experiment Name: At_Guard_Cells_P Parameter: Tissue Value: Guard Cells vs. Leaves
  misc_feature: MA Experiment ID: 20000794 Result: Up-regulated in Transcription
  misc_feature: MA Experiment 20000794 PARAMETER Experiment Name: At_Petals_P Parameter: Age (day) Value: 23-25 days
  misc_feature: MA Experiment 20000794 PARAMETER Experiment Name: At_Petals_P Parameter: Plant Line Value: WS
  misc_feature: MA Experiment 20000794 PARAMETER Experiment Name: At_Petals_P Parameter: Tissue Value: Petals vs. Whole plant
  misc_feature: MA Experiment ID: 20001248 Result: Up-regulated in Transcription
  misc_feature: MA Experiment 20001248 PARAMETER Experiment Name: At_Far-red-induction_P Parameter: Age (day) Value: 7
  misc_feature: MA Experiment 20001248 PARAMETER Experiment Name: At_Far-red-induction_P Parameter: Light Value: Far-red vs. White
  misc_feature: MA Experiment 20001248 PARAMETER Experiment Name: At_Far-red-induction_P Parameter: Organism Value: A. thaliana
  misc_feature: MA Experiment 20001248 PARAMETER Experiment Name: At_Far-red-induction_P Parameter: Plant Line Value: Columbia
  misc_feature: MA Experiment 20001248 PARAMETER Experiment Name: At_Far-red-induction_P Parameter: Timepoint (hr) Value: 4
  misc_feature: MA Experiment 20001248 PARAMETER Experiment Name: At_Far-red-induction_P Parameter: Tissue Value: Whole Plant
  misc_feature: MA Experiment ID: 20001450 Result: Up-regulated in Transcription
  misc_feature: MA Experiment 20001450 PARAMETER Experiment Name: At_Far-red-induction_P Parameter: Age (day) Value: 7
  misc_feature: MA Experiment 20001450 PARAMETER Experiment Name: At_Far-red-induction_P Parameter: Light Value: Far-red vs. White
  misc_feature: MA Experiment 20001450 PARAMETER Experiment Name: At_Far-red-induction_P Parameter: Organism Value: A. thaliana
  misc_feature: MA Experiment 20001450 PARAMETER Experiment Name: At_Far-red-induction_P Parameter: Plant Line Value: Columbia
  misc_feature: MA Experiment 20001450 PARAMETER Experiment Name: At_Far-red-induction_P Parameter: Timepoint (hr) Value: 8
  misc_feature: MA Experiment 20001450 PARAMETER Experiment Name: At_Far-red-induction_P Parameter: Tissue Value: Whole Plant
  misc_feature: MA Experiment ID: 20001557 Result: Down-regulated in Transcription
  misc_feature: MA Experiment 20001557 PARAMETER Experiment Name: At_Drought_Soil_Dry_P Parameter: Age (day) Value: 27
  misc_feature: MA Experiment 20001557 PARAMETER Experiment Name: At_Drought_Soil_Dry_P Parameter: Organism Value: A. thaliana
  misc_feature: MA Experiment 20001557 PARAMETER Experiment Name: At_Drought_Soil_Dry_P Parameter: Plant Line Value: WS
  misc_feature: MA Experiment 20001557 PARAMETER Experiment Name: At_Drought_Soil_Dry_P Parameter: Post Timepoint (hr) Value: 3
  misc_feature: MA Experiment 20001557 PARAMETER Experiment Name: At_Drought_Soil_Dry_P Parameter: Post-Treatment Value: Re-Water vs. No Drought
  misc_feature: MA Experiment 20001557 PARAMETER Experiment Name: At_Drought_Soil_Dry_P Parameter: Timepoint (day) Value: 13
  misc_feature: MA Experiment 20001557 PARAMETER Experiment Name: At_Drought_Soil_Dry_P Parameter: Treatment Value: Drought vs. No Drought
  misc_feature: MA Experiment ID: 20001558 Result: Down-regulated in Transcription
  misc_feature: MA Experiment 20001558 PARAMETER Experiment Name: At_Drought_Soil_Dry_P Parameter: Age (day) Value: 27
  misc_feature: MA Experiment 20001558 PARAMETER Experiment Name: At_Drought_Soil_Dry_P Parameter: Organism Value: A. thaliana
  misc_feature: MA Experiment 20001558 PARAMETER Experiment Name: At_Drought_Soil_Dry_P Parameter: Plant Line Value: WS
  misc_feature: MA Experiment 20001558 PARAMETER Experiment Name: At_Drought_Soil_Dry_P Parameter: Post Timepoint (hr) Value: 6
  misc_feature: MA Experiment 20001558 PARAMETER Experiment Name: At_Drought_Soil_Dry_P Parameter: Post-Treatment Value: Re-Water vs. No Drought
  misc_feature: MA Experiment 20001558 PARAMETER Experiment Name: At_Drought_Soil_Dry_P Parameter: Timepoint (day) Value: 13
  misc_feature: MA Experiment 20001558 PARAMETER Experiment Name: At_Drought_Soil_Dry_P Parameter: Treatment Value: Drought vs. No Drought
  misc_feature: MA Experiment ID: 20001757 Result: Down-regulated in Transcription
  misc_feature: MA Experiment 20001757 PARAMETER Experiment Name: At_50mM_NH4NO3_L-to-H_P Parameter: Timepoint (hr) Value: 6
  misc_feature: MA Experiment 20001757 PARAMETER Experiment Name: At_50mM_NH4NO3_L-to-H_P Parameter: Tissue Value: Leaf
  misc_feature: MA Experiment 20001757 PARAMETER Experiment Name: At_50mM_NH4NO3_L-to-H_P Parameter: Treatment Value: 50mM NH4NO3 vs 100mM Mannitol
  misc_feature: MA Experiment ID: 20001911 Result: Up-regulated in Transcription
  misc_feature: MA Experiment 20001911 PARAMETER Experiment Name: At_Drought_Reproduction_P Parameter: Age (day) Value: 40
  misc_feature: MA Experiment 20001911 PARAMETER Experiment Name: At_Drought_Reproduction_P Parameter: Organism Value: A. thaliana
  misc_feature: MA Experiment 20001911 PARAMETER Experiment Name: At_Drought_Reproduction_P Parameter: Plant Line Value: WS
  misc_feature: MA Experiment 20001911 PARAMETER Experiment Name: At_Drought_Reproduction_P Parameter: Timepoint (day) Value: 10
  misc_feature: MA Experiment 20001911 PARAMETER Experiment Name: At_Drought_Reproduction_P Parameter: Tissue Value: Flowers
  misc_feature: MA Experiment 20001911 PARAMETER Experiment Name: At_Drought_Reproduction_P Parameter: Treatment Value: Drought vs. No Drought
aaattgatctcatcttcaatcaaattcatcatcttcgatactcgtttcttctctctttggtttcatacagatcccaaatttctagggctcctagtcctttgatttcttcgactggaatcgcaattccccactacgtcaagctggacagacaccgaagggatcgccatgagagtggcggctacgaggattcctaccataaccaccgagcccatcccagaggtccatctcgtccctcagattcacgcttcgaagaggatgatgatgattttcgccgccaccgtcgtcgtcgtggaagcagccctagcaattatcgaattggaattgggggcggaggaggaggtaatggtggtcgacgctgggaagatgacactcctaaggattttgatggtcccggagatggaggtttccggcagatgaatggtcccccagatagagtagattttaagcctatgggtcctcaccatggtggaagttttcggcctatggggtttgcctacgatgatggttttcgtccaatgggtcctaacggtggtgtgggaggagaagggacacggtcaattgttggagctcggtataactatcccgcgaagtatcctccttcagagagtccagacaggaggagatttatcggtaaagcaatggagtctgattattctgtaagaccgactacaccgccggtccagcagcctctttccggtcagaaaagagggtatcctatctcagaccatggcagctttactggaactgatgtctctgatcgtagcagtacagtcaagctttttgttggatctgtaccaaggacagctacagaagaagaaatccgtccctatttcgaacagcatggaaatgttctggaggttgctctgatcaaggacaagagaactggacagcagcaaggtatgtcaatctccattttattaggaaatagtcgtgaattatactttttaaaatttcaggtctccctgaaaaggctgatgggaagcaaccccagtctcatcattggcctccaattgtttgcaacaattttcgggcttattgcttatgcttgccagcgtcttatctgtgttcgattctgtcacagaagaaggctacctgtgctaagaaagggtttatgtacttatgttgggcaaatagatttcgctacttgtgtgtattctagaactttagatgtgtttgaaaagtgtagaatttattgagggtgttttagagttggagttaatgtacagagaactgaattttgctgttgcctttatagtgggaattggttataagaacatcgctattttcctctcctattgaaattcattttctttactcttcctctagatggattgaagatgttgtgtatggtcttgacaggatgaatgtatttttttaagttggtagtttgataaggacatgaggttcaaaagatggtttcttgatttgccactcctgctggtcaaagatttggccgtctttctaattttatcatgttggaggtttggcgtcttcattttctttcatatcaatttatgggtgtgctgtctattggttaatgatggcattccttttacctttttggatgagtgatgctggaatgaatgcgtttctccttttcttttgttgatggcctgaggaactatgatggctatatttctttccactctctttgaatggcctgaaatgtgtgctttctgtatggtcgtccctctcaatttcttggatggcttgtgatgtgatataccatctctcgtcataggtgaatgaatgatttgtttagtagttcttatgtatgtattttgtatgttcccacgtctctattccttggatggcttgtgatgtgatataccatctctcgtcatagatgaatgaatattttgttgagtagctcttatgtctgtatggtggcccttgcagtgctgatcgatatttatgtggaagaaatgtttgatgatagattttttttgtatgctcccttttcgctaatcaagcctttgtgcttgcaaggtgcaactgttattttattattgaatttcctgttctactactccatttagttctgtctctattttgtcagtgtgaagaaatactagacgatgaatggtgtgtttgtacgtgcatagttatttataaattcttgactttccaagaagttattatttctataactgctacacctttgtggatggcagaacaaatgcatctgattgtggtgacataaacacttttgatcgcggttgaatgtactagattccatacaactctttcttcagccttgtgaaatattattatgttaggtggtgcaaacatatggaaggaacctgattgttttagtttcttagaatagtttctgatgttaatacagcatgttgacttcactctcttgcccttgatcaatcagcatcaggcaggggcctaattatgtattacatgaagcaatcgtattcttttctgaattagatttttttccaatgagttatcttgcccataactgtagttctttatttgaagtcttcaaatgcttgatgtatggtgacgaaaatgtgtatatgttttggttttgattatccgctactcatcaattattgagattcttacatactgaatccgttactttggacctatagttatgttttatgttgctaattaacttgtacatgtttctagattttctttcaaatggatcctgcttggacaaatgcagccaccctttgtctgaaaggccctcttgtagatatgttatctgcagatactgactgtgttcaattttttaatatttgtttttgccatattctccatttgaagacattaatttattctctccaacaactttacatcaatatttaagtggaggctgtcagacatgtcttatgattttcctactgaacttatgtgctttgagtagtacatcttgttactagtacaatttgatggtagaaggaaaagttgaaccctgaaacagatagcttaagtatcagtctttaatgcaggctgttgttttgtaaaatatgcaacttcgaaagatgcggatagagccatcagagcactgcacaatcagatcactcttcctgggggaactggtcctgttcaagttcgatatgctgacggggagagagaacgcataggcaccctagagtttaagctttttgttggttcactaaacaagcaagccactgaaaaagaagttgaggagatctttttacaatttggtcatgtggaagatgtctatctcatgcgggatgaatatagacagagtcgtggatgtgggtttgttaaatattcaagcaaagagacggcaatggcagctatcgatggtctcaacggaacttataccatgagaggttgcaatcagccattgattgttcggtttgctgagccaaagaggcctaaacctggcgagtcaagggaaatggcacctcctgttggacttggttcagggcctcgttttcaagcttcaggaccaaggcctacctctaactttggtgactctagtggggatgtaagccacacaaatccttggcgtccagctacttcacgaaacgtaggcccacctagtaacactgggatccgtggtgccggtagtgactttccccctaaaccaggtcaagcaacattgccttcaaatcagggtggcccgttaggtggttatggtgttcctccccttaaccctctcccagtccctggagtttcatcttctgccacattgcaacagcaaaatcgggcagctggccagcatataacaccattaaaaaaacctcttcacagtccacagggtctccctctccccctccgtccgcaaactaatttccctggggcccaggcacccttgcagaatccttatgcttatagcagccagttgcctacctctcagctgccaccacagcaaaacatcagtcgtgcaactgctcctcaaactcctttgaacattaatctacggccaacaactgtgtcttctgcaactgttcaatttccccctcgttcccagcagcaaccgctacaaaagatgcaacatcctccttctgagctagctcagctcttgtcgcagcaaactcagagtctacaagcaacattccaatcgtctcagcaagcaatttctcagctgcagcagcaggtgcagtctatgcagcaaccaaaccaaaatttaccactctcacagaatggccgagctggtaaacaacagtgggctggatctgcaattccaagagtggctagcaccactggttcgacaccagtgagctatgtgcaaacagctgcacctgcagtaagtcagagcgtaggttctgtcaaatgtacctggaccgagcatacctcgcctgatggatttaaatattattacaatggtctaacgggtgaaagcaagtgggaaaaacctgaggaaatgatagtgttcgaacgagagcaacagaaacagcaacaacatcaagagaagccaactatacagcagtcccagacccaattacagccgttgcagcaacaaccacaacaagttcagcagcaatatcagggccagcaattacagcagccgttttattcttcactgtatccaactccaggggccagccataatactcagtatccatcattgccagtaggtcaaaatagccagtttcctatgtcaggaattggtcagaatgctcaggattatgctcggacacatatacccgtgggagctgcttcaatgaatgatatatcaagaactcaacagagccgtcaatctccccaagaactcatgtggaagaataaagcttgaggtacatgagacgaggagctaaactatctcagtagctagatagaaatttctggaactaattagtcaaggagaggaaaagcagcaatggtagtgtccttagtctctgatttttttagttaaccccttcagttataatagataggcgatcgtagaccatctgcattctatcttttctctaatcagatatctcctcctttttcattttaagagctgccaaacaatggcctgttgtaacatagctagcgcaagttatgtctcatgttgtgttactagtagtaacttagctgggtaaaccaaactttgatccagattaggagtcatatataattatataaatagaatatgtacattcat

SEQ ID NO: 50141 - protein, 505 aa, Arabidopsis thaliana; identical to SEQ ID NO: 41238
  peptide (1)..(505): Ceres Seq. ID no. 13609962
  misc_feature (351)..(380): Pfam Name: WW domain Pfam Description: WW domain
  misc_feature (355)..(382): Homolog of NCBI NO: 23479626 NR Description: FCA gamma-related [Plasmodium yoelii yoelii]
  misc_feature (1)..(95): Homolog of NCBI NO: 23479626 NR Description: FCA gamma-related [Plasmodium yoelii yoelii]
  misc_feature (1)..(299): Homolog of NCBI NO: 34555648 NR Description: flowering time control protein isoform rFCA-2
  misc_feature (1)..(503): Homolog of NCBI NO: 33390912 NR Description: gamma flowering time control protein
  misc_feature (1)..(160): Homolog of NCBI NO: 11045077 NR Description: putative FCA orthologue [Brassica napus]
  misc_feature (1)..(505): Homolog of NCBI NO: 2204100 NR Description: FCA alpha 2 [Arabidopsis thaliana]
  misc_feature (1)..(505): Homolog of NCBI NO: 30683595 NR Description: Flowering time control protein (FCA) [Arabidopsis
  misc_feature (1)..(491): Homolog of NCBI NO: 18150431 NR Description: FCA gamma [Brassica napus]
  misc_feature (1)..(291): Homolog of NCBI NO: 2204091 NR Description: FCA delta [Arabidopsis thaliana]
  misc_feature (1)..(291): Homolog of NCBI NO: 30683603 NR Description: Flowering time control protein (FCA) [Arabidopsis

SEQ ID NO: 50142 - protein, 483 aa, Arabidopsis thaliana; identical to SEQ ID NO: 41239
  peptide (1)..(483): Ceres Seq. ID no. 13609963
  misc_feature (329)..(358): Pfam Name: WW domain Pfam Description: WW domain
  misc_feature (333)..(360): Homolog of NCBI NO: 23479626 NR Description: FCA gamma-related [Plasmodium yoelii yoelii]
  misc_feature (1)..(73): Homolog of NCBI NO: 23479626 NR Description: FCA gamma-related [Plasmodium yoelii yoelii]
  misc_feature (1)..(277): Homolog of NCBI NO: 34555648 NR Description: flowering time control protein isoform rFCA-2
  misc_feature (1)..(481): Homolog of NCBI NO: 33390912 NR Description: gamma flowering time control protein
  misc_feature (1)..(138): Homolog of NCBI NO: 11045077 NR Description: putative FCA orthologue [Brassica napus]
  misc_feature (1)..(483): Homolog of NCBI NO: 2204100 NR Description: FCA alpha 2 [Arabidopsis thaliana]
  misc_feature (1)..(483): Homolog of NCBI NO: 30683595 NR Description: Flowering time control protein (FCA) [Arabidopsis
  misc_feature (1)..(469): Homolog of NCBI NO: 18150431 NR Description: FCA gamma [Brassica napus]
  misc_feature (1)..(269): Homolog of NCBI NO: 2204091 NR Description: FCA delta [Arabidopsis thaliana]
  misc_feature (1)..(269): Homolog of NCBI NO: 30683603 NR Description: Flowering time control protein (FCA) [Arabidopsis

SEQ ID NO: 50143 - protein, 471 aa, Arabidopsis thaliana; identical to SEQ ID NO: 41240
  peptide (1)..(471): Ceres Seq. ID no. 13609964
  misc_feature (317)..(346): Pfam Name: WW domain Pfam Description: WW domain
  misc_feature (321)..(348): Homolog of NCBI NO: 23479626 NR Description: FCA gamma-related [Plasmodium yoelii yoelii]
  misc_feature (1)..(61): Homolog of NCBI NO: 23479626 NR Description: FCA gamma-related [Plasmodium yoelii yoelii]
  misc_feature (1)..(265): Homolog of NCBI NO: 34555648 NR Description: flowering time control protein isoform rFCA-2
  misc_feature (1)..(469): Homolog of NCBI NO: 33390912 NR Description: gamma flowering time control protein
  misc_feature (1)..(126): Homolog of NCBI NO: 11045077 NR Description: putative FCA orthologue [Brassica napus]
  misc_feature (1)..(471): Homolog of NCBI NO: 2204100 NR Description: FCA alpha 2 [Arabidopsis thaliana]
  misc_feature (1)..(471): Homolog of NCBI NO: 30683595 NR Description: Flowering time control protein (FCA) [Arabidopsis
  misc_feature (1)..(457): Homolog of NCBI NO: 18150431 NR Description: FCA gamma [Brassica napus]
  misc_feature (1)..(257): Homolog of NCBI NO: 2204091 NR Description: FCA delta [Arabidopsis thaliana]
  misc_feature (1)..(257): Homolog of NCBI NO: 30683603 NR Description: Flowering time control protein (FCA) [Arabidopsis

SEQ ID NO: 50144 - DNA, 1234 bp, Arabidopsis thaliana
  misc_feature (1)..(1234): Ceres Seq. ID no. 13588117
  misc_feature: MA Experiment ID: 20000166 Result: Up-regulated in Transcription
  misc_feature: MA Experiment 20000166 PARAMETER Experiment Name: At_100uM_ABA_P Parameter: Age (day) Value: 14
  misc_feature: MA Experiment 20000166 PARAMETER Experiment Name: At_100uM_ABA_P Parameter: Organism Value: A. thaliana
  misc_feature: MA Experiment 20000166 PARAMETER Experiment Name: At_100uM_ABA_P Parameter: Plant Line Value: WS
  misc_feature: MA Experiment 20000166 PARAMETER Experiment Name: At_100uM_ABA_P Parameter: Timepoint (hr) Value: 1
  misc_feature: MA Experiment 20000166 PARAMETER Experiment Name: At_100uM_ABA_P Parameter: Tissue Value: Aerial
  misc_feature: MA Experiment 20000166 PARAMETER Experiment Name: At_100uM_ABA_P Parameter: Treatment Value: 100uM ABA vs. No Treatment
  misc_feature: MA Experiment ID: 20000173 Result: Down-regulated in Transcription
  misc_feature: MA Experiment 20000173 PARAMETER Experiment Name: At_42deg_Heat_P Parameter: Age (day) Value: 14
  misc_feature: MA Experiment 20000173 PARAMETER Experiment Name: At_42deg_Heat_P Parameter: Organism Value: A. thaliana
  misc_feature: MA Experiment 20000173 PARAMETER Experiment Name: At_42deg_Heat_P Parameter: Plant Line Value: WS
  misc_feature: MA Experiment 20000173 PARAMETER Experiment Name: At_42deg_Heat_P Parameter: Temperature (deg C) Value: 42 vs. 22
  misc_feature: MA Experiment 20000173 PARAMETER Experiment Name: At_42deg_Heat_P Parameter: Timepoint (hr) Value: 6
  misc_feature: MA Experiment 20000173 PARAMETER Experiment Name: At_42deg_Heat_P Parameter: Tissue Value: Aerial
  misc_feature: MA Experiment ID: 20000180 Result: Up-regulated in Transcription
  misc_feature: MA Experiment 20000180 PARAMETER Experiment Name: At_Germinating_Seeds_P Parameter: Age (hr) Value: 24 vs. 0
  misc_feature: MA Experiment 20000180 PARAMETER Experiment Name: At_Germinating_Seeds_P Parameter: Tissue Value: Germinating Seeds
  misc_feature: MA Experiment ID: 20000185 Result: Down-regulated in Transcription
  misc_feature: MA Experiment 20000185 PARAMETER Experiment Name: At_Roots__P Parameter: Age (day) Value: 7 vs. 21
  misc_feature: MA Experiment 20000185 PARAMETER Experiment Name: At_Roots__P Parameter: Organism Value: A. thaliana
  misc_feature: MA Experiment 20000185 PARAMETER Experiment Name: At_Roots__P Parameter: Tissue Value: Roots vs. Whole Plant
  misc_feature: MA Experiment ID: 20000234 Result: Up-regulated in Transcription
  misc_feature: MA Experiment 20000234 PARAMETER Experiment Name: At_Siliques_P Parameter: Age (day) Value: 21
  misc_feature: MA Experiment 20000234 PARAMETER Experiment Name: At_Siliques_P Parameter: Organism Value: A. thaliana
  misc_feature: MA Experiment 20000234 PARAMETER Experiment Name: At_Siliques_P Parameter: Plant Line Value: WS
  misc_feature: MA Experiment 20000234 PARAMETER Experiment Name: At_Siliques_P Parameter: Tissue Value: Less Than 5mm Siliques vs. Whole Plant
  misc_feature: MA Experiment ID: 20000265 Result: Up-regulated in Transcription
  misc_feature: MA Experiment 20000265 PARAMETER Experiment Name: At_Open_Flower_P Parameter: Age (day) Value: 21
  misc_feature: MA Experiment 20000265 PARAMETER Experiment Name: At_Open_Flower_P Parameter: Plant Line Value: WS
  misc_feature: MA Experiment 20000265 PARAMETER Experiment Name: At_Open_Flower_P Parameter: Tissue Value: Closed Flower vs. Whole Plant
  misc_feature: MA Experiment ID: 20000437 Result: Down-regulated in Transcription
  misc_feature: MA Experiment 20000437 PARAMETER Experiment Name: At_Drought_P Parameter: Age (day) Value: 8
  misc_feature: MA Experiment 20000437 PARAMETER Experiment Name: At_Drought_P Parameter: Organism Value: A. thaliana
  misc_feature: MA Experiment 20000437 PARAMETER Experiment Name: At_Drought_P Parameter: Plant Line Value: WS
  misc_feature: MA Experiment 20000437 PARAMETER Experiment Name: At_Drought_P Parameter: Timepoint (hr) Value: 24
  misc_feature: MA Experiment 20000437 PARAMETER Experiment Name: At_Drought_P Parameter: Tissue Value: Whole Plant
  misc_feature: MA Experiment 20000437 PARAMETER Experiment Name: At_Drought_P Parameter: Treatment Value: Drought vs. No Drought
  misc_feature: MA Experiment ID: 20000439 Result: Down-regulated in Transcription
  misc_feature: MA Experiment 20000439 PARAMETER Experiment Name: At_Roots__P Parameter: Age (day) Value: 14 vs. 21
  misc_feature: MA Experiment 20000439 PARAMETER Experiment Name: At_Roots__P Parameter: Organism Value: A. thaliana
  misc_feature: MA Experiment 20000439 PARAMETER Experiment Name: At_Roots__P Parameter: Tissue Value: Roots vs. Whole Plant
  misc_feature: MA Experiment ID: 20000495 Result: Up-regulated in Transcription
  misc_feature: MA Experiment 20000495 PARAMETER Experiment Name: At_Guard_Cells_P Parameter: Harvest Date Value: 8/2/2002
  misc_feature: MA Experiment 20000495 PARAMETER Experiment Name: At_Guard_Cells_P Parameter: Organism Value: A. thaliana
  misc_feature: MA Experiment 20000495 PARAMETER Experiment Name: At_Guard_Cells_P Parameter: Tissue Value: Guard Cells vs. Leaves
  misc_feature: MA Experiment ID: 20001248 Result: Down-regulated in Transcription
  misc_feature: MA Experiment 20001248 PARAMETER Experiment Name: At_Far-red-induction_P Parameter: Age (day) Value: 7
  misc_feature: MA Experiment 20001248 PARAMETER Experiment Name: At_Far-red-induction_P Parameter: Light Value: Far-red vs. White
  misc_feature: MA Experiment 20001248 PARAMETER Experiment Name: At_Far-red-induction_P Parameter: Organism Value: A. thaliana
  misc_feature: MA Experiment 20001248 PARAMETER Experiment Name: At_Far-red-induction_P Parameter: Plant Line Value: Columbia
  misc_feature: MA Experiment 20001248 PARAMETER Experiment Name: At_Far-red-induction_P Parameter: Timepoint (hr) Value: 4
  misc_feature: MA Experiment 20001248 PARAMETER Experiment Name: At_Far-red-induction_P Parameter: Tissue Value: Whole Plant
  misc_feature: MA Experiment ID: 20001451 Result: Up-regulated in Transcription
  misc_feature: MA Experiment 20001451 PARAMETER Experiment Name: At_Far-red-induction_P Parameter: Age (day) Value: 7
  misc_feature: MA Experiment 20001451 PARAMETER Experiment Name: At_Far-red-induction_P Parameter: Light Value: Far-red vs. White
  misc_feature: MA Experiment 20001451 PARAMETER Experiment Name: At_Far-red-induction_P Parameter: Organism Value: A. thaliana
  misc_feature: MA Experiment 20001451 PARAMETER Experiment Name: At_Far-red-induction_P Parameter: Plant Line Value: Columbia
  misc_feature: MA Experiment 20001451 PARAMETER Experiment Name: At_Far-red-induction_P Parameter: Timepoint (hr) Value: 24
  misc_feature: MA Experiment 20001451 PARAMETER Experiment Name: At_Far-red-induction_P Parameter: Tissue Value: Whole Plant
  misc_feature: MA Experiment ID: 20001757 Result: Up-regulated in Transcription
  misc_feature: MA Experiment 20001757 PARAMETER Experiment Name: At_50mM_NH4NO3_L-to-H_P Parameter: Timepoint (hr) Value: 6
  misc_feature: MA Experiment 20001757 PARAMETER Experiment Name: At_50mM_NH4NO3_L-to-H_P Parameter: Tissue Value: Leaf
  misc_feature: MA Experiment 20001757 PARAMETER Experiment Name: At_50mM_NH4NO3_L-to-H_P Parameter: Treatment Value: 50mM NH4NO3 vs 100mM Mannitol
  misc_feature: MA Experiment ID: 20001904 Result: Down-regulated in Transcription
  misc_feature: MA Experiment 20001904 PARAMETER Experiment Name: At_Drought_Reproduction_P Parameter: Age (day) Value: 37
  misc_feature: MA Experiment 20001904 PARAMETER Experiment Name: At_Drought_Reproduction_P Parameter: Organism Value: A. thaliana
  misc_feature: MA Experiment 20001904 PARAMETER Experiment Name: At_Drought_Reproduction_P Parameter: Plant Line Value: WS
  misc_feature: MA Experiment 20001904 PARAMETER Experiment Name: At_Drought_Reproduction_P Parameter: Timepoint (day) Value: 7
  misc_feature: MA Experiment 20001904 PARAMETER Experiment Name: At_Drought_Reproduction_P Parameter: Tissue Value: Rosettes
  misc_feature: MA Experiment 20001904 PARAMETER Experiment Name: At_Drought_Reproduction_P Parameter: Treatment Value: Drought vs. No Drought
  misc_feature: MA Experiment ID: 20001905 Result: Down-regulated in Transcription
  misc_feature: MA Experiment 20001905 PARAMETER Experiment Name: At_Drought_Reproduction_P Parameter: Age (day) Value: 40
  misc_feature: MA Experiment 20001905 PARAMETER Experiment Name: At_Drought_Reproduction_P Parameter: Organism Value: A. thaliana
  misc_feature: MA Experiment 20001905 PARAMETER Experiment Name: At_Drought_Reproduction_P Parameter: Plant Line Value: WS
  misc_feature: MA Experiment 20001905 PARAMETER Experiment Name: At_Drought_Reproduction_P Parameter: Timepoint (day) Value: 10
  misc_feature: MA Experiment 20001905 PARAMETER Experiment Name: At_Drought_Reproduction_P Parameter: Tissue Value: Rosettes
  misc_feature: MA Experiment 20001905 PARAMETER Experiment Name: At_Drought_Reproduction_P Parameter: Treatment Value: Drought vs. No Drought
  misc_feature: MA Experiment ID: 20001906 Result: Down-regulated in Transcription
  misc_feature: MA Experiment 20001906 PARAMETER Experiment Name: At_Drought_Reproduction_P Parameter: Age (day) Value: 35
  misc_feature: MA Experiment 20001906 PARAMETER Experiment Name: At_Drought_Reproduction_P Parameter: Organism Value: A. thaliana
  misc_feature: MA Experiment 20001906 PARAMETER Experiment Name: At_Drought_Reproduction_P Parameter: Plant Line Value: WS
  misc_feature: MA Experiment 20001906 PARAMETER Experiment Name: At_Drought_Reproduction_P Parameter: Timepoint (day) Value: 5
  misc_feature: MA Experiment 20001906 PARAMETER Experiment Name: At_Drought_Reproduction_P Parameter: Tissue Value: Siliques
  misc_feature: MA Experiment 20001906 PARAMETER Experiment Name: At_Drought_Reproduction_P Parameter: Treatment Value: Drought vs. No Drought
  misc_feature: MA Experiment ID: 20001908 Result: Down-regulated in Transcription
  misc_feature: MA Experiment 20001908 PARAMETER Experiment Name: At_Drought_Reproduction_P Parameter: Age (day) Value: 40
  misc_feature: MA Experiment 20001908 PARAMETER Experiment Name: At_Drought_Reproduction_P Parameter: Organism Value: A. thaliana
  misc_feature: MA Experiment 20001908 PARAMETER Experiment Name: At_Drought_Reproduction_P Parameter: Plant Line Value: WS
  misc_feature: MA Experiment 20001908 PARAMETER Experiment Name: At_Drought_Reproduction_P Parameter: Timepoint (day) Value: 10
  misc_feature: MA Experiment 20001908 PARAMETER Experiment Name: At_Drought_Reproduction_P Parameter: Tissue Value: Siliques
  misc_feature: MA Experiment 20001908 PARAMETER Experiment Name: At_Drought_Reproduction_P Parameter: Treatment Value: Drought vs. No Drought
  misc_feature: MA Experiment ID: 20001911 Result: Down-regulated in Transcription
  misc_feature: MA Experiment 20001911 PARAMETER Experiment Name: At_Drought_Reproduction_P Parameter: Age (day) Value: 40
  misc_feature: MA Experiment 20001911 PARAMETER Experiment Name: At_Drought_Reproduction_P Parameter: Organism Value: A. thaliana
  misc_feature: MA Experiment 20001911 PARAMETER Experiment Name: At_Drought_Reproduction_P Parameter: Plant Line Value: WS
  misc_feature: MA Experiment 20001911 PARAMETER Experiment Name: At_Drought_Reproduction_P Parameter: Timepoint (day) Value: 10
  misc_feature: MA Experiment 20001911 PARAMETER Experiment Name: At_Drought_Reproduction_P Parameter: Tissue Value: Flowers
  misc_feature: MA Experiment 20001911 PARAMETER Experiment Name: At_Drought_Reproduction_P Parameter: Treatment Value: Drought vs. No Drought
tcagaacacaaaagtttggctacagttgtgttctgatagtgatgatcatgatcatcacatgaataagtagaagatatctcttaccttctccttcttctaataagatcagagttttggttcttatttctttgacctctcaaaacaatgggtagatcaccgtgttgtgacaaattgggtttgaagaaaggaccttggacaccagaggaggatcagaaacttttagcttatattgaagaacatggtcatggaagttggcgttcattgcctgagaaagctggtctccatcgatgcggaaagagttgtagactaagatggactaactacctaagacctgacatcaaaagaggcaaattcaacttacaagaagaacaaaccattatccaactccatgctctgttaggaaacagatggtcagcgattgctactcatttgccaaagagaacagacaacgagatcaagaactattggaacactcatttgaagaaacggttagtgaaaatggggattgatccagtgactcataaacccaaaaacgagactcctttatcttctcttggtctatccaagaacgcagctatacttagccacactgctcaatgggaaagtgcaaggcttgaagctgaagcaagactagctagagaatcaaagcttcttcatttacaacattaccaaaccaaaacatcatctcaacctcatcatcatcatggattcactcacaagtcattgttacctaattggacaacaaaaccacacgaagatcaacaacagcttgaatctccgacatctacagtgtcattctctgagatgaaggaatcaatcccggcgaagatagagtttgtcggatcatcaactggtgtgactctgatgaaagaacctgaacacgattggatcaattcaacgatgcacgagtttgaaactacgcagatgggagaaggaatcgaagaagggttcacgggtctcttgctcggtggtgattcaatcgaccggagtttctccggcgataaaaacgagacggccggcgagagtagtggtggtgactgcaactactatgaggacaacaagaactacttggacagcatttttaactttgtagatccttcaccgtcggattcaccgatgttctgaatctaagggttgatatttgttgggaatgtttttgattctttttttagtttctagtttttgtgcttaaactctgattagacaatttttaaactaatccaatttttgcgct

SEQ ID NO: 50145 - protein, 326 aa, Arabidopsis thaliana
  peptide (1)..(326): Ceres Seq. ID no. 13588118
  misc_feature (14)..(61): Pfam Name: Myb-like DNA-binding domain Pfam Description: Myb-like DNA-binding domain
  misc_feature (1)..(205): Homolog of NCBI NO: 4886264 NR Description: Myb-related transcription factor mixta-like 1
  misc_feature (1)..(169): Homolog of NCBI NO: 28628947 NR Description: MYB1 [Dendrobium sp. XMW-2002-1]
  misc_feature (1)..(248): Homolog of NCBI NO: 27125807 NR Description: MYB27 protein [Oryza sativa (japonica
  misc_feature (1)..(258): Homolog of NCBI NO: 13346188 NR Description: GHMYB25 [Gossypium hirsutum]
  misc_feature (1)..(325): Homolog of NCBI NO: 38344966 NR Description: OSJNBa0072F16.11 [Oryza sativa (japonica
  misc_feature (119)..(326): Homolog of NCBI NO: 20340243 NR Description: myb-related protein-like protein [Thellungiella
  misc_feature (213)..(326): Homolog of NCBI NO: 282964 NR Description: myb-related protein 1 - garden petunia
  misc_feature (1)..(169): Homolog of NCBI NO: 282964 NR Description: myb-related protein 1 - garden petunia
  misc_feature (1)..(220): Homolog of NCBI NO: 15232045 NR Description: myb family transcription factor [Arabidopsis
  misc_feature (1)..(326): Homolog of NCBI NO: 15242272 NR Description: myb family transcription factor [Arabidopsis
MGRSPCCDKLGLKKGPWTPEEDQKLLAYIEEHGHGSWRSLPEKAGLHRCGKSCRLRWTNYLRPDIKRGKFNLQEEQTIIQLHALLGNRWSAIATHLPKRTDNEIKNYWNTHLKKRLVKMGIDPVTHKPKNETPLSSLGLSKNAAILSHTAQWESARLEAEARLARESKLLHLQHYQTKTSSQPHHHHGFTHKSLLPNWTTKPHEDQQQLESPTSTVSFSEMKESIPAKIEFVGSSTGVTLMKEPEHDWINSTMHEFETTQMGEGIEEGFTGLLLGGDSIDRSFSGDKNETAGESSGGDCNYYEDNKNYLDSIFNFVDPSPSDSPMF

SEQ ID NO: 50146 - protein, 208 aa, Arabidopsis thaliana
  peptide (1)..(208): Ceres Seq. ID no. 13588119
  misc_feature (1)..(87): Homolog of NCBI NO: 4886264 NR Description: Myb-related transcription factor mixta-like 1
  misc_feature (1)..(51): Homolog of NCBI NO: 28628947 NR Description: MYB1 [Dendrobium sp. XMW-2002-1]
  misc_feature (1)..(130): Homolog of NCBI NO: 27125807 NR Description: MYB27 protein [Oryza sativa (japonica
  misc_feature (1)..(140): Homolog of NCBI NO: 13346188 NR Description: GHMYB25 [Gossypium hirsutum]
  misc_feature (1)..(207): Homolog of NCBI NO: 38344966 NR Description: OSJNBa0072F16.11 [Oryza sativa (japonica
  misc_feature (1)..(208): Homolog of NCBI NO: 20340243 NR Description: myb-related protein-like protein [Thellungiella
  misc_feature (95)..(208): Homolog of NCBI NO: 282964 NR Description: myb-related protein 1 - garden petunia
  misc_feature (1)..(51): Homolog of NCBI NO: 282964 NR Description: myb-related protein 1 - garden petunia
  misc_feature (1)..(102): Homolog of NCBI NO: 15232045 NR Description: myb family transcription factor [Arabidopsis
  misc_feature (1)..(208): Homolog of NCBI NO: 15242272 NR Description: myb family transcription factor [Arabidopsis
MGIDPVTHKPKNETPLSSLGLSKNAAILSHTAQWESARLEAEARLARESKLLHLQHYQTKTSSQPHHHHGFTHKSLLPNWTTKPHEDQQQLESPTSTVSFSEMKESIPAKIEFVGSSTGVTLMKEPEHDWINSTMHEFETTQMGEGIEEGFTGLLLGGDSIDRSFSGDKNETAGESSGGDCNYYEDNKNYLDSIFNFVDPSPSDSPMF

SEQ ID NO: 50147 - DNA, 1375 bp, Arabidopsis thaliana
  misc_feature (1)..(1375): Ceres Seq. ID no. 13588469
  misc_feature: MA Experiment ID: 20000173 Result: Down-regulated in Transcription
  misc_feature: MA Experiment 20000173 PARAMETER Experiment Name: At_42deg_Heat_P Parameter: Age (day) Value: 14
  misc_feature: MA Experiment 20000173 PARAMETER Experiment Name: At_42deg_Heat_P Parameter: Organism Value: A. thaliana
  misc_feature: MA Experiment 20000173 PARAMETER Experiment Name: At_42deg_Heat_P Parameter: Plant Line Value: WS
  misc_feature: MA Experiment 20000173 PARAMETER Experiment Name: At_42deg_Heat_P Parameter: Temperature (deg C) Value: 42 vs. 22
  misc_feature: MA Experiment 20000173 PARAMETER Experiment Name: At_42deg_Heat_P Parameter: Timepoint (hr) Value: 6
  misc_feature: MA Experiment 20000173 PARAMETER Experiment Name: At_42deg_Heat_P Parameter: Tissue Value: Aerial
  misc_feature: MA Experiment ID: 20000184 Result: Down-regulated in Transcription
  misc_feature: MA Experiment 20000184 PARAMETER Experiment Name: At_Shoots__P Parameter: Age (day) Value: 7
  misc_feature: MA Experiment 20000184 PARAMETER Experiment Name: At_Shoots__P Parameter: Tissue Value: Shoots vs. Whole Plant
  misc_feature: MA Experiment ID: 20000794 Result: Up-regulated in Transcription
  misc_feature: MA Experiment 20000794 PARAMETER Experiment Name: At_Petals_P Parameter: Age (day) Value: 23-25 days
  misc_feature: MA Experiment 20000794 PARAMETER Experiment Name: At_Petals_P Parameter: Plant Line Value: WS
  misc_feature: MA Experiment 20000794 PARAMETER Experiment Name: At_Petals_P Parameter: Tissue Value: Petals vs. Whole plant
ggagaggaagatgttcgcttacaggactctgtttaggattgatcgtgtatttgggtttacgagtagatgttttcaatcgaaaccggaatatattagtatcctgagctttaggggaagtgagaagagtgccatggatggatataagaagcagaagatggtaaatttagtgtggagacccatctccactcaaacctcttcagttattgctgaagctggaaatgaagtccaagaagtagctcagtgtagcaaatcaagtgatgtttctaaggaagttattgaaggagagacagcttcagttgtttcagctggaaagcattcagtttctcttgaggttggggcttctttgattaagttcattagagggaaagaaggaacgacgcagatgaaacttgaagaggaaatgggagtgaagatcattcttccatcatcaaggaacaaagatcatatcagcattgaaggcggttcagtggattgtgtgactaaagcttcaaaaagaatagcaaccattatcgatgaggttgtaaggagtccaagtctcgactactcacactttgtatcacttccattagccatacatcctgagttagtggacaagctagtgaattttcagaattctatcctcgggatccatagcatagctagtgataagcaagacgaccaagctaatagagcaaccacaagtgtggcagttgatctaaaagctaatagtgaaacaaaccaggtcaatgtgggtatcaagagcataccaattgtcagttacccgcctaaggccaaatcaaagtcatctactttattggacttaggaattgaaaagtccatatttattaagccaagtacttttcacttgactgtggttatgctgaagttatggaacaaagatcgtgtcaatgcagcgtgtgatgttctgaagagtatatttcctagtgtgatggatgctttggataacaaaccagtattcattagacttaaaggattggattgtatgagaggaccattagacaagactcgtgttctctatgctcctgttgaagaaattggtgatgaaggccggcttttacgtgcttgtcgtatcctagattttaaagttattactgatgcatttgtgaaagctgggcttgttctcgagaaagatgcaaagcaaagcttgaagctgcatgtgaccgtgatgaatgcgaggcacaggaaaaggagaaagaacaataagaagaagatggagacgtttgatgcaagagagatacacaaacagtttggaaacgaagactggggagaatatctgatccaagaagctcatctctcacagcgttttgtgttcgaccagaacggttattaccgttgctgtggttcaataccatttccaggagaacagagagcctga

SEQ ID NO: 50148 - protein, 457 aa, Arabidopsis thaliana
  peptide (1)..(457): Ceres Seq. ID no. 13588470
  misc_feature (286)..(457): Homolog of NCBI NO: 34904328 NR Description: unnamed protein product [Oryza sativa (japonica
  misc_feature (181)..(208): Homolog of NCBI NO: 9279705 NR Description: gene_id:MYA6.3~unknown protein [Arabidopsis
  misc_feature (262)..(452): Homolog of NCBI NO: 9279705 NR Description: gene_id:MYA6.3~unknown protein [Arabidopsis
  misc_feature (266)..(455): Homolog of NCBI NO: 34904330 NR Description: unnamed protein product [Oryza sativa (japonica
  misc_feature (181)..(208): Homolog of NCBI NO: 30683966 NR Description: expressed protein [Arabidopsis thaliana]
  misc_feature (262)..(452): Homolog of NCBI NO: 30683966 NR Description: expressed protein [Arabidopsis thaliana]
  misc_feature (4)..(150): Homolog of NCBI NO: 17065114 NR Description: Unknown protein [Arabidopsis thaliana]
  misc_feature (37)..(53): Homolog of NCBI NO: 9279706 NR Description: gene_id:MYA6.4~unknown protein [Arabidopsis
  misc_feature (111)..(457): Homolog of NCBI NO: 9279706 NR Description: gene_id:MYA6.4~unknown protein [Arabidopsis
  misc_feature (44)..(457): Homolog of NCBI NO: 15233319 NR Description: expressed protein [Arabidopsis thaliana]
ERKMFAYRTLFRIDRVFGFTSRCFQSKPEYISILSFRGSEKSAMDGYKKQKMVNLVWRPISTQTSSVIAEAGNEVQEVAQCSKSSDVSKEVIEGETASVVSAGKHSVSLEVGASLIKFIRGKEGTTQMKLEEEMGVKIILPSSRNKDHISIEGGSVDCVTKASKRIATIIDEVVRSPSLDYSHFVSLPLAIHPELVDKLVNFQNSILGIHSIASDKQDDQANRATTSVAVDLKANSETNQVNVGIKSIPIVSYPPKAKSKSSTLLDLGIEKSIFIKPSTFHLTVVMLKLWNKDRVNAACDVLKSIFPSVMDALDNKPVFIRLKGLDCMRGPLDKTRVLYAPVEEIGDEGRLLRACRILDFKVITDAFVKAGLVLEKDAKQSLKLHVTVMNARHRKRRKNNKKKMETFDAREIHKQFGNEDWGEYLIQEAHLSQRFVFDQNGYYRCCGSIPFPGEQRA

SEQ ID NO: 50149 - protein, 454 aa, Arabidopsis thaliana
  peptide (1)..(454): Ceres Seq. ID no. 13588471
  misc_feature (283)..(454): Homolog of NCBI NO: 34904328 NR Description: unnamed protein product [Oryza sativa (japonica
  misc_feature (178)..(205): Homolog of NCBI NO: 9279705 NR Description: gene_id:MYA6.3~unknown protein [Arabidopsis
  misc_feature (259)..(449): Homolog of NCBI NO: 9279705 NR Description: gene_id:MYA6.3~unknown protein [Arabidopsis
  misc_feature (263)..(452): Homolog of NCBI NO: 34904330 NR Description: unnamed protein product [Oryza sativa (japonica
  misc_feature (178)..(205): Homolog of NCBI NO: 30683966 NR Description: expressed protein [Arabidopsis thaliana]
  misc_feature (259)..(449): Homolog of NCBI NO: 30683966 NR Description: expressed protein [Arabidopsis thaliana]
  misc_feature (1)..(147): Homolog of NCBI NO: 17065114 NR Description: Unknown protein [Arabidopsis thaliana]
  misc_feature (34)..(50): Homolog of NCBI NO: 9279706 NR Description: gene_id:MYA6.4~unknown protein [Arabidopsis
  misc_feature (108)..(454): Homolog of NCBI NO: 9279706 NR Description: gene_id:MYA6.4~unknown protein [Arabidopsis
  misc_feature (41)..(454): Homolog of NCBI NO: 15233319 NR Description: expressed protein [Arabidopsis thaliana]
MFAYRTLFRIDRVFGFTSRCFQSKPEYISILSFRGSEKSAMDGYKKQKMVNLVWRPISTQTSSVIAEAGNEVQEVAQCSKSSDVSKEVIEGETASVVSAGKHSVSLEVGASLIKFIRGKEGTTQMKLEEEMGVKIILPSSRNKDHISIEGGSVDCVTKASKRIATIIDEVVRSPSLDYSHFVSLPLAIHPELVDKLVNFQNSILGIHSIASDKQDDQANRATTSVAVDLKANSETNQVNVGIKSIPIVSYPPKAKSKSSTLLDLGIEKSIFIKPSTFHLTVVMLKLWNKDRVNAACDVLKSIFPSVMDALDNKPVFIRLKGLDCMRGPLDKTRVLYAPVEEIGDEGRLLRACRILDFKVITDAFVKAGLVLEKDAKQSLKLHVTVMNARHRKRRKNNKKKMETFDAREIHKQFGNEDWGEYLIQEAHLSQRFVFDQNGYYRCCGSIPFPGEQRA

SEQ ID NO: 50150 - protein, 414 aa, Arabidopsis thaliana
  peptide (1)..(414): Ceres Seq. ID no. 13588472
  misc_feature (222)..(408): Homolog of NCBI NO: 7705602 NR Description: CGI-18 protein [Homo sapiens]
  misc_feature (243)..(414): Homolog of NCBI NO: 34904328 NR Description: unnamed protein product [Oryza sativa (japonica
  misc_feature (138)..(165): Homolog of NCBI NO: 9279705 NR Description: gene_id:MYA6.3~unknown protein [Arabidopsis
  misc_feature (219)..(409): Homolog of NCBI NO: 9279705 NR Description: gene_id:MYA6.3~unknown protein [Arabidopsis
  misc_feature (223)..(412): Homolog of NCBI NO: 34904330 NR Description: unnamed protein product [Oryza sativa (japonica
  misc_feature (138)..(165): Homolog of NCBI NO: 30683966 NR Description: expressed protein [Arabidopsis thaliana]
  misc_feature (219)..(409): Homolog of NCBI NO: 30683966 NR Description: expressed protein [Arabidopsis thaliana]
  misc_feature (1)..(107): Homolog of NCBI NO: 17065114 NR Description: Unknown protein [Arabidopsis thaliana]
  misc_feature (68)..(414): Homolog of NCBI NO: 9279706 NR Description: gene_id:MYA6.4~unknown protein [Arabidopsis
  misc_feature (1)..(414): Homolog of NCBI NO: 15233319 NR Description: expressed protein [Arabidopsis thaliana]
MDGYKKQKMVNLVWRPISTQTSSVIAEAGNEVQEVAQCSKSSDVSKEVIEGETASVVSAGKHSVSLEVGASLIKFIRGKEGTTQMKLEEEMGVKIILPSSRNKDHISIEGGSVDCVTKASKRIATIIDEVVRSPSLDYSHFVSLPLAIHPELVDKLVNFQNSILGIHSIASDKQDDQANRATTSVAVDLKANSETNQVNVGIKSIPIVSYPPKAKSKSSTLLDLGIEKSIFIKPSTFHLTVVMLKLWNKDRVNAACDVLKSIFPSVMDALDNKPVFIRLKGLDCMRGPLDKTRVLYAPVEEIGDEGRLLRACRILDFKVITDAFVKAGLVLEKDAKQSLKLHVTVMNARHRKRRKNNKKKMETFDAREIHKQFGNEDWGEYLIQEAHLSQRFVFDQNGYYRCCGSIPFPGEQRA

SEQ ID NO: 50151 - DNA, 640 bp, Arabidopsis thaliana; identical to SEQ ID NO: 38920
  misc_feature (1)..(640): Ceres Seq. ID no. 12652846
  misc_feature: MA Experiment ID: 108434 Result: Down-regulated in Transcription
  misc_feature: MA Experiment 108434 PARAMETER Experiment Name: At_Root_Tips_cDNA_P Parameter: Tissue Value: Root Tips
  misc_feature: MA Experiment ID: 108462 Result: Up-regulated in Transcription
  misc_feature: MA Experiment 108462 PARAMETER Experiment Name: At_Germinating_Seeds_cDNA_P Parameter: Age (day) Value: 2 vs. 0
  misc_feature: MA Experiment 108462 PARAMETER Experiment Name: At_Germinating_Seeds_cDNA_P Parameter: Tissue Value: Germinating Seeds
  misc_feature: MA Experiment ID: 108488 Result: Up-regulated in Transcription
  misc_feature: MA Experiment ID: 108605 Result: Up-regulated in Transcription
  misc_feature: MA Experiment 108605 PARAMETER Experiment Name: At_100uM_ABA_cDNA_P Parameter: Timepoint (hr) Value: 6
  misc_feature: MA Experiment 108605 PARAMETER Experiment Name: At_100uM_ABA_cDNA_P Parameter: Tissue Value: Aerial
  misc_feature: MA Experiment 108605 PARAMETER Experiment Name: At_100uM_ABA_cDNA_P Parameter: Treatment Value: 100uM ABA vs. No Treatment
  misc_feature: MA Experiment ID: 20000169 Result: Up-regulated in Transcription
  misc_feature: MA Experiment 20000169 PARAMETER Experiment Name: At_100uM_ABA_P Parameter: Age (day) Value: 14
  misc_feature: MA Experiment 20000169 PARAMETER Experiment Name: At_100uM_ABA_P Parameter: Organism Value: A. thaliana
  misc_feature: MA Experiment 20000169 PARAMETER Experiment Name: At_100uM_ABA_P Parameter: Plant Line Value: WS
  misc_feature: MA Experiment 20000169 PARAMETER Experiment Name: At_100uM_ABA_P Parameter: Timepoint (hr) Value: 6
  misc_feature: MA Experiment 20000169 PARAMETER Experiment Name: At_100uM_ABA_P Parameter: Tissue Value: Aerial
  misc_feature: MA Experiment 20000169 PARAMETER Experiment Name: At_100uM_ABA_P Parameter: Treatment Value: 100uM ABA vs. No Treatment
  misc_feature: MA Experiment ID: 20000180 Result: Up-regulated in Transcription
  misc_feature: MA Experiment 20000180 PARAMETER Experiment Name: At_Germinating_Seeds_P Parameter: Age (hr) Value: 24 vs. 0
  misc_feature: MA Experiment 20000180 PARAMETER Experiment Name: At_Germinating_Seeds_P Parameter: Tissue Value: Germinating Seeds
  misc_feature: MA Experiment ID: 20000184 Result: Up-regulated in Transcription
  misc_feature: MA Experiment 20000184 PARAMETER Experiment Name: At_Shoots__P Parameter: Age (day) Value: 7
  misc_feature: MA Experiment 20000184 PARAMETER Experiment Name: At_Shoots__P Parameter: Tissue Value: Shoots vs. Whole Plant
  misc_feature: MA Experiment ID: 20000227 Result: Down-regulated in Transcription
  misc_feature: MA Experiment 20000227 PARAMETER Experiment Name: At_Root-Tips-vs-Tops_P Parameter: Tissue Value: Root Tips vs. Root Tops
  misc_feature: MA Experiment ID: 20000264 Result: Up-regulated in Transcription
  misc_feature: MA Experiment 20000264 PARAMETER Experiment Name: At_Open_Flower_P Parameter: Age (day) Value: 21
  misc_feature: MA Experiment 20000264 PARAMETER Experiment Name: At_Open_Flower_P Parameter: Plant Line Value: WS
  misc_feature: MA Experiment 20000264 PARAMETER Experiment Name: At_Open_Flower_P Parameter: Tissue Value: Open Flower vs. Whole Plant
  misc_feature: MA Experiment ID: 20000438 Result: Up-regulated in Transcription
  misc_feature: MA Experiment 20000438 PARAMETER Experiment Name: At_Shoots__P Parameter: Age (day) Value: 14
  misc_feature: MA Experiment 20000438 PARAMETER Experiment Name: At_Shoots__P Parameter: Tissue Value: Shoots vs. Whole Plant
  misc_feature: MA Experiment ID: 20000439 Result: Down-regulated in Transcription
  misc_feature: MA Experiment 20000439 PARAMETER Experiment Name: At_Roots__P Parameter: Age (day) Value: 14 vs. 21
  misc_feature: MA Experiment 20000439 PARAMETER Experiment Name: At_Roots__P Parameter: Organism Value: A. thaliana
  misc_feature: MA Experiment 20000439 PARAMETER Experiment Name: At_Roots__P Parameter: Tissue Value: Roots vs. Whole Plant
  misc_feature: MA Experiment ID: 20000451 Result: Up-regulated in Transcription
  misc_feature: MA Experiment 20000451 PARAMETER Experiment Name: At_CS6879_Shoots-Roots_P Parameter: Age (day) Value: 14
  misc_feature: MA Experiment 20000451 PARAMETER Experiment Name: At_CS6879_Shoots-Roots_P Parameter: Organism Value: A. thaliana
  misc_feature: MA Experiment 20000451 PARAMETER Experiment Name: At_CS6879_Shoots-Roots_P Parameter: Plant Line Value: CS6879 vs. WS
  misc_feature: MA Experiment 20000451 PARAMETER Experiment Name: At_CS6879_Shoots-Roots_P Parameter: Tissue Value: Roots
  misc_feature: MA Experiment ID: 20000794 Result: Up-regulated in Transcription
  misc_feature: MA Experiment 20000794 PARAMETER Experiment Name: At_Petals_P Parameter: Age (day) Value: 23-25 days
  misc_feature: MA Experiment 20000794 PARAMETER Experiment Name: At_Petals_P Parameter: Plant Line Value: WS
  misc_feature: MA Experiment 20000794 PARAMETER Experiment Name: At_Petals_P Parameter: Tissue Value: Petals vs. Whole plant
  misc_feature: MA Experiment ID: 20001555 Result: Up-regulated in Transcription
  misc_feature: MA Experiment 20001555 PARAMETER Experiment Name: At_Drought_Soil_Dry_P Parameter: Age (day) Value: 24
  misc_feature: MA Experiment 20001555 PARAMETER Experiment Name: At_Drought_Soil_Dry_P Parameter: Organism Value: A. thaliana
  misc_feature: MA Experiment 20001555 PARAMETER Experiment Name: At_Drought_Soil_Dry_P Parameter: Plant Line Value: WS
  misc_feature: MA Experiment 20001555 PARAMETER Experiment Name: At_Drought_Soil_Dry_P Parameter: Post Timepoint (hr) Value: None
  misc_feature: MA Experiment 20001555 PARAMETER Experiment Name: At_Drought_Soil_Dry_P Parameter: Post-Treatment Value: None
  misc_feature: MA Experiment 20001555 PARAMETER Experiment Name: At_Drought_Soil_Dry_P Parameter: Timepoint (day) Value: 10
  misc_feature: MA Experiment 20001555 PARAMETER Experiment Name: At_Drought_Soil_Dry_P Parameter: Treatment Value: Drought vs. No Drought
  misc_feature: MA Experiment ID: 20001556 Result: Up-regulated in Transcription
  misc_feature: MA Experiment 20001556 PARAMETER Experiment Name: At_Drought_Soil_Dry_P Parameter: Age (day) Value: 26
  misc_feature: MA Experiment 20001556 PARAMETER Experiment Name: At_Drought_Soil_Dry_P Parameter: Organism Value: A. thaliana
  misc_feature: MA Experiment 20001556 PARAMETER Experiment Name: At_Drought_Soil_Dry_P Parameter: Plant Line Value: WS
  misc_feature: MA Experiment 20001556 PARAMETER Experiment Name: At_Drought_Soil_Dry_P Parameter: Post Timepoint (hr) Value: None
  misc_feature: MA Experiment 20001556 PARAMETER Experiment Name: At_Drought_Soil_Dry_P Parameter: Post-Treatment Value: None
  misc_feature: MA Experiment 20001556 PARAMETER Experiment Name: At_Drought_Soil_Dry_P Parameter: Timepoint (day) Value: 12
  misc_feature: MA Experiment 20001556 PARAMETER Experiment Name: At_Drought_Soil_Dry_P Parameter: Treatment Value: Drought vs. No Drought
  misc_feature: MA Experiment ID: 20001559 Result: Up-regulated in Transcription
  misc_feature: MA Experiment 20001559 PARAMETER Experiment Name: At_Drought_Soil_Dry_P Parameter: Age (day) Value: 28
  misc_feature: MA Experiment 20001559 PARAMETER Experiment Name: At_Drought_Soil_Dry_P Parameter: Organism Value: A. thaliana
  misc_feature: MA Experiment 20001559 PARAMETER Experiment Name: At_Drought_Soil_Dry_P Parameter: Plant Line Value: WS
  misc_feature: MA Experiment 20001559 PARAMETER Experiment Name: At_Drought_Soil_Dry_P Parameter: Post Timepoint (hr) Value: 29
  misc_feature: MA Experiment 20001559 PARAMETER Experiment Name: At_Drought_Soil_Dry_P Parameter: Post-Treatment Value: Re-Water vs. No Drought
  misc_feature: MA Experiment 20001559 PARAMETER Experiment Name: At_Drought_Soil_Dry_P Parameter: Timepoint (day) Value: 14
  misc_feature: MA Experiment 20001559 PARAMETER Experiment Name: At_Drought_Soil_Dry_P Parameter: Treatment Value: Drought vs. No Drought
  misc_feature: MA Experiment ID: 20001560 Result: Up-regulated in Transcription
  misc_feature: MA Experiment 20001560 PARAMETER Experiment Name: At_Drought_Soil_Dry_P Parameter: Age (day) Value: 28
  misc_feature: MA Experiment 20001560 PARAMETER Experiment Name: At_Drought_Soil_Dry_P Parameter: Organism Value: A. thaliana
  misc_feature: MA Experiment 20001560 PARAMETER Experiment Name: At_Drought_Soil_Dry_P Parameter: Plant Line Value: WS
  misc_feature: MA Experiment 20001560 PARAMETER Experiment Name: At_Drought_Soil_Dry_P Parameter: Post Timepoint (hr) Value: None
  misc_feature: MA Experiment 20001560 PARAMETER Experiment Name: At_Drought_Soil_Dry_P Parameter: Post-Treatment Value: None
  misc_feature: MA Experiment 20001560 PARAMETER Experiment Name: At_Drought_Soil_Dry_P Parameter: Timepoint (day) Value: 14
  misc_feature: MA Experiment 20001560 PARAMETER Experiment Name: At_Drought_Soil_Dry_P Parameter: Treatment Value: Drought vs. No Drought
  misc_feature: MA Experiment ID: 20001904 Result: Up-regulated in Transcription
  misc_feature: MA Experiment 20001904 PARAMETER Experiment Name: At_Drought_Reproduction_P Parameter: Age (day) Value: 37
  misc_feature: MA Experiment 20001904 PARAMETER Experiment Name: At_Drought_Reproduction_P Parameter: Organism Value: A. thaliana
  misc_feature: MA Experiment 20001904 PARAMETER Experiment Name: At_Drought_Reproduction_P Parameter: Plant Line Value: WS
  misc_feature: MA Experiment 20001904 PARAMETER Experiment Name: At_Drought_Reproduction_P Parameter: Timepoint (day) Value: 7
  misc_feature: MA Experiment 20001904 PARAMETER Experiment Name: At_Drought_Reproduction_P Parameter: Tissue Value: Rosettes
  misc_feature: MA Experiment 20001904 PARAMETER Experiment Name: At_Drought_Reproduction_P Parameter: Treatment Value: Drought vs. No Drought

SEQ ID NO: 50152 - protein, 118 aa, Arabidopsis thaliana; identical to SEQ ID NO: 38921
  peptide (1)..(118): Ceres Seq. ID no. 12652847
  misc_feature (29)..(114): Pfam Name: Protease inhibitor/seed storage/LTP family Pfam Description: Protease inhibitor/seed storage/LTP family
  misc_feature (29)..(114): Pfam Name: Protease inhibitor/seed storage/LTP family Pfam Description: Protease inhibitor/seed storage/LTP family
  misc_feature (29)..(114): Pfam Name: Protease inhibitor/seed storage/LTP family Pfam Description: Protease inhibitor/seed storage/LTP family
  misc_feature (29)..(114): Pfam Name: Protease inhibitor/seed storage/LTP family Pfam Description: Protease inhibitor/seed storage/LTP family
  misc_feature (1)..(118): Homolog of NCBI NO: 5777389 NR Description: non-specific lipid transfer protein [Brassica
  misc_feature (1)..(118): Homolog of NCBI NO: 15224898 NR Description: putative nonspecific lipid-transfer protein
  misc_feature (1)..(118): Homolog of NCBI NO: 2497737 NR Description: NONSPECIFIC LIPID-TRANSFER PROTEIN 3 PRECURSOR
  misc_feature (1)..(118): Homolog of NCBI NO: 2497736 NR Description: NONSPECIFIC LIPID-TRANSFER PROTEIN 2 PRECURSOR
  misc_feature (1)..(118): Homolog of NCBI NO: 2497739 NR Description: NONSPECIFIC LIPID-TRANSFER PROTEIN B PRECURSOR
  misc_feature (1)..(118): Homolog of NCBI NO: 5777389 NR Description: non-specific lipid transfer protein [Brassica
  misc_feature (1)..(118): Homolog of NCBI NO: 2497737 NR Description: NONSPECIFIC LIPID-TRANSFER PROTEIN 3 PRECURSOR
  misc_feature (1)..(118): Homolog of NCBI NO: 2497739 NR Description: NONSPECIFIC LIPID-TRANSFER PROTEIN B PRECURSOR
  misc_feature (1)..(118): Homolog of NCBI NO: 2497736 NR Description: NONSPECIFIC LIPID-TRANSFER PROTEIN 2 PRECURSOR
  misc_feature (1)..(118): Homolog of NCBI NO: 2497737 NR Description: NONSPECIFIC LIPID-TRANSFER PROTEIN 3 PRECURSOR
  misc_feature (1)..(118): Homolog of NCBI NO: 15224898 NR Description: putative nonspecific lipid-transfer protein
  misc_feature (1)..(118): Homolog of NCBI NO: 5777389 NR Description: non-specific lipid transfer protein [Brassica
  misc_feature (1)..(118): Homolog of NCBI NO: 15224899 NR Description: putative nonspecific lipid-transfer protein
  misc_feature (1)..(118): Homolog of NCBI NO: 2497738 NR Description: NONSPECIFIC LIPID-TRANSFER PROTEIN A PRECURSOR
  misc_feature (1)..(118): Homolog of NCBI NO: 11273805 NR Description: lipid transfer protein [imported] - wild cabbage
  misc_feature (1)..(114): Homolog of NCBI NO: 7438295 NR Description: lipid transfer protein wax9C - broccoli
  misc_feature (1)..(118): Homolog of NCBI NO: 2497735 NR Description: NONSPECIFIC LIPID-TRANSFER PROTEIN 1 PRECURSOR
  misc_feature (1)..(118): Homolog of NCBI NO: 15224899 NR Description: putative nonspecific lipid-transfer protein
  misc_feature (1)..(118): Homolog of NCBI NO: 2497738 NR Description: NONSPECIFIC LIPID-TRANSFER PROTEIN A PRECURSOR
  misc_feature (1)..(118): Homolog of NCBI NO: 11273805 NR Description: lipid transfer protein [imported] - wild cabbage
  misc_feature (1)..(114): Homolog of NCBI NO: 7438295 NR Description: lipid transfer protein wax9C - broccoli
  misc_feature (1)..(118): Homolog of NCBI NO: 2497735 NR Description: NONSPECIFIC LIPID-TRANSFER PROTEIN 1 PRECURSOR
  misc_feature (1)..(118): Homolog of NCBI NO: 2497739 NR Description: NONSPECIFIC LIPID-TRANSFER PROTEIN B PRECURSOR
  misc_feature (1)..(118): Homolog of NCBI NO: 2497736 NR Description: NONSPECIFIC LIPID-TRANSFER PROTEIN 2 PRECURSOR
  misc_feature (1)..(118): Homolog of NCBI NO: 2497737 NR Description: NONSPECIFIC LIPID-TRANSFER PROTEIN 3 PRECURSOR
  misc_feature (1)..(118): Homolog of NCBI NO: 15224898 NR Description: putative nonspecific lipid-transfer protein
  misc_feature (1)..(118): Homolog of NCBI NO: 5777389 NR Description: non-specific lipid transfer protein [Brassica
  misc_feature (1)..(118): Homolog of NCBI NO: 15224899 NR Description: putative nonspecific lipid-transfer protein
  misc_feature (1)..(118): Homolog of NCBI NO: 2497738 NR Description: NONSPECIFIC LIPID-TRANSFER PROTEIN A PRECURSOR
  misc_feature (1)..(118): Homolog of NCBI NO: 11273805 NR Description: lipid transfer protein [imported] - wild cabbage
  misc_feature (1)..(114): Homolog of NCBI NO: 7438295 NR Description: lipid transfer protein wax9C - broccoli
  misc_feature (1)..(118): Homolog of NCBI NO: 2497735 NR Description: NONSPECIFIC LIPID-TRANSFER PROTEIN 1 PRECURSOR
  misc_feature (1)..(118): Homolog of NCBI NO: 2497739 NR Description: NONSPECIFIC LIPID-TRANSFER PROTEIN B PRECURSOR
  misc_feature (1)..(118): Homolog of NCBI NO: 2497736 NR Description: NONSPECIFIC LIPID-TRANSFER PROTEIN 2 PRECURSOR
  misc_feature (1)..(118): Homolog of NCBI NO: 15224898 NR Description: putative nonspecific lipid-transfer protein
  misc_feature (1)..(118): Homolog of NCBI NO: 2497735 NR Description: NONSPECIFIC LIPID-TRANSFER PROTEIN 1 PRECURSOR
  misc_feature (1)..(114): Homolog of NCBI NO: 7438295 NR Description: lipid transfer protein wax9C - broccoli
  misc_feature (1)..(118): Homolog of NCBI NO: 11273805 NR Description: lipid transfer protein [imported] - wild cabbage
  misc_feature (1)..(118): Homolog of NCBI NO: 2497738 NR Description: NONSPECIFIC LIPID-TRANSFER PROTEIN A PRECURSOR
  misc_feature (1)..(118): Homolog of NCBI NO: 15224899 NR Description: putative nonspecific lipid-transfer protein

SEQ ID NO: 50153 - protein, 114 aa, Arabidopsis thaliana; identical to SEQ ID NO: 38922
  peptide (1)..(114): Ceres Seq. ID no. 12652848
  misc_feature (25)..(110): Pfam Name: Protease inhibitor/seed storage/LTP family Pfam Description: Protease inhibitor/seed storage/LTP family
  misc_feature (25)..(110): Pfam Name: Protease inhibitor/seed storage/LTP family Pfam Description: Protease inhibitor/seed storage/LTP family
  misc_feature (25)..(110): Pfam Name: Protease inhibitor/seed storage/LTP family Pfam Description: Protease inhibitor/seed storage/LTP family
  misc_feature (25)..(110): Pfam Name: Protease inhibitor/seed storage/LTP family Pfam Description: Protease inhibitor/seed storage/LTP family
  misc_feature (1)..(114): Homolog of NCBI NO: 5777389 NR Description: non-specific lipid transfer protein [Brassica
  misc_feature (1)..(114): Homolog of NCBI NO: 15224898 NR Description: putative nonspecific lipid-transfer protein
  misc_feature (1)..(114): Homolog of NCBI NO: 2497737 NR Description: NONSPECIFIC LIPID-TRANSFER PROTEIN 3 PRECURSOR
  misc_feature (1)..(114): Homolog of NCBI NO: 2497736 NR Description: NONSPECIFIC LIPID-TRANSFER PROTEIN 2 PRECURSOR
  misc_feature (1)..(114): Homolog of NCBI NO: 2497739 NR Description: NONSPECIFIC LIPID-TRANSFER PROTEIN B PRECURSOR
  misc_feature (1)..(114): Homolog of NCBI NO: 5777389 NR Description: non-specific lipid transfer protein [Brassica
  misc_feature (1)..(114): Homolog of NCBI NO: 2497737 NR Description: NONSPECIFIC LIPID-TRANSFER PROTEIN 3 PRECURSOR
  misc_feature (1)..(114): Homolog of NCBI NO: 2497739 NR Description: NONSPECIFIC LIPID-TRANSFER PROTEIN B PRECURSOR
  misc_feature (1)..(114): Homolog of NCBI NO: 2497736 NR Description: NONSPECIFIC LIPID-TRANSFER PROTEIN 2 PRECURSOR
  misc_feature (1)..(114): Homolog of NCBI NO: 2497737 NR Description: NONSPECIFIC LIPID-TRANSFER PROTEIN 3 PRECURSOR
  misc_feature (1)..(114): Homolog of NCBI NO: 15224898 NR Description: putative nonspecific lipid-transfer protein
  misc_feature (1)..(114): Homolog of NCBI NO: 5777389 NR Description: non-specific lipid transfer protein [Brassica
  misc_feature (1)..(114): Homolog of NCBI NO: 15224899 NR Description: putative nonspecific lipid-transfer protein
  misc_feature (1)..(114): Homolog of NCBI NO: 2497738 NR Description: NONSPECIFIC LIPID-TRANSFER PROTEIN A PRECURSOR
  misc_feature (1)..(114): Homolog of NCBI NO: 11273805 NR Description: lipid transfer protein [imported] - wild cabbage
  misc_feature (1)..(110): Homolog of NCBI NO: 7438295 NR Description: lipid transfer protein wax9C - broccoli
  misc_feature (1)..(114): Homolog of NCBI NO: 2497735 NR Description: NONSPECIFIC LIPID-TRANSFER PROTEIN 1 PRECURSOR
  misc_feature (1)..(114): Homolog of NCBI NO: 15224899 NR Description: putative nonspecific lipid-transfer protein
  misc_feature (1)..(114): Homolog of NCBI NO: 2497738 NR Description: NONSPECIFIC LIPID-TRANSFER PROTEIN A PRECURSOR
  misc_feature (1)..(114): Homolog of NCBI NO: 11273805 NR Description: lipid transfer protein [imported] - wild cabbage
  misc_feature (1)..(110): Homolog of NCBI NO: 7438295 NR Description: lipid transfer protein wax9C - broccoli
  misc_feature (1)..(114): Homolog of NCBI NO: 2497735 NR Description: NONSPECIFIC LIPID-TRANSFER PROTEIN 1 PRECURSOR
  misc_feature (1)..(114): Homolog of NCBI NO: 2497739 NR Description: NONSPECIFIC LIPID-TRANSFER PROTEIN B PRECURSOR
  misc_feature (1)..(114): Homolog of NCBI NO: 2497736 NR Description: NONSPECIFIC LIPID-TRANSFER PROTEIN 2 PRECURSOR
  misc_feature (1)..(114): Homolog of NCBI NO: 2497737 NR Description: NONSPECIFIC LIPID-TRANSFER PROTEIN 3 PRECURSOR
  misc_feature (1)..(114): Homolog of NCBI NO: 15224898 NR Description: putative nonspecific lipid-transfer protein
  misc_feature (1)..(114): Homolog of NCBI NO: 5777389 NR Description: non-specific lipid transfer protein [Brassica
  misc_feature (1)..(114): Homolog of NCBI NO: 15224899 NR Description: putative nonspecific lipid-transfer protein
  misc_feature (1)..(114): Homolog of NCBI NO: 2497738 NR Description: NONSPECIFIC LIPID-TRANSFER PROTEIN A PRECURSOR
  misc_feature (1)..(114): Homolog of NCBI NO: 11273805 NR Description: lipid transfer protein [imported] - wild cabbage
  misc_feature (1)..(110): Homolog of NCBI NO: 7438295 NR Description: lipid transfer protein wax9C - broccoli
  misc_feature (1)..(114): Homolog of NCBI NO: 2497735 NR Description: NONSPECIFIC LIPID-TRANSFER PROTEIN 1 PRECURSOR
  misc_feature (1)..(114): Homolog of NCBI NO: 2497739 NR Description: NONSPECIFIC LIPID-TRANSFER PROTEIN B PRECURSOR
  misc_feature (1)..(114): Homolog of NCBI NO: 2497736 NR Description: NONSPECIFIC LIPID-TRANSFER PROTEIN 2 PRECURSOR
  misc_feature (1)..(114): Homolog of NCBI NO: 15224898 NR Description: putative nonspecific lipid-transfer protein
  misc_feature (1)..(114): Homolog of NCBI NO: 2497735 NR Description: NONSPECIFIC LIPID-TRANSFER PROTEIN 1 PRECURSOR
  misc_feature (1)..(110): Homolog of NCBI NO: 7438295 NR Description: lipid transfer protein wax9C - broccoli
  misc_feature (1)..(114): Homolog of NCBI NO: 11273805 NR Description: lipid transfer protein [imported] - wild cabbage
  misc_feature (1)..(114): Homolog of NCBI NO: 2497738 NR Description: NONSPECIFIC LIPID-TRANSFER PROTEIN A PRECURSOR
  misc_feature (1)..(114): Homolog of NCBI NO: 15224899 NR Description: putative nonspecific lipid-transfer protein

SEQ ID NO: 50154 - protein, 104 aa, Arabidopsis thaliana; identical to SEQ ID NO: 38923
  peptide (1)..(104): Ceres Seq. ID no. 12652849
  misc_feature (15)..(100): Pfam Name: Protease inhibitor/seed storage/LTP family Pfam Description: Protease inhibitor/seed storage/LTP family
  misc_feature (15)..(100): Pfam Name: Protease inhibitor/seed storage/LTP family Pfam Description: Protease inhibitor/seed storage/LTP family
  misc_feature (15)..(100): Pfam Name: Protease inhibitor/seed storage/LTP family Pfam Description: Protease inhibitor/seed storage/LTP family
  misc_feature (15)..(100): Pfam Name: Protease inhibitor/seed storage/LTP family Pfam Description: Protease inhibitor/seed storage/LTP family
  misc_feature (1)..(104): Homolog of NCBI NO: 5777389 NR Description: non-specific lipid transfer protein [Brassica
  misc_feature (1)..(104): Homolog of NCBI NO: 15224898 NR Description: putative nonspecific lipid-transfer protein
  misc_feature (1)..(104): Homolog of NCBI NO: 2497737 NR Description: NONSPECIFIC LIPID-TRANSFER PROTEIN 3 PRECURSOR
  misc_feature (1)..(104): Homolog of NCBI NO: 2497736 NR Description: NONSPECIFIC LIPID-TRANSFER PROTEIN 2 PRECURSOR
  misc_feature (1)..(104): Homolog of NCBI NO: 2497739 NR Description: NONSPECIFIC LIPID-TRANSFER PROTEIN B PRECURSOR
  misc_feature (1)..(104): Homolog of NCBI NO: 5777389 NR Description: non-specific lipid transfer protein [Brassica
  misc_feature (1)..(104): Homolog of NCBI NO: 2497737 NR Description: NONSPECIFIC LIPID-TRANSFER PROTEIN 3 PRECURSOR
  misc_feature (1)..(104): Homolog of NCBI NO: 2497739 NR Description: NONSPECIFIC LIPID-TRANSFER PROTEIN B PRECURSOR
  misc_feature (1)..(104): Homolog of NCBI NO: 2497736 NR Description: NONSPECIFIC LIPID-TRANSFER PROTEIN 2 PRECURSOR
  misc_feature (1)..(104): Homolog of NCBI NO: 2497737 NR Description: NONSPECIFIC LIPID-TRANSFER PROTEIN 3 PRECURSOR
  misc_feature (1)..(104): Homolog of NCBI NO: 15224898 NR Description: putative nonspecific lipid-transfer protein
  misc_feature (1)..(104): Homolog of NCBI NO: 5777389 NR Description: non-specific lipid transfer protein [Brassica
  misc_feature (1)..(104): Homolog of NCBI NO: 15224899 NR Description: putative nonspecific lipid-transfer protein
  misc_feature (1)..(104): Homolog of NCBI NO: 2497738 NR Description: NONSPECIFIC LIPID-TRANSFER PROTEIN A PRECURSOR
  misc_feature (1)..(104): Homolog of NCBI NO: 11273805 NR Description: lipid transfer protein [imported] - wild cabbage
  misc_feature (1)..(100): Homolog of NCBI NO: 7438295 NR Description: lipid transfer protein wax9C - broccoli
  misc_feature (1)..(104): Homolog of NCBI NO: 2497735 NR Description: NONSPECIFIC LIPID-TRANSFER PROTEIN 1 PRECURSOR
  misc_feature (1)..(104): Homolog of NCBI NO: 15224899 NR Description: putative nonspecific lipid-transfer protein
  misc_feature (1)..(104): Homolog of NCBI NO: 2497738 NR Description: NONSPECIFIC LIPID-TRANSFER PROTEIN A PRECURSOR
  misc_feature (1)..(104): Homolog of NCBI NO: 11273805 NR Description: lipid transfer protein [imported] - wild cabbage
  misc_feature (1)..(100): Homolog of NCBI NO: 7438295 NR Description: lipid transfer protein wax9C - broccoli
  misc_feature (1)..(104): Homolog of NCBI NO: 2497735 NR Description: NONSPECIFIC LIPID-TRANSFER PROTEIN 1 PRECURSOR
  misc_feature (1)..(104): Homolog of NCBI NO: 2497739 NR Description: NONSPECIFIC LIPID-TRANSFER PROTEIN B PRECURSOR
  misc_feature (1)..(104): Homolog of NCBI NO: 2497736 NR Description: NONSPECIFIC LIPID-TRANSFER PROTEIN 2 PRECURSOR
  misc_feature (1)..(104): Homolog of NCBI NO: 2497737 NR Description: NONSPECIFIC LIPID-TRANSFER PROTEIN 3 PRECURSOR
  misc_feature (1)..(104): Homolog of NCBI NO: 15224898 NR Description: putative nonspecific lipid-transfer protein
  misc_feature (1)..(104): Homolog of NCBI NO: 5777389 NR Description: non-specific lipid transfer protein [Brassica
  misc_feature (1)..(104): Homolog of NCBI NO: 15224899 NR Description: putative nonspecific lipid-transfer protein
  misc_feature (1)..(104): Homolog of NCBI NO: 2497738 NR Description: NONSPECIFIC LIPID-TRANSFER PROTEIN A PRECURSOR
  misc_feature (1)..(104): Homolog of NCBI NO: 11273805 NR Description: lipid transfer protein [imported] - wild cabbage
  misc_feature (1)..(100): Homolog of NCBI NO: 7438295 NR Description: lipid transfer protein wax9C - broccoli
  misc_feature (1)..(104): Homolog of NCBI NO: 2497735 NR Description: NONSPECIFIC LIPID-TRANSFER PROTEIN 1 PRECURSOR
  misc_feature (1)..(104): Homolog of NCBI NO: 2497739 NR Description: NONSPECIFIC LIPID-TRANSFER PROTEIN B PRECURSOR
  misc_feature (1)..(104): Homolog of NCBI NO: 2497736 NR Description: NONSPECIFIC LIPID-TRANSFER PROTEIN 2 PRECURSOR
  misc_feature (1)..(104): Homolog of NCBI NO: 15224898 NR Description: putative nonspecific lipid-transfer protein
  misc_feature (1)..(104): Homolog of NCBI NO: 2497735 NR Description: NONSPECIFIC LIPID-TRANSFER PROTEIN 1 PRECURSOR
  misc_feature (1)..(100): Homolog of NCBI NO: 7438295 NR Description: lipid transfer protein wax9C - broccoli
  misc_feature (1)..(104): Homolog of NCBI NO: 11273805 NR Description: lipid transfer protein [imported] - wild cabbage
  misc_feature (1)..(104): Homolog of NCBI NO: 2497738 NR Description: NONSPECIFIC LIPID-TRANSFER PROTEIN A PRECURSOR
  misc_feature (1)..(104): Homolog of NCBI NO: 15224899 NR Description: putative nonspecific lipid-transfer protein

SEQ ID NO: 50155 - DNA, 3798 bp, Arabidopsis thaliana; identical to SEQ ID NO: 45415
  misc_feature (1)..(3798): Ceres Seq. ID no. 13618884
  misc_feature: MA Experiment ID: 20000307 Result: Up-regulated in Transcription
  misc_feature: MA Experiment 20000307 PARAMETER Experiment Name: At_Germinating_Seeds_Sub_P Parameter: Age (hr) Value: 24 vs. 0
  misc_feature: MA Experiment 20000307 PARAMETER Experiment Name: At_Germinating_Seeds_Sub_P Parameter: Organism Value: A. thaliana
  misc_feature: MA Experiment 20000307 PARAMETER Experiment Name: At_Germinating_Seeds_Sub_P Parameter: Plant Line Value: WS
  misc_feature: MA Experiment 20000307 PARAMETER Experiment Name: At_Germinating_Seeds_Sub_P Parameter: Tissue Value: Germinating Seeds

SEQ ID NO: 50156 - protein, 1081 aa, Arabidopsis thaliana; identical to SEQ ID NO: 45416
  peptide (1)..(1081): Ceres Seq. ID no. 13618885
  misc_feature (746)..(1069): Homolog of NCBI NO: 13925884 NR Description: cellulose synthase D-like protein [Nicotiana
  misc_feature (35)..(105): Homolog of NCBI NO: 15217853 NR Description: cellulose synthase family [Arabidopsis thaliana]
  misc_feature (242)..(469): Homolog of NCBI NO: 15217853 NR Description: cellulose synthase family [Arabidopsis thaliana]
  misc_feature (518)..(1063): Homolog of NCBI NO: 15217853 NR Description: cellulose synthase family [Arabidopsis thaliana]
  misc_feature (230)..(469): Homolog of NCBI NO: 15237873 NR Description: cellulose synthase family [Arabidopsis thaliana]
  misc_feature (475)..(1075): Homolog of NCBI NO: 15237873 NR Description: cellulose synthase family [Arabidopsis thaliana]
  misc_feature (225)..(469): Homolog of NCBI NO: 27372782 NR Description: cellulose synthase-like protein D4 [Populus
  misc_feature (475)..(1063): Homolog of NCBI NO: 27372782 NR Description: cellulose synthase-like protein D4 [Populus
  misc_feature (230)..(469): Homolog of NCBI NO: 15228448 NR Description: cellulose synthase family [Arabidopsis thaliana]
  misc_feature (450)..(1063): Homolog of NCBI NO: 15228448 NR Description: cellulose synthase family [Arabidopsis thaliana]
  misc_feature (746)..(1069): Homolog of NCBI NO: 13925884 NR Description: cellulose synthase D-like protein [Nicotiana
  misc_feature (35)..(105): Homolog of NCBI NO: 15217853 NR Description: cellulose synthase family [Arabidopsis thaliana]
  misc_feature (242)..(469): Homolog of NCBI NO: 15217853 NR Description: cellulose synthase family [Arabidopsis thaliana]
  misc_feature (518)..(1063): Homolog of NCBI NO: 15217853 NR Description: cellulose synthase family [Arabidopsis thaliana]
  misc_feature (230)..(469): Homolog of NCBI NO: 15237873 NR Description: cellulose synthase family [Arabidopsis thaliana]
  misc_feature (475)..(1075): Homolog of NCBI NO: 15237873 NR Description: cellulose synthase family [Arabidopsis thaliana]
  misc_feature (225)..(469): Homolog of NCBI NO: 27372782 NR Description: cellulose synthase-like protein D4 [Populus
  misc_feature (475)..(1063): Homolog of NCBI NO: 27372782 NR Description: cellulose synthase-like protein D4 [Populus
  misc_feature (230)..(469): Homolog of NCBI NO: 15228448 NR Description: cellulose synthase family [Arabidopsis thaliana]
  misc_feature (450)..(1063): Homolog of NCBI NO: 15228448 NR Description: cellulose synthase family [Arabidopsis thaliana]
  misc_feature (746)..(1069): Homolog of NCBI NO: 13925884 NR Description: cellulose synthase D-like protein [Nicotiana
  misc_feature (35)..(105): Homolog of NCBI NO: 15217853 NR Description: cellulose synthase family [Arabidopsis thaliana]
  misc_feature (242)..(469): Homolog of NCBI NO: 15217853 NR Description: cellulose synthase family [Arabidopsis thaliana]
  misc_feature (518)..(1063): Homolog of NCBI NO: 15217853 NR Description: cellulose synthase family [Arabidopsis thaliana]
  misc_feature (230)..(469): Homolog of NCBI NO: 15237873 NR Description: cellulose synthase family [Arabidopsis thaliana]
  misc_feature (475)..(1075): Homolog of NCBI NO: 15237873 NR Description: cellulose synthase family [Arabidopsis thaliana]
  misc_feature (225)..(469): Homolog of NCBI NO: 27372782 NR Description: cellulose synthase-like protein D4 [Populus
  misc_feature (475)..(1063): Homolog of NCBI NO: 27372782 NR Description: cellulose synthase-like protein D4 [Populus
  misc_feature (230)..(469): Homolog of NCBI NO: 15228448 NR Description: cellulose synthase family [Arabidopsis thaliana]
  misc_feature (450)..(1063): Homolog of NCBI NO: 15228448 NR Description: cellulose synthase family [Arabidopsis thaliana]

SEQ ID NO: 50157 - protein, 1048 aa, Arabidopsis thaliana; identical to SEQ ID NO: 45417
  peptide (1)..(1048): Ceres Seq. ID no. 13618886
  misc_feature (713)..(1036): Homolog of NCBI NO: 13925884 NR Description: cellulose synthase D-like protein [Nicotiana
  misc_feature (2)..(72): Homolog of NCBI NO: 15217853 NR Description: cellulose synthase family [Arabidopsis thaliana]
  misc_feature (209)..(436): Homolog of NCBI NO: 15217853 NR Description: cellulose synthase family [Arabidopsis thaliana]
  misc_feature (485)..(1030): Homolog of NCBI NO: 15217853 NR Description: cellulose synthase family [Arabidopsis thaliana]
  misc_feature (197)..(436): Homolog of NCBI NO: 15237873 NR Description: cellulose synthase family [Arabidopsis thaliana]
  misc_feature (442)..(1042): Homolog of NCBI NO: 15237873 NR Description: cellulose synthase family [Arabidopsis thaliana]
  misc_feature (192)..(436): Homolog of NCBI NO: 27372782 NR Description: cellulose synthase-like protein D4 [Populus
  misc_feature (442)..(1030): Homolog of NCBI NO: 27372782 NR Description: cellulose synthase-like protein D4 [Populus
  misc_feature (197)..(436): Homolog of NCBI NO: 15228448 NR Description: cellulose synthase family [Arabidopsis thaliana]
  misc_feature (417)..(1030): Homolog of NCBI NO: 15228448 NR Description: cellulose synthase family [Arabidopsis thaliana]
  misc_feature (713)..(1036): Homolog of NCBI NO: 13925884 NR Description: cellulose synthase D-like protein [Nicotiana
  misc_feature (2)..(72): Homolog of NCBI NO: 15217853 NR Description: cellulose synthase family [Arabidopsis thaliana]
  misc_feature (209)..(436): Homolog of NCBI NO: 15217853 NR Description: cellulose synthase family [Arabidopsis thaliana]
  misc_feature (485)..(1030): Homolog of NCBI NO: 15217853 NR Description: cellulose synthase family [Arabidopsis thaliana]
  misc_feature (197)..(436): Homolog of NCBI NO: 15237873 NR Description: cellulose synthase family [Arabidopsis thaliana]
  misc_feature (442)..(1042): Homolog of NCBI NO: 15237873 NR Description: cellulose synthase family [Arabidopsis thaliana]
  misc_feature (192)..(436): Homolog of NCBI NO: 27372782 NR Description: cellulose synthase-like protein D4 [Populus
  misc_feature (442)..(1030): Homolog of NCBI NO: 27372782 NR Description: cellulose synthase-like protein D4 [Populus
  misc_feature (197)..(436): Homolog of NCBI NO: 15228448 NR Description: cellulose synthase family [Arabidopsis thaliana]
  misc_feature (417)..(1030): Homolog of NCBI NO: 15228448 NR Description: cellulose synthase family [Arabidopsis thaliana]
  misc_feature (713)..(1036): Homolog of NCBI NO: 13925884 NR Description: cellulose synthase D-like protein [Nicotiana
  misc_feature (2)..(72): Homolog of NCBI NO: 15217853 NR Description: cellulose synthase family [Arabidopsis thaliana]
  misc_feature (209)..(436): Homolog of NCBI NO: 15217853 NR Description: cellulose synthase family [Arabidopsis thaliana]
  misc_feature (485)..(1030): Homolog of NCBI NO: 15217853 NR Description: cellulose synthase family [Arabidopsis thaliana]
  misc_feature (197)..(436): Homolog of NCBI NO: 15237873 NR Description: cellulose synthase family [Arabidopsis thaliana]
  misc_feature (442)..(1042): Homolog of NCBI NO: 15237873 NR Description: cellulose synthase family [Arabidopsis thaliana]
  misc_feature (192)..(436): Homolog of NCBI NO: 27372782 NR Description: cellulose synthase-like protein D4 [Populus
  misc_feature (442)..(1030): Homolog of NCBI NO: 27372782 NR Description: cellulose synthase-like protein D4 [Populus
  misc_feature (197)..(436): Homolog of NCBI NO: 15228448 NR Description: cellulose synthase family [Arabidopsis thaliana]
  misc_feature (417)..(1030): Homolog of NCBI NO: 15228448 NR Description: cellulose synthase family [Arabidopsis thaliana]

SEQ ID NO: 50158 - protein, 857 aa, Arabidopsis thaliana; identical to SEQ ID NO: 45418
  peptide (1)..(857): Ceres Seq. ID no. 13618887
  misc_feature (1)..(245): Homolog of NCBI NO: 13925884 NR Description: cellulose synthase D-like protein [Nicotiana
  misc_feature (522)..(845): Homolog of NCBI NO: 13925884 NR Description: cellulose synthase D-like protein [Nicotiana
  misc_feature (18)..(245): Homolog of NCBI NO: 15217853 NR Description: cellulose synthase family [Arabidopsis thaliana]
  misc_feature (294)..(839): Homolog of NCBI NO: 15217853 NR Description: cellulose synthase family [Arabidopsis thaliana]
  misc_feature (6)..(245): Homolog of NCBI NO: 15237873 NR Description: cellulose synthase family [Arabidopsis thaliana]
  misc_feature (251)..(851): Homolog of NCBI NO: 15237873 NR Description: cellulose synthase family [Arabidopsis thaliana]
  misc_feature (1)..(245): Homolog of NCBI NO: 27372782 NR Description: cellulose synthase-like protein D4 [Populus
  misc_feature (251)..(839): Homolog of NCBI NO: 27372782 NR Description: cellulose synthase-like protein D4 [Populus
  misc_feature (6)..(245): Homolog of NCBI NO: 15228448 NR Description: cellulose synthase family [Arabidopsis thaliana]
  misc_feature (226)..(839): Homolog of NCBI NO: 15228448 NR Description: cellulose synthase family [Arabidopsis thaliana]
  misc_feature (1)..(245): Homolog of NCBI NO: 13925884 NR Description: cellulose synthase D-like protein [Nicotiana
  misc_feature (522)..(845): Homolog of NCBI NO: 13925884 NR Description: cellulose synthase D-like protein [Nicotiana
  misc_feature (18)..(245): Homolog of NCBI NO: 15217853 NR Description: cellulose synthase family [Arabidopsis thaliana]
  misc_feature (294)..(839): Homolog of NCBI NO: 15217853 NR Description: cellulose synthase family [Arabidopsis thaliana]
  misc_feature (6)..(245): Homolog of NCBI NO: 15237873 NR Description: cellulose synthase family [Arabidopsis thaliana]
  misc_feature (251)..(851): Homolog of NCBI NO: 15237873 NR Description: cellulose synthase family [Arabidopsis thaliana]
  misc_feature (1)..(245): Homolog of NCBI NO: 27372782 NR Description: cellulose synthase-like protein D4 [Populus
  misc_feature (251)..(839): Homolog of NCBI NO: 27372782 NR Description: cellulose synthase-like protein D4 [Populus
  misc_feature (6)..(245): Homolog of NCBI NO: 15228448 NR Description: cellulose synthase family [Arabidopsis thaliana]
  misc_feature (226)..(839): Homolog of NCBI NO: 15228448 NR Description: cellulose synthase family [Arabidopsis thaliana]
  misc_feature (1)..(245): Homolog of NCBI NO: 13925884 NR Description: cellulose synthase D-like protein [Nicotiana
  misc_feature (522)..(845): Homolog of NCBI NO: 13925884 NR Description: cellulose synthase D-like protein [Nicotiana
  misc_feature (18)..(245): Homolog of NCBI NO: 15217853 NR Description: cellulose synthase family [Arabidopsis thaliana]
  misc_feature (294)..(839): Homolog of NCBI NO: 15217853 NR Description: cellulose synthase family [Arabidopsis thaliana]
  misc_feature (6)..(245): Homolog of NCBI NO: 15237873 NR Description: cellulose synthase family [Arabidopsis thaliana]
  misc_feature (251)..(851): Homolog of NCBI NO: 15237873 NR Description: cellulose synthase family [Arabidopsis thaliana]
  misc_feature (1)..(245): Homolog of NCBI NO: 27372782 NR Description: cellulose synthase-like protein D4 [Populus
  misc_feature (251)..(839): Homolog of NCBI NO: 27372782 NR Description: cellulose synthase-like protein D4 [Populus
  misc_feature (6)..(245): Homolog of NCBI NO: 15228448 NR Description: cellulose synthase family [Arabidopsis thaliana]
  misc_feature (226)..(839): Homolog of NCBI NO: 15228448 NR Description: cellulose synthase family [Arabidopsis thaliana]

SEQ ID NO: 50159 - DNA, 923 bp, Arabidopsis thaliana
  misc_feature (1)..(923): Ceres Seq. ID no. 13647710
  misc_feature: MA Experiment ID: 20000171 Result: Down-regulated in Transcription
  misc_feature: MA Experiment 20000171 PARAMETER Experiment Name: At_42deg_Heat_P Parameter: Age (day) Value: 14
  misc_feature: MA Experiment 20000171 PARAMETER Experiment Name: At_42deg_Heat_P Parameter: Organism Value: A. thaliana
  misc_feature: MA Experiment 20000171 PARAMETER Experiment Name: At_42deg_Heat_P Parameter: Plant Line Value: WS
  misc_feature: MA Experiment 20000171 PARAMETER Experiment Name: At_42deg_Heat_P Parameter: Temperature (deg C) Value: 42 vs. 22
  misc_feature: MA Experiment 20000171 PARAMETER Experiment Name: At_42deg_Heat_P Parameter: Timepoint (hr) Value: 1
  misc_feature: MA Experiment 20000171 PARAMETER Experiment Name: At_42deg_Heat_P Parameter: Tissue Value: Aerial
  misc_feature: MA Experiment ID: 20000179 Result: Down-regulated in Transcription
  misc_feature: MA Experiment 20000179 PARAMETER Experiment Name: At_Germinating_Seeds_P Parameter: Age (hr) Value: 6 vs. 0
  misc_feature: MA Experiment 20000179 PARAMETER Experiment Name: At_Germinating_Seeds_P Parameter: Tissue Value: Germinating Seeds
  misc_feature: MA Experiment ID: 20000180 Result: Down-regulated in Transcription
  misc_feature: MA Experiment 20000180 PARAMETER Experiment Name: At_Germinating_Seeds_P Parameter: Age (hr) Value: 24 vs. 0
  misc_feature: MA Experiment 20000180 PARAMETER Experiment Name: At_Germinating_Seeds_P Parameter: Tissue Value: Germinating Seeds
  misc_feature: MA Experiment ID: 20000182 Result: Down-regulated in Transcription
  misc_feature: MA Experiment 20000182 PARAMETER Experiment Name: At_2mM_SA_P Parameter: Age (day) Value: 14
  misc_feature: MA Experiment 20000182 PARAMETER Experiment Name: At_2mM_SA_P Parameter: Organism Value: A. thaliana
  misc_feature: MA Experiment 20000182 PARAMETER Experiment Name: At_2mM_SA_P Parameter: Plant Line Value: WS
  misc_feature: MA Experiment 20000182 PARAMETER Experiment Name: At_2mM_SA_P Parameter: Timepoint (hr) Value: 6
  misc_feature: MA Experiment 20000182 PARAMETER Experiment Name: At_2mM_SA_P Parameter: Tissue Value: Aerial
  misc_feature: MA Experiment 20000182 PARAMETER Experiment Name: At_2mM_SA_P Parameter: Treatment Value: 2mM SA vs. No Treatment
  misc_feature: MA Experiment ID: 20000184 Result: Up-regulated in Transcription
  misc_feature: MA Experiment 20000184 PARAMETER Experiment Name: At_Shoots__P Parameter: Age (day) Value: 7
  misc_feature: MA Experiment 20000184 PARAMETER Experiment Name: At_Shoots__P Parameter: Tissue Value: Shoots vs. Whole Plant
  misc_feature: MA Experiment ID: 20000185 Result: Down-regulated in Transcription
  misc_feature: MA Experiment 20000185 PARAMETER Experiment Name: At_Roots__P Parameter: Age (day) Value: 7 vs. 21
  misc_feature: MA Experiment 20000185 PARAMETER Experiment Name: At_Roots__P Parameter: Organism Value: A. thaliana
  misc_feature: MA Experiment 20000185 PARAMETER Experiment Name: At_Roots__P Parameter: Tissue Value: Roots vs. Whole Plant
  misc_feature: MA Experiment ID: 20000234 Result: Down-regulated in Transcription
  misc_feature: MA Experiment 20000234 PARAMETER Experiment Name: At_Siliques_P Parameter: Age (day) Value: 21
  misc_feature: MA Experiment 20000234 PARAMETER Experiment Name: At_Siliques_P Parameter: Organism Value: A. thaliana
  misc_feature: MA Experiment 20000234 PARAMETER Experiment Name: At_Siliques_P Parameter: Plant Line Value: WS
  misc_feature: MA Experiment 20000234 PARAMETER Experiment Name: At_Siliques_P Parameter: Tissue Value: Less Than 5mm Siliques vs. Whole Plant
  misc_feature: MA Experiment ID: 20000264 Result: Down-regulated in Transcription
  misc_feature: MA Experiment 20000264 PARAMETER Experiment Name: At_Open_Flower_P Parameter: Age (day) Value: 21
  misc_feature: MA Experiment 20000264 PARAMETER Experiment Name: At_Open_Flower_P Parameter: Plant Line Value: WS
  misc_feature: MA Experiment 20000264 PARAMETER Experiment Name: At_Open_Flower_P Parameter: Tissue Value: Open Flower vs. Whole Plant
  misc_feature: MA Experiment ID: 20000265 Result: Down-regulated in Transcription
  misc_feature: MA Experiment 20000265 PARAMETER Experiment Name: At_Open_Flower_P Parameter: Age (day) Value: 21
  misc_feature: MA Experiment 20000265 PARAMETER Experiment Name: At_Open_Flower_P Parameter: Plant Line Value: WS
  misc_feature: MA Experiment 20000265 PARAMETER Experiment Name: At_Open_Flower_P Parameter: Tissue Value: Closed Flower vs. Whole Plant
  misc_feature: MA Experiment ID: 20000267 Result: Down-regulated in Transcription
  misc_feature: MA Experiment 20000267 PARAMETER Experiment Name: At_Drought_P Parameter: Age (day) Value: 7
  misc_feature: MA Experiment 20000267 PARAMETER Experiment Name: At_Drought_P Parameter: Organism Value: A. thaliana
  misc_feature: MA Experiment 20000267 PARAMETER Experiment Name: At_Drought_P Parameter: Plant Line Value: WS
  misc_feature: MA Experiment 20000267 PARAMETER Experiment Name: At_Drought_P Parameter: Timepoint (hr) Value: 6
  misc_feature: MA Experiment 20000267 PARAMETER Experiment Name: At_Drought_P Parameter: Tissue Value: Whole Plant
  misc_feature: MA Experiment 20000267 PARAMETER Experiment Name: At_Drought_P Parameter: Treatment Value: Drought vs. No Drought
  misc_feature: MA Experiment ID: 20000286 Result: Down-regulated in Transcription
  misc_feature: MA Experiment 20000286 PARAMETER Experiment Name: At_Open_Flower_P Parameter: Age (day) Value: 21
  misc_feature: MA Experiment 20000286 PARAMETER Experiment Name: At_Open_Flower_P Parameter: Plant Line Value: WS
  misc_feature: MA Experiment 20000286 PARAMETER Experiment Name: At_Open_Flower_P Parameter: Tissue Value: Half Open vs. Whole Plant
  misc_feature: MA Experiment ID: 20000288 Result: Down-regulated in Transcription
  misc_feature: MA Experiment 20000288 PARAMETER Experiment Name: At_Drought_P Parameter: Age (day) Value: 7
  misc_feature: MA Experiment 20000288 PARAMETER Experiment Name: At_Drought_P Parameter: Organism Value: A. thaliana
  misc_feature: MA Experiment 20000288 PARAMETER Experiment Name: At_Drought_P Parameter: Plant Line Value: WS
  misc_feature: MA Experiment 20000288 PARAMETER Experiment Name: At_Drought_P Parameter: Timepoint (hr) Value: 1
  misc_feature: MA Experiment 20000288 PARAMETER Experiment Name: At_Drought_P Parameter: Tissue Value: Whole Plant
  misc_feature: MA Experiment 20000288 PARAMETER Experiment Name: At_Drought_P Parameter: Treatment Value: Drought vs. No Drought
  misc_feature: MA Experiment ID: 20000436 Result: Down-regulated in Transcription
  misc_feature: MA Experiment 20000436 PARAMETER Experiment Name: At_Drought_P Parameter: Age (day) Value: 7
  misc_feature: MA Experiment 20000436 PARAMETER Experiment Name: At_Drought_P Parameter: Organism Value: A. thaliana
  misc_feature: MA Experiment 20000436 PARAMETER Experiment Name: At_Drought_P Parameter: Plant Line Value: WS
  misc_feature: MA Experiment 20000436 PARAMETER Experiment Name: At_Drought_P Parameter: Timepoint (hr) Value: 12
  misc_feature: MA Experiment 20000436 PARAMETER Experiment Name: At_Drought_P Parameter: Tissue Value: Whole Plant
  misc_feature: MA Experiment 20000436 PARAMETER Experiment Name: At_Drought_P Parameter: Treatment Value: Drought vs. No Drought
  misc_feature: MA Experiment ID: 20000437 Result: Down-regulated in Transcription
  misc_feature: MA Experiment 20000437 PARAMETER Experiment Name: At_Drought_P Parameter: Age (day) Value: 8
  misc_feature: MA Experiment 20000437 PARAMETER Experiment Name: At_Drought_P Parameter: Organism Value: A. thaliana
  misc_feature: MA Experiment 20000437 PARAMETER Experiment Name: At_Drought_P Parameter: Plant Line Value: WS
  misc_feature: MA Experiment 20000437 PARAMETER Experiment Name: At_Drought_P Parameter: Timepoint (hr) Value: 24
  misc_feature: MA Experiment 20000437 PARAMETER Experiment Name: At_Drought_P Parameter: Tissue Value: Whole Plant
  misc_feature: MA Experiment 20000437 PARAMETER Experiment Name: At_Drought_P Parameter: Treatment Value: Drought vs. No Drought
  misc_feature: MA Experiment ID: 20000439 Result: Down-regulated in Transcription
  misc_feature: MA Experiment 20000439 PARAMETER Experiment Name: At_Roots__P Parameter: Age (day) Value: 14 vs. 21
  misc_feature: MA Experiment 20000439 PARAMETER Experiment Name: At_Roots__P Parameter: Organism Value: A. thaliana
  misc_feature: MA Experiment 20000439 PARAMETER Experiment Name: At_Roots__P Parameter: Tissue Value: Roots vs. Whole Plant
  misc_feature: MA Experiment ID: 20000441 Result: Up-regulated in Transcription
  misc_feature: MA Experiment 20000441 PARAMETER Experiment Name: At_1uM_BR-BRZ__P Parameter: Tissue Value: Shoot Apices
  misc_feature: MA Experiment 20000441 PARAMETER Experiment Name: At_1uM_BR-BRZ__P Parameter: Treatment Value: 1uM BR vs. No Treatment
  misc_feature: MA Experiment ID: 20000444 Result: Up-regulated in Transcription
  misc_feature: MA Experiment 20000444 PARAMETER Experiment Name: At_100uM_NAA__P Parameter: Age (day) Value: 14
  misc_feature: MA Experiment 20000444 PARAMETER Experiment Name: At_100uM_NAA__P Parameter: Organism Value: A. thaliana
  misc_feature: MA Experiment 20000444 PARAMETER Experiment Name: At_100uM_NAA__P Parameter: Plant Line Value: WS
  misc_feature: MA Experiment 20000444 PARAMETER Experiment Name: At_100uM_NAA__P Parameter: Timepoint (hr) Value: 1
  misc_feature: MA Experiment 20000444 PARAMETER Experiment Name: At_100uM_NAA__P Parameter: Tissue Value: Aerial
  misc_feature: MA Experiment 20000444 PARAMETER Experiment Name: At_100uM_NAA__P Parameter: Treatment Value: 100uM NAA vs. No Treatment
  misc_feature: MA Experiment ID: 20000445 Result: Up-regulated in Transcription
  misc_feature: MA Experiment 20000445 PARAMETER Experiment Name: At_100uM_NAA__P Parameter: Age (day) Value: 14
  misc_feature: MA Experiment 20000445 PARAMETER Experiment Name: At_100uM_NAA__P Parameter: Organism Value: A. thaliana
  misc_feature: MA Experiment 20000445 PARAMETER Experiment Name: At_100uM_NAA__P Parameter: Plant Line Value: WS
  misc_feature: MA Experiment 20000445 PARAMETER Experiment Name: At_100uM_NAA__P Parameter: Timepoint (hr) Value: 6
  misc_feature: MA Experiment 20000445 PARAMETER Experiment Name: At_100uM_NAA__P Parameter: Tissue Value: Aerial
  misc_feature: MA Experiment 20000445 PARAMETER Experiment Name: At_100uM_NAA__P Parameter: Treatment Value: 100uM NAA vs. No Treatment
  misc_feature: MA Experiment ID: 20000452 Result: Up-regulated in Transcription
  misc_feature: MA Experiment 20000452 PARAMETER Experiment Name: At_CS6879_Shoots-Roots_P Parameter: Age (day) Value: 14
  misc_feature: MA Experiment 20000452 PARAMETER Experiment Name: At_CS6879_Shoots-Roots_P Parameter: Organism Value: A. thaliana
  misc_feature: MA Experiment 20000452 PARAMETER Experiment Name: At_CS6879_Shoots-Roots_P Parameter: Plant Line Value: CS6879 vs. WS
  misc_feature: MA Experiment 20000452 PARAMETER Experiment Name: At_CS6879_Shoots-Roots_P Parameter: Tissue Value: Shoots
  misc_feature: MA Experiment ID: 20000453 Result: Down-regulated in Transcription
  misc_feature: MA Experiment 20000453 PARAMETER Experiment Name: At_100uM_ABA_P Parameter: Age (day) Value: 15
  misc_feature: MA Experiment 20000453 PARAMETER Experiment Name: At_100uM_ABA_P Parameter: Organism Value: A. thaliana
  misc_feature: MA Experiment 20000453 PARAMETER Experiment Name: At_100uM_ABA_P Parameter: Plant Line Value: WS
  misc_feature: MA Experiment 20000453 PARAMETER Experiment Name: At_100uM_ABA_P Parameter: Timepoint (hr) Value: 24
  misc_feature: MA Experiment 20000453 PARAMETER Experiment Name: At_100uM_ABA_P Parameter: Tissue Value: Aerial
  misc_feature: MA Experiment 20000453 PARAMETER Experiment Name: At_100uM_ABA_P Parameter: Treatment Value: 100uM ABA vs. No Treatment
  misc_feature: MA Experiment ID: 20000455 Result: Down-regulated in Transcription
  misc_feature: MA Experiment 20000455 PARAMETER Experiment Name: At_100uM_ABA_P Parameter: Age (day) Value: 16
  misc_feature: MA Experiment 20000455 PARAMETER Experiment Name: At_100uM_ABA_P Parameter: Organism Value: A. thaliana
  misc_feature: MA Experiment 20000455 PARAMETER Experiment Name: At_100uM_ABA_P Parameter: Plant Line Value: WS
  misc_feature: MA Experiment 20000455 PARAMETER Experiment Name: At_100uM_ABA_P Parameter: Timepoint (hr) Value: 48
  misc_feature: MA Experiment 20000455 PARAMETER Experiment Name: At_100uM_ABA_P Parameter: Tissue Value: Aerial
  misc_feature: MA Experiment 20000455 PARAMETER Experiment Name: At_100uM_ABA_P Parameter: Treatment Value: 100uM ABA vs. No Treatment
  misc_feature: MA Experiment ID: 20000456 Result: Up-regulated in Transcription
  misc_feature: MA Experiment 20000456 PARAMETER Experiment Name: At_100uM_BA_P Parameter: Age (day) Value: 14
  misc_feature: MA Experiment 20000456 PARAMETER Experiment Name: At_100uM_BA_P Parameter: Organism Value: A. thaliana
  misc_feature: MA Experiment 20000456 PARAMETER Experiment Name: At_100uM_BA_P Parameter: Plant Line Value: WS
  misc_feature: MA Experiment 20000456 PARAMETER Experiment Name: At_100uM_BA_P Parameter: Timepoint (hr) Value: 6
  misc_feature: MA Experiment 20000456 PARAMETER Experiment Name: At_100uM_BA_P Parameter: Tissue Value: Aerial
  misc_feature: MA Experiment 20000456 PARAMETER Experiment Name: At_100uM_BA_P Parameter: Treatment Value: 100uM BA vs. No Treatment
  misc_feature: MA Experiment ID: 20000460 Result: Up-regulated in Transcription
  misc_feature: MA Experiment 20000460 PARAMETER Experiment Name: At_10percent_PEG_P Parameter: Age (day) Value: 12
  misc_feature: MA Experiment 20000460 PARAMETER Experiment Name: At_10percent_PEG_P Parameter: Organism Value: A. thaliana
  misc_feature: MA Experiment 20000460 PARAMETER Experiment Name: At_10percent_PEG_P Parameter: Plant Line Value: WS
  misc_feature: MA Experiment 20000460 PARAMETER Experiment Name: At_10percent_PEG_P Parameter: Timepoint (day) Value: 12
  misc_feature: MA Experiment 20000460 PARAMETER Experiment Name: At_10percent_PEG_P Parameter: Tissue Value: Whole Plant
  misc_feature: MA Experiment 20000460 PARAMETER Experiment Name: At_10percent_PEG_P Parameter: Treatment Value: 10percent PEG vs. No Treatment
  misc_feature: MA Experiment ID: 20000527 Result: Up-regulated in Transcription
  misc_feature: MA Experiment 20000527 PARAMETER Experiment Name: At_10percent_PEG_P Parameter: Age (day) Value: 20
  misc_feature: MA Experiment 20000527 PARAMETER Experiment Name: At_10percent_PEG_P Parameter: Organism Value: A. thaliana
  misc_feature: MA Experiment 20000527 PARAMETER Experiment Name: At_10percent_PEG_P Parameter: Plant Line Value: WS
  misc_feature: MA Experiment 20000527 PARAMETER Experiment Name: At_10percent_PEG_P Parameter: Timepoint (day) Value: 20
  misc_feature: MA Experiment 20000527 PARAMETER Experiment Name: At_10percent_PEG_P Parameter: Tissue Value: Whole Plant
  misc_feature: MA Experiment 20000527 PARAMETER Experiment Name: At_10percent_PEG_P Parameter: Treatment Value: 10percent PEG vs. No Treatment
  misc_feature: MA Experiment ID: 20000573 Result: Down-regulated in Transcription
  misc_feature: MA Experiment 20000573 PARAMETER Experiment Name: At_100uM_ABA_Mutants__P Parameter: Organism Value: A. thaliana
  misc_feature: MA Experiment 20000573 PARAMETER Experiment Name: At_100uM_ABA_Mutants__P Parameter: Plant Line Value: CS22 vs. Ler wt
  misc_feature: MA Experiment 20000573 PARAMETER Experiment Name: At_100uM_ABA_Mutants__P Parameter: Timepoint (hr) Value: N/A
  misc_feature: MA Experiment 20000573 PARAMETER Experiment Name: At_100uM_ABA_Mutants__P Parameter: Tissue Value: Whole Plant
  misc_feature: MA Experiment 20000573 PARAMETER Experiment Name: At_100uM_ABA_Mutants__P Parameter: Treatment Value: None
  misc_feature: MA Experiment ID: 20000574 Result: Down-regulated in Transcription
  misc_feature: MA Experiment 20000574 PARAMETER Experiment Name: At_100uM_ABA_Mutants__P Parameter: Organism Value: A. thaliana
  misc_feature: MA Experiment 20000574 PARAMETER Experiment Name: At_100uM_ABA_Mutants__P Parameter: Plant Line Value: CS23 vs. Ler wt
  misc_feature: MA Experiment 20000574 PARAMETER Experiment Name: At_100uM_ABA_Mutants__P Parameter: Timepoint (hr) Value: N/A
  misc_feature: MA Experiment 20000574 PARAMETER Experiment Name: At_100uM_ABA_Mutants__P Parameter: Tissue Value: Whole Plant
  misc_feature: MA Experiment 20000574 PARAMETER Experiment Name: At_100uM_ABA_Mutants__P Parameter: Treatment Value: None
  misc_feature: MA Experiment ID: 20000578 Result: Down-regulated in Transcription
  misc_feature: MA Experiment 20000578 PARAMETER Experiment Name: At_CS3726__P Parameter: Organism Value: A. thaliana
  misc_feature: MA Experiment 20000578 PARAMETER Experiment Name: At_CS3726__P Parameter: Plant Line Value: CS3726
  misc_feature: MA Experiment 20000578 PARAMETER Experiment Name: At_CS3726__P Parameter: Tissue Value: Whole Plant
  misc_feature: MA Experiment ID: 20000794 Result: Down-regulated in Transcription
  misc_feature: MA Experiment 20000794 PARAMETER Experiment Name: At_Petals_P Parameter: Age (day) Value: 23-25 days
  misc_feature: MA Experiment 20000794 PARAMETER Experiment Name: At_Petals_P Parameter: Plant Line Value: WS
  misc_feature: MA Experiment 20000794 PARAMETER Experiment Name: At_Petals_P Parameter: Tissue Value: Petals vs. Whole plant
  misc_feature: MA Experiment ID: 20001247 Result: Up-regulated in Transcription
  misc_feature: MA Experiment 20001247 PARAMETER Experiment Name: At_Far-red-induction_P Parameter: Age (day) Value: 7
  misc_feature: MA Experiment 20001247 PARAMETER Experiment Name: At_Far-red-induction_P Parameter: Light Value: Far-red vs. White
  misc_feature: MA Experiment 20001247 PARAMETER Experiment Name: At_Far-red-induction_P Parameter: Organism Value: A. thaliana
  misc_feature: MA Experiment 20001247 PARAMETER Experiment Name: At_Far-red-induction_P Parameter: Plant Line Value: Columbia
  misc_feature: MA Experiment 20001247 PARAMETER Experiment Name: At_Far-red-induction_P Parameter: Timepoint (hr) Value: 1
  misc_feature: MA Experiment 20001247 PARAMETER Experiment Name: At_Far-red-induction_P Parameter: Tissue Value: Whole Plant
  misc_feature: MA Experiment ID: 20001248 Result: Up-regulated in Transcription
  misc_feature: MA Experiment 20001248 PARAMETER Experiment Name: At_Far-red-induction_P Parameter: Age (day) Value: 7
  misc_feature: MA Experiment 20001248 PARAMETER Experiment Name: At_Far-red-induction_P Parameter: Light Value: Far-red vs. White
  misc_feature: MA Experiment 20001248 PARAMETER Experiment Name: At_Far-red-induction_P Parameter: Organism Value: A. thaliana
  misc_feature: MA Experiment 20001248 PARAMETER Experiment Name: At_Far-red-induction_P Parameter: Plant Line Value: Columbia
  misc_feature: MA Experiment 20001248 PARAMETER Experiment Name: At_Far-red-induction_P Parameter: Timepoint (hr) Value: 4
  misc_feature: MA Experiment 20001248 PARAMETER Experiment Name: At_Far-red-induction_P Parameter: Tissue Value: Whole Plant
  misc_feature: MA Experiment ID: 20001450 Result: Up-regulated in Transcription
  misc_feature: MA Experiment 20001450 PARAMETER Experiment Name: At_Far-red-induction_P Parameter: Age (day) Value: 7
  misc_feature: MA Experiment 20001450 PARAMETER Experiment Name: At_Far-red-induction_P Parameter: Light Value: Far-red vs. White
  misc_feature: MA Experiment 20001450 PARAMETER Experiment Name: At_Far-red-induction_P Parameter: Organism Value: A. thaliana
  misc_feature: MA Experiment 20001450 PARAMETER Experiment Name: At_Far-red-induction_P Parameter: Plant Line Value: Columbia
  misc_feature: MA Experiment 20001450 PARAMETER Experiment Name: At_Far-red-induction_P Parameter: Timepoint (hr) Value: 8
  misc_feature: MA Experiment 20001450 PARAMETER Experiment Name: At_Far-red-induction_P Parameter: Tissue Value: Whole Plant
  misc_feature: MA Experiment ID: 20001554 Result: Down-regulated in Transcription
  misc_feature: MA Experiment 20001554 PARAMETER Experiment Name: At_Drought_Soil_Dry_P Parameter: Age (day) Value: 21
  misc_feature: MA Experiment 20001554 PARAMETER Experiment Name: At_Drought_Soil_Dry_P Parameter: Organism Value: A. thaliana
  misc_feature: MA Experiment 20001554 PARAMETER Experiment Name: At_Drought_Soil_Dry_P Parameter: Plant Line Value: WS
  misc_feature: MA Experiment 20001554 PARAMETER Experiment Name: At_Drought_Soil_Dry_P Parameter: Post Timepoint (hr) Value: None
  misc_feature: MA Experiment 20001554 PARAMETER Experiment Name: At_Drought_Soil_Dry_P Parameter: Post-Treatment Value: None
  misc_feature: MA Experiment 20001554 PARAMETER Experiment Name: At_Drought_Soil_Dry_P Parameter: Timepoint (day) Value: 7
  misc_feature: MA Experiment 20001554 PARAMETER Experiment Name: At_Drought_Soil_Dry_P Parameter: Treatment Value: Drought vs. No Drought
  misc_feature: MA Experiment ID: 20001555 Result: Down-regulated in Transcription
  misc_feature: MA Experiment 20001555 PARAMETER Experiment Name: At_Drought_Soil_Dry_P Parameter: Age (day) Value: 24
  misc_feature: MA Experiment 20001555 PARAMETER Experiment Name: At_Drought_Soil_Dry_P Parameter: Organism Value: A. thaliana
  misc_feature: MA Experiment 20001555 PARAMETER Experiment Name: At_Drought_Soil_Dry_P Parameter: Plant Line Value: WS
  misc_feature: MA Experiment 20001555 PARAMETER Experiment Name: At_Drought_Soil_Dry_P Parameter: Post Timepoint (hr) Value: None
  misc_feature: MA Experiment 20001555 PARAMETER Experiment Name: At_Drought_Soil_Dry_P Parameter: Post-Treatment Value: None
  misc_feature: MA Experiment 20001555 PARAMETER Experiment Name: At_Drought_Soil_Dry_P Parameter: Timepoint (day) Value: 10
  misc_feature: MA Experiment 20001555 PARAMETER Experiment Name: At_Drought_Soil_Dry_P Parameter: Treatment Value: Drought vs. No Drought
  misc_feature: MA Experiment ID: 20001556 Result: Down-regulated in Transcription
  misc_feature: MA Experiment 20001556 PARAMETER Experiment Name: At_Drought_Soil_Dry_P Parameter: Age (day) Value: 26
  misc_feature: MA Experiment 20001556 PARAMETER Experiment Name: At_Drought_Soil_Dry_P Parameter: Organism Value: A. thaliana
  misc_feature: MA Experiment 20001556 PARAMETER Experiment Name: At_Drought_Soil_Dry_P Parameter: Plant Line Value: WS
  misc_feature: MA Experiment 20001556 PARAMETER Experiment Name: At_Drought_Soil_Dry_P Parameter: Post Timepoint (hr) Value: None
  misc_feature: MA Experiment 20001556 PARAMETER Experiment Name: At_Drought_Soil_Dry_P Parameter: Post-Treatment Value: None
  misc_feature: MA Experiment 20001556 PARAMETER Experiment Name: At_Drought_Soil_Dry_P Parameter: Timepoint (day) Value: 12
  misc_feature: MA Experiment 20001556 PARAMETER Experiment Name: At_Drought_Soil_Dry_P Parameter: Treatment Value: Drought vs. No Drought
  misc_feature: MA Experiment ID: 20001557 Result: Up-regulated in Transcription
  misc_feature: MA Experiment 20001557 PARAMETER Experiment Name: At_Drought_Soil_Dry_P Parameter: Age (day) Value: 27
  misc_feature: MA Experiment 20001557 PARAMETER Experiment Name: At_Drought_Soil_Dry_P Parameter: Organism Value: A. thaliana
  misc_feature: MA Experiment 20001557 PARAMETER Experiment Name: At_Drought_Soil_Dry_P Parameter: Plant Line Value: WS
  misc_feature: MA Experiment 20001557 PARAMETER Experiment Name: At_Drought_Soil_Dry_P Parameter: Post Timepoint (hr) Value: 3
  misc_feature: MA Experiment 20001557 PARAMETER Experiment Name: At_Drought_Soil_Dry_P Parameter: Post-Treatment Value: Re-Water vs. No Drought
  misc_feature: MA Experiment 20001557 PARAMETER Experiment Name: At_Drought_Soil_Dry_P Parameter: Timepoint (day) Value: 13
  misc_feature: MA Experiment 20001557 PARAMETER Experiment Name: At_Drought_Soil_Dry_P Parameter: Treatment Value: Drought vs. No Drought
  misc_feature: MA Experiment ID: 20001558 Result: Up-regulated in Transcription
  misc_feature: MA Experiment 20001558 PARAMETER Experiment Name: At_Drought_Soil_Dry_P Parameter: Age (day) Value: 27
  misc_feature: MA Experiment 20001558 PARAMETER Experiment Name: At_Drought_Soil_Dry_P Parameter: Organism Value: A. thaliana
  misc_feature: MA Experiment 20001558 PARAMETER Experiment Name: At_Drought_Soil_Dry_P Parameter: Plant Line Value: WS
  misc_feature: MA Experiment 20001558 PARAMETER Experiment Name: At_Drought_Soil_Dry_P Parameter: Post Timepoint (hr) Value: 6
  misc_feature: MA Experiment 20001558 PARAMETER Experiment Name: At_Drought_Soil_Dry_P Parameter: Post-Treatment Value: Re-Water vs. No Drought
  misc_feature: MA Experiment 20001558 PARAMETER Experiment Name: At_Drought_Soil_Dry_P Parameter: Timepoint (day) Value: 13
  misc_feature: MA Experiment 20001558 PARAMETER Experiment Name: At_Drought_Soil_Dry_P Parameter: Treatment Value: Drought vs. No Drought
  misc_feature: MA Experiment ID: 20001560 Result: Up-regulated in Transcription
  misc_feature: MA Experiment 20001560 PARAMETER Experiment Name: At_Drought_Soil_Dry_P Parameter: Age (day) Value: 28
  misc_feature: MA Experiment 20001560 PARAMETER Experiment Name: At_Drought_Soil_Dry_P Parameter: Organism Value: A. thaliana
  misc_feature: MA Experiment 20001560 PARAMETER Experiment Name: At_Drought_Soil_Dry_P Parameter: Plant Line Value: WS
  misc_feature: MA Experiment 20001560 PARAMETER Experiment Name: At_Drought_Soil_Dry_P Parameter: Post Timepoint (hr) Value: None
  misc_feature: MA Experiment 20001560 PARAMETER Experiment Name: At_Drought_Soil_Dry_P Parameter: Post-Treatment Value: None
  misc_feature: MA Experiment 20001560 PARAMETER Experiment Name: At_Drought_Soil_Dry_P Parameter: Timepoint (day) Value: 14
  misc_feature: MA Experiment 20001560 PARAMETER Experiment Name: At_Drought_Soil_Dry_P Parameter: Treatment Value: Drought vs. No Drought
  misc_feature: MA Experiment ID: 20001757 Result: Up-regulated in Transcription
  misc_feature: MA Experiment 20001757 PARAMETER Experiment Name: At_50mM_NH4NO3_L-to-H_P Parameter: Timepoint (hr) Value: 6
  misc_feature: MA Experiment 20001757 PARAMETER Experiment Name: At_50mM_NH4NO3_L-to-H_P Parameter: Tissue Value: Leaf
  misc_feature: MA Experiment 20001757 PARAMETER Experiment Name: At_50mM_NH4NO3_L-to-H_P Parameter: Treatment Value: 50mM NH4NO3 vs 100mM Mannitol
  misc_feature: MA Experiment ID: 20001769 Result: Up-regulated in Transcription
  misc_feature: MA Experiment 20001769 PARAMETER Experiment Name: At_Far-red-enriched-adult_P Parameter: Age (day) Value: 28
  misc_feature: MA Experiment 20001769 PARAMETER Experiment Name: At_Far-red-enriched-adult_P Parameter: Light Value: Far-red enriched vs. White
  misc_feature: MA Experiment 20001769 PARAMETER Experiment Name: At_Far-red-enriched-adult_P Parameter: Organism Value: A. thaliana
  misc_feature: MA Experiment 20001769 PARAMETER Experiment Name: At_Far-red-enriched-adult_P Parameter: Plant Line Value: Columbia
  misc_feature: MA Experiment 20001769 PARAMETER Experiment Name: At_Far-red-enriched-adult_P Parameter: Timepoint (hr) Value: 4
  misc_feature: MA Experiment 20001769 PARAMETER Experiment Name: At_Far-red-enriched-adult_P Parameter: Tissue Value: Aerial
  misc_feature: MA Experiment ID: 20001904 Result: Down-regulated in Transcription
  misc_feature: MA Experiment 20001904 PARAMETER Experiment Name: At_Drought_Reproduction_P Parameter: Age (day) Value: 37
  misc_feature: MA Experiment 20001904 PARAMETER Experiment Name: At_Drought_Reproduction_P Parameter: Organism Value: A. thaliana
  misc_feature: MA Experiment 20001904 PARAMETER Experiment Name: At_Drought_Reproduction_P Parameter: Plant Line Value: WS
  misc_feature: MA Experiment 20001904 PARAMETER Experiment Name: At_Drought_Reproduction_P Parameter: Timepoint (day) Value: 7
  misc_feature: MA Experiment 20001904 PARAMETER Experiment Name: At_Drought_Reproduction_P Parameter: Tissue Value: Rosettes
  misc_feature: MA Experiment 20001904 PARAMETER Experiment Name: At_Drought_Reproduction_P Parameter: Treatment Value: Drought vs. No Drought
agctcactagtcccccccccccccccgtccttcactctcatcattctttcttctttcaaaacatttccacaaacacaccaaactcacctgaaaccctatttccatttaccattcacactaatggcacgaccacaacaacgctttcgaggcgttagacagaggcattggggctcttgggtctccgaaattcgtcaccctctcttgaaaacaagaatctggctagggacgtttgagacagcggaggatgcagcaagggcctacgacgaggcggctaggctaatgtgtggcccgagagctcgtactaatttcccatacaaccctaatgccattcctacttcctcttccaagcttctatcagcaactcttaccgctaaactccacaaatgctacatggcttctcttcaaatgaccaagcaaacgcaaacacaaacgcaaacgcagaccgcaagatcacaatccgcggacagtgacggtgtgacggctaacgaaagtcatttgaacagaggagtaacggagacgacagagatcaagtgggaagatggaaatgcgaatatgcaacagaattttaggccattggaggaagatcatatcgagcaaatgattgaggagctgcttcactacggttccattgagctttgctctgttttaccaactcagacgctgtgagaaatggccttgtcgttttagcgtattcttttcatttttatttttgtttccacaaaaacggcgtcgtaagtgatgagagtagtagtgagagaaggctaatttcaagacattttgatctgaattggcctcttttgaaacactgattctagtttctataagagcaatcgatcatatgctatgttatgtatagtattataaaaaaatgttattttctgattaaaaaaaaaaaaaaaaaaactcgagggggggcccggttg

SEQ ID NO: 50160 - protein, 221 aa, Arabidopsis thaliana
  peptide (1)..(221): Ceres Seq. ID no. 13647711
  misc_feature (45)..(109): Pfam Name: AP2 domain Pfam Description: AP2 domain
  misc_feature (46)..(207): Homolog of NCBI NO: 30689846 NR Description: AP2 domain transcription factor, putative
  misc_feature (46)..(182): Homolog of NCBI NO: 15238976 NR Description: putative protein; protein id: At5g11190.1
  misc_feature (46)..(207): Homolog of NCBI NO: 15239413 NR Description: AP2 domain transcription factor, putative
  misc_feature (46)..(138): Homolog of NCBI NO: 21553845 NR Description: putative ethylene responsive element [Arabidopsis
  misc_feature (46)..(138): Homolog of NCBI NO: 15218134 NR Description: ethylene responsive element binding factor 2
  misc_feature (47)..(174): Homolog of NCBI NO: 38343976 NR Description: OSJNBb0022F16.15 [Oryza sativa (japonica
  misc_feature (41)..(199): Homolog of NCBI NO: 131754 NR Description: PPLZ02 PROTEIN
  misc_feature (165)..(221): Homolog of NCBI NO: 18650662 NR Description: ethylene response factor 1 [Lycopersicon
  misc_feature (41)..(145): Homolog of NCBI NO: 18650662 NR Description: ethylene response factor 1 [Lycopersicon
  misc_feature (41)..(221): Homolog of NCBI NO: 15238727 NR Description: ethylene responsive element binding protein,
SSLVPPPPPSFTLIILSSFKTFPQTHQTHLKPYFHLPFTLMARPQQRFRGVRQRHWGSWVSEIRHPLLKTRIWLGTFETAEDAARAYDEAARLMCGPRARTNFPYNPNAIPTSSSKLLSATLTAKLHKCYMASLQMTKQTQTQTQTQTARSQSADSDGVTANESHLNRGVTETTEIKWEDGNANMQQNFRPLEEDHIEQMIEELLHYGSIELCSVLPTQTL

SEQ ID NO: 50161 - protein, 181 aa, Arabidopsis thaliana
  peptide (1)..(181): Ceres Seq. ID no. 13647712
  misc_feature (5)..(69): Pfam Name: AP2 domain Pfam Description: AP2 domain
  misc_feature (6)..(167): Homolog of NCBI NO: 30689846 NR Description: AP2 domain transcription factor, putative
  misc_feature (6)..(142): Homolog of NCBI NO: 15238976 NR Description: putative protein; protein id: At5g11190.1
  misc_feature (6)..(167): Homolog of NCBI NO: 15239413 NR Description: AP2 domain transcription factor, putative
  misc_feature (6)..(98): Homolog of NCBI NO: 21553845 NR Description: putative ethylene responsive element [Arabidopsis
  misc_feature (6)..(98): Homolog of NCBI NO: 15218134 NR Description: ethylene responsive element binding factor 2
  misc_feature (7)..(134): Homolog of NCBI NO: 38343976 NR Description: OSJNBb0022F16.15 [Oryza sativa (japonica
  misc_feature (1)..(159): Homolog of NCBI NO: 131754 NR Description: PPLZ02 PROTEIN
  misc_feature (125)..(181): Homolog of NCBI NO: 18650662 NR Description: ethylene response factor 1 [Lycopersicon
  misc_feature (1)..(105): Homolog of NCBI NO: 18650662 NR Description: ethylene response factor 1 [Lycopersicon
  misc_feature (1)..(181): Homolog of NCBI NO: 15238727 NR Description: ethylene responsive element binding protein,
MARPQQRFRGVRQRHWGSWVSEIRHPLLKTRIWLGTFETAEDAARAYDEAARLMCGPRARTNFPYNPNAIPTSSSKLLSATLTAKLHKCYMASLQMTKQTQTQTQTQTARSQSADSDGVTANESHLNRGVTETTEIKWEDGNANMQQNFRPLEEDHIEQMIEELLHYGSIELCSVLPTQTL

SEQ ID NO: 50162 - protein, 128 aa, Arabidopsis thaliana
  peptide (1)..(128): Ceres Seq. ID no. 13647713
  misc_feature (1)..(114): Homolog of NCBI NO: 30689846 NR Description: AP2 domain transcription factor, putative
  misc_feature (1)..(89): Homolog of NCBI NO: 15238976 NR Description: putative protein; protein id: At5g11190.1
  misc_feature (1)..(114): Homolog of NCBI NO: 15239413 NR Description: AP2 domain transcription factor, putative
  misc_feature (1)..(45): Homolog of NCBI NO: 21553845 NR Description: putative ethylene responsive element [Arabidopsis
  misc_feature (1)..(45): Homolog of NCBI NO: 15218134 NR Description: ethylene responsive element binding factor 2
  misc_feature (1)..(81): Homolog of NCBI NO: 38343976 NR Description: OSJNBb0022F16.15 [Oryza sativa (japonica
  misc_feature (1)..(106): Homolog of NCBI NO: 131754 NR Description: PPLZ02 PROTEIN
  misc_feature (72)..(128): Homolog of NCBI NO: 18650662 NR Description: ethylene response factor 1 [Lycopersicon
  misc_feature (1)..(52): Homolog of NCBI NO: 18650662 NR Description: ethylene response factor 1 [Lycopersicon
  misc_feature (1)..(128): Homolog of NCBI NO: 15238727 NR Description: ethylene responsive element binding protein,
MCGPRARTNFPYNPNAIPTSSSKLLSATLTAKLHKCYMASLQMTKQTQTQTQTQTARSQSADSDGVTANESHLNRGVTETTEIKWEDGNANMQQNFRPLEEDHIEQMIEELLHYGSIELCSVLPTQTL

SEQ ID NO: 50163 - DNA, 833 bp, Arabidopsis thaliana; identical to SEQ ID NO: 48167
  misc_feature (1)..(833): Ceres Seq. ID no. 12591931
  misc_feature: MA Experiment ID: 20000234 Result: Up-regulated in Transcription
  misc_feature: MA Experiment 20000234 PARAMETER Experiment Name: At_Siliques_P Parameter: Age (day) Value: 21
  misc_feature: MA Experiment 20000234 PARAMETER Experiment Name: At_Siliques_P Parameter: Organism Value: A. thaliana
  misc_feature: MA Experiment 20000234 PARAMETER Experiment Name: At_Siliques_P Parameter: Plant Line Value: WS
  misc_feature: MA Experiment 20000234 PARAMETER Experiment Name: At_Siliques_P Parameter: Tissue Value: Less Than 5mm Siliques vs. Whole Plant
  misc_feature: MA Experiment ID: 20000235 Result: Up-regulated in Transcription
  misc_feature: MA Experiment 20000235 PARAMETER Experiment Name: At_Siliques_P Parameter: Age (day) Value: 21
  misc_feature: MA Experiment 20000235 PARAMETER Experiment Name: At_Siliques_P Parameter: Organism Value: A. thaliana
  misc_feature: MA Experiment 20000235 PARAMETER Experiment Name: At_Siliques_P Parameter: Plant Line Value: WS
  misc_feature: MA Experiment 20000235 PARAMETER Experiment Name: At_Siliques_P Parameter: Tissue Value: 5-10mm Siliques vs. Whole Plant
  misc_feature: MA Experiment ID: 20000269 Result: Down-regulated in Transcription
  misc_feature: MA Experiment 20000269 PARAMETER Experiment Name: At_1mM_KNO3_L-vs-H_Roots_P Parameter: Age (day) Value: 7,10,12
  misc_feature: MA Experiment 20000269 PARAMETER Experiment Name: At_1mM_KNO3_L-vs-H_Roots_P Parameter: Organism Value: A. thaliana
  misc_feature: MA Experiment 20000269 PARAMETER Experiment Name: At_1mM_KNO3_L-vs-H_Roots_P Parameter: Plant Line Value: WS
  misc_feature: MA Experiment 20000269 PARAMETER Experiment Name: At_1mM_KNO3_L-vs-H_Roots_P Parameter: Timepoint (day) Value: 7,10,12
  misc_feature: MA Experiment 20000269 PARAMETER Experiment Name: At_1mM_KNO3_L-vs-H_Roots_P Parameter: Tissue Value: Roots
  misc_feature: MA Experiment 20000269 PARAMETER Experiment Name: At_1mM_KNO3_L-vs-H_Roots_P Parameter: Treatment Value: 1mM KNO3 vs. 50mM KNO3
  misc_feature: MA Experiment ID: 20000437 Result: Down-regulated in Transcription
  misc_feature: MA Experiment 20000437 PARAMETER Experiment Name: At_Drought_P Parameter: Age (day) Value: 8
  misc_feature: MA Experiment 20000437 PARAMETER Experiment Name: At_Drought_P Parameter: Organism Value: A. thaliana
  misc_feature: MA Experiment 20000437 PARAMETER Experiment Name: At_Drought_P Parameter: Plant Line Value: WS
  misc_feature: MA Experiment 20000437 PARAMETER Experiment Name: At_Drought_P Parameter: Timepoint (hr) Value: 24
  misc_feature: MA Experiment 20000437 PARAMETER Experiment Name: At_Drought_P Parameter: Tissue Value: Whole Plant
  misc_feature: MA Experiment 20000437 PARAMETER Experiment Name: At_Drought_P Parameter: Treatment Value: Drought vs. No Drought
  misc_feature: MA Experiment ID: 20000445 Result: Down-regulated in Transcription
  misc_feature: MA Experiment 20000445 PARAMETER Experiment Name: At_100uM_NAA__P Parameter: Age (day) Value: 14
  misc_feature: MA Experiment 20000445 PARAMETER Experiment Name: At_100uM_NAA__P Parameter: Organism Value: A. thaliana
  misc_feature: MA Experiment 20000445 PARAMETER Experiment Name: At_100uM_NAA__P Parameter: Plant Line Value: WS
  misc_feature: MA Experiment 20000445 PARAMETER Experiment Name: At_100uM_NAA__P Parameter: Timepoint (hr) Value: 6
  misc_feature: MA Experiment 20000445 PARAMETER Experiment Name: At_100uM_NAA__P Parameter: Tissue Value: Aerial
  misc_feature: MA Experiment 20000445 PARAMETER Experiment Name: At_100uM_NAA__P Parameter: Treatment Value: 100uM NAA vs. No Treatment
  misc_feature: MA Experiment ID: 20000453 Result: Down-regulated in Transcription
  misc_feature: MA Experiment 20000453 PARAMETER Experiment Name: At_100uM_ABA_P Parameter: Age (day) Value: 15
  misc_feature: MA Experiment 20000453 PARAMETER Experiment Name: At_100uM_ABA_P Parameter: Organism Value: A. thaliana
  misc_feature: MA Experiment 20000453 PARAMETER Experiment Name: At_100uM_ABA_P Parameter: Plant Line Value: WS
  misc_feature: MA Experiment 20000453 PARAMETER Experiment Name: At_100uM_ABA_P Parameter: Timepoint (hr) Value: 24
  misc_feature: MA Experiment 20000453 PARAMETER Experiment Name: At_100uM_ABA_P Parameter: Tissue Value: Aerial
  misc_feature: MA Experiment 20000453 PARAMETER Experiment Name: At_100uM_ABA_P Parameter: Treatment Value: 100uM ABA vs. No Treatment
  misc_feature: MA Experiment ID: 20001248 Result: Down-regulated in Transcription
  misc_feature: MA Experiment 20001248 PARAMETER Experiment Name: At_Far-red-induction_P Parameter: Age (day) Value: 7
  misc_feature: MA Experiment 20001248 PARAMETER Experiment Name: At_Far-red-induction_P Parameter: Light Value: Far-red vs. White
  misc_feature: MA Experiment 20001248 PARAMETER Experiment Name: At_Far-red-induction_P Parameter: Organism Value: A. thaliana
  misc_feature: MA Experiment 20001248 PARAMETER Experiment Name: At_Far-red-induction_P Parameter: Plant Line Value: Columbia
  misc_feature: MA Experiment 20001248 PARAMETER Experiment Name: At_Far-red-induction_P Parameter: Timepoint (hr) Value: 4
  misc_feature: MA Experiment 20001248 PARAMETER Experiment Name: At_Far-red-induction_P Parameter: Tissue Value: Whole Plant
  misc_feature: MA Experiment ID: 20001770 Result: Down-regulated in Transcription
  misc_feature: MA Experiment 20001770 PARAMETER Experiment Name: At_Far-red-enriched-adult_P Parameter: Age (day) Value: 28
  misc_feature: MA Experiment 20001770 PARAMETER Experiment Name: At_Far-red-enriched-adult_P Parameter: Light Value: Far-red enriched vs. White
  misc_feature: MA Experiment 20001770 PARAMETER Experiment Name: At_Far-red-enriched-adult_P Parameter: Organism Value: A. thaliana
  misc_feature: MA Experiment 20001770 PARAMETER Experiment Name: At_Far-red-enriched-adult_P Parameter: Plant Line Value: Columbia
  misc_feature: MA Experiment 20001770 PARAMETER Experiment Name: At_Far-red-enriched-adult_P Parameter: Timepoint (hr) Value: 8
  misc_feature: MA Experiment 20001770 PARAMETER Experiment Name: At_Far-red-enriched-adult_P Parameter: Tissue Value: Aerial
  misc_feature: MA Experiment ID: 20001904 Result: Up-regulated in Transcription
  misc_feature: MA Experiment 20001904 PARAMETER Experiment Name: At_Drought_Reproduction_P Parameter: Age (day) Value: 37
  misc_feature: MA Experiment 20001904 PARAMETER Experiment Name: At_Drought_Reproduction_P Parameter: Organism Value: A. thaliana
  misc_feature: MA Experiment 20001904 PARAMETER Experiment Name: At_Drought_Reproduction_P Parameter: Plant Line Value: WS
  misc_feature: MA Experiment 20001904 PARAMETER Experiment Name: At_Drought_Reproduction_P Parameter: Timepoint (day) Value: 7
  misc_feature: MA Experiment 20001904 PARAMETER Experiment Name: At_Drought_Reproduction_P Parameter: Tissue Value: Rosettes
  misc_feature: MA Experiment 20001904 PARAMETER Experiment Name: At_Drought_Reproduction_P Parameter: Treatment Value: Drought vs. No Drought
  misc_feature: MA Experiment ID: 20001906 Result: Down-regulated in Transcription
  misc_feature: MA Experiment 20001906 PARAMETER Experiment Name: At_Drought_Reproduction_P Parameter: Age (day) Value: 35
  misc_feature: MA Experiment 20001906 PARAMETER Experiment Name: At_Drought_Reproduction_P Parameter: Organism Value: A. thaliana
  misc_feature: MA Experiment 20001906 PARAMETER Experiment Name: At_Drought_Reproduction_P Parameter: Plant Line Value: WS
  misc_feature: MA Experiment 20001906 PARAMETER Experiment Name: At_Drought_Reproduction_P Parameter: Timepoint (day) Value: 5
  misc_feature: MA Experiment 20001906 PARAMETER Experiment Name: At_Drought_Reproduction_P Parameter: Tissue Value: Siliques
  misc_feature: MA Experiment 20001906 PARAMETER Experiment Name: At_Drought_Reproduction_P Parameter: Treatment Value: Drought vs. No Drought

SEQ ID NO: 50164 - protein, 192 aa, Arabidopsis thaliana; identical to SEQ ID NO: 48168
  peptide (1)..(192): Ceres Seq. ID no. 12591932
  misc_feature (3)..(182): Homolog of NCBI NO: 32492063 NR Description: adenine phosphoribosyltransferase [Brassica napus]
  misc_feature (11)..(183): Homolog of NCBI NO: 40019121 NR Description: adenine phosphoribosyltransferase [Zea mays]
  misc_feature (6)..(183): Homolog of NCBI NO: 21536749 NR Description: adenine phosphoribosyltransferase (EC
  misc_feature (6)..(183): Homolog of NCBI NO: 15235709 NR Description: adenine phosphoribosyltransferase (EC 2.4.2.7) -
  misc_feature (11)..(183): Homolog of NCBI NO: 33354190 NR Description: putative adenine phosphoribosyl transferase
  misc_feature (5)..(183): Homolog of NCBI NO: 15234553 NR Description: putative adenine phosphoribosyltransferase
  misc_feature (5)..(183): Homolog of NCBI NO: 29826070 NR Description: adenine phosphoribosyltransferase form 2
  misc_feature (1)..(189): Homolog of NCBI NO: 15238973 NR Description: adenine phosphoribosyltransferase - like protein
  misc_feature (1)..(192): Homolog of NCBI NO: 1402894 NR Description: adenine phosphoribosyltransferase [Arabidopsis
  misc_feature (1)..(192): Homolog of NCBI NO: 15220047 NR Description: adenine phosphoribosyltransferase; protein id:
  misc_feature (3)..(182): Homolog of NCBI NO: 32492063 NR Description: adenine phosphoribosyltransferase [Brassica napus]
  misc_feature (11)..(183): Homolog of NCBI NO: 40019121 NR Description: adenine phosphoribosyltransferase [Zea mays]
  misc_feature (6)..(183): Homolog of NCBI NO: 21536749 NR Description: adenine phosphoribosyltransferase (EC
  misc_feature (6)..(183): Homolog of NCBI NO: 15235709 NR Description: adenine phosphoribosyltransferase (EC 2.4.2.7) -
  misc_feature (11)..(183): Homolog of NCBI NO: 33354190 NR Description: putative adenine phosphoribosyl transferase
  misc_feature (5)..(183): Homolog of NCBI NO: 15234553 NR Description: putative adenine phosphoribosyltransferase
  misc_feature (5)..(183): Homolog of NCBI NO: 29826070 NR Description: adenine phosphoribosyltransferase form 2
  misc_feature (1)..(189): Homolog of NCBI NO: 15238973 NR Description: adenine phosphoribosyltransferase - like protein
  misc_feature (1)..(192): Homolog of NCBI NO: 1402894 NR Description: adenine phosphoribosyltransferase [Arabidopsis
  misc_feature (1)..(192): Homolog of NCBI NO: 15220047 NR Description: adenine phosphoribosyltransferase; protein id:

SEQ ID NO: 50165 - protein, 160 aa, Arabidopsis thaliana; identical to SEQ ID NO: 48169
  peptide (1)..(160): Ceres Seq. ID no. 12591933
  misc_feature (1)..(150): Homolog of NCBI NO: 32492063 NR Description: adenine phosphoribosyltransferase [Brassica napus]
  misc_feature (1)..(151): Homolog of NCBI NO: 40019121 NR Description: adenine phosphoribosyltransferase [Zea mays]
  misc_feature (1)..(151): Homolog of NCBI NO: 21536749 NR Description: adenine phosphoribosyltransferase (EC
  misc_feature (1)..(151): Homolog of NCBI NO: 15235709 NR Description: adenine phosphoribosyltransferase (EC 2.4.2.7) -
  misc_feature (1)..(151): Homolog of NCBI NO: 33354190 NR Description: putative adenine phosphoribosyl transferase
  misc_feature (1)..(151): Homolog of NCBI NO: 15234553 NR Description: putative adenine phosphoribosyltransferase
  misc_feature (1)..(151): Homolog of NCBI NO: 29826070 NR Description: adenine phosphoribosyltransferase form 2
  misc_feature (1)..(157): Homolog of NCBI NO: 15238973 NR Description: adenine phosphoribosyltransferase - like protein
  misc_feature (1)..(160): Homolog of NCBI NO: 1402894 NR Description: adenine phosphoribosyltransferase [Arabidopsis
  misc_feature (1)..(160): Homolog of NCBI NO: 15220047 NR Description: adenine phosphoribosyltransferase; protein id:
  misc_feature (1)..(150): Homolog of NCBI NO: 32492063 NR Description: adenine phosphoribosyltransferase [Brassica napus]
  misc_feature (1)..(151): Homolog of NCBI NO: 40019121 NR Description: adenine phosphoribosyltransferase [Zea mays]
  misc_feature (1)..(151): Homolog of NCBI NO: 21536749 NR Description: adenine phosphoribosyltransferase (EC
  misc_feature (1)..(151): Homolog of NCBI NO: 15235709 NR Description: adenine phosphoribosyltransferase (EC 2.4.2.7) -
  misc_feature (1)..(151): Homolog of NCBI NO: 33354190 NR Description: putative adenine phosphoribosyl transferase
  misc_feature (1)..(151): Homolog of NCBI NO: 15234553 NR Description: putative adenine phosphoribosyltransferase
  misc_feature (1)..(151): Homolog of NCBI NO: 29826070 NR Description: adenine phosphoribosyltransferase form 2
  misc_feature (1)..(157): Homolog of NCBI NO: 15238973 NR Description: adenine phosphoribosyltransferase - like protein
  misc_feature (1)..(160): Homolog of NCBI NO: 1402894 NR Description: adenine phosphoribosyltransferase [Arabidopsis
  misc_feature (1)..(160): Homolog of NCBI NO: 15220047 NR Description: adenine phosphoribosyltransferase; protein id:

SEQ ID NO: 50166 - protein, 132 aa, Arabidopsis thaliana; identical to SEQ ID NO: 48170
  peptide (1)..(132): Ceres Seq. ID no. 12591934
  misc_feature (1)..(122): Homolog of NCBI NO: 32492063 NR Description: adenine phosphoribosyltransferase [Brassica napus]
  misc_feature (1)..(123): Homolog of NCBI NO: 40019121 NR Description: adenine phosphoribosyltransferase [Zea mays]
  misc_feature (1)..(123): Homolog of NCBI NO: 21536749 NR Description: adenine phosphoribosyltransferase (EC
  misc_feature (1)..(123): Homolog of NCBI NO: 15235709 NR Description: adenine phosphoribosyltransferase (EC 2.4.2.7) -
  misc_feature (1)..(123): Homolog of NCBI NO: 33354190 NR Description: putative adenine phosphoribosyl transferase
  misc_feature (1)..(123): Homolog of NCBI NO: 15234553 NR Description: putative adenine phosphoribosyltransferase
  misc_feature (1)..(123): Homolog of NCBI NO: 29826070 NR Description: adenine phosphoribosyltransferase form 2
  misc_feature (1)..(129): Homolog of NCBI NO: 15238973 NR Description: adenine phosphoribosyltransferase - like protein
  misc_feature (1)..(132): Homolog of NCBI NO: 1402894 NR Description: adenine phosphoribosyltransferase [Arabidopsis
  misc_feature (1)..(132): Homolog of NCBI NO: 15220047 NR Description: adenine phosphoribosyltransferase; protein id:
  misc_feature (1)..(122): Homolog of NCBI NO: 32492063 NR Description: adenine phosphoribosyltransferase [Brassica napus]
  misc_feature (1)..(123): Homolog of NCBI NO: 40019121 NR Description: adenine phosphoribosyltransferase [Zea mays]
  misc_feature (1)..(123): Homolog of NCBI NO: 21536749 NR Description: adenine phosphoribosyltransferase (EC
  misc_feature (1)..(123): Homolog of NCBI NO: 15235709 NR Description: adenine phosphoribosyltransferase (EC 2.4.2.7) -
  misc_feature (1)..(123): Homolog of NCBI NO: 33354190 NR Description: putative adenine phosphoribosyl transferase
  misc_feature (1)..(123): Homolog of NCBI NO: 15234553 NR Description: putative adenine phosphoribosyltransferase
  misc_feature (1)..(123): Homolog of NCBI NO: 29826070 NR Description: adenine phosphoribosyltransferase form 2
  misc_feature (1)..(129): Homolog of NCBI NO: 15238973 NR Description: adenine phosphoribosyltransferase - like protein
  misc_feature (1)..(132): Homolog of NCBI NO: 1402894 NR Description: adenine phosphoribosyltransferase [Arabidopsis
  misc_feature (1)..(132): Homolog of NCBI NO: 15220047 NR Description: adenine phosphoribosyltransferase; protein id:

SEQ ID NO: 50167 - DNA, 1622 bp, Arabidopsis thaliana
  misc_feature (1)..(1622): Ceres Seq. ID no. 13647929
  misc_feature: MA Experiment ID: 20000182 Result: Up-regulated in Transcription
  misc_feature: MA Experiment 20000182 PARAMETER Experiment Name: At_2mM_SA_P Parameter: Age (day) Value: 14
  misc_feature: MA Experiment 20000182 PARAMETER Experiment Name: At_2mM_SA_P Parameter: Organism Value: A. thaliana
  misc_feature: MA Experiment 20000182 PARAMETER Experiment Name: At_2mM_SA_P Parameter: Plant Line Value: WS
  misc_feature: MA Experiment 20000182 PARAMETER Experiment Name: At_2mM_SA_P Parameter: Timepoint (hr) Value: 6
  misc_feature: MA Experiment 20000182 PARAMETER Experiment Name: At_2mM_SA_P Parameter: Tissue Value: Aerial
  misc_feature: MA Experiment 20000182 PARAMETER Experiment Name: At_2mM_SA_P Parameter: Treatment Value: 2mM SA vs. No Treatment
  misc_feature: MA Experiment ID: 20000437 Result: Down-regulated in Transcription
  misc_feature: MA Experiment 20000437 PARAMETER Experiment Name: At_Drought_P Parameter: Age (day) Value: 8
  misc_feature: MA Experiment 20000437 PARAMETER Experiment Name: At_Drought_P Parameter: Organism Value: A. thaliana
  misc_feature: MA Experiment 20000437 PARAMETER Experiment Name: At_Drought_P Parameter: Plant Line Value: WS
  misc_feature: MA Experiment 20000437 PARAMETER Experiment Name: At_Drought_P Parameter: Timepoint (hr) Value: 24
  misc_feature: MA Experiment 20000437 PARAMETER Experiment Name: At_Drought_P Parameter: Tissue Value: Whole Plant
  misc_feature: MA Experiment 20000437 PARAMETER Experiment Name: At_Drought_P Parameter: Treatment Value: Drought vs. No Drought
  misc_feature: MA Experiment ID: 20000527 Result: Down-regulated in Transcription
  misc_feature: MA Experiment 20000527 PARAMETER Experiment Name: At_10percent_PEG_P Parameter: Age (day) Value: 20
  misc_feature: MA Experiment 20000527 PARAMETER Experiment Name: At_10percent_PEG_P Parameter: Organism Value: A. thaliana
  misc_feature: MA Experiment 20000527 PARAMETER Experiment Name: At_10percent_PEG_P Parameter: Plant Line Value: WS
  misc_feature: MA Experiment 20000527 PARAMETER Experiment Name: At_10percent_PEG_P Parameter: Timepoint (day) Value: 20
  misc_feature: MA Experiment 20000527 PARAMETER Experiment Name: At_10percent_PEG_P Parameter: Tissue Value: Whole Plant
  misc_feature: MA Experiment 20000527 PARAMETER Experiment Name: At_10percent_PEG_P Parameter: Treatment Value: 10percent PEG vs. No Treatment
  misc_feature: MA Experiment ID: 20001248 Result: Down-regulated in Transcription
  misc_feature: MA Experiment 20001248 PARAMETER Experiment Name: At_Far-red-induction_P Parameter: Age (day) Value: 7
  misc_feature: MA Experiment 20001248 PARAMETER Experiment Name: At_Far-red-induction_P Parameter: Light Value: Far-red vs. White
  misc_feature: MA Experiment 20001248 PARAMETER Experiment Name: At_Far-red-induction_P Parameter: Organism Value: A. thaliana
  misc_feature: MA Experiment 20001248 PARAMETER Experiment Name: At_Far-red-induction_P Parameter: Plant Line Value: Columbia
  misc_feature: MA Experiment 20001248 PARAMETER Experiment Name: At_Far-red-induction_P Parameter: Timepoint (hr) Value: 4
  misc_feature: MA Experiment 20001248 PARAMETER Experiment Name: At_Far-red-induction_P Parameter: Tissue Value: Whole Plant
  misc_feature: MA Experiment ID: 20001559 Result: Down-regulated in Transcription
  misc_feature: MA Experiment 20001559 PARAMETER Experiment Name: At_Drought_Soil_Dry_P Parameter: Age (day) Value: 28
  misc_feature: MA Experiment 20001559 PARAMETER Experiment Name: At_Drought_Soil_Dry_P Parameter: Organism Value: A. thaliana
  misc_feature: MA Experiment 20001559 PARAMETER Experiment Name: At_Drought_Soil_Dry_P Parameter: Plant Line Value: WS
  misc_feature: MA Experiment 20001559 PARAMETER Experiment Name: At_Drought_Soil_Dry_P Parameter: Post Timepoint (hr) Value: 29
  misc_feature: MA Experiment 20001559 PARAMETER Experiment Name: At_Drought_Soil_Dry_P Parameter: Post-Treatment Value: Re-Water vs. No Drought
  misc_feature: MA Experiment 20001559 PARAMETER Experiment Name: At_Drought_Soil_Dry_P Parameter: Timepoint (day) Value: 14
  misc_feature: MA Experiment 20001559 PARAMETER Experiment Name: At_Drought_Soil_Dry_P Parameter: Treatment Value: Drought vs. No Drought
  misc_feature: MA Experiment ID: 20001560 Result: Down-regulated in Transcription
  misc_feature: MA Experiment 20001560 PARAMETER Experiment Name: At_Drought_Soil_Dry_P Parameter: Age (day) Value: 28
  misc_feature: MA Experiment 20001560 PARAMETER Experiment Name: At_Drought_Soil_Dry_P Parameter: Organism Value: A. thaliana
  misc_feature: MA Experiment 20001560 PARAMETER Experiment Name: At_Drought_Soil_Dry_P Parameter: Plant Line Value: WS
  misc_feature: MA Experiment 20001560 PARAMETER Experiment Name: At_Drought_Soil_Dry_P Parameter: Post Timepoint (hr) Value: None
  misc_feature: MA Experiment 20001560 PARAMETER Experiment Name: At_Drought_Soil_Dry_P Parameter: Post-Treatment Value: None
  misc_feature: MA Experiment 20001560 PARAMETER Experiment Name: At_Drought_Soil_Dry_P Parameter: Timepoint (day) Value: 14
  misc_feature: MA Experiment 20001560 PARAMETER Experiment Name: At_Drought_Soil_Dry_P Parameter: Treatment Value: Drought vs. No Drought
  misc_feature: MA Experiment ID: 20001911 Result: Down-regulated in Transcription
  misc_feature: MA Experiment 20001911 PARAMETER Experiment Name: At_Drought_Reproduction_P Parameter: Age (day) Value: 40
  misc_feature: MA Experiment 20001911 PARAMETER Experiment Name: At_Drought_Reproduction_P Parameter: Organism Value: A. thaliana
  misc_feature: MA Experiment 20001911 PARAMETER Experiment Name: At_Drought_Reproduction_P Parameter: Plant Line Value: WS
  misc_feature: MA Experiment 20001911 PARAMETER Experiment Name: At_Drought_Reproduction_P Parameter: Timepoint (day) Value: 10
  misc_feature: MA Experiment 20001911 PARAMETER Experiment Name: At_Drought_Reproduction_P Parameter: Tissue Value: Flowers
  misc_feature: MA Experiment 20001911 PARAMETER Experiment Name: At_Drought_Reproduction_P Parameter: Treatment Value: Drought vs. No Drought
gattgacttgagaagaaccacaacaatgcctcgcctacaatgcctaacaatggcgacttcactaattctgctgcttcaagctctgagtttagtgagctcaactattctgtcccgggccgatcggatcacccgtttacccggtcaaccccgagtcgggtttcagcagtactcaggttatgtcactattgacgagaagaaacagagagctctgttttactacttggctgaagcagaaaccaaacccatctctaaacctctcgttctctggctcaatggaggacctggatgttcatcattaggtgttggtgcattctctgagaatggaccttttagaccaaagggatcaatcttggtgagaaatcaacacagctggaatcaagaggctaatatgttgtatctggagacacctgttggagttggattttcttatgcaaatgagagctcctcttatgagggtgtgaatgataagatcactgcaaaagacaatcttgtgttcttgcaaaaatggttcctcaaattccctcaatatctcaacagaagtctcttcatcactggtgaaagctatgctggccattatgttcctcagttggctcagcttatgattcagtacaacaagaagcacaatttgtttaatctcaaaggcattgctattggcaatccggttatggagtttgcaacggatttcaattcacgagcagagtatttctggtctcacgggttgatatcggatccaacttacaaattgttcacatcttcttgtaattactcgagatttttgagtgagtaccatagaggatcagtgtcgagtatgtgcactaaagtgctaagtcaagttggcatcgaaacaagtagattcatagacaaatatgacgttactcttgacgtctgcattccctctgtgctatctcaatccaaagtagttagccctcaacctcaacaagtgggagagacggtggatgtgtgtctagaagatgagacggtgaactatcttaaccggagagatgtgcaaaaagctctccacgctcggcttgtcggaactcgcaaatggactgtttgcagcgatgtgctggattacgaagtacttgatgtggaagtaccaacgataaatatcgtaggaagtcttgttaaagctggtgttccagtttttgtgtacagtggagatcaagactctgtgattccgttaaccggaagtagaacattagtgaagcgactggctgaagagttgggactaagaacaaccgtgccttatcgagtttggttcgcaggacaacaggttggtgggtggactcaagtttatgggaacacattggcgtttgccactgtgagaggagcagcccacgaggtaccattctcgcagcccgcgagagcgcttgtgttgtttaaagcattcttgggtggtcgtcctctccctgaagaattctaatgcgtttaccattttctgagcttgtaagtaaacattggtgaacaatgtcccaaaatggctatatttgattcacggcgagaaaaggaaatactacaaacattgtttgtagaatgtgtagaaatatcaatatgtattgttctttaagttttcaagatttttaaaagaaggatgtaaaaataaaaatctagtgtttaccgtc

SEQ ID NO: 50168 - protein, 473 aa, Arabidopsis thaliana
  peptide (1)..(473): Ceres Seq. ID no. 13647930
  misc_feature (46)..(466): Pfam Name: Serine carboxypeptidase Pfam Description: Serine carboxypeptidase
  misc_feature (37)..(471): Homolog of NCBI NO: 15232847 NR Description: serine carboxypeptidase -related [Arabidopsis
  misc_feature (27)..(472): Homolog of NCBI NO: 15238327 NR Description: serine carboxypeptidase -related [Arabidopsis
  misc_feature (20)..(472): Homolog of NCBI NO: 15224454 NR Description: serine carboxypeptidase -related [Arabidopsis
  misc_feature (17)..(470): Homolog of NCBI NO: 15238328 NR Description: serine carboxypeptidase -related [Arabidopsis
  misc_feature (40)..(472): Homolog of NCBI NO: 15218514 NR Description: serine carboxypeptidase -related [Arabidopsis
  misc_feature (40)..(473): Homolog of NCBI NO: 38347156 NR Description: OSJNBa0039C07.2 [Oryza sativa (japonica
  misc_feature (9)..(473): Homolog of NCBI NO: 25289785 NR Description: probable serine carboxypeptidase II
  misc_feature (9)..(473): Homolog of NCBI NO: 18396647 NR Description: serine carboxypeptidase -related [Arabidopsis
  misc_feature (9)..(473): Homolog of NCBI NO: 25289793 NR Description: probable serine carboxypeptidase II
  misc_feature (9)..(473): Homolog of NCBI NO: 30685740 NR Description: serine carboxypeptidase -related [Arabidopsis
IDLRRTTTMPRLQCLTMATSLILLLQALSLVSSTILSRADRITRLPGQPRVGFQQYSGYVTIDEKKQRALFYYLAEAETKPISKPLVLWLNGGPGCSSLGVGAFSENGPFRPKGSILVRNQHSWNQEANMLYLETPVGVGFSYANESSSYEGVNDKITAKDNLVFLQKWFLKFPQYLNRSLFITGESYAGHYVPQLAQLMIQYNKKHNLFNLKGIAIGNPVMEFATDFNSRAEYFWSHGLISDPTYKLFTSSCNYSRFLSEYHRGSVSSMCTKVLSQVGIETSRFIDKYDVTLDVCIPSVLSQSKVVSPQPQQVGETVDVCLEDETVNYLNRRDVQKALHARLVGTRKWTVCSDVLDYEVLDVEVPTINIVGSLVKAGVPVFVYSGDQDSVIPLTGSRTLVKRLAEELGLRTTVPYRVWFAGQQVGGWTQVYGNTLAFATVRGAAHEVPFSQPARALVLFKAFLGGRPLPEEF

SEQ ID NO: 50169 - protein, 465 aa, Arabidopsis thaliana
  peptide (1)..(465): Ceres Seq. ID no. 13647931
  misc_feature (38)..(458): Pfam Name: Serine carboxypeptidase Pfam Description: Serine carboxypeptidase
  misc_feature (29)..(463): Homolog of NCBI NO: 15232847 NR Description: serine carboxypeptidase -related [Arabidopsis
  misc_feature (19)..(464): Homolog of NCBI NO: 15238327 NR Description: serine carboxypeptidase -related [Arabidopsis
  misc_feature (12)..(464): Homolog of NCBI NO: 15224454 NR Description: serine carboxypeptidase -related [Arabidopsis
  misc_feature (9)..(462): Homolog of NCBI NO: 15238328 NR Description: serine carboxypeptidase -related [Arabidopsis
  misc_feature (32)..(464): Homolog of NCBI NO: 15218514 NR Description: serine carboxypeptidase -related [Arabidopsis
  misc_feature (32)..(465): Homolog of NCBI NO: 38347156 NR Description: OSJNBa0039C07.2 [Oryza sativa (japonica
  misc_feature (1)..(465): Homolog of NCBI NO: 25289785 NR Description: probable serine carboxypeptidase II
  misc_feature (1)..(465): Homolog of NCBI NO: 18396647 NR Description: serine carboxypeptidase -related [Arabidopsis
  misc_feature (1)..(465): Homolog of NCBI NO: 25289793 NR Description: probable serine carboxypeptidase II
  misc_feature (1)..(465): Homolog of NCBI NO: 30685740 NR Description: serine carboxypeptidase -related [Arabidopsis
MPRLQCLTMATSLILLLQALSLVSSTILSRADRITRLPGQPRVGFQQYSGYVTIDEKKQRALFYYLAEAETKPISKPLVLWLNGGPGCSSLGVGAFSENGPFRPKGSILVRNQHSWNQEANMLYLETPVGVGFSYANESSSYEGVNDKITAKDNLVFLQKWFLKFPQYLNRSLFITGESYAGHYVPQLAQLMIQYNKKHNLFNLKGIAIGNPVMEFATDFNSRAEYFWSHGLISDPTYKLFTSSCNYSRFLSEYHRGSVSSMCTKVLSQVGIETSRFIDKYDVTLDVCIPSVLSQSKVVSPQPQQVGETVDVCLEDETVNYLNRRDVQKALHARLVGTRKWTVCSDVLDYEVLDVEVPTINIVGSLVKAGVPVFVYSGDQDSVIPLTGSRTLVKRLAEELGLRTTVPYRVWFAGQQVGGWTQVYGNTLAFATVRGAAHEVPFSQPARALVLFKAFLGGRPLPEEF

SEQ ID NO: 50170 - protein, 457 aa, Arabidopsis thaliana
  peptide (1)..(457): Ceres Seq. ID no. 13647932
  misc_feature (30)..(450): Pfam Name: Serine carboxypeptidase Pfam Description: Serine carboxypeptidase
  misc_feature (21)..(455): Homolog of NCBI NO: 15232847 NR Description: serine carboxypeptidase -related [Arabidopsis
  misc_feature (11)..(456): Homolog of NCBI NO: 15238327 NR Description: serine carboxypeptidase -related [Arabidopsis
  misc_feature (4)..(456): Homolog of NCBI NO: 15224454 NR Description: serine carboxypeptidase -related [Arabidopsis
  misc_feature (1)..(454): Homolog of NCBI NO: 15238328 NR Description: serine carboxypeptidase -related [Arabidopsis
  misc_feature (24)..(456): Homolog of NCBI NO: 15218514 NR Description: serine carboxypeptidase -related [Arabidopsis
  misc_feature (24)..(457): Homolog of NCBI NO: 38347156 NR Description: OSJNBa0039C07.2 [Oryza sativa (japonica
  misc_feature (1)..(457): Homolog of NCBI NO: 25289785 NR Description: probable serine carboxypeptidase II
  misc_feature (1)..(457): Homolog of NCBI NO: 18396647 NR Description: serine carboxypeptidase -related [Arabidopsis
  misc_feature (1)..(457): Homolog of NCBI NO: 25289793 NR Description: probable serine carboxypeptidase II
  misc_feature (1)..(457): Homolog of NCBI NO: 30685740 NR Description: serine carboxypeptidase -related [Arabidopsis
MATSLILLLQALSLVSSTILSRADRITRLPGQPRVGFQQYSGYVTIDEKKQRALFYYLAEAETKPISKPLVLWLNGGPGCSSLGVGAFSENGPFRPKGSILVRNQHSWNQEANMLYLETPVGVGFSYANESSSYEGVNDKITAKDNLVFLQKWFLKFPQYLNRSLFITGESYAGHYVPQLAQLMIQYNKKHNLFNLKGIAIGNPVMEFATDFNSRAEYFWSHGLISDPTYKLFTSSCNYSRFLSEYHRGSVSSMCTKVLSQVGIETSRFIDKYDVTLDVCIPSVLSQSKVVSPQPQQVGETVDVCLEDETVNYLNRRDVQKALHARLVGTRKWTVCSDVLDYEVLDVEVPTINIVGSLVKAGVPVFVYSGDQDSVIPLTGSRTLVKRLAEELGLRTTVPYRVWFAGQQVGGWTQVYGNTLAFATVRGAAHEVPFSQPARALVLFKAFLGGRPLPEEF

SEQ ID NO: 50171 - DNA, 1610 bp, Arabidopsis thaliana
  misc_feature (1)..(1610): Ceres Seq. ID no. 12591935
  misc_feature: MA Experiment ID: 20000179 Result: Up-regulated in Transcription
  misc_feature: MA Experiment 20000179 PARAMETER Experiment Name: At_Germinating_Seeds_P Parameter: Age (hr) Value: 6 vs. 0
  misc_feature: MA Experiment 20000179 PARAMETER Experiment Name: At_Germinating_Seeds_P Parameter: Tissue Value: Germinating Seeds
  misc_feature: MA Experiment ID: 20000180 Result: Up-regulated in Transcription
  misc_feature: MA Experiment 20000180 PARAMETER Experiment Name: At_Germinating_Seeds_P Parameter: Age (hr) Value: 24 vs. 0
  misc_feature: MA Experiment 20000180 PARAMETER Experiment Name: At_Germinating_Seeds_P Parameter: Tissue Value: Germinating Seeds
  misc_feature: MA Experiment ID: 20000182 Result: Up-regulated in Transcription
  misc_feature: MA Experiment 20000182 PARAMETER Experiment Name: At_2mM_SA_P Parameter: Age (day) Value: 14
  misc_feature: MA Experiment 20000182 PARAMETER Experiment Name: At_2mM_SA_P Parameter: Organism Value: A. thaliana
  misc_feature: MA Experiment 20000182 PARAMETER Experiment Name: At_2mM_SA_P Parameter: Plant Line Value: WS
  misc_feature: MA Experiment 20000182 PARAMETER Experiment Name: At_2mM_SA_P Parameter: Timepoint (hr) Value: 6
  misc_feature: MA Experiment 20000182 PARAMETER Experiment Name: At_2mM_SA_P Parameter: Tissue Value: Aerial
  misc_feature: MA Experiment 20000182 PARAMETER Experiment Name: At_2mM_SA_P Parameter: Treatment Value: 2mM SA vs. No Treatment
  misc_feature: MA Experiment ID: 20000234 Result: Down-regulated in Transcription
  misc_feature: MA Experiment 20000234 PARAMETER Experiment Name: At_Siliques_P Parameter: Age (day) Value: 21
  misc_feature: MA Experiment 20000234 PARAMETER Experiment Name: At_Siliques_P Parameter: Organism Value: A. thaliana
  misc_feature: MA Experiment 20000234 PARAMETER Experiment Name: At_Siliques_P Parameter: Plant Line Value: WS
  misc_feature: MA Experiment 20000234 PARAMETER Experiment Name: At_Siliques_P Parameter: Tissue Value: Less Than 5mm Siliques vs. Whole Plant
  misc_feature: MA Experiment ID: 20000235 Result: Down-regulated in Transcription
  misc_feature: MA Experiment 20000235 PARAMETER Experiment Name: At_Siliques_P Parameter: Age (day) Value: 21
  misc_feature: MA Experiment 20000235 PARAMETER Experiment Name: At_Siliques_P Parameter: Organism Value: A. thaliana
  misc_feature: MA Experiment 20000235 PARAMETER Experiment Name: At_Siliques_P Parameter: Plant Line Value: WS
  misc_feature: MA Experiment 20000235 PARAMETER Experiment Name: At_Siliques_P Parameter: Tissue Value: 5-10mm Siliques vs. Whole Plant
  misc_feature: MA Experiment ID: 20000264 Result: Down-regulated in Transcription
  misc_feature: MA Experiment 20000264 PARAMETER Experiment Name: At_Open_Flower_P Parameter: Age (day) Value: 21
  misc_feature: MA Experiment 20000264 PARAMETER Experiment Name: At_Open_Flower_P Parameter: Plant Line Value: WS
  misc_feature: MA Experiment 20000264 PARAMETER Experiment Name: At_Open_Flower_P Parameter: Tissue Value: Open Flower vs. Whole Plant
  misc_feature: MA Experiment ID: 20000265 Result: Down-regulated in Transcription
  misc_feature: MA Experiment 20000265 PARAMETER Experiment Name: At_Open_Flower_P Parameter: Age (day) Value: 21
  misc_feature: MA Experiment 20000265 PARAMETER Experiment Name: At_Open_Flower_P Parameter: Plant Line Value: WS
  misc_feature: MA Experiment 20000265 PARAMETER Experiment Name: At_Open_Flower_P Parameter: Tissue Value: Closed Flower vs. Whole Plant
  misc_feature: MA Experiment ID: 20000286 Result: Down-regulated in Transcription
  misc_feature: MA Experiment 20000286 PARAMETER Experiment Name: At_Open_Flower_P Parameter: Age (day) Value: 21
  misc_feature: MA Experiment 20000286 PARAMETER Experiment Name: At_Open_Flower_P Parameter: Plant Line Value: WS
  misc_feature: MA Experiment 20000286 PARAMETER Experiment Name: At_Open_Flower_P Parameter: Tissue Value: Half Open vs. Whole Plant
  misc_feature: MA Experiment ID: 20001557 Result: Down-regulated in Transcription
  misc_feature: MA Experiment 20001557 PARAMETER Experiment Name: At_Drought_Soil_Dry_P Parameter: Age (day) Value: 27
  misc_feature: MA Experiment 20001557 PARAMETER Experiment Name: At_Drought_Soil_Dry_P Parameter: Organism Value: A. thaliana
  misc_feature: MA Experiment 20001557 PARAMETER Experiment Name: At_Drought_Soil_Dry_P Parameter: Plant Line Value: WS
  misc_feature: MA Experiment 20001557 PARAMETER Experiment Name: At_Drought_Soil_Dry_P Parameter: Post Timepoint (hr) Value: 3
  misc_feature: MA Experiment 20001557 PARAMETER Experiment Name: At_Drought_Soil_Dry_P Parameter: Post-Treatment Value: Re-Water vs. No Drought
  misc_feature: MA Experiment 20001557 PARAMETER Experiment Name: At_Drought_Soil_Dry_P Parameter: Timepoint (day) Value: 13
  misc_feature: MA Experiment 20001557 PARAMETER Experiment Name: At_Drought_Soil_Dry_P Parameter: Treatment Value: Drought vs. No Drought
  misc_feature: MA Experiment ID: 20001558 Result: Down-regulated in Transcription
  misc_feature: MA Experiment 20001558 PARAMETER Experiment Name: At_Drought_Soil_Dry_P Parameter: Age (day) Value: 27
  misc_feature: MA Experiment 20001558 PARAMETER Experiment Name: At_Drought_Soil_Dry_P Parameter: Organism Value: A. thaliana
  misc_feature: MA Experiment 20001558 PARAMETER Experiment Name: At_Drought_Soil_Dry_P Parameter: Plant Line Value: WS
  misc_feature: MA Experiment 20001558 PARAMETER Experiment Name: At_Drought_Soil_Dry_P Parameter: Post Timepoint (hr) Value: 6
  misc_feature: MA Experiment 20001558 PARAMETER Experiment Name: At_Drought_Soil_Dry_P Parameter: Post-Treatment Value: Re-Water vs. No Drought
  misc_feature: MA Experiment 20001558 PARAMETER Experiment Name: At_Drought_Soil_Dry_P Parameter: Timepoint (day) Value: 13
  misc_feature: MA Experiment 20001558 PARAMETER Experiment Name: At_Drought_Soil_Dry_P Parameter: Treatment Value: Drought vs. No Drought
  misc_feature: MA Experiment ID: 20001560 Result: Down-regulated in Transcription
  misc_feature: MA Experiment 20001560 PARAMETER Experiment Name: At_Drought_Soil_Dry_P Parameter: Age (day) Value: 28
  misc_feature: MA Experiment 20001560 PARAMETER Experiment Name: At_Drought_Soil_Dry_P Parameter: Organism Value: A. thaliana
  misc_feature: MA Experiment 20001560 PARAMETER Experiment Name: At_Drought_Soil_Dry_P Parameter: Plant Line Value: WS
  misc_feature: MA Experiment 20001560 PARAMETER Experiment Name: At_Drought_Soil_Dry_P Parameter: Post Timepoint (hr) Value: None
  misc_feature: MA Experiment 20001560 PARAMETER Experiment Name: At_Drought_Soil_Dry_P Parameter: Post-Treatment Value: None
  misc_feature: MA Experiment 20001560 PARAMETER Experiment Name: At_Drought_Soil_Dry_P Parameter: Timepoint (day) Value: 14
  misc_feature: MA Experiment 20001560 PARAMETER Experiment Name: At_Drought_Soil_Dry_P Parameter: Treatment Value: Drought vs. No Drought
  misc_feature: MA Experiment ID: 20001905 Result: Down-regulated in Transcription
  misc_feature: MA Experiment 20001905 PARAMETER Experiment Name: At_Drought_Reproduction_P Parameter: Age (day) Value: 40
  misc_feature: MA Experiment 20001905 PARAMETER Experiment Name: At_Drought_Reproduction_P Parameter: Organism Value: A. thaliana
  misc_feature: MA Experiment 20001905 PARAMETER Experiment Name: At_Drought_Reproduction_P Parameter: Plant Line Value: WS
  misc_feature: MA Experiment 20001905 PARAMETER Experiment Name: At_Drought_Reproduction_P Parameter: Timepoint (day) Value: 10
  misc_feature: MA Experiment 20001905 PARAMETER Experiment Name: At_Drought_Reproduction_P Parameter: Tissue Value: Rosettes
  misc_feature: MA Experiment 20001905 PARAMETER Experiment Name: At_Drought_Reproduction_P Parameter: Treatment Value: Drought vs. No Drought
agctctaaaatggtaatgaacgagaaactagagagtcaacggtcatagcgttgaccaaatctctcactctcaccagccaaatctctccaacttcctctttctctccacccaaatctcgccggcgatcgtcactgacgaatctgattcgtccccaacactcaacgggaggtagaagaatggcgactcctgttgatccacctaatggaattaggaatcaagggaagcattacttctcaatgtggcaaacacttttcgagatcgataccaaatacgtgcctatcaaaccgataggccgaggcgcgtacggtgtggtttgctcttcggttaacagagagagtaatgagagagtggcgatcaagaagatccacaatgtgtttgagaataggattgatgcgttgaggactcttagggagctcaagcttctacgtcatcttcgacatgagaatgtggttgctcttaaagatgtaatgatggctaatcataagagaagctttaaggatgtttatcttgtttatgagcttatggatactgatcttcatcagattattaagtcttctcaagttctaagtaatgaccattgccaatacttcttgttccagttgcttcgagggctcaagtatattcattcagcaaacattctccatcgggatctgaaacccggtaacctccttgtgaatgcaaactgcgacttaaagatatgtgactttgggctagcgaggacgagcaacaccaaaggtcagttcatgactgaatatgttgtgactagatggtaccgagcaccagagctactcctctgttgtgacaactatggaacctccattgatgtctggtcagtcggttgcatattcgccgagcttcttggaagaaaaccagtattcccgggaacagaatgtctaaaccagattaaactcatcattaacattttgggtagccagagagaggaagatctcgagtttatagataacccaaaagccaaaagatacatagaatcactcccttactcaccagggatatcattctctcgtctttacccgggtgcaaatgttttagccattgatctgcttcagaaaatgctcgttcttgacccttcgaaaaggattagtgtcacggaagcgcttcaacatccttacatggcgcctttatatgacccgagtgcaaatcctcctgctcaagttcctattgatctcgatgtagatgaagacgaggatttgggagcagagatgataagagaattaatgtggaaggaaatgattcattatcatccagaagctgctaccataaacaacaatgaggtctctgagttttgagatcaagtcttttgcaggtactgttcagagagatctttcaacaacttaaacttatttattttcatgtttgcttcttgaaatgttgttaataatagtgtcgaagaagaagaacaataactttaaattatgtgatatgtttgtgtcatggagctttgttttgtttttggttacaagcttaagtgtctgtaacgtttgtacataagtgtatgtgtccttaaaacttcatactctgtctctgatcttattgttggtgatttttcttattgaagattttcgaatgttcaaagagcaaaccattggatt

SEQ ID NO: 50172 - protein, 376 aa, Arabidopsis thaliana
  peptide (1)..(376): Ceres Seq. ID no. 12591936
  misc_feature (32)..(319): Pfam Name: Protein kinase domain Pfam Description: Protein kinase domain
  misc_feature (1)..(364): Homolog of NCBI NO: 7341300 NR Description: MAP kinase MAPK2 [Oryza sativa]
  misc_feature (1)..(369): Homolog of NCBI NO: 24412848 NR Description: putative mitogen-activated protein kinase, msrmk3
  misc_feature (1)..(369): Homolog of NCBI NO: 11869994 NR Description: MAP kinase 2 [Oryza sativa]
  misc_feature (1)..(366): Homolog of NCBI NO: 2499612 NR Description: MITOGEN-ACTIVATED PROTEIN KINASE HOMOLOG 1
  misc_feature (1)..(374): Homolog of NCBI NO: 8132347 NR Description: MAP kinase PsMAPK2 [Pisum sativum]
  misc_feature (1)..(367): Homolog of NCBI NO: 2499614 NR Description: MITOGEN-ACTIVATED PROTEIN KINASE HOMOLOG NTF3
  misc_feature (1)..(369): Homolog of NCBI NO: 533280 NR Description: ATMPK1 [Arabidopsis thaliana]
  misc_feature (1)..(369): Homolog of NCBI NO: 15218451 NR Description: putative mitogen-activated protein kinase, MAP
  misc_feature (1)..(376): Homolog of NCBI NO: 533281 NR Description: ATMPK2 [Arabidopsis thaliana]
  misc_feature (1)..(376): Homolog of NCBI NO: 18406388 NR Description: expressed protein
MATPVDPPNGIRNQGKHYFSMWQTLFEIDTKYVPIKPIGRGAYGVVCSSVNRESNERVAIKKIHNVFENRIDALRTLRELKLLRHLRHENVVALKDVMMANHKRSFKDVYLVYELMDTDLHQIIKSSQVLSNDHCQYFLFQLLRGLKYIHSANILHRDLKPGNLLVNANCDLKICDFGLARTSNTKGQFMTEYVVTRWYRAPELLLCCDNYGTSIDVWSVGCIFAELLGRKPVFPGTECLNQIKLIINILGSQREEDLEFIDNPKAKRYIESLPYSPGISFSRLYPGANVLAIDLLQKMLVLDPSKRISVTEALQHPYMAPLYDPSANPPAQVPIDLDVDEDEDLGAEMIRELMWKEMIHYHPEAATINNNEVSEF

SEQ ID NO: 50173 - protein, 356 aa, Arabidopsis thaliana
  peptide (1)..(356): Ceres Seq. ID no. 12591937
  misc_feature (12)..(299): Pfam Name: Protein kinase domain Pfam Description: Protein kinase domain
  misc_feature (1)..(344): Homolog of NCBI NO: 7341300 NR Description: MAP kinase MAPK2 [Oryza sativa]
  misc_feature (1)..(349): Homolog of NCBI NO: 24412848 NR Description: putative mitogen-activated protein kinase, msrmk3
  misc_feature (1)..(349): Homolog of NCBI NO: 11869994 NR Description: MAP kinase 2 [Oryza sativa]
  misc_feature (1)..(346): Homolog of NCBI NO: 2499612 NR Description: MITOGEN-ACTIVATED PROTEIN KINASE HOMOLOG 1
  misc_feature (1)..(354): Homolog of NCBI NO: 8132347 NR Description: MAP kinase PsMAPK2 [Pisum sativum]
  misc_feature (1)..(347): Homolog of NCBI NO: 2499614 NR Description: MITOGEN-ACTIVATED PROTEIN KINASE HOMOLOG NTF3
  misc_feature (1)..(349): Homolog of NCBI NO: 533280 NR Description: ATMPK1 [Arabidopsis thaliana]
  misc_feature (1)..(349): Homolog of NCBI NO: 15218451 NR Description: putative mitogen-activated protein kinase, MAP
  misc_feature (1)..(356): Homolog of NCBI NO: 533281 NR Description: ATMPK2 [Arabidopsis thaliana]
  misc_feature (1)..(356): Homolog of NCBI NO: 18406388 NR Description: expressed protein
MWQTLFEIDTKYVPIKPIGRGAYGVVCSSVNRESNERVAIKKIHNVFENRIDALRTLRELKLLRHLRHENVVALKDVMMANHKRSFKDVYLVYELMDTDLHQIIKSSQVLSNDHCQYFLFQLLRGLKYIHSANILHRDLKPGNLLVNANCDLKICDFGLARTSNTKGQFMTEYVVTRWYRAPELLLCCDNYGTSIDVWSVGCIFAELLGRKPVFPGTECLNQIKLIINILGSQREEDLEFIDNPKAKRYIESLPYSPGISFSRLYPGANVLAIDLLQKMLVLDPSKRISVTEALQHPYMAPLYDPSANPPAQVPIDLDVDEDEDLGAEMIRELMWKEMIHYHPEAATINNNEVSEF

SEQ ID NO: 50174 - protein, 279 aa, Arabidopsis thaliana
  peptide (1)..(279): Ceres Seq. ID no. 12591938
  misc_feature (1)..(222): Pfam Name: Protein kinase domain Pfam Description: Protein kinase domain
  misc_feature (1)..(267): Homolog of NCBI NO: 7341300 NR Description: MAP kinase MAPK2 [Oryza sativa]
  misc_feature (1)..(272): Homolog of NCBI NO: 24412848 NR Description: putative mitogen-activated protein kinase, msrmk3
  misc_feature (1)..(272): Homolog of NCBI NO: 11869994 NR Description: MAP kinase 2 [Oryza sativa]
  misc_feature (1)..(269): Homolog of NCBI NO: 2499612 NR Description: MITOGEN-ACTIVATED PROTEIN KINASE HOMOLOG 1
  misc_feature (1)..(277): Homolog of NCBI NO: 8132347 NR Description: MAP kinase PsMAPK2 [Pisum sativum]
  misc_feature (1)..(270): Homolog of NCBI NO: 2499614 NR Description: MITOGEN-ACTIVATED PROTEIN KINASE HOMOLOG NTF3
  misc_feature (1)..(272): Homolog of NCBI NO: 533280 NR Description: ATMPK1 [Arabidopsis thaliana]
  misc_feature (1)..(272): Homolog of NCBI NO: 15218451 NR Description: putative mitogen-activated protein kinase, MAP
  misc_feature (1)..(279): Homolog of NCBI NO: 533281 NR Description: ATMPK2 [Arabidopsis thaliana]
  misc_feature (1)..(279): Homolog of NCBI NO: 18406388 NR Description: expressed protein
MMANHKRSFKDVYLVYELMDTDLHQIIKSSQVLSNDHCQYFLFQLLRGLKYIHSANILHRDLKPGNLLVNANCDLKICDFGLARTSNTKGQFMTEYVVTRWYRAPELLLCCDNYGTSIDVWSVGCIFAELLGRKPVFPGTECLNQIKLIINILGSQREEDLEFIDNPKAKRYIESLPYSPGISFSRLYPGANVLAIDLLQKMLVLDPSKRISVTEALQHPYMAPLYDPSANPPAQVPIDLDVDEDEDLGAEMIRELMWKEMIHYHPEAATINNNEVSEF

SEQ ID NO: 50175 - DNA, 1349 bp, Arabidopsis thaliana; identical to SEQ ID NO: 38328
  misc_feature (1)..(1349): Ceres Seq. ID no. 13592504
  misc_feature: MA Experiment ID: 108434 Result: Up-regulated in Transcription
  misc_feature: MA Experiment 108434 PARAMETER Experiment Name: At_Root_Tips_cDNA_P Parameter: Tissue Value: Root Tips
  misc_feature: MA Experiment ID: 20001247 Result: Up-regulated in Transcription
  misc_feature: MA Experiment 20001247 PARAMETER Experiment Name: At_Far-red-induction_P Parameter: Age (day) Value: 7
  misc_feature: MA Experiment 20001247 PARAMETER Experiment Name: At_Far-red-induction_P Parameter: Light Value: Far-red vs. White
  misc_feature: MA Experiment 20001247 PARAMETER Experiment Name: At_Far-red-induction_P Parameter: Organism Value: A. thaliana
  misc_feature: MA Experiment 20001247 PARAMETER Experiment Name: At_Far-red-induction_P Parameter: Plant Line Value: Columbia
  misc_feature: MA Experiment 20001247 PARAMETER Experiment Name: At_Far-red-induction_P Parameter: Timepoint (hr) Value: 1
  misc_feature: MA Experiment 20001247 PARAMETER Experiment Name: At_Far-red-induction_P Parameter: Tissue Value: Whole Plant

SEQ ID NO: 50176 - protein, 327 aa, Arabidopsis thaliana; identical to SEQ ID NO: 38329
  peptide (1)..(327): Ceres Seq. ID no. 13592505
  misc_feature (54)..(303): Homolog of NCBI NO: 15964328 NR Description: RIBITOL TYPE DEHYDROGENASE PROTEIN [Sinorhizobium
  misc_feature (23)..(308): Homolog of NCBI NO: 39583655 NR Description: Hypothetical protein CBG08294 [Caenorhabditis
  misc_feature (22)..(307): Homolog of NCBI NO: 21356301 NR Description: CG10425-PA [Drosophila melanogaster]
  misc_feature (33)..(301): Homolog of NCBI NO: 34878781 NR Description: similar to 6330410P18Rik protein [Rattus
  misc_feature (24)..(301): Homolog of NCBI NO: 30585239 NR Description: Homo sapiens follicular lymphoma variant
  misc_feature (24)..(301): Homolog of NCBI NO: 4503817 NR Description: follicular lymphoma variant translocation 1 [Homo
  misc_feature (33)..(301): Homolog of NCBI NO: 27882572 NR Description: Similar to follicular lymphoma variant
  misc_feature (14)..(309): Homolog of NCBI NO: 15239681 NR Description: short-chain dehydrogenase/reductase family
  misc_feature (14)..(309): Homolog of NCBI NO: 30679701 NR Description: short-chain dehydrogenase/reductase family
  misc_feature (14)..(309): Homolog of NCBI NO: 7658344 NR Description: unknown protein; 15741-13972 [Arabidopsis
  misc_feature (54)..(303): Homolog of NCBI NO: 15964328 NR Description: RIBITOL TYPE DEHYDROGENASE PROTEIN [Sinorhizobium
  misc_feature (23)..(308): Homolog of NCBI NO: 39583655 NR Description: Hypothetical protein CBG08294 [Caenorhabditis
  misc_feature (22)..(307): Homolog of NCBI NO: 21356301 NR Description: CG10425-PA [Drosophila melanogaster]
  misc_feature (33)..(301): Homolog of NCBI NO: 34878781 NR Description: similar to 6330410P18Rik protein [Rattus
  misc_feature (24)..(301): Homolog of NCBI NO: 30585239 NR Description: Homo sapiens follicular lymphoma variant
  misc_feature (24)..(301): Homolog of NCBI NO: 4503817 NR Description: follicular lymphoma variant translocation 1 [Homo
  misc_feature (33)..(301): Homolog of NCBI NO: 27882572 NR Description: Similar to follicular lymphoma variant
  misc_feature (14)..(309): Homolog of NCBI NO: 15239681 NR Description: short-chain dehydrogenase/reductase family
  misc_feature (14)..(309): Homolog of NCBI NO: 30679701 NR Description: short-chain dehydrogenase/reductase family
  misc_feature (14)..(309): Homolog of NCBI NO: 7658344 NR Description: unknown protein; 15741-13972 [Arabidopsis

SEQ ID NO: 50177 - protein, 314 aa, Arabidopsis thaliana; identical to SEQ ID NO: 38330
  peptide (1)..(314): Ceres Seq. ID no. 13592506
  misc_feature (41)..(290): Homolog of NCBI NO: 15964328 NR Description: RIBITOL TYPE DEHYDROGENASE PROTEIN [Sinorhizobium
  misc_feature (10)..(295): Homolog of NCBI NO: 39583655 NR Description: Hypothetical protein CBG08294 [Caenorhabditis
  misc_feature (9)..(294): Homolog of NCBI NO: 21356301 NR Description: CG10425-PA [Drosophila melanogaster]
  misc_feature (20)..(288): Homolog of NCBI NO: 34878781 NR Description: similar to 6330410P18Rik protein [Rattus
  misc_feature (11)..(288): Homolog of NCBI NO: 30585239 NR Description: Homo sapiens follicular lymphoma variant
  misc_feature (11)..(288): Homolog of NCBI NO: 4503817 NR Description: follicular lymphoma variant translocation 1 [Homo
  misc_feature (20)..(288): Homolog of NCBI NO: 27882572 NR Description: Similar to follicular lymphoma variant
  misc_feature (1)..(296): Homolog of NCBI NO: 15239681 NR Description: short-chain dehydrogenase/reductase family
  misc_feature (1)..(296): Homolog of NCBI NO: 30679701 NR Description: short-chain dehydrogenase/reductase family
  misc_feature (1)..(296): Homolog of NCBI NO: 7658344 NR Description: unknown protein; 15741-13972 [Arabidopsis
  misc_feature (41)..(290): Homolog of NCBI NO: 15964328 NR Description: RIBITOL TYPE DEHYDROGENASE PROTEIN [Sinorhizobium
  misc_feature (10)..(295): Homolog of NCBI NO: 39583655 NR Description: Hypothetical protein CBG08294 [Caenorhabditis
  misc_feature (9)..(294): Homolog of NCBI NO: 21356301 NR Description: CG10425-PA [Drosophila melanogaster]
  misc_feature (20)..(288): Homolog of NCBI NO: 34878781 NR Description: similar to 6330410P18Rik protein [Rattus
  misc_feature (11)..(288): Homolog of NCBI NO: 30585239 NR Description: Homo sapiens follicular lymphoma variant
  misc_feature (11)..(288): Homolog of NCBI NO: 4503817 NR Description: follicular lymphoma variant translocation 1 [Homo
  misc_feature (20)..(288): Homolog of NCBI NO: 27882572 NR Description: Similar to follicular lymphoma variant
  misc_feature (1)..(296): Homolog of NCBI NO: 15239681 NR Description: short-chain dehydrogenase/reductase family
  misc_feature (1)..(296): Homolog of NCBI NO: 30679701 NR Description: short-chain dehydrogenase/reductase family
  misc_feature (1)..(296): Homolog of NCBI NO: 7658344 NR Description: unknown protein; 15741-13972 [Arabidopsis

SEQ ID NO: 50178 - DNA, 1046 bp, Arabidopsis thaliana
  misc_feature (1)..(1046): Ceres Seq. ID no. 13588127
  misc_feature: MA Experiment ID: 20000173 Result: Down-regulated in Transcription
  misc_feature: MA Experiment 20000173 PARAMETER Experiment Name: At_42deg_Heat_P Parameter: Age (day) Value: 14
  misc_feature: MA Experiment 20000173 PARAMETER Experiment Name: At_42deg_Heat_P Parameter: Organism Value: A. thaliana
  misc_feature: MA Experiment 20000173 PARAMETER Experiment Name: At_42deg_Heat_P Parameter: Plant Line Value: WS
  misc_feature: MA Experiment 20000173 PARAMETER Experiment Name: At_42deg_Heat_P Parameter: Temperature (deg C) Value: 42 vs. 22
  misc_feature: MA Experiment 20000173 PARAMETER Experiment Name: At_42deg_Heat_P Parameter: Timepoint (hr) Value: 6
  misc_feature: MA Experiment 20000173 PARAMETER Experiment Name: At_42deg_Heat_P Parameter: Tissue Value: Aerial
  misc_feature: MA Experiment ID: 20000182 Result: Down-regulated in Transcription
  misc_feature: MA Experiment 20000182 PARAMETER Experiment Name: At_2mM_SA_P Parameter: Age (day) Value: 14
  misc_feature: MA Experiment 20000182 PARAMETER Experiment Name: At_2mM_SA_P Parameter: Organism Value: A. thaliana
  misc_feature: MA Experiment 20000182 PARAMETER Experiment Name: At_2mM_SA_P Parameter: Plant Line Value: WS
  misc_feature: MA Experiment 20000182 PARAMETER Experiment Name: At_2mM_SA_P Parameter: Timepoint (hr) Value: 6
  misc_feature: MA Experiment 20000182 PARAMETER Experiment Name: At_2mM_SA_P Parameter: Tissue Value: Aerial
  misc_feature: MA Experiment 20000182 PARAMETER Experiment Name: At_2mM_SA_P Parameter: Treatment Value: 2mM SA vs. No Treatment
  misc_feature: MA Experiment ID: 20000184 Result: Down-regulated in Transcription
  misc_feature: MA Experiment 20000184 PARAMETER Experiment Name: At_Shoots__P Parameter: Age (day) Value: 7
  misc_feature: MA Experiment 20000184 PARAMETER Experiment Name: At_Shoots__P Parameter: Tissue Value: Shoots vs. Whole Plant
  misc_feature: MA Experiment ID: 20000214 Result: Down-regulated in Transcription
  misc_feature: MA Experiment 20000214 PARAMETER Experiment Name: At_4deg_Cold_P Parameter: Timepoint (hr) Value: 6
  misc_feature: MA Experiment ID: 20000227 Result: Down-regulated in Transcription
  misc_feature: MA Experiment 20000227 PARAMETER Experiment Name: At_Root-Tips-vs-Tops_P Parameter: Tissue Value: Root Tips vs. Root Tops
  misc_feature: MA Experiment ID: 20000439 Result: Down-regulated in Transcription
  misc_feature: MA Experiment 20000439 PARAMETER Experiment Name: At_Roots__P Parameter: Age (day) Value: 14 vs. 21
  misc_feature: MA Experiment 20000439 PARAMETER Experiment Name: At_Roots__P Parameter: Organism Value: A. thaliana
  misc_feature: MA Experiment 20000439 PARAMETER Experiment Name: At_Roots__P Parameter: Tissue Value: Roots vs. Whole Plant
  misc_feature: MA Experiment ID: 20001557 Result: Down-regulated in Transcription
  misc_feature: MA Experiment 20001557 PARAMETER Experiment Name: At_Drought_Soil_Dry_P Parameter: Age (day) Value: 27
  misc_feature: MA Experiment 20001557 PARAMETER Experiment Name: At_Drought_Soil_Dry_P Parameter: Organism Value: A. thaliana
  misc_feature: MA Experiment 20001557 PARAMETER Experiment Name: At_Drought_Soil_Dry_P Parameter: Plant Line Value: WS
  misc_feature: MA Experiment 20001557 PARAMETER Experiment Name: At_Drought_Soil_Dry_P Parameter: Post Timepoint (hr) Value: 3
  misc_feature: MA Experiment 20001557 PARAMETER Experiment Name: At_Drought_Soil_Dry_P Parameter: Post-Treatment Value: Re-Water vs. No Drought
  misc_feature: MA Experiment 20001557 PARAMETER Experiment Name: At_Drought_Soil_Dry_P Parameter: Timepoint (day) Value: 13
  misc_feature: MA Experiment 20001557 PARAMETER Experiment Name: At_Drought_Soil_Dry_P Parameter: Treatment Value: Drought vs. No Drought
  misc_feature: MA Experiment ID: 20001558 Result: Down-regulated in Transcription
  misc_feature: MA Experiment 20001558 PARAMETER Experiment Name: At_Drought_Soil_Dry_P Parameter: Age (day) Value: 27
  misc_feature: MA Experiment 20001558 PARAMETER Experiment Name: At_Drought_Soil_Dry_P Parameter: Organism Value: A. thaliana
  misc_feature: MA Experiment 20001558 PARAMETER Experiment Name: At_Drought_Soil_Dry_P Parameter: Plant Line Value: WS
  misc_feature: MA Experiment 20001558 PARAMETER Experiment Name: At_Drought_Soil_Dry_P Parameter: Post Timepoint (hr) Value: 6
  misc_feature: MA Experiment 20001558 PARAMETER Experiment Name: At_Drought_Soil_Dry_P Parameter: Post-Treatment Value: Re-Water vs. No Drought
  misc_feature: MA Experiment 20001558 PARAMETER Experiment Name: At_Drought_Soil_Dry_P Parameter: Timepoint (day) Value: 13
  misc_feature: MA Experiment 20001558 PARAMETER Experiment Name: At_Drought_Soil_Dry_P Parameter: Treatment Value: Drought vs. No Drought
  misc_feature: MA Experiment ID: 20001904 Result: Down-regulated in Transcription
  misc_feature: MA Experiment 20001904 PARAMETER Experiment Name: At_Drought_Reproduction_P Parameter: Age (day) Value: 37
  misc_feature: MA Experiment 20001904 PARAMETER Experiment Name: At_Drought_Reproduction_P Parameter: Organism Value: A. thaliana
  misc_feature: MA Experiment 20001904 PARAMETER Experiment Name: At_Drought_Reproduction_P Parameter: Plant Line Value: WS
  misc_feature: MA Experiment 20001904 PARAMETER Experiment Name: At_Drought_Reproduction_P Parameter: Timepoint (day) Value: 7
  misc_feature: MA Experiment 20001904 PARAMETER Experiment Name: At_Drought_Reproduction_P Parameter: Tissue Value: Rosettes
  misc_feature: MA Experiment 20001904 PARAMETER Experiment Name: At_Drought_Reproduction_P Parameter: Treatment Value: Drought vs. No Drought
  misc_feature: MA Experiment ID: 20001905 Result: Down-regulated in Transcription
  misc_feature: MA Experiment 20001905 PARAMETER Experiment Name: At_Drought_Reproduction_P Parameter: Age (day) Value: 40
  misc_feature: MA Experiment 20001905 PARAMETER Experiment Name: At_Drought_Reproduction_P Parameter: Organism Value: A. thaliana
  misc_feature: MA Experiment 20001905 PARAMETER Experiment Name: At_Drought_Reproduction_P Parameter: Plant Line Value: WS
  misc_feature: MA Experiment 20001905 PARAMETER Experiment Name: At_Drought_Reproduction_P Parameter: Timepoint (day) Value: 10
  misc_feature: MA Experiment 20001905 PARAMETER Experiment Name: At_Drought_Reproduction_P Parameter: Tissue Value: Rosettes
  misc_feature: MA Experiment 20001905 PARAMETER Experiment Name: At_Drought_Reproduction_P Parameter: Treatment Value: Drought vs. No Drought
  misc_feature: MA Experiment ID: 20001906 Result: Down-regulated in Transcription
  misc_feature: MA Experiment 20001906 PARAMETER Experiment Name: At_Drought_Reproduction_P Parameter: Age (day) Value: 35
  misc_feature: MA Experiment 20001906 PARAMETER Experiment Name: At_Drought_Reproduction_P Parameter: Organism Value: A. thaliana
  misc_feature: MA Experiment 20001906 PARAMETER Experiment Name: At_Drought_Reproduction_P Parameter: Plant Line Value: WS
  misc_feature: MA Experiment 20001906 PARAMETER Experiment Name: At_Drought_Reproduction_P Parameter: Timepoint (day) Value: 5
  misc_feature: MA Experiment 20001906 PARAMETER Experiment Name: At_Drought_Reproduction_P Parameter: Tissue Value: Siliques
  misc_feature: MA Experiment 20001906 PARAMETER Experiment Name: At_Drought_Reproduction_P Parameter: Treatment Value: Drought vs. No Drought
ggttcttttgtatttaaatcggatcattctaattggtggagagacagactctggactctgaagaagcaaatggctgggatcaccagcaccgttggattcaacgccattctcgccggagccaccaaaacggtgtcgcatcctgttaaatctaagctctttggtcttcgactctgtgtacccgaattctcaattgtttctctttccccttatcatcatcgccgttgtcccgccatcacttgccgttacggaggcggtggtggcggaggctctagatttcccggcgataggagaggtaggcagaaagaatccgaggatgatgattcgcttgatatctcagctattaggtcagccactgttaggcttattgatgatcagcagaacatgattggtttagtttccaaagaagaagctgttcgaagagctgaagatgctgagcttgatctggtgattctttcgccggatgcagatcctccggttgttagaatgatggattacagtaaatacagatatgagcagcaaaagaggaaaaaggaacagcagaagaaaactactcgaatggacttgaaggagcttaaaatgggttataacatcgatcagcatgattattctgtacgcatgagagcagcccggaagttcttgcaagacggtgacaaggttaaagtgattgtgaacatgaaaggccgagaaaacgagttcagaaatattgctattgagctcctcagacgttttcagactgaaataggagagcttggtactgaggagagcaaaaactttcgggacagaaatttgtttattgtcttggtgccaaacaaggaagttattcggaaagtgcaagaaccacccccaaaaaagaagaaaaagccagcggatgataaagtttcagcagcaaatataactgcaacacaagatatatgatgcggaattgtctgatgtaaaatgttctgtgactttgataaatttctgtatagtttcttttttaatatgcttcttgcatttccatgtaattgtaaccatagaaatagattatttgaatgaagatcttcgtc

SEQ ID NO: 50179 - protein, 304 aa, Arabidopsis thaliana
  peptide (1)..(304): Ceres Seq. ID no. 13588128
  misc_feature (185)..(271): Pfam Name: Translation initiation factor IF-3, C-terminal domain Pfam Description: Translation initiation factor IF-3, C-terminal
  misc_feature (114)..(287): Homolog of NCBI NO: 33241247 NR Description: Translation initiation factor 3
  misc_feature (114)..(269): Homolog of NCBI NO: 22965839 NR Description: hypothetical protein [Rhodospirillum rubrum]
  misc_feature (100)..(271): Homolog of NCBI NO: 23128110 NR Description: hypothetical protein [Nostoc punctiforme]
  misc_feature (119)..(302): Homolog of NCBI NO: 33864629 NR Description: translation initiation factor IF-3 [Synechococcus
  misc_feature (114)..(272): Homolog of NCBI NO: 20808119 NR Description: Translation initiation factor IF3
  misc_feature (100)..(271): Homolog of NCBI NO: 20138475 NR Description: Translation initiation factor IF-3
  misc_feature (100)..(271): Homolog of NCBI NO: 17232115 NR Description: translation initiation factor IF-3 [Nostoc sp.
  misc_feature (24)..(183): Homolog of NCBI NO: 25407671 NR Description: hypothetical protein AT4g30690 [imported] -
  misc_feature (24)..(300): Homolog of NCBI NO: 15224088 NR Description: chloroplast initiation factor 3 -related
  misc_feature (24)..(304): Homolog of NCBI NO: 18417644 NR Description: expressed protein [Arabidopsis thaliana]
GSFVFKSDHSNWWRDRLWTLKKQMAGITSTVGFNAILAGATKTVSHPVKSKLFGLRLCVPEFSIVSLSPYHHRRCPAITCRYGGGGGGGSRFPGDRRGRQKESEDDDSLDISAIRSATVRLIDDQQNMIGLVSKEEAVRRAEDAELDLVILSPDADPPVVRMMDYSKYRYEQQKRKKEQQKKTTRMDLKELKMGYNIDQHDYSVRMRAARKFLQDGDKVKVIVNMKGRENEFRNIAIELLRRFQTEIGELGTEESKNFRDRNLFIVLVPNKEVIRKVQEPPPKKKKKPADDKVSAANITATQDI

SEQ ID NO: 50180 - protein, 281 aa, Arabidopsis thaliana
  peptide (1)..(281): Ceres Seq. ID no. 13588129
  misc_feature (162)..(248): Pfam Name: Translation initiation factor IF-3, C-terminal domain Pfam Description: Translation initiation factor IF-3, C-terminal
  misc_feature (91)..(264): Homolog of NCBI NO: 33241247 NR Description: Translation initiation factor 3
  misc_feature (91)..(246): Homolog of NCBI NO: 22965839 NR Description: hypothetical protein [Rhodospirillum rubrum]
  misc_feature (77)..(248): Homolog of NCBI NO: 23128110 NR Description: hypothetical protein [Nostoc punctiforme]
  misc_feature (96)..(279): Homolog of NCBI NO: 33864629 NR Description: translation initiation factor IF-3 [Synechococcus
  misc_feature (91)..(249): Homolog of NCBI NO: 20808119 NR Description: Translation initiation factor IF3
  misc_feature (77)..(248): Homolog of NCBI NO: 20138475 NR Description: Translation initiation factor IF-3
  misc_feature (77)..(248): Homolog of NCBI NO: 17232115 NR Description: translation initiation factor IF-3 [Nostoc sp.
  misc_feature (1)..(160): Homolog of NCBI NO: 25407671 NR Description: hypothetical protein AT4g30690 [imported] -
  misc_feature (1)..(277): Homolog of NCBI NO: 15224088 NR Description: chloroplast initiation factor 3 -related
  misc_feature (1)..(281): Homolog of NCBI NO: 18417644 NR Description: expressed protein [Arabidopsis thaliana]
MAGITSTVGFNAILAGATKTVSHPVKSKLFGLRLCVPEFSIVSLSPYHHRRCPAITCRYGGGGGGGSRFPGDRRGRQKESEDDDSLDISAIRSATVRLIDDQQNMIGLVSKEEAVRRAEDAELDLVILSPDADPPVVRMMDYSKYRYEQQKRKKEQQKKTTRMDLKELKMGYNIDQHDYSVRMRAARKFLQDGDKVKVIVNMKGRENEFRNIAIELLRRFQTEIGELGTEESKNFRDRNLFIVLVPNKEVIRKVQEPPPKKKKKPADDKVSAANITATQDI

SEQ ID NO: 50181 - protein, 177 aa, Arabidopsis thaliana
  peptide (1)..(177): Ceres Seq. ID no. 13588130
  misc_feature (58)..(144): Pfam Name: Translation initiation factor IF-3, C-terminal domain Pfam Description: Translation initiation factor IF-3, C-terminal
  misc_feature (1)..(160): Homolog of NCBI NO: 33241247 NR Description: Translation initiation factor 3
  misc_feature (1)..(142): Homolog of NCBI NO: 22965839 NR Description: hypothetical protein [Rhodospirillum rubrum]
  misc_feature (1)..(144): Homolog of NCBI NO: 23128110 NR Description: hypothetical protein [Nostoc punctiforme]
  misc_feature (1)..(175): Homolog of NCBI NO: 33864629 NR Description: translation initiation factor IF-3 [Synechococcus
  misc_feature (1)..(145): Homolog of NCBI NO: 20808119 NR Description: Translation initiation factor IF3
  misc_feature (1)..(144): Homolog of NCBI NO: 20138475 NR Description: Translation initiation factor IF-3
  misc_feature (1)..(144): Homolog of NCBI NO: 17232115 NR Description: translation initiation factor IF-3 [Nostoc sp.
  misc_feature (1)..(56): Homolog of NCBI NO: 25407671 NR Description: hypothetical protein AT4g30690 [imported] -
  misc_feature (1)..(173): Homolog of NCBI NO: 15224088 NR Description: chloroplast initiation factor 3 -related
  misc_feature (1)..(177): Homolog of NCBI NO: 18417644 NR Description: expressed protein [Arabidopsis thaliana]
MIGLVSKEEAVRRAEDAELDLVILSPDADPPVVRMMDYSKYRYEQQKRKKEQQKKTTRMDLKELKMGYNIDQHDYSVRMRAARKFLQDGDKVKVIVNMKGRENEFRNIAIELLRRFQTEIGELGTEESKNFRDRNLFIVLVPNKEVIRKVQEPPPKKKKKPADDKVSAANITATQDI

SEQ ID NO: 50182 - DNA, 693 bp, Arabidopsis thaliana
  misc_feature (1)..(693): Ceres Seq. ID no. 13647933
  misc_feature: MA Experiment ID: 20000306 Result: Up-regulated in Transcription
  misc_feature: MA Experiment 20000306 PARAMETER Experiment Name: At_Germinating_Seeds_Sub_P Parameter: Age (hr) Value: 6 vs. 0
  misc_feature: MA Experiment 20000306 PARAMETER Experiment Name: At_Germinating_Seeds_Sub_P Parameter: Organism Value: A. thaliana
  misc_feature: MA Experiment 20000306 PARAMETER Experiment Name: At_Germinating_Seeds_Sub_P Parameter: Plant Line Value: WS
  misc_feature: MA Experiment 20000306 PARAMETER Experiment Name: At_Germinating_Seeds_Sub_P Parameter: Tissue Value: Germinating Seeds
  misc_feature: MA Experiment ID: 20000307 Result: Up-regulated in Transcription
  misc_feature: MA Experiment 20000307 PARAMETER Experiment Name: At_Germinating_Seeds_Sub_P Parameter: Age (hr) Value: 24 vs. 0
  misc_feature: MA Experiment 20000307 PARAMETER Experiment Name: At_Germinating_Seeds_Sub_P Parameter: Organism Value: A. thaliana
  misc_feature: MA Experiment 20000307 PARAMETER Experiment Name: At_Germinating_Seeds_Sub_P Parameter: Plant Line Value: WS
  misc_feature: MA Experiment 20000307 PARAMETER Experiment Name: At_Germinating_Seeds_Sub_P Parameter: Tissue Value: Germinating Seeds
  misc_feature: MA Experiment ID: 20000328 Result: Down-regulated in Transcription
  misc_feature: MA Experiment 20000328 PARAMETER Experiment Name: At_42deg_Heat_Sub_P Parameter: Age (day) Value: 14
  misc_feature: MA Experiment 20000328 PARAMETER Experiment Name: At_42deg_Heat_Sub_P Parameter: Organism Value: A. thaliana
  misc_feature: MA Experiment 20000328 PARAMETER Experiment Name: At_42deg_Heat_Sub_P Parameter: Plant Line Value: WS
  misc_feature: MA Experiment 20000328 PARAMETER Experiment Name: At_42deg_Heat_Sub_P Parameter: Temperature (deg C) Value: 42 vs. 22
  misc_feature: MA Experiment 20000328 PARAMETER Experiment Name: At_42deg_Heat_Sub_P Parameter: Timepoint (hr) Value: 6
  misc_feature: MA Experiment 20000328 PARAMETER Experiment Name: At_42deg_Heat_Sub_P Parameter: Tissue Value: Aerial
gtcaagaacaaagacgattcgattgaattctccataagaggtccgacccgaattcgaaaacccgtaagaaccgaatcgaagatgagcaaggatggtttgagcaacgaccaagtctcatcaatgaaggaagcattcatgctattcgacacagacggcgacggcaaaatcgcaccgtcggagctcggaatcttaatgcgttcactcggcggcaatccaacagaatcacaactcaaattaatcataacgacggagaatctctcgtctccgttcgatttcaatcgattcctagatctaatggcgaaacatctgaaaacagagccgttcgatcgccagcttcgtgatgcgttcaaagtgcttgacaaggaaggtactggattcgttgctgtggcagatctgagacatatacttacgagtatcggtgagaaattgcagccgagtgagtttgatgagtggatcaaagaggttgatgttggatctgatggtaagatccggtatgaggattttattgctagaatggttgctaagtaagatctaaatctttgaaatttgaattttttggattagaacaatcttaggatttgttcagaaagtgttgaattcttaatgtaattgggaatttggtcttaattaagctgtgttatttgaaaaaaaaaaaaaaaaaaaactcgagggggggcccggtacccaatycgc

SEQ ID NO: 50183 - protein, 175 aa, Arabidopsis thaliana
  peptide (1)..(175): Ceres Seq. ID no. 15219505
  misc_feature (147)..(175): Pfam Name: EF hand Pfam Description: EF hand
  misc_feature (31)..(175): Homolog of NCBI NO: 4959168 NR Description: calmodulin mutant SYNCAM62 [synthetic construct]
  misc_feature (31)..(175): Homolog of NCBI NO: 162030 NR Description: calmodulin A
  misc_feature (31)..(175): Homolog of NCBI NO: 115531 NR Description: Calmodulin
  misc_feature (31)..(175): Homolog of NCBI NO: 115530 NR Description: Calmodulin
  misc_feature (33)..(175): Homolog of NCBI NO: 29367559 NR Description: putative serine/threonine kinase
  misc_feature (28)..(175): Homolog of NCBI NO: 28629126 NR Description: putative serine/threonine kinase [Vitis vinifera]
  misc_feature (28)..(175): Homolog of NCBI NO: 15221284 NR Description: calmodulin, putative [Arabidopsis thaliana]
  misc_feature (28)..(175): Homolog of NCBI NO: 25402719 NR Description: protein F5O11.4 [imported] - Arabidopsis thaliana
  misc_feature (28)..(175): Homolog of NCBI NO: 15221593 NR Description: calmodulin, putative [Arabidopsis thaliana]
  misc_feature (1)..(174): Homolog of NCBI NO: 6630454 NR Description: F23N19.18 [Arabidopsis thaliana]
VKNKDDSIEFSIRGPTRIRKPVRTESKMSKDGLSNDQVSSMKEAFMLFDTDGDGKIAPSELGILMRSLGGNPTESQLKLIITTENLSSPFDFNRFLDLMAKHLKTEPFDRQLRDAFKVLDKEGTGFVAVADLRHILTSIGEKLQPSEFDEWIKEVDVGSDGKIRYEDFIARMVAK

SEQ ID NO: 50184 - protein, 148 aa, Arabidopsis thaliana
  peptide (1)..(148): Ceres Seq. ID no. 15219506
  misc_feature (120)..(148): Pfam Name: EF hand Pfam Description: EF hand
  misc_feature (4)..(148): Homolog of NCBI NO: 4959168 NR Description: calmodulin mutant SYNCAM62 [synthetic construct]
  misc_feature (4)..(148): Homolog of NCBI NO: 162030 NR Description: calmodulin A
  misc_feature (4)..(148): Homolog of NCBI NO: 115531 NR Description: Calmodulin
  misc_feature (4)..(148): Homolog of NCBI NO: 115530 NR Description: Calmodulin
  misc_feature (6)..(148): Homolog of NCBI NO: 29367559 NR Description: putative serine/threonine kinase
  misc_feature (1)..(148): Homolog of NCBI NO: 28629126 NR Description: putative serine/threonine kinase [Vitis vinifera]
  misc_feature (1)..(148): Homolog of NCBI NO: 15221284 NR Description: calmodulin, putative [Arabidopsis thaliana]
  misc_feature (1)..(148): Homolog of NCBI NO: 25402719 NR Description: protein F5O11.4 [imported] - Arabidopsis thaliana
  misc_feature (1)..(148): Homolog of NCBI NO: 15221593 NR Description: calmodulin, putative [Arabidopsis thaliana]
  misc_feature (1)..(147): Homolog of NCBI NO: 6630454 NR Description: F23N19.18 [Arabidopsis thaliana]
MSKDGLSNDQVSSMKEAFMLFDTDGDGKIAPSELGILMRSLGGNPTESQLKLIITTENLSSPFDFNRFLDLMAKHLKTEPFDRQLRDAFKVLDKEGTGFVAVADLRHILTSIGEKLQPSEFDEWIKEVDVGSDGKIRYEDFIARMVAK

SEQ ID NO: 50185 - protein, 135 aa, Arabidopsis thaliana
  peptide (1)..(135): Ceres Seq. ID no. 15219507
  misc_feature (107)..(135): Pfam Name: EF hand Pfam Description: EF hand
  misc_feature (1)..(135): Homolog of NCBI NO: 4959168 NR Description: calmodulin mutant SYNCAM62 [synthetic construct]
  misc_feature (1)..(135): Homolog of NCBI NO: 162030 NR Description: calmodulin A
  misc_feature (1)..(135): Homolog of NCBI NO: 115531 NR Description: Calmodulin
  misc_feature (1)..(135): Homolog of NCBI NO: 115530 NR Description: Calmodulin
  misc_feature (1)..(135): Homolog of NCBI NO: 29367559 NR Description: putative serine/threonine kinase
  misc_feature (1)..(135): Homolog of NCBI NO: 28629126 NR Description: putative serine/threonine kinase [Vitis vinifera]
  misc_feature (1)..(135): Homolog of NCBI NO: 15221284 NR Description: calmodulin, putative [Arabidopsis thaliana]
  misc_feature (1)..(135): Homolog of NCBI NO: 25402719 NR Description: protein F5O11.4 [imported] - Arabidopsis thaliana
  misc_feature (1)..(135): Homolog of NCBI NO: 15221593 NR Description: calmodulin, putative [Arabidopsis thaliana]
  misc_feature (1)..(134): Homolog of NCBI NO: 6630454 NR Description: F23N19.18 [Arabidopsis thaliana]
MKEAFMLFDTDGDGKIAPSELGILMRSLGGNPTESQLKLIITTENLSSPFDFNRFLDLMAKHLKTEPFDRQLRDAFKVLDKEGTGFVAVADLRHILTSIGEKLQPSEFDEWIKEVDVGSDGKIRYEDFIARMVAK

SEQ ID NO: 50186 - DNA, 1915 bp, Arabidopsis thaliana
  misc_feature (1)..(1915): Ceres Seq. ID no. 15168753
  misc_feature: MA Experiment ID: 20000315 Result: Down-regulated in Transcription
  misc_feature: MA Experiment 20000315 PARAMETER Experiment Name: At_14day_Shoots-Roots_Sub_P Parameter: Age (day) Value: 14
  misc_feature: MA Experiment 20000315 PARAMETER Experiment Name: At_14day_Shoots-Roots_Sub_P Parameter: Organism Value: A. thaliana
  misc_feature: MA Experiment 20000315 PARAMETER Experiment Name: At_14day_Shoots-Roots_Sub_P Parameter: Plant Line Value: WS
  misc_feature: MA Experiment 20000315 PARAMETER Experiment Name: At_14day_Shoots-Roots_Sub_P Parameter: Tissue Value: Shoots vs. Whole Plant
gatttccttgttcggaatcggagaagaaggaagactagattcgatgtgttggtgaagaagatctcgactttgttcaaaattccaatttcgttcgcctcaaagatcattctctcatcttctcgactttgatgcgattgattaaatatggtggatacggttattcccggagatatggcttgtttggatgcagatttgttgcagcttcaggaaatgtcttcctttgttctcaattctaaacctggattcactcagaagctcttcgaccagtggctttctcttcccgaagctcagcgacaggttggatcattgcttaaggatgctgtagctggagctcctatcaatgttactggaagtgcatcgggttctaattctgccactataccatctatgtttcctgcgggaagcgctcctcctctttcaccaagaagttgtggttcaccccgtacaaccaaacagagagccccttctaacttaggttctactctcaaagtagtcaacgagcctgttaaagagcctatacctcagttttatttccaaaatggtcgccctccaccaagcgagattaaagagcaatgtatgtttagaatcaatcacttcttttatggtcacatggatggcttgcagatacaagaattcaagttagtcaccagagaaatctgcaagctcccatctttcttctccacttcccttttccggaagatcgatctcaacaatacaggttttgttactagagatgcatttattgatttttgggtaaacgggaacatgttgataatggatacaacgacccaaatcttcaagatcctaaagcagaaagatcagagtttcattgttaaggatgatttcaaaccactacttaaagaactgttggcgacgcatcctggcctagagttcctgcaatccacacctgaattccaagaaagatatgctgaaactgtcacctacagaatattttactacataaatagatctggcaatggtcgaattacatttagggagcttaaacggggaaacttaattgatgctatgctacatgctgatgaagaagaagatattaacaaagtgttgagatacttctcatatgagcatttctatgtcatatactgcaagttctgggagctggatacggatcacgatttcctgattgacaaagaaaatcttatgagatatggaaaccatgctcttacctaccggattgtcgacagaatattctcccaggttgctaggaagttcactagcaaagttgaagggaagatggggtatgaagactttgtctatttcattcttgcggaagaagataaatcgtcagtgcctagcctagaatattggtttaagtgcatagacttggatgcaaatgggattataacgcgaaatgagatgcaattcttttatgaagagcagttgcatagaatggagtgcatggcgcaagaggctgttcttttcgaggatatcttatgtcagatgattgatatgatcggacctgagaacgaaagccatataacgctgcatgaactgaaaggctcaaagctctctggaaacgtcttcaacatcctttttaatctaaacaaatttatggcatttgaaacccgggatccgttcctcattcgtcaggagcgcgagaacccgacattgacagactgggaccgttttgcacatagagagtatattcggctatcaatggaagaagatgttgaagatgcatccaatggaagtgctgaggtttgggatgactcgtcactggaggctcccttctgagttcaaagaggtagcaagtcaacaaaagaaaatcataatctctagaatggattttattttttaaaaaaggaaacaaaaaaacttagaagttgaaggttatggatatgttgttatttcatcatattagttaatcatgcaaaagagaaacagaaagtccctg

SEQ ID NO: 50187 - protein, 536 aa, Arabidopsis thaliana
  peptide (1)..(536): Ceres Seq. ID no. 15168754
  misc_feature (391)..(419): Pfam Name: EF hand Pfam Description: EF hand
  misc_feature (6)..(536): Homolog of NCBI NO: 15219596 NR Description: protein phosphatase 2A -related [Arabidopsis
  misc_feature (9)..(196): Homolog of NCBI NO: 16905168 NR Description: putative phosphatase subunit, 3'-partial [Oryza
  misc_feature (186)..(489): Homolog of NCBI NO: 16905168 NR Description: putative phosphatase subunit, 3'-partial [Oryza
  misc_feature (6)..(536): Homolog of NCBI NO: 28393301 NR Description: putative protein phosphatase 2A [Arabidopsis
  misc_feature (9)..(536): Homolog of NCBI NO: 15240089 NR Description: protein phosphatase 2A 62 kDa B regulatory
  misc_feature (9)..(196): Homolog of NCBI NO: 37535364 NR Description: putative protein phosphatase 2A regulatory
  misc_feature (186)..(536): Homolog of NCBI NO: 37535364 NR Description: putative protein phosphatase 2A regulatory
  misc_feature (13)..(536): Homolog of NCBI NO: 15221817 NR Description: protein phosphatase 2A 72 kDa regulatory subunit
  misc_feature (1)..(536): Homolog of NCBI NO: 15241978 NR Description: protein phosphatase 2A regulatory subunit
  misc_feature (1)..(536): Homolog of NCBI NO: 18421273 NR Description: protein phosphatase 2A regulatory subunit
MVDTVIPGDMACLDADLLQLQEMSSFVLNSKPGFTQKLFDQWLSLPEAQRQVGSLLKDAVAGAPINVTGSASGSNSATIPSMFPAGSAPPLSPRSCGSPRTTKQRAPSNLGSTLKVVNEPVKEPIPQFYFQNGRPPPSEIKEQCMFRINHFFYGHMDGLQIQEFKLVTREICKLPSFFSTSLFRKIDLNNTGFVTRDAFIDFWVNGNMLIMDTTTQIFKILKQKDQSFIVKDDFKPLLKELLATHPGLEFLQSTPEFQERYAETVTYRIFYYINRSGNGRITFRELKRGNLIDAMLHADEEEDINKVLRYFSYEHFYVIYCKFWELDTDHDFLIDKENLMRYGNHALTYRIVDRIFSQVARKFTSKVEGKMGYEDFVYFILAEEDKSSVPSLEYWFKCIDLDANGIITRNEMQFFYEEQLHRMECMAQEAVLFEDILCQMIDMIGPENESHITLHELKGSKLSGNVFNILFNLNKFMAFETRDPFLIRQERENPTLTDWDRFAHREYIRLSMEEDVEDASNGSAEVWDDSSLEAPF

SEQ ID NO: 50188 - protein, 527 aa, Arabidopsis thaliana
  peptide (1)..(527): Ceres Seq. ID no. 15168755
  misc_feature (382)..(410): Pfam Name: EF hand Pfam Description: EF hand
  misc_feature (1)..(527): Homolog of NCBI NO: 15219596 NR Description: protein phosphatase 2A -related [Arabidopsis
  misc_feature (1)..(187): Homolog of NCBI NO: 16905168 NR Description: putative phosphatase subunit, 3'-partial [Oryza
  misc_feature (177)..(480): Homolog of NCBI NO: 16905168 NR Description: putative phosphatase subunit, 3'-partial [Oryza
  misc_feature (1)..(527): Homolog of NCBI NO: 28393301 NR Description: putative protein phosphatase 2A [Arabidopsis
  misc_feature (1)..(527): Homolog of NCBI NO: 15240089 NR Description: protein phosphatase 2A 62 kDa B regulatory
  misc_feature (1)..(187): Homolog of NCBI NO: 37535364 NR Description: putative protein phosphatase 2A regulatory
  misc_feature (177)..(527): Homolog of NCBI NO: 37535364 NR Description: putative protein phosphatase 2A regulatory
  misc_feature (4)..(527): Homolog of NCBI NO: 15221817 NR Description: protein phosphatase 2A 72 kDa regulatory subunit
  misc_feature (1)..(527): Homolog of NCBI NO: 15241978 NR Description: protein phosphatase 2A regulatory subunit
  misc_feature (1)..(527): Homolog of NCBI NO: 18421273 NR Description: protein phosphatase 2A regulatory subunit
MACLDADLLQLQEMSSFVLNSKPGFTQKLFDQWLSLPEAQRQVGSLLKDAVAGAPINVTGSASGSNSATIPSMFPAGSAPPLSPRSCGSPRTTKQRAPSNLGSTLKVVNEPVKEPIPQFYFQNGRPPPSEIKEQCMFRINHFFYGHMDGLQIQEFKLVTREICKLPSFFSTSLFRKIDLNNTGFVTRDAFIDFWVNGNMLIMDTTTQIFKILKQKDQSFIVKDDFKPLLKELLATHPGLEFLQSTPEFQERYAETVTYRIFYYINRSGNGRITFRELKRGNLIDAMLHADEEEDINKVLRYFSYEHFYVIYCKFWELDTDHDFLIDKENLMRYGNHALTYRIVDRIFSQVARKFTSKVEGKMGYEDFVYFILAEEDKSSVPSLEYWFKCIDLDANGIITRNEMQFFYEEQLHRMECMAQEAVLFEDILCQMIDMIGPENESHITLHELKGSKLSGNVFNILFNLNKFMAFETRDPFLIRQERENPTLTDWDRFAHREYIRLSMEEDVEDASNGSAEVWDDSSLEAPF

SEQ ID NO: 50189 - protein, 514 aa, Arabidopsis thaliana
  peptide (1)..(514): Ceres Seq. ID no. 15168756
  misc_feature (369)..(397): Pfam Name: EF hand Pfam Description: EF hand
  misc_feature (1)..(514): Homolog of NCBI NO: 15219596 NR Description: protein phosphatase 2A -related [Arabidopsis
  misc_feature (1)..(174): Homolog of NCBI NO: 16905168 NR Description: putative phosphatase subunit, 3'-partial [Oryza
  misc_feature (164)..(467): Homolog of NCBI NO: 16905168 NR Description: putative phosphatase subunit, 3'-partial [Oryza
  misc_feature (1)..(514): Homolog of NCBI NO: 28393301 NR Description: putative protein phosphatase 2A [Arabidopsis
  misc_feature (1)..(514): Homolog of NCBI NO: 15240089 NR Description: protein phosphatase 2A 62 kDa B regulatory
  misc_feature (1)..(174): Homolog of NCBI NO: 37535364 NR Description: putative protein phosphatase 2A regulatory
  misc_feature (164)..(514): Homolog of NCBI NO: 37535364 NR Description: putative protein phosphatase 2A regulatory
  misc_feature (1)..(514): Homolog of NCBI NO: 15221817 NR Description: protein phosphatase 2A 72 kDa regulatory subunit
  misc_feature (1)..(514): Homolog of NCBI NO: 15241978 NR Description: protein phosphatase 2A regulatory subunit
  misc_feature (1)..(514): Homolog of NCBI NO: 18421273 NR Description: protein phosphatase 2A regulatory subunit
MSSFVLNSKPGFTQKLFDQWLSLPEAQRQVGSLLKDAVAGAPINVTGSASGSNSATIPSMFPAGSAPPLSPRSCGSPRTTKQRAPSNLGSTLKVVNEPVKEPIPQFYFQNGRPPPSEIKEQCMFRINHFFYGHMDGLQIQEFKLVTREICKLPSFFSTSLFRKIDLNNTGFVTRDAFIDFWVNGNMLIMDTTTQIFKILKQKDQSFIVKDDFKPLLKELLATHPGLEFLQSTPEFQERYAETVTYRIFYYINRSGNGRITFRELKRGNLIDAMLHADEEEDINKVLRYFSYEHFYVIYCKFWELDTDHDFLIDKENLMRYGNHALTYRIVDRIFSQVARKFTSKVEGKMGYEDFVYFILAEEDKSSVPSLEYWFKCIDLDANGIITRNEMQFFYEEQLHRMECMAQEAVLFEDILCQMIDMIGPENESHITLHELKGSKLSGNVFNILFNLNKFMAFETRDPFLIRQERENPTLTDWDRFAHREYIRLSMEEDVEDASNGSAEVWDDSSLEAPF

SEQ ID NO: 50190 - DNA, 1746 bp, Arabidopsis thaliana; identical to SEQ ID NO: 46031
  misc_feature (1)..(1746): Ceres Seq. ID no. 13591719
  misc_feature: MA Experiment ID: 20000234 Result: Up-regulated in Transcription
  misc_feature: MA Experiment 20000234 PARAMETER Experiment Name: At_Siliques_P Parameter: Age (day) Value: 21
  misc_feature: MA Experiment 20000234 PARAMETER Experiment Name: At_Siliques_P Parameter: Organism Value: A. thaliana
  misc_feature: MA Experiment 20000234 PARAMETER Experiment Name: At_Siliques_P Parameter: Plant Line Value: WS
  misc_feature: MA Experiment 20000234 PARAMETER Experiment Name: At_Siliques_P Parameter: Tissue Value: Less Than 5mm Siliques vs. Whole Plant
  misc_feature: MA Experiment ID: 20000437 Result: Down-regulated in Transcription
  misc_feature: MA Experiment 20000437 PARAMETER Experiment Name: At_Drought_P Parameter: Age (day) Value: 8
  misc_feature: MA Experiment 20000437 PARAMETER Experiment Name: At_Drought_P Parameter: Organism Value: A. thaliana
  misc_feature: MA Experiment 20000437 PARAMETER Experiment Name: At_Drought_P Parameter: Plant Line Value: WS
  misc_feature: MA Experiment 20000437 PARAMETER Experiment Name: At_Drought_P Parameter: Timepoint (hr) Value: 24
  misc_feature: MA Experiment 20000437 PARAMETER Experiment Name: At_Drought_P Parameter: Tissue Value: Whole Plant
  misc_feature: MA Experiment 20000437 PARAMETER Experiment Name: At_Drought_P Parameter: Treatment Value: Drought vs. No Drought
  misc_feature: MA Experiment ID: 20000495 Result: Up-regulated in Transcription
  misc_feature: MA Experiment 20000495 PARAMETER Experiment Name: At_Guard_Cells_P Parameter: Harvest Date Value: 8/2/2002
  misc_feature: MA Experiment 20000495 PARAMETER Experiment Name: At_Guard_Cells_P Parameter: Organism Value: A. thaliana
  misc_feature: MA Experiment 20000495 PARAMETER Experiment Name: At_Guard_Cells_P Parameter: Tissue Value: Guard Cells vs. Leaves
  misc_feature: MA Experiment ID: 20001556 Result: Down-regulated in Transcription
  misc_feature: MA Experiment 20001556 PARAMETER Experiment Name: At_Drought_Soil_Dry_P Parameter: Age (day) Value: 26
  misc_feature: MA Experiment 20001556 PARAMETER Experiment Name: At_Drought_Soil_Dry_P Parameter: Organism Value: A. thaliana
  misc_feature: MA Experiment 20001556 PARAMETER Experiment Name: At_Drought_Soil_Dry_P Parameter: Plant Line Value: WS
  misc_feature: MA Experiment 20001556 PARAMETER Experiment Name: At_Drought_Soil_Dry_P Parameter: Post Timepoint (hr) Value: None
  misc_feature: MA Experiment 20001556 PARAMETER Experiment Name: At_Drought_Soil_Dry_P Parameter: Post-Treatment Value: None
  misc_feature: MA Experiment 20001556 PARAMETER Experiment Name: At_Drought_Soil_Dry_P Parameter: Timepoint (day) Value: 12
  misc_feature: MA Experiment 20001556 PARAMETER Experiment Name: At_Drought_Soil_Dry_P Parameter: Treatment Value: Drought vs. No Drought
  misc_feature: MA Experiment ID: 20001911 Result: Down-regulated in Transcription
  misc_feature: MA Experiment 20001911 PARAMETER Experiment Name: At_Drought_Reproduction_P Parameter: Age (day) Value: 40
  misc_feature: MA Experiment 20001911 PARAMETER Experiment Name: At_Drought_Reproduction_P Parameter: Organism Value: A. thaliana
  misc_feature: MA Experiment 20001911 PARAMETER Experiment Name: At_Drought_Reproduction_P Parameter: Plant Line Value: WS
  misc_feature: MA Experiment 20001911 PARAMETER Experiment Name: At_Drought_Reproduction_P Parameter: Timepoint (day) Value: 10
  misc_feature: MA Experiment 20001911 PARAMETER Experiment Name: At_Drought_Reproduction_P Parameter: Tissue Value: Flowers
  misc_feature: MA Experiment 20001911 PARAMETER Experiment Name: At_Drought_Reproduction_P Parameter: Treatment Value: Drought vs. No Drought

SEQ ID NO: 50191 - protein, 420 aa, Arabidopsis thaliana; identical to SEQ ID NO: 46032
  peptide (1)..(420): Ceres Seq. ID no. 13591720
  misc_feature (184)..(380): Pfam Name: Arabidopsis proteins of unknown function Pfam Description: Arabidopsis proteins of unknown function
  misc_feature (184)..(380): Pfam Name: Arabidopsis proteins of unknown function Pfam Description: Arabidopsis proteins of unknown function
  misc_feature (42)..(419): Homolog of NCBI NO: 15238835 NR Description: expressed protein [Arabidopsis thaliana]
  misc_feature (39)..(419): Homolog of NCBI NO: 18406483 NR Description: expressed protein [Arabidopsis thaliana]
  misc_feature (24)..(419): Homolog of NCBI NO: 30103019 NR Description: unknown protein [Oryza sativa (japonica
  misc_feature (42)..(419): Homolog of NCBI NO: 34393299 NR Description: putative DD1A protein [Oryza sativa (japonica
  misc_feature (32)..(419): Homolog of NCBI NO: 34393554 NR Description: putative carboxyl-terminal proteinase
  misc_feature (42)..(419): Homolog of NCBI NO: 15238835 NR Description: expressed protein [Arabidopsis thaliana]
  misc_feature (24)..(419): Homolog of NCBI NO: 30103019 NR Description: unknown protein [Oryza sativa (japonica
  misc_feature (32)..(419): Homolog of NCBI NO: 34393554 NR Description: putative carboxyl-terminal proteinase
  misc_feature (1)..(420): Homolog of NCBI NO: 15241244 NR Description: expressed protein [Arabidopsis thaliana]
  misc_feature (1)..(419): Homolog of NCBI NO: 18400044 NR Description: expressed protein [Arabidopsis thaliana]
  misc_feature (2)..(419): Homolog of NCBI NO: 15222707 NR Description: expressed protein [Arabidopsis thaliana]
  misc_feature (1)..(419): Homolog of NCBI NO: 21593294 NR Description: putative carboxyl-terminal peptidase [Arabidopsis
  misc_feature (2)..(419): Homolog of NCBI NO: 27311623 NR Description: unknown protein [Arabidopsis thaliana]
  misc_feature (42)..(419): Homolog of NCBI NO: 34393299 NR Description: putative DD1A protein [Oryza sativa (japonica
  misc_feature (39)..(419): Homolog of NCBI NO: 18406483 NR Description: expressed protein [Arabidopsis thaliana]
  misc_feature (2)..(419): Homolog of NCBI NO: 27311623 NR Description: unknown protein [Arabidopsis thaliana]
  misc_feature (1)..(419): Homolog of NCBI NO: 21593294 NR Description: putative carboxyl-terminal peptidase [Arabidopsis
  misc_feature (2)..(419): Homolog of NCBI NO: 15222707 NR Description: expressed protein [Arabidopsis thaliana]
  misc_feature (1)..(419): Homolog of NCBI NO: 18400044 NR Description: expressed protein [Arabidopsis thaliana]
  misc_feature (1)..(420): Homolog of NCBI NO: 15241244 NR Description: expressed protein [Arabidopsis thaliana]

SEQ ID NO: 50192 - protein, 396 aa, Arabidopsis thaliana; identical to SEQ ID NO: 46033
  peptide (1)..(396): Ceres Seq. ID no. 13591721
  misc_feature (160)..(356): Pfam Name: Arabidopsis proteins of unknown function Pfam Description: Arabidopsis proteins of unknown function
  misc_feature (160)..(356): Pfam Name: Arabidopsis proteins of unknown function Pfam Description: Arabidopsis proteins of unknown function
  misc_feature (18)..(395): Homolog of NCBI NO: 15238835 NR Description: expressed protein [Arabidopsis thaliana]
  misc_feature (15)..(395): Homolog of NCBI NO: 18406483 NR Description: expressed protein [Arabidopsis thaliana]
  misc_feature (1)..(395): Homolog of NCBI NO: 30103019 NR Description: unknown protein [Oryza sativa (japonica
  misc_feature (18)..(395): Homolog of NCBI NO: 34393299 NR Description: putative DD1A protein [Oryza sativa (japonica
  misc_feature (8)..(395): Homolog of NCBI NO: 34393554 NR Description: putative carboxyl-terminal proteinase
  misc_feature (18)..(395): Homolog of NCBI NO: 15238835 NR Description: expressed protein [Arabidopsis thaliana]
  misc_feature (1)..(395): Homolog of NCBI NO: 30103019 NR Description: unknown protein [Oryza sativa (japonica
  misc_feature (8)..(395): Homolog of NCBI NO: 34393554 NR Description: putative carboxyl-terminal proteinase
  misc_feature (1)..(396): Homolog of NCBI NO: 15241244 NR Description: expressed protein [Arabidopsis thaliana]
  misc_feature (1)..(395): Homolog of NCBI NO: 18400044 NR Description: expressed protein [Arabidopsis thaliana]
  misc_feature (1)..(395): Homolog of NCBI NO: 15222707 NR Description: expressed protein [Arabidopsis thaliana]
  misc_feature (1)..(395): Homolog of NCBI NO: 21593294 NR Description: putative carboxyl-terminal peptidase [Arabidopsis
  misc_feature (1)..(395): Homolog of NCBI NO: 27311623 NR Description: unknown protein [Arabidopsis thaliana]
  misc_feature (18)..(395): Homolog of NCBI NO: 34393299 NR Description: putative DD1A protein [Oryza sativa (japonica
  misc_feature (15)..(395): Homolog of NCBI NO: 18406483 NR Description: expressed protein [Arabidopsis thaliana]
  misc_feature (1)..(395): Homolog of NCBI NO: 27311623 NR Description: unknown protein [Arabidopsis thaliana]
  misc_feature (1)..(395): Homolog of NCBI NO: 21593294 NR Description: putative carboxyl-terminal peptidase [Arabidopsis
  misc_feature (1)..(395): Homolog of NCBI NO: 15222707 NR Description: expressed protein [Arabidopsis thaliana]
  misc_feature (1)..(395): Homolog of NCBI NO: 18400044 NR Description: expressed protein [Arabidopsis thaliana]
  misc_feature (1)..(396): Homolog of NCBI NO: 15241244 NR Description: expressed protein [Arabidopsis thaliana]

SEQ ID NO: 50193 - protein, 333 aa, Arabidopsis thaliana; identical to SEQ ID NO: 46034
  peptide (1)..(333): Ceres Seq. ID no. 13591722
  misc_feature (97)..(293): Pfam Name: Arabidopsis proteins of unknown function Pfam Description: Arabidopsis proteins of unknown function
  misc_feature (97)..(293): Pfam Name: Arabidopsis proteins of unknown function Pfam Description: Arabidopsis proteins of unknown function
  misc_feature (1)..(332): Homolog of NCBI NO: 15238835 NR Description: expressed protein [Arabidopsis thaliana]
  misc_feature (1)..(332): Homolog of NCBI NO: 18406483 NR Description: expressed protein [Arabidopsis thaliana]
  misc_feature (1)..(332): Homolog of NCBI NO: 30103019 NR Description: unknown protein [Oryza sativa (japonica
  misc_feature (1)..(332): Homolog of NCBI NO: 34393299 NR Description: putative DD1A protein [Oryza sativa (japonica
  misc_feature (1)..(332): Homolog of NCBI NO: 34393554 NR Description: putative carboxyl-terminal proteinase
  misc_feature (1)..(332): Homolog of NCBI NO: 15238835 NR Description: expressed protein [Arabidopsis thaliana]
  misc_feature (1)..(332): Homolog of NCBI NO: 30103019 NR Description: unknown protein [Oryza sativa (japonica
  misc_feature (1)..(332): Homolog of NCBI NO: 34393554 NR Description: putative carboxyl-terminal proteinase
  misc_feature (1)..(333): Homolog of NCBI NO: 15241244 NR Description: expressed protein [Arabidopsis thaliana]
  misc_feature (1)..(332): Homolog of NCBI NO: 18400044 NR Description: expressed protein [Arabidopsis thaliana]
  misc_feature (1)..(332): Homolog of NCBI NO: 15222707 NR Description: expressed protein [Arabidopsis thaliana]
  misc_feature (1)..(332): Homolog of NCBI NO: 21593294 NR Description: putative carboxyl-terminal peptidase [Arabidopsis
  misc_feature (1)..(332): Homolog of NCBI NO: 27311623 NR Description: unknown protein [Arabidopsis thaliana]
  misc_feature (1)..(332): Homolog of NCBI NO: 34393299 NR Description: putative DD1A protein [Oryza sativa (japonica
  misc_feature (1)..(332): Homolog of NCBI NO: 18406483 NR Description: expressed protein [Arabidopsis thaliana]
  misc_feature (1)..(332): Homolog of NCBI NO: 27311623 NR Description: unknown protein [Arabidopsis thaliana]
  misc_feature (1)..(332): Homolog of NCBI NO: 21593294 NR Description: putative carboxyl-terminal peptidase [Arabidopsis
  misc_feature (1)..(332): Homolog of NCBI NO: 15222707 NR Description: expressed protein [Arabidopsis thaliana]
  misc_feature (1)..(332): Homolog of NCBI NO: 18400044 NR Description: expressed protein [Arabidopsis thaliana]
  misc_feature (1)..(333): Homolog of NCBI NO: 15241244 NR Description: expressed protein [Arabidopsis thaliana]

SEQ ID NO: 50194 - DNA, 1636 bp, Arabidopsis thaliana; identical to SEQ ID NO: 49986
  misc_feature (1)..(1636): Ceres Seq. ID no. 13648342
  misc_feature: MA Experiment ID: 20000180 Result: Up-regulated in Transcription
  misc_feature: MA Experiment 20000180 PARAMETER Experiment Name: At_Germinating_Seeds_P Parameter: Age (hr) Value: 24 vs. 0
  misc_feature: MA Experiment 20000180 PARAMETER Experiment Name: At_Germinating_Seeds_P Parameter: Tissue Value: Germinating Seeds
  misc_feature: MA Experiment ID: 20000184 Result: Up-regulated in Transcription
  misc_feature: MA Experiment 20000184 PARAMETER Experiment Name: At_Shoots__P Parameter: Age (day) Value: 7
  misc_feature: MA Experiment 20000184 PARAMETER Experiment Name: At_Shoots__P Parameter: Tissue Value: Shoots vs. Whole Plant
  misc_feature: MA Experiment ID: 20000185 Result: Down-regulated in Transcription
  misc_feature: MA Experiment 20000185 PARAMETER Experiment Name: At_Roots__P Parameter: Age (day) Value: 7 vs. 21
  misc_feature: MA Experiment 20000185 PARAMETER Experiment Name: At_Roots__P Parameter: Organism Value: A. thaliana
  misc_feature: MA Experiment 20000185 PARAMETER Experiment Name: At_Roots__P Parameter: Tissue Value: Roots vs. Whole Plant
  misc_feature: MA Experiment ID: 20000214 Result: Up-regulated in Transcription
  misc_feature: MA Experiment 20000214 PARAMETER Experiment Name: At_4deg_Cold_P Parameter: Timepoint (hr) Value: 6
  misc_feature: MA Experiment ID: 20000227 Result: Down-regulated in Transcription
  misc_feature: MA Experiment 20000227 PARAMETER Experiment Name: At_Root-Tips-vs-Tops_P Parameter: Tissue Value: Root Tips vs. Root Tops
  misc_feature: MA Experiment ID: 20000438 Result: Up-regulated in Transcription
  misc_feature: MA Experiment 20000438 PARAMETER Experiment Name: At_Shoots__P Parameter: Age (day) Value: 14
  misc_feature: MA Experiment 20000438 PARAMETER Experiment Name: At_Shoots__P Parameter: Tissue Value: Shoots vs. Whole Plant
  misc_feature: MA Experiment ID: 20000439 Result: Down-regulated in Transcription
  misc_feature: MA Experiment 20000439 PARAMETER Experiment Name: At_Roots__P Parameter: Age (day) Value: 14 vs. 21
  misc_feature: MA Experiment 20000439 PARAMETER Experiment Name: At_Roots__P Parameter: Organism Value: A. thaliana
  misc_feature: MA Experiment 20000439 PARAMETER Experiment Name: At_Roots__P Parameter: Tissue Value: Roots vs. Whole Plant
  misc_feature: MA Experiment ID: 20000794 Result: Down-regulated in Transcription
  misc_feature: MA Experiment 20000794 PARAMETER Experiment Name: At_Petals_P Parameter: Age (day) Value: 23-25 days
  misc_feature: MA Experiment 20000794 PARAMETER Experiment Name: At_Petals_P Parameter: Plant Line Value: WS
  misc_feature: MA Experiment 20000794 PARAMETER Experiment Name: At_Petals_P Parameter: Tissue Value: Petals vs. Whole plant
  misc_feature: MA Experiment ID: 20001450 Result: Down-regulated in Transcription
  misc_feature: MA Experiment 20001450 PARAMETER Experiment Name: At_Far-red-induction_P Parameter: Age (day) Value: 7
  misc_feature: MA Experiment 20001450 PARAMETER Experiment Name: At_Far-red-induction_P Parameter: Light Value: Far-red vs. White
  misc_feature: MA Experiment 20001450 PARAMETER Experiment Name: At_Far-red-induction_P Parameter: Organism Value: A. thaliana
  misc_feature: MA Experiment 20001450 PARAMETER Experiment Name: At_Far-red-induction_P Parameter: Plant Line Value: Columbia
  misc_feature: MA Experiment 20001450 PARAMETER Experiment Name: At_Far-red-induction_P Parameter: Timepoint (hr) Value: 8
  misc_feature: MA Experiment 20001450 PARAMETER Experiment Name: At_Far-red-induction_P Parameter: Tissue Value: Whole Plant
  misc_feature: MA Experiment ID: 20001904 Result: Down-regulated in Transcription
  misc_feature: MA Experiment 20001904 PARAMETER Experiment Name: At_Drought_Reproduction_P Parameter: Age (day) Value: 37
  misc_feature: MA Experiment 20001904 PARAMETER Experiment Name: At_Drought_Reproduction_P Parameter: Organism Value: A. thaliana
  misc_feature: MA Experiment 20001904 PARAMETER Experiment Name: At_Drought_Reproduction_P Parameter: Plant Line Value: WS
  misc_feature: MA Experiment 20001904 PARAMETER Experiment Name: At_Drought_Reproduction_P Parameter: Timepoint (day) Value: 7
  misc_feature: MA Experiment 20001904 PARAMETER Experiment Name: At_Drought_Reproduction_P Parameter: Tissue Value: Rosettes
  misc_feature: MA Experiment 20001904 PARAMETER Experiment Name: At_Drought_Reproduction_P Parameter: Treatment Value: Drought vs. No Drought
  misc_feature: MA Experiment ID: 20001905 Result: Down-regulated in Transcription
  misc_feature: MA Experiment 20001905 PARAMETER Experiment Name: At_Drought_Reproduction_P Parameter: Age (day) Value: 40
  misc_feature: MA Experiment 20001905 PARAMETER Experiment Name: At_Drought_Reproduction_P Parameter: Organism Value: A. thaliana
  misc_feature: MA Experiment 20001905 PARAMETER Experiment Name: At_Drought_Reproduction_P Parameter: Plant Line Value: WS
  misc_feature: MA Experiment 20001905 PARAMETER Experiment Name: At_Drought_Reproduction_P Parameter: Timepoint (day) Value: 10
  misc_feature: MA Experiment 20001905 PARAMETER Experiment Name: At_Drought_Reproduction_P Parameter: Tissue Value: Rosettes
  misc_feature: MA Experiment 20001905 PARAMETER Experiment Name: At_Drought_Reproduction_P Parameter: Treatment Value: Drought vs. No Drought
  misc_feature: MA Experiment ID: 20001908 Result: Down-regulated in Transcription
  misc_feature: MA Experiment 20001908 PARAMETER Experiment Name: At_Drought_Reproduction_P Parameter: Age (day) Value: 40
  misc_feature: MA Experiment 20001908 PARAMETER Experiment Name: At_Drought_Reproduction_P Parameter: Organism Value: A. thaliana
  misc_feature: MA Experiment 20001908 PARAMETER Experiment Name: At_Drought_Reproduction_P Parameter: Plant Line Value: WS
  misc_feature: MA Experiment 20001908 PARAMETER Experiment Name: At_Drought_Reproduction_P Parameter: Timepoint (day) Value: 10
  misc_feature: MA Experiment 20001908 PARAMETER Experiment Name: At_Drought_Reproduction_P Parameter: Tissue Value: Siliques
  misc_feature: MA Experiment 20001908 PARAMETER Experiment Name: At_Drought_Reproduction_P Parameter: Treatment Value: Drought vs. No Drought

SEQ ID NO: 50195 - protein, 447 aa, Arabidopsis thaliana; identical to SEQ ID NO: 49987
  peptide (1)..(447): Ceres Seq. ID no. 13648343
  misc_feature (236)..(397): Pfam Name: Glyceraldehyde 3-phosphate dehydrogenase, Pfam Description: Glyceraldehyde 3-phosphate dehydrogenase,
  misc_feature (236)..(397): Pfam Name: Glyceraldehyde 3-phosphate dehydrogenase, Pfam Description: Glyceraldehyde 3-phosphate dehydrogenase,
  misc_feature (83)..(447): Homolog of NCBI NO: 18073141 NR Description: glyceraldehyde-3-phosphate dehydrogenase [Chara
  misc_feature (1)..(431): Homolog of NCBI NO: 18076102 NR Description: glyceraldehyde-3-phosphate dehydrogenase
  misc_feature (31)..(421): Homolog of NCBI NO: 120665 NR Description: Glyceraldehyde 3-phosphate dehydrogenase B, precursor (NADP-dependent glyceraldehydephosphate dehydrogenase
  misc_feature (1)..(447): Homolog of NCBI NO: 6063542 NR Description: EST C74302(E30840) corresponds to a region of the gene.~similar to glyceraldehyde-3-phosphate dehydrogenase.
  misc_feature (1)..(447): Homolog of NCBI NO: 120664 NR Description: Glyceraldehyde 3-phosphate dehydrogenase B, precursor (NADP-dependent glyceraldehydephosphate dehydrogenase
  misc_feature (83)..(447): Homolog of NCBI NO: 18073141 NR Description: glyceraldehyde-3-phosphate dehydrogenase [Chara
  misc_feature (31)..(421): Homolog of NCBI NO: 120665 NR Description: Glyceraldehyde 3-phosphate dehydrogenase B, precursor (NADP-dependent glyceraldehydephosphate dehydrogenase
  misc_feature (1)..(447): Homolog of NCBI NO: 120664 NR Description: Glyceraldehyde 3-phosphate dehydrogenase B, precursor (NADP-dependent glyceraldehydephosphate dehydrogenase
  misc_feature (1)..(447): Homolog of NCBI NO: 15217555 NR Description: glyceraldehyde-3-phosphate dehydrogenase
  misc_feature (46)..(447): Homolog of NCBI NO: 81621 NR Description: glyceraldehyde-3-phosphate dehydrogenase (NADP)
  misc_feature (1)..(447): Homolog of NCBI NO: 120663 NR Description: Glyceraldehyde 3-phosphate dehydrogenase B, precursor (NADP-dependent glyceraldehydephosphate dehydrogenase
  misc_feature (5)..(447): Homolog of NCBI NO: 20733 NR Description: precursor C-terminal fragment (AA -80 to 367)
  misc_feature (1)..(447): Homolog of NCBI NO: 66028 NR Description: glyceraldehyde-3-phosphate dehydrogenase (NADP)
  misc_feature (1)..(447): Homolog of NCBI NO: 6063542 NR Description: EST C74302(E30840) corresponds to a region of the gene.~similar to glyceraldehyde-3-phosphate dehydrogenase.
  misc_feature (1)..(431): Homolog of NCBI NO: 18076102 NR Description: glyceraldehyde-3-phosphate dehydrogenase
  misc_feature (1)..(447): Homolog of NCBI NO: 66028 NR Description: glyceraldehyde-3-phosphate dehydrogenase (NADP)
  misc_feature (5)..(447): Homolog of NCBI NO: 20733 NR Description: precursor C-terminal fragment (AA -80 to 367)
  misc_feature (1)..(447): Homolog of NCBI NO: 120663 NR Description: Glyceraldehyde 3-phosphate dehydrogenase B, precursor (NADP-dependent glyceraldehydephosphate dehydrogenase
  misc_feature (46)..(447): Homolog of NCBI NO: 81621 NR Description: glyceraldehyde-3-phosphate dehydrogenase (NADP)
  misc_feature (1)..(447): Homolog of NCBI NO: 15217555 NR Description: glyceraldehyde-3-phosphate dehydrogenase

SEQ ID NO: 50196 - protein, 402 aa, Arabidopsis thaliana; identical to SEQ ID NO: 49988
  peptide (1)..(402): Ceres Seq. ID no. 13648344
  misc_feature (191)..(352): Pfam Name: Glyceraldehyde 3-phosphate dehydrogenase, Pfam Description: Glyceraldehyde 3-phosphate dehydrogenase,
  misc_feature (191)..(352): Pfam Name: Glyceraldehyde 3-phosphate dehydrogenase, Pfam Description: Glyceraldehyde 3-phosphate dehydrogenase,
  misc_feature (38)..(402): Homolog of NCBI NO: 18073141 NR Description: glyceraldehyde-3-phosphate dehydrogenase [Chara
  misc_feature (1)..(386): Homolog of NCBI NO: 18076102 NR Description: glyceraldehyde-3-phosphate dehydrogenase
  misc_feature (1)..(376): Homolog of NCBI NO: 120665 NR Description: Glyceraldehyde 3-phosphate dehydrogenase B, precursor (NADP-dependent glyceraldehydephosphate dehydrogenase
  misc_feature (1)..(402): Homolog of NCBI NO: 6063542 NR Description: EST C74302(E30840) corresponds to a region of the gene.~similar to glyceraldehyde-3-phosphate dehydrogenase.
  misc_feature (1)..(402): Homolog of NCBI NO: 120664 NR Description: Glyceraldehyde 3-phosphate dehydrogenase B, precursor (NADP-dependent glyceraldehydephosphate dehydrogenase
  misc_feature (38)..(402): Homolog of NCBI NO: 18073141 NR Description: glyceraldehyde-3-phosphate dehydrogenase [Chara
  misc_feature (1)..(376): Homolog of NCBI NO: 120665 NR Description: Glyceraldehyde 3-phosphate dehydrogenase B, precursor (NADP-dependent glyceraldehydephosphate dehydrogenase
  misc_feature (1)..(402): Homolog of NCBI NO: 120664 NR Description: Glyceraldehyde 3-phosphate dehydrogenase B, precursor (NADP-dependent glyceraldehydephosphate dehydrogenase
  misc_feature (1)..(402): Homolog of NCBI NO: 15217555 NR Description: glyceraldehyde-3-phosphate dehydrogenase
  misc_feature (1)..(402): Homolog of NCBI NO: 81621 NR Description: glyceraldehyde-3-phosphate dehydrogenase (NADP)
  misc_feature (1)..(402): Homolog of NCBI NO: 120663 NR Description: Glyceraldehyde 3-phosphate dehydrogenase B, precursor (NADP-dependent glyceraldehydephosphate dehydrogenase
  misc_feature (1)..(402): Homolog of NCBI NO: 20733 NR Description: precursor C-terminal fragment (AA -80 to 367)
  misc_feature (1)..(402): Homolog of NCBI NO: 66028 NR Description: glyceraldehyde-3-phosphate dehydrogenase (NADP)
  misc_feature (1)..(402): Homolog of NCBI NO: 6063542 NR Description: EST C74302(E30840) corresponds to a region of the gene.~similar to glyceraldehyde-3-phosphate dehydrogenase.
  misc_feature (1)..(386): Homolog of NCBI NO: 18076102 NR Description: glyceraldehyde-3-phosphate dehydrogenase
  misc_feature (1)..(402): Homolog of NCBI NO: 66028 NR Description: glyceraldehyde-3-phosphate dehydrogenase (NADP)
  misc_feature (1)..(402): Homolog of NCBI NO: 20733 NR Description: precursor C-terminal fragment (AA -80 to 367)
  misc_feature (1)..(402): Homolog of NCBI NO: 120663 NR Description: Glyceraldehyde 3-phosphate dehydrogenase B, precursor (NADP-dependent glyceraldehydephosphate dehydrogenase
  misc_feature (1)..(402): Homolog of NCBI NO: 81621 NR Description: glyceraldehyde-3-phosphate dehydrogenase (NADP)
  misc_feature (1)..(402): Homolog of NCBI NO: 15217555 NR Description: glyceraldehyde-3-phosphate dehydrogenase

SEQ ID NO: 50197 - protein, 317 aa, Arabidopsis thaliana; identical to SEQ ID NO: 49989
  peptide (1)..(317): Ceres Seq. ID no. 13648345
  misc_feature (106)..(267): Pfam Name: Glyceraldehyde 3-phosphate dehydrogenase, Pfam Description: Glyceraldehyde 3-phosphate dehydrogenase,
  misc_feature (106)..(267): Pfam Name: Glyceraldehyde 3-phosphate dehydrogenase, Pfam Description: Glyceraldehyde 3-phosphate dehydrogenase,
  misc_feature (1)..(317): Homolog of NCBI NO: 18073141 NR Description: glyceraldehyde-3-phosphate dehydrogenase [Chara
  misc_feature (1)..(301): Homolog of NCBI NO: 18076102 NR Description: glyceraldehyde-3-phosphate dehydrogenase
  misc_feature (1)..(291): Homolog of NCBI NO: 120665 NR Description: Glyceraldehyde 3-phosphate dehydrogenase B, precursor (NADP-dependent glyceraldehydephosphate dehydrogenase
  misc_feature (1)..(317): Homolog of NCBI NO: 6063542 NR Description: EST C74302(E30840) corresponds to a region of the gene.~similar to glyceraldehyde-3-phosphate dehydrogenase.
  misc_feature (1)..(317): Homolog of NCBI NO: 120664 NR Description: Glyceraldehyde 3-phosphate dehydrogenase B, precursor (NADP-dependent glyceraldehydephosphate dehydrogenase
  misc_feature (1)..(317): Homolog of NCBI NO: 18073141 NR Description: glyceraldehyde-3-phosphate dehydrogenase [Chara
  misc_feature (1)..(291): Homolog of NCBI NO: 120665 NR Description: Glyceraldehyde 3-phosphate dehydrogenase B, precursor (NADP-dependent glyceraldehydephosphate dehydrogenase
  misc_feature (1)..(317): Homolog of NCBI NO: 120664 NR Description: Glyceraldehyde 3-phosphate dehydrogenase B, precursor (NADP-dependent glyceraldehydephosphate dehydrogenase
  misc_feature (1)..(317): Homolog of NCBI NO: 15217555 NR Description: glyceraldehyde-3-phosphate dehydrogenase
  misc_feature (1)..(317): Homolog of NCBI NO: 81621 NR Description: glyceraldehyde-3-phosphate dehydrogenase (NADP)
  misc_feature (1)..(317): Homolog of NCBI NO: 120663 NR Description: Glyceraldehyde 3-phosphate dehydrogenase B, precursor (NADP-dependent glyceraldehydephosphate dehydrogenase
  misc_feature (1)..(317): Homolog of NCBI NO: 20733 NR Description: precursor C-terminal fragment (AA -80 to 367)
  misc_feature (1)..(317): Homolog of NCBI NO: 66028 NR Description: glyceraldehyde-3-phosphate dehydrogenase (NADP)
  misc_feature (1)..(317): Homolog of NCBI NO: 6063542 NR Description: EST C74302(E30840) corresponds to a region of the gene.~similar to glyceraldehyde-3-phosphate dehydrogenase.
  misc_feature (1)..(301): Homolog of NCBI NO: 18076102 NR Description: glyceraldehyde-3-phosphate dehydrogenase
  misc_feature (1)..(317): Homolog of NCBI NO: 66028 NR Description: glyceraldehyde-3-phosphate dehydrogenase (NADP)
  misc_feature (1)..(317): Homolog of NCBI NO: 20733 NR Description: precursor C-terminal fragment (AA -80 to 367)
  misc_feature (1)..(317): Homolog of NCBI NO: 120663 NR Description: Glyceraldehyde 3-phosphate dehydrogenase B, precursor (NADP-dependent glyceraldehydephosphate dehydrogenase
  misc_feature (1)..(317): Homolog of NCBI NO: 81621 NR Description: glyceraldehyde-3-phosphate dehydrogenase (NADP)
  misc_feature (1)..(317): Homolog of NCBI NO: 15217555 NR Description: glyceraldehyde-3-phosphate dehydrogenase

SEQ ID NO: 50198 - DNA, 2310 bp, Arabidopsis thaliana
  misc_feature (1)..(2310): Ceres Seq. ID no. 12591386
  misc_feature: MA Experiment ID: 20000307 Result: Up-regulated in Transcription
  misc_feature: MA Experiment 20000307 PARAMETER Experiment Name: At_Germinating_Seeds_Sub_P Parameter: Age (hr) Value: 24 vs. 0
  misc_feature: MA Experiment 20000307 PARAMETER Experiment Name: At_Germinating_Seeds_Sub_P Parameter: Organism Value: A. thaliana
  misc_feature: MA Experiment 20000307 PARAMETER Experiment Name: At_Germinating_Seeds_Sub_P Parameter: Plant Line Value: WS
  misc_feature: MA Experiment 20000307 PARAMETER Experiment Name: At_Germinating_Seeds_Sub_P Parameter: Tissue Value: Germinating Seeds
  misc_feature: MA Experiment ID: 20000315 Result: Up-regulated in Transcription
  misc_feature: MA Experiment 20000315 PARAMETER Experiment Name: At_14day_Shoots-Roots_Sub_P Parameter: Age (day) Value: 14
  misc_feature: MA Experiment 20000315 PARAMETER Experiment Name: At_14day_Shoots-Roots_Sub_P Parameter: Organism Value: A. thaliana
  misc_feature: MA Experiment 20000315 PARAMETER Experiment Name: At_14day_Shoots-Roots_Sub_P Parameter: Plant Line Value: WS
  misc_feature: MA Experiment 20000315 PARAMETER Experiment Name: At_14day_Shoots-Roots_Sub_P Parameter: Tissue Value: Shoots vs. Whole Plant
tccttcaattccaattcaaagctccttccttttttcacatctctcttcttcaaattcaatcatcataaaaatcgaatctttattcttcagagagcttcaatggcgaccacatcatcaaacccattactactttcttcaaatttcctcggttctcaaattataatctcagctccaacaccaaaaaccaccacaaagtctcttcctttctcagtaatctctcgaaaaagataccaaatttctcaatcggagaagctaatgaaatcgttaccatcacaagctgcgttagcagctctgttgttctcatcttcatctccacaagctttagcagttaacgaaccagttcaaccaccagcaccaaccattactgctgaagctcaatcaccaaatctgtcgacttttggtcaaaacgttttgatgacagcaccgaatccacaagctcaatcatcagatcttcctgatggaacacaatggcgatacagtgagtttctaaatgctgtgaagaaaggtaaagttgagagagtgaagtttagtaaagatggttctgttcttcagttaacagctgttgataatcgtcgtgctactgttattgttcctaatgatcctgatttgattgatatcttggcgatgaatggtgttgatatatctgtttctgaaggagaaggtggaaatgggttgtttgatttcattggtaatttgctttttcctttgttggcttttggagggttgttttatctctttagaggaggtcaaggaggtgctggtggtcctggaggtttaggaggtcctatggatttcggaagatcgaaatcgaagtttcaggaagtgcctgaaaccggtgtgacatttggtgatgttgctggagctgatcaagctaagcttgagttacaagaagttgttgatttcttgaagaatcctgataagtatactgcgttaggtgctaagattcctaaaggttgtttgttggttggtccaccgggtacggggaagacgcttttggctagagctgtggctggagaagctggagtgccgttcttttcgtgtgctgcttcggagtttgttgagctttttgttggtgtgggtgcttctagagttagggatttatttgagaaggcgaaatcgaaagctccttgtattgtgtttattgatgagattgatgctgttggtagacaaagaggagctgggatgggtggtggaaatgatgagagggaacagactattaatcagcttttgactgagatggatgggttttctggtaactctggtgtcattgtgttggctgccactaatagaccggatgttcttgactccgcgttgctgagacctggtagatttgaccggcaagtcacagtggataggcctgatgtagccggaagagttcagatccttaaggtgcattctagaggaaaagctattgggaaggatgttgattacgaaaaagttgcgaggagaactccgggtttcactggtgctgatttgcagaacctgatgaatgaagctgcgattcttgctgctagacgtgagcttaaggagataagcaaggatgaaatatctgatgctcttgagaggatcattgctggacctgaaaagaagaacgctgttgtctctgaggagaagaaaagacttgttgcttaccatgaggctgggcatgctttagttggtgcacttatgccggagtatgatccagtggccaagatatcgattattccacgtggccaagctggtgggctcacctttttcgctcctagcgaagagaggctagagtccggattgtatagcagaagctaccttgagaaccaaatggctgttgcacttggtggaagggttgcagaagaggtgatctttggagacgagaatgtgacaaccggagcatcaaatgatttcatgcaagtgtcgcgggtggctcgccaaatggttgagagattcgggttcagcaaaaagattggacaagttgcagttggtggagcaggaggaaaccctttcttgggtcaaagtatgtcatcgcagaaggattactcgatggcaacagcggatgtggttgatgcggaagtgagagagctcgttgagaaggcgtacgtgagagcgaaagagatcataacaacacaaattgatatcctacacaagcttgcacagctccttattgagaaagaaactgtggatggagaagagttcatgagtcttttcattgacggacaagccgagttatatgtttcttaaaatcaactaattggcttgtaataataccaattagcttcgatctatacatactgtatgttaatatacattgacatgttcagagacttttctttttct

SEQ ID NO: 50199 - protein, 737 aa, Arabidopsis thaliana
  peptide (1)..(737): Ceres Seq. ID no. 12591387
  misc_feature (511)..(726): Pfam Name: Peptidase family M41 Pfam Description: Peptidase family M41
  misc_feature (155)..(737): Homolog of NCBI NO: 16331432 NR Description: cell division protein; FtsH [Synechocystis sp.
  misc_feature (157)..(734): Homolog of NCBI NO: 23041054 NR Description: hypothetical protein [Trichodesmium erythraeum
  misc_feature (157)..(726): Homolog of NCBI NO: 23129565 NR Description: hypothetical protein [Nostoc punctiforme]
  misc_feature (157)..(733): Homolog of NCBI NO: 17228756 NR Description: cell division protein [Nostoc sp. PCC 7120]
  misc_feature (98)..(722): Homolog of NCBI NO: 2077957 NR Description: ATPase [Arabidopsis thaliana]
  misc_feature (87)..(715): Homolog of NCBI NO: 2492515 NR Description: Cell division protein ftsH homolog, chloroplast
  misc_feature (34)..(737): Homolog of NCBI NO: 17865463 NR Description: Cell division protein ftsH homolog, chloroplast
  misc_feature (43)..(737): Homolog of NCBI NO: 17865457 NR Description: Cell division protein ftsH homolog, chloroplast
  misc_feature (38)..(730): Homolog of NCBI NO: 1483215 NR Description: chloroplast FtsH protease [Arabidopsis thaliana]
  misc_feature (38)..(737): Homolog of NCBI NO: 18402995 NR Description: chloroplast FtsH protease
SFNSNSKLLPFFTSLFFKFNHHKNRIFILQRASMATTSSNPLLLSSNFLGSQIIISAPTPKTTTKSLPFSVISRKRYQISQSEKLMKSLPSQAALAALLFSSSSPQALAVNEPVQPPAPTITAEAQSPNLSTFGQNVLMTAPNPQAQSSDLPDGTQWRYSEFLNAVKKGKVERVKFSKDGSVLQLTAVDNRRATVIVPNDPDLIDILAMNGVDISVSEGEGGNGLFDFIGNLLFPLLAFGGLFYLFRGGQGGAGGPGGLGGPMDFGRSKSKFQEVPETGVTFGDVAGADQAKLELQEVVDFLKNPDKYTALGAKIPKGCLLVGPPGTGKTLLARAVAGEAGVPFFSCAASEFVELFVGVGASRVRDLFEKAKSKAPCIVFIDEIDAVGRQRGAGMGGGNDEREQTINQLLTEMDGFSGNSGVIVLAATNRPDVLDSALLRPGRFDRQVTVDRPDVAGRVQILKVHSRGKAIGKDVDYEKVARRTPGFTGADLQNLMNEAAILAARRELKEISKDEISDALERIIAGPEKKNAVVSEEKKRLVAYHEAGHALVGALMPEYDPVAKISIIPRGQAGGLTFFAPSEERLESGLYSRSYLENQMAVALGGRVAEEVIFGDENVTTGASNDFMQVSRVARQMVERFGFSKKIGQVAVGGAGGNPFLGQSMSSQKDYSMATADVVDAEVRELVEKAYVRAKEIITTQIDILHKLAQLLIEKETVDGEEFMSLFIDGQAELYVS

SEQ ID NO: 50200 - protein, 704 aa, Arabidopsis thaliana
  peptide (1)..(704): Ceres Seq. ID no. 12591388
  misc_feature (478)..(693): Pfam Name: Peptidase family M41 Pfam Description: Peptidase family M41
  misc_feature (122)..(704): Homolog of NCBI NO: 16331432 NR Description: cell division protein; FtsH [Synechocystis sp.
  misc_feature (124)..(701): Homolog of NCBI NO: 23041054 NR Description: hypothetical protein [Trichodesmium erythraeum
  misc_feature (124)..(693): Homolog of NCBI NO: 23129565 NR Description: hypothetical protein [Nostoc punctiforme]
  misc_feature (124)..(700): Homolog of NCBI NO: 17228756 NR Description: cell division protein [Nostoc sp. PCC 7120]
  misc_feature (65)..(689): Homolog of NCBI NO: 2077957 NR Description: ATPase [Arabidopsis thaliana]
  misc_feature (54)..(682): Homolog of NCBI NO: 2492515 NR Description: Cell division protein ftsH homolog, chloroplast
  misc_feature (1)..(704): Homolog of NCBI NO: 17865463 NR Description: Cell division protein ftsH homolog, chloroplast
  misc_feature (10)..(704): Homolog of NCBI NO: 17865457 NR Description: Cell division protein ftsH homolog, chloroplast
  misc_feature (5)..(697): Homolog of NCBI NO: 1483215 NR Description: chloroplast FtsH protease [Arabidopsis thaliana]
  misc_feature (5)..(704): Homolog of NCBI NO: 18402995 NR Description: chloroplast FtsH protease
MATTSSNPLLLSSNFLGSQIIISAPTPKTTTKSLPFSVISRKRYQISQSEKLMKSLPSQAALAALLFSSSSPQALAVNEPVQPPAPTITAEAQSPNLSTFGQNVLMTAPNPQAQSSDLPDGTQWRYSEFLNAVKKGKVERVKFSKDGSVLQLTAVDNRRATVIVPNDPDLIDILAMNGVDISVSEGEGGNGLFDFIGNLLFPLLAFGGLFYLFRGGQGGAGGPGGLGGPMDFGRSKSKFQEVPETGVTFGDVAGADQAKLELQEVVDFLKNPDKYTALGAKIPKGCLLVGPPGTGKTLLARAVAGEAGVPFFSCAASEFVELFVGVGASRVRDLFEKAKSKAPCIVFIDEIDAVGRQRGAGMGGGNDEREQTINQLLTEMDGFSGNSGVIVLAATNRPDVLDSALLRPGRFDRQVTVDRPDVAGRVQILKVHSRGKAIGKDVDYEKVARRTPGFTGADLQNLMNEAAILAARRELKEISKDEISDALERIIAGPEKKNAVVSEEKKRLVAYHEAGHALVGALMPEYDPVAKISIIPRGQAGGLTFFAPSEERLESGLYSRSYLENQMAVALGGRVAEEVIFGDENVTTGASNDFMQVSRVARQMVERFGFSKKIGQVAVGGAGGNPFLGQSMSSQKDYSMATADVVDAEVRELVEKAYVRAKEIITTQIDILHKLAQLLIEKETVDGEEFMSLFIDGQAELYVS

SEQ ID NO: 50201 - protein, 652 aa, Arabidopsis thaliana
  peptide (1)..(652): Ceres Seq. ID no. 12591389
  misc_feature (426)..(641): Pfam Name: Peptidase family M41 Pfam Description: Peptidase family M41
  misc_feature (70)..(652): Homolog of NCBI NO: 16331432 NR Description: cell division protein; FtsH [Synechocystis sp.
  misc_feature (72)..(649): Homolog of NCBI NO: 23041054 NR Description: hypothetical protein [Trichodesmium erythraeum
  misc_feature (72)..(641): Homolog of NCBI NO: 23129565 NR Description: hypothetical protein [Nostoc punctiforme]
  misc_feature (72)..(648): Homolog of NCBI NO: 17228756 NR Description: cell division protein [Nostoc sp. PCC 7120]
  misc_feature (13)..(637): Homolog of NCBI NO: 2077957 NR Description: ATPase [Arabidopsis thaliana]
  misc_feature (2)..(630): Homolog of NCBI NO: 2492515 NR Description: Cell division protein ftsH homolog, chloroplast
  misc_feature (1)..(652): Homolog of NCBI NO: 17865463 NR Description: Cell division protein ftsH homolog, chloroplast
  misc_feature (1)..(652): Homolog of NCBI NO: 17865457 NR Description: Cell division protein ftsH homolog, chloroplast
  misc_feature (1)..(645): Homolog of NCBI NO: 1483215 NR Description: chloroplast FtsH protease [Arabidopsis thaliana]
  misc_feature (1)..(652): Homolog of NCBI NO: 18402995 NR Description: chloroplast FtsH protease
MKSLPSQAALAALLFSSSSPQALAVNEPVQPPAPTITAEAQSPNLSTFGQNVLMTAPNPQAQSSDLPDGTQWRYSEFLNAVKKGKVERVKFSKDGSVLQLTAVDNRRATVIVPNDPDLIDILAMNGVDISVSEGEGGNGLFDFIGNLLFPLLAFGGLFYLFRGGQGGAGGPGGLGGPMDFGRSKSKFQEVPETGVTFGDVAGADQAKLELQEVVDFLKNPDKYTALGAKIPKGCLLVGPPGTGKTLLARAVAGEAGVPFFSCAASEFVELFVGVGASRVRDLFEKAKSKAPCIVFIDEIDAVGRQRGAGMGGGNDEREQTINQLLTEMDGFSGNSGVIVLAATNRPDVLDSALLRPGRFDRQVTVDRPDVAGRVQILKVHSRGKAIGKDVDYEKVARRTPGFTGADLQNLMNEAAILAARRELKEISKDEISDALERIIAGPEKKNAVVSEEKKRLVAYHEAGHALVGALMPEYDPVAKISIIPRGQAGGLTFFAPSEERLESGLYSRSYLENQMAVALGGRVAEEVIFGDENVTTGASNDFMQVSRVARQMVERFGFSKKIGQVAVGGAGGNPFLGQSMSSQKDYSMATADVVDAEVRELVEKAYVRAKEIITTQIDILHKLAQLLIEKETVDGEEFMSLFIDGQAELYVS

SEQ ID NO: 50202 - DNA, 2000 bp, Arabidopsis thaliana
  misc_feature (1)..(2000): Ceres Seq. ID no. 12591944
  misc_feature: MA Experiment ID: 20000166 Result: Down-regulated in Transcription
  misc_feature: MA Experiment 20000166 PARAMETER Experiment Name: At_100uM_ABA_P Parameter: Age (day) Value: 14
  misc_feature: MA Experiment 20000166 PARAMETER Experiment Name: At_100uM_ABA_P Parameter: Organism Value: A. thaliana
  misc_feature: MA Experiment 20000166 PARAMETER Experiment Name: At_100uM_ABA_P Parameter: Plant Line Value: WS
  misc_feature: MA Experiment 20000166 PARAMETER Experiment Name: At_100uM_ABA_P Parameter: Timepoint (hr) Value: 1
  misc_feature: MA Experiment 20000166 PARAMETER Experiment Name: At_100uM_ABA_P Parameter: Tissue Value: Aerial
  misc_feature: MA Experiment 20000166 PARAMETER Experiment Name: At_100uM_ABA_P Parameter: Treatment Value: 100uM ABA vs. No Treatment
  misc_feature: MA Experiment ID: 20000171 Result: Down-regulated in Transcription
  misc_feature: MA Experiment 20000171 PARAMETER Experiment Name: At_42deg_Heat_P Parameter: Age (day) Value: 14
  misc_feature: MA Experiment 20000171 PARAMETER Experiment Name: At_42deg_Heat_P Parameter: Organism Value: A. thaliana
  misc_feature: MA Experiment 20000171 PARAMETER Experiment Name: At_42deg_Heat_P Parameter: Plant Line Value: WS
  misc_feature: MA Experiment 20000171 PARAMETER Experiment Name: At_42deg_Heat_P Parameter: Temperature (deg C) Value: 42 vs. 22
  misc_feature: MA Experiment 20000171 PARAMETER Experiment Name: At_42deg_Heat_P Parameter: Timepoint (hr) Value: 1
  misc_feature: MA Experiment 20000171 PARAMETER Experiment Name: At_42deg_Heat_P Parameter: Tissue Value: Aerial
  misc_feature: MA Experiment ID: 20000184 Result: Down-regulated in Transcription
  misc_feature: MA Experiment 20000184 PARAMETER Experiment Name: At_Shoots__P Parameter: Age (day) Value: 7
  misc_feature: MA Experiment 20000184 PARAMETER Experiment Name: At_Shoots__P Parameter: Tissue Value: Shoots vs. Whole Plant
  misc_feature: MA Experiment ID: 20000227 Result: Down-regulated in Transcription
  misc_feature: MA Experiment 20000227 PARAMETER Experiment Name: At_Root-Tips-vs-Tops_P Parameter: Tissue Value: Root Tips vs. Root Tops
  misc_feature: MA Experiment ID: 20000264 Result: Down-regulated in Transcription
  misc_feature: MA Experiment 20000264 PARAMETER Experiment Name: At_Open_Flower_P Parameter: Age (day) Value: 21
  misc_feature: MA Experiment 20000264 PARAMETER Experiment Name: At_Open_Flower_P Parameter: Plant Line Value: WS
  misc_feature: MA Experiment 20000264 PARAMETER Experiment Name: At_Open_Flower_P Parameter: Tissue Value: Open Flower vs. Whole Plant
  misc_feature: MA Experiment ID: 20000265 Result: Down-regulated in Transcription
  misc_feature: MA Experiment 20000265 PARAMETER Experiment Name: At_Open_Flower_P Parameter: Age (day) Value: 21
  misc_feature: MA Experiment 20000265 PARAMETER Experiment Name: At_Open_Flower_P Parameter: Plant Line Value: WS
  misc_feature: MA Experiment 20000265 PARAMETER Experiment Name: At_Open_Flower_P Parameter: Tissue Value: Closed Flower vs. Whole Plant
  misc_feature: MA Experiment ID: 20000286 Result: Down-regulated in Transcription
  misc_feature: MA Experiment 20000286 PARAMETER Experiment Name: At_Open_Flower_P Parameter: Age (day) Value: 21
  misc_feature: MA Experiment 20000286 PARAMETER Experiment Name: At_Open_Flower_P Parameter: Plant Line Value: WS
  misc_feature: MA Experiment 20000286 PARAMETER Experiment Name: At_Open_Flower_P Parameter: Tissue Value: Half Open vs. Whole Plant
  misc_feature: MA Experiment ID: 20000709 Result: Down-regulated in Transcription
  misc_feature: MA Experiment 20000709 PARAMETER Experiment Name: At_15mM_NH4NO3_L-to-H_P Parameter: Age (hr) Value: 14
  misc_feature: MA Experiment 20000709 PARAMETER Experiment Name: At_15mM_NH4NO3_L-to-H_P Parameter: Organism Value: A. thaliana
  misc_feature: MA Experiment 20000709 PARAMETER Experiment Name: At_15mM_NH4NO3_L-to-H_P Parameter: Plant Line Value: WS
  misc_feature: MA Experiment 20000709 PARAMETER Experiment Name: At_15mM_NH4NO3_L-to-H_P Parameter: Timepoint (hr) Value: 4
  misc_feature: MA Experiment 20000709 PARAMETER Experiment Name: At_15mM_NH4NO3_L-to-H_P Parameter: Tissue Value: Aerial
  misc_feature: MA Experiment 20000709 PARAMETER Experiment Name: At_15mM_NH4NO3_L-to-H_P Parameter: Treatment Value: 15mM NH4NO3 vs. 30mM Mannitol
  misc_feature: MA Experiment ID: 20000794 Result: Down-regulated in Transcription
  misc_feature: MA Experiment 20000794 PARAMETER Experiment Name: At_Petals_P Parameter: Age (day) Value: 23-25 days
  misc_feature: MA Experiment 20000794 PARAMETER Experiment Name: At_Petals_P Parameter: Plant Line Value: WS
  misc_feature: MA Experiment 20000794 PARAMETER Experiment Name: At_Petals_P Parameter: Tissue Value: Petals vs. Whole plant
  misc_feature: MA Experiment ID: 20001248 Result: Up-regulated in Transcription
  misc_feature: MA Experiment 20001248 PARAMETER Experiment Name: At_Far-red-induction_P Parameter: Age (day) Value: 7
  misc_feature: MA Experiment 20001248 PARAMETER Experiment Name: At_Far-red-induction_P Parameter: Light Value: Far-red vs. White
  misc_feature: MA Experiment 20001248 PARAMETER Experiment Name: At_Far-red-induction_P Parameter: Organism Value: A. thaliana
  misc_feature: MA Experiment 20001248 PARAMETER Experiment Name: At_Far-red-induction_P Parameter: Plant Line Value: Columbia
  misc_feature: MA Experiment 20001248 PARAMETER Experiment Name: At_Far-red-induction_P Parameter: Timepoint (hr) Value: 4
  misc_feature: MA Experiment 20001248 PARAMETER Experiment Name: At_Far-red-induction_P Parameter: Tissue Value: Whole Plant
  misc_feature: MA Experiment ID: 20001450 Result: Up-regulated in Transcription
  misc_feature: MA Experiment 20001450 PARAMETER Experiment Name: At_Far-red-induction_P Parameter: Age (day) Value: 7
  misc_feature: MA Experiment 20001450 PARAMETER Experiment Name: At_Far-red-induction_P Parameter: Light Value: Far-red vs. White
  misc_feature: MA Experiment 20001450 PARAMETER Experiment Name: At_Far-red-induction_P Parameter: Organism Value: A. thaliana
  misc_feature: MA Experiment 20001450 PARAMETER Experiment Name: At_Far-red-induction_P Parameter: Plant Line Value: Columbia
  misc_feature: MA Experiment 20001450 PARAMETER Experiment Name: At_Far-red-induction_P Parameter: Timepoint (hr) Value: 8
  misc_feature: MA Experiment 20001450 PARAMETER Experiment Name: At_Far-red-induction_P Parameter: Tissue Value: Whole Plant
  misc_feature: MA Experiment ID: 20001555 Result: Down-regulated in Transcription
  misc_feature: MA Experiment 20001555 PARAMETER Experiment Name: At_Drought_Soil_Dry_P Parameter: Age (day) Value: 24
  misc_feature: MA Experiment 20001555 PARAMETER Experiment Name: At_Drought_Soil_Dry_P Parameter: Organism Value: A. thaliana
  misc_feature: MA Experiment 20001555 PARAMETER Experiment Name: At_Drought_Soil_Dry_P Parameter: Plant Line Value: WS
  misc_feature: MA Experiment 20001555 PARAMETER Experiment Name: At_Drought_Soil_Dry_P Parameter: Post Timepoint (hr) Value: None
  misc_feature: MA Experiment 20001555 PARAMETER Experiment Name: At_Drought_Soil_Dry_P Parameter: Post-Treatment Value: None
  misc_feature: MA Experiment 20001555 PARAMETER Experiment Name: At_Drought_Soil_Dry_P Parameter: Timepoint (day) Value: 10
  misc_feature: MA Experiment 20001555 PARAMETER Experiment Name: At_Drought_Soil_Dry_P Parameter: Treatment Value: Drought vs. No Drought
  misc_feature: MA Experiment ID: 20001556 Result: Down-regulated in Transcription
  misc_feature: MA Experiment 20001556 PARAMETER Experiment Name: At_Drought_Soil_Dry_P Parameter: Age (day) Value: 26
  misc_feature: MA Experiment 20001556 PARAMETER Experiment Name: At_Drought_Soil_Dry_P Parameter: Organism Value: A. thaliana
  misc_feature: MA Experiment 20001556 PARAMETER Experiment Name: At_Drought_Soil_Dry_P Parameter: Plant Line Value: WS
  misc_feature: MA Experiment 20001556 PARAMETER Experiment Name: At_Drought_Soil_Dry_P Parameter: Post Timepoint (hr) Value: None
  misc_feature: MA Experiment 20001556 PARAMETER Experiment Name: At_Drought_Soil_Dry_P Parameter: Post-Treatment Value: None
  misc_feature: MA Experiment 20001556 PARAMETER Experiment Name: At_Drought_Soil_Dry_P Parameter: Timepoint (day) Value: 12
  misc_feature: MA Experiment 20001556 PARAMETER Experiment Name: At_Drought_Soil_Dry_P Parameter: Treatment Value: Drought vs. No Drought
  misc_feature: MA Experiment ID: 20001557 Result: Up-regulated in Transcription
  misc_feature: MA Experiment 20001557 PARAMETER Experiment Name: At_Drought_Soil_Dry_P Parameter: Age (day) Value: 27
  misc_feature: MA Experiment 20001557 PARAMETER Experiment Name: At_Drought_Soil_Dry_P Parameter: Organism Value: A. thaliana
  misc_feature: MA Experiment 20001557 PARAMETER Experiment Name: At_Drought_Soil_Dry_P Parameter: Plant Line Value: WS
  misc_feature: MA Experiment 20001557 PARAMETER Experiment Name: At_Drought_Soil_Dry_P Parameter: Post Timepoint (hr) Value: 3
  misc_feature: MA Experiment 20001557 PARAMETER Experiment Name: At_Drought_Soil_Dry_P Parameter: Post-Treatment Value: Re-Water vs. No Drought
  misc_feature: MA Experiment 20001557 PARAMETER Experiment Name: At_Drought_Soil_Dry_P Parameter: Timepoint (day) Value: 13
  misc_feature: MA Experiment 20001557 PARAMETER Experiment Name: At_Drought_Soil_Dry_P Parameter: Treatment Value: Drought vs. No Drought
  misc_feature: MA Experiment ID: 20001904 Result: Down-regulated in Transcription
  misc_feature: MA Experiment 20001904 PARAMETER Experiment Name: At_Drought_Reproduction_P Parameter: Age (day) Value: 37
  misc_feature: MA Experiment 20001904 PARAMETER Experiment Name: At_Drought_Reproduction_P Parameter: Organism Value: A. thaliana
  misc_feature: MA Experiment 20001904 PARAMETER Experiment Name: At_Drought_Reproduction_P Parameter: Plant Line Value: WS
  misc_feature: MA Experiment 20001904 PARAMETER Experiment Name: At_Drought_Reproduction_P Parameter: Timepoint (day) Value: 7
  misc_feature: MA Experiment 20001904 PARAMETER Experiment Name: At_Drought_Reproduction_P Parameter: Tissue Value: Rosettes
  misc_feature: MA Experiment 20001904 PARAMETER Experiment Name: At_Drought_Reproduction_P Parameter: Treatment Value: Drought vs. No Drought
  misc_feature: MA Experiment ID: 20001906 Result: Down-regulated in Transcription
  misc_feature: MA Experiment 20001906 PARAMETER Experiment Name: At_Drought_Reproduction_P Parameter: Age (day) Value: 35
  misc_feature: MA Experiment 20001906 PARAMETER Experiment Name: At_Drought_Reproduction_P Parameter: Organism Value: A. thaliana
  misc_feature: MA Experiment 20001906 PARAMETER Experiment Name: At_Drought_Reproduction_P Parameter: Plant Line Value: WS
  misc_feature: MA Experiment 20001906 PARAMETER Experiment Name: At_Drought_Reproduction_P Parameter: Timepoint (day) Value: 5
  misc_feature: MA Experiment 20001906 PARAMETER Experiment Name: At_Drought_Reproduction_P Parameter: Tissue Value: Siliques
  misc_feature: MA Experiment 20001906 PARAMETER Experiment Name: At_Drought_Reproduction_P Parameter: Treatment Value: Drought vs. No Drought
aatatcaaatcttgtcttcttcttcttcttcttcttctttttcttcttcttacatttgatttctctgtctgaattcgagaaccagatctactaattacctgagagaaaaaagatctgctctgtttgtctgaaacagacagaagtcaacaaatctttcatttgttttttagcaaatcaaagaaatggccggagggttcgtcagtcaaacgccgggtgttcggaactacaattacaaactgacaccgaaagtgtttgtgacatgtttcatcggtgcttttggtggtctcatcttcggatacgatctcgggatctcaggaggggtaacctcaatggagccattcttggaagagttcttcccttacgtctacaagaagatgaagagcgcacatgagaacgagtactgtcgatttgatagtcagcttctcactctcttcacttcgtctctctatgtggcggctttggtgtcttctctctttgcctccaccattactagagttttcggaaggaaatggtcgatgtttctcggtggtttcaccttcttcatcggttctgctttcaacggctttgcccaaaacatcgctatgcttctcattggtcgtatcctacttggtttcggagtcggattcgccaatcaatctgtaccggtttatttatcagaaatggctcctccgaatctaagaggagctttcaacaacgggtttcaagtagcgattatctttggtattgtggttgcaacgatcatcaattacttcaccgcacagatgaaaggaaacatcggatggagaatctctctcggattagcttgtgtccctgcagtgatgatcatgatcggagctctgatccttcccgacactcccaactctctcatcgaacgtggctacaccgaagaggccaaggaaatgcttcagtccatccgaggaaccaatgaagtcgatgaagagtttcaagatctcattgatgcaagtgaggagtccaagcaagtgaaacacccatggaagaacatcatgcttcctcgttacagaccacaattgatcatgacttgcttcattcctttctttcaacaacttaccggaatcaatgtcattaccttctacgccccggttttgttccaaaccctcgggttcggtagcaaagcttccctcctatcagctatggtaacgggtatcatcgagctcttgtgtaccttcgtctctgtttttacagtggataggtttggaagaagaatcttgttcctccaaggaggtatccagatgcttgtctctcagatcgctattggagccatgattggagtcaaatttggagtggctggaacaggaaacatagggaaaagtgatgccaatctaatcgtggcactgatctgcatctatgtagcgggtttcgcctggtcatggggaccgttgggatggttggttcctagtgagatatctccactagagatccgatcagcagctcaagccataaacgtttcggtcaacatgttcttcacattccttgtggctcagctcttcctcactatgctttgtcacatgaaattcggactattcttcttcttcgccttctttgttgtcataatgacaatattcatctacttgatgttgcctgagacaaagaatgtgccaatcgaagagatgaacagagtgtggaaggcacattggttctggggaaagtttattcctgatgaagctgtcaatatgggtgctgctgagatgcaacagaagtccgtatgatgatgatcaagaatgaagttttctttgggcaataaagatttatgagaaaagagaaagtgaataattcttgggatgaaataagaataattgtcaaaaatgccttacttcctaaaagaaagctgctctgtctttagcttcagagacttagctttcattgtttcttctttcttcttttttaatgtttctttgttgaaattgttatttggggcctaaagatgtaaaaacaaaaaaaagaacaaaattatttaaaaatggtttcttattttacatttc

SEQ ID NO: 50203 - protein, 514 aa, Arabidopsis thaliana
  peptide (1)..(514): Ceres Seq. ID no. 12591945
  misc_feature (26)..(487): Pfam Name: Sugar (and other) transporter Pfam Description: Sugar (and other) transporter
  misc_feature (83)..(483): Homolog of NCBI NO: 27467165 NR Description: bicyclomycin resistance protein TcaB
  misc_feature (2)..(509): Homolog of NCBI NO: 3915039 NR Description: Sugar carrier protein C
  misc_feature (2)..(513): Homolog of NCBI NO: 81619 NR Description: glucose transport protein STP1 - Arabidopsis
  misc_feature (2)..(513): Homolog of NCBI NO: 15220330 NR Description: glucose transporter
  misc_feature (1)..(497): Homolog of NCBI NO: 1353516 NR Description: sugar transporter
  misc_feature (11)..(504): Homolog of NCBI NO: 7446727 NR Description: monosaccharid transport protein - fava bean
  misc_feature (1)..(496): Homolog of NCBI NO: 15237271 NR Description: monosaccharide transporter; protein id:
  misc_feature (1)..(514): Homolog of NCBI NO: 15222935 NR Description: hexose transporter, putative; protein id:
  misc_feature (1)..(502): Homolog of NCBI NO: 15231001 NR Description: putative monosaccharide transport protein, STP4
  misc_feature (1)..(514): Homolog of NCBI NO: 15230987 NR Description: monosaccharide transport protein, STP4
MAGGFVSQTPGVRNYNYKLTPKVFVTCFIGAFGGLIFGYDLGISGGVTSMEPFLEEFFPYVYKKMKSAHENEYCRFDSQLLTLFTSSLYVAALVSSLFASTITRVFGRKWSMFLGGFTFFIGSAFNGFAQNIAMLLIGRILLGFGVGFANQSVPVYLSEMAPPNLRGAFNNGFQVAIIFGIVVATIINYFTAQMKGNIGWRISLGLACVPAVMIMIGALILPDTPNSLIERGYTEEAKEMLQSIRGTNEVDEEFQDLIDASEESKQVKHPWKNIMLPRYRPQLIMTCFIPFFQQLTGINVITFYAPVLFQTLGFGSKASLLSAMVTGIIELLCTFVSVFTVDRFGRRILFLQGGIQMLVSQIAIGAMIGVKFGVAGTGNIGKSDANLIVALICIYVAGFAWSWGPLGWLVPSEISPLEIRSAAQAINVSVNMFFTFLVAQLFLTMLCHMKFGLFFFFAFFVVIMTIFIYLMLPETKNVPIEEMNRVWKAHWFWGKFIPDEAVNMGAAEMQQKSV

SEQ ID NO: 50204 - protein, 465 aa, Arabidopsis thaliana
  peptide (1)..(465): Ceres Seq. ID no. 12591946
  misc_feature (1)..(438): Pfam Name: Sugar (and other) transporter Pfam Description: Sugar (and other) transporter
  misc_feature (34)..(434): Homolog of NCBI NO: 27467165 NR Description: bicyclomycin resistance protein TcaB
  misc_feature (1)..(460): Homolog of NCBI NO: 3915039 NR Description: Sugar carrier protein C
  misc_feature (1)..(464): Homolog of NCBI NO: 81619 NR Description: glucose transport protein STP1 - Arabidopsis
  misc_feature (1)..(464): Homolog of NCBI NO: 15220330 NR Description: glucose transporter
  misc_feature (1)..(448): Homolog of NCBI NO: 1353516 NR Description: sugar transporter
  misc_feature (1)..(455): Homolog of NCBI NO: 7446727 NR Description: monosaccharid transport protein - fava bean
  misc_feature (1)..(447): Homolog of NCBI NO: 15237271 NR Description: monosaccharide transporter; protein id:
  misc_feature (1)..(465): Homolog of NCBI NO: 15222935 NR Description: hexose transporter, putative; protein id:
  misc_feature (1)..(453): Homolog of NCBI NO: 15231001 NR Description: putative monosaccharide transport protein, STP4
  misc_feature (1)..(465): Homolog of NCBI NO: 15230987 NR Description: monosaccharide transport protein, STP4
MEPFLEEFFPYVYKKMKSAHENEYCRFDSQLLTLFTSSLYVAALVSSLFASTITRVFGRKWSMFLGGFTFFIGSAFNGFAQNIAMLLIGRILLGFGVGFANQSVPVYLSEMAPPNLRGAFNNGFQVAIIFGIVVATIINYFTAQMKGNIGWRISLGLACVPAVMIMIGALILPDTPNSLIERGYTEEAKEMLQSIRGTNEVDEEFQDLIDASEESKQVKHPWKNIMLPRYRPQLIMTCFIPFFQQLTGINVITFYAPVLFQTLGFGSKASLLSAMVTGIIELLCTFVSVFTVDRFGRRILFLQGGIQMLVSQIAIGAMIGVKFGVAGTGNIGKSDANLIVALICIYVAGFAWSWGPLGWLVPSEISPLEIRSAAQAINVSVNMFFTFLVAQLFLTMLCHMKFGLFFFFAFFVVIMTIFIYLMLPETKNVPIEEMNRVWKAHWFWGKFIPDEAVNMGAAEMQQKSV

SEQ ID NO: 50205 - protein, 450 aa, Arabidopsis thaliana
  peptide (1)..(450): Ceres Seq. ID no. 12591947
  misc_feature (1)..(423): Pfam Name: Sugar (and other) transporter Pfam Description: Sugar (and other) transporter
  misc_feature (19)..(419): Homolog of NCBI NO: 27467165 NR Description: bicyclomycin resistance protein TcaB
  misc_feature (1)..(445): Homolog of NCBI NO: 3915039 NR Description: Sugar carrier protein C
  misc_feature (1)..(449): Homolog of NCBI NO: 81619 NR Description: glucose transport protein STP1 - Arabidopsis
  misc_feature (1)..(449): Homolog of NCBI NO: 15220330 NR Description: glucose transporter
  misc_feature (1)..(433): Homolog of NCBI NO: 1353516 NR Description: sugar transporter
  misc_feature (1)..(440): Homolog of NCBI NO: 7446727 NR Description: monosaccharid transport protein - fava bean
  misc_feature (1)..(432): Homolog of NCBI NO: 15237271 NR Description: monosaccharide transporter; protein id:
  misc_feature (1)..(450): Homolog of NCBI NO: 15222935 NR Description: hexose transporter, putative; protein id:
  misc_feature (1)..(438): Homolog of NCBI NO: 15231001 NR Description: putative monosaccharide transport protein, STP4
  misc_feature (1)..(450): Homolog of NCBI NO: 15230987 NR Description: monosaccharide transport protein, STP4
MKSAHENEYCRFDSQLLTLFTSSLYVAALVSSLFASTITRVFGRKWSMFLGGFTFFIGSAFNGFAQNIAMLLIGRILLGFGVGFANQSVPVYLSEMAPPNLRGAFNNGFQVAIIFGIVVATIINYFTAQMKGNIGWRISLGLACVPAVMIMIGALILPDTPNSLIERGYTEEAKEMLQSIRGTNEVDEEFQDLIDASEESKQVKHPWKNIMLPRYRPQLIMTCFIPFFQQLTGINVITFYAPVLFQTLGFGSKASLLSAMVTGIIELLCTFVSVFTVDRFGRRILFLQGGIQMLVSQIAIGAMIGVKFGVAGTGNIGKSDANLIVALICIYVAGFAWSWGPLGWLVPSEISPLEIRSAAQAINVSVNMFFTFLVAQLFLTMLCHMKFGLFFFFAFFVVIMTIFIYLMLPETKNVPIEEMNRVWKAHWFWGKFIPDEAVNMGAAEMQQKSV

SEQ ID NO: 50206 - DNA, 1178 bp, Arabidopsis thaliana
  misc_feature (1)..(1178): Ceres Seq. ID no. 13647949
  misc_feature: MA Experiment ID: 20000180 Result: Up-regulated in Transcription
  misc_feature: MA Experiment 20000180 PARAMETER Experiment Name: At_Germinating_Seeds_P Parameter: Age (hr) Value: 24 vs. 0
  misc_feature: MA Experiment 20000180 PARAMETER Experiment Name: At_Germinating_Seeds_P Parameter: Tissue Value: Germinating Seeds
ggggacggaccgtgattggtcggtctctctcgttacggtgaggctgaggctgaggcggagattgagagagaccaaccatgatacgacgaatcaccgagagagcttctggtttcgctaagaatattccgattctcaaatcgtctcgatttcacggcgagtccctcgattcctccgtctcccctgttctcattcccggcgtccatgtcttccattgtcaggatgctgttgggattgtagctaaactatcagattgcatagcagcaaaaggtggcaacattcttggctacgatgtttttgttcctgaaaacaacaacgtcttctactctcgcagcgagtttatctttgatccggttaaatggccgagaagccaagtggatgaagattttcaaactattgcacaaagatacggtgccttgaattcagttgtgcgtgtgccttctattgatcctaagtataagatagctcttcttctttcaaaacaggatcattgtcttgtcgaaatgttgcataaatggcaggacgggaaactccctgtggatattacctgtgtgataagcaatcatgaaagagcttcaaacactcacgttatgcggtttcttgagaggcatggcatcccttatcattatgtatctacaactaaagagaataaaagagaagatgatattttggaattggttaaggacactgatttcctagttcttgctagatatatgcagattttatcgggtaactttttgaaaggttatggaaaggatgtaatcaacatccaccatggtctcttaccatcatttaagggtggatatcccgcaaaacaggcattcgacgctggtgtgaaactaattggagccactagtcactttgttaccgaggaacttgattcagggccaattattgaacaaatggttgagagtgtttcccaccgagacaacttaaggagctttgtccagaaatccgaggacctagagaaaaaatgcctcacgagagctataaaatcttactgcgaactaagggtattaccttatggtacaaacaagactgttgtattctagttaagaaagcaataactacgattctcatctgattctttgtttgaacatctcaagaaaaggtgatacgaatttctataaaaaaaaaaaaaaaaaaaaaaaaaaaaaaaaaaaccaaaaaaaaaaaaaaaa

SEQ ID NO: 50207 - protein, 323 aa, Arabidopsis thaliana
  peptide (1)..(323): Ceres Seq. ID no. 13647950
  misc_feature (126)..(304): Pfam Name: Formyl transferase Pfam Description: Formyl transferase
  misc_feature (43)..(323): Homolog of NCBI NO: 23063861 NR Description: hypothetical protein [Pseudomonas fluorescens
  misc_feature (46)..(323): Homolog of NCBI NO: 15805611 NR Description: formyltetrahydrofolate deformylase [Deinococcus
  misc_feature (43)..(323): Homolog of NCBI NO: 29346791 NR Description: formyltetrahydrofolate deformylase
  misc_feature (43)..(323): Homolog of NCBI NO: 15599510 NR Description: formyltetrahydrofolate deformylase [Pseudomonas
  misc_feature (46)..(323): Homolog of NCBI NO: 27381066 NR Description: formyltetrahydrofolate deformylase
  misc_feature (30)..(323): Homolog of NCBI NO: 37523894 NR Description: formyltetrahydrofolate deformylase [Gloeobacter
  misc_feature (46)..(323): Homolog of NCBI NO: 15606867 NR Description: formyltetrahydrofolate deformylase [Aquifex
  misc_feature (58)..(323): Homolog of NCBI NO: 7433570 NR Description: probable formyltransferase purU - Arabidopsis
  misc_feature (20)..(323): Homolog of NCBI NO: 15236046 NR Description: formyltetrahydrofolate deformylase, putative
  misc_feature (1)..(323): Homolog of NCBI NO: 18422794 NR Description: formyltetrahydrofolate deformylase, putative
MIRRITERASGFAKNIPILKSSRFHGESLDSSVSPVLIPGVHVFHCQDAVGIVAKLSDCIAAKGGNILGYDVFVPENNNVFYSRSEFIFDPVKWPRSQVDEDFQTIAQRYGALNSVVRVPSIDPKYKIALLLSKQDHCLVEMLHKWQDGKLPVDITCVISNHERASNTHVMRFLERHGIPYHYVSTTKENKREDDILELVKDTDFLVLARYMQILSGNFLKGYGKDVINIHHGLLPSFKGGYPAKQAFDAGVKLIGATSHFVTEELDSGPIIEQMVESVSHRDNLRSFVQKSEDLEKKCLTRAIKSYCELRVLPYGTNKTVVF

SEQ ID NO: 50208 - protein, 182 aa, Arabidopsis thaliana
  peptide (1)..(182): Ceres Seq. ID no. 13647951
  misc_feature (1)..(163): Pfam Name: Formyl transferase Pfam Description: Formyl transferase
  misc_feature (1)..(182): Homolog of NCBI NO: 23063861 NR Description: hypothetical protein [Pseudomonas fluorescens
  misc_feature (1)..(182): Homolog of NCBI NO: 15805611 NR Description: formyltetrahydrofolate deformylase [Deinococcus
  misc_feature (1)..(182): Homolog of NCBI NO: 29346791 NR Description: formyltetrahydrofolate deformylase
  misc_feature (1)..(182): Homolog of NCBI NO: 15599510 NR Description: formyltetrahydrofolate deformylase [Pseudomonas
  misc_feature (1)..(182): Homolog of NCBI NO: 27381066 NR Description: formyltetrahydrofolate deformylase
  misc_feature (1)..(182): Homolog of NCBI NO: 37523894 NR Description: formyltetrahydrofolate deformylase [Gloeobacter
  misc_feature (1)..(182): Homolog of NCBI NO: 15606867 NR Description: formyltetrahydrofolate deformylase [Aquifex
  misc_feature (1)..(182): Homolog of NCBI NO: 7433570 NR Description: probable formyltransferase purU - Arabidopsis
  misc_feature (1)..(182): Homolog of NCBI NO: 15236046 NR Description: formyltetrahydrofolate deformylase, putative
  misc_feature (1)..(182): Homolog of NCBI NO: 18422794 NR Description: formyltetrahydrofolate deformylase, putative
MLHKWQDGKLPVDITCVISNHERASNTHVMRFLERHGIPYHYVSTTKENKREDDILELVKDTDFLVLARYMQILSGNFLKGYGKDVINIHHGLLPSFKGGYPAKQAFDAGVKLIGATSHFVTEELDSGPIIEQMVESVSHRDNLRSFVQKSEDLEKKCLTRAIKSYCELRVLPYGTNKTVVF

SEQ ID NO: 50209 - DNA, 1183 bp, Arabidopsis thaliana
  misc_feature (1)..(1183): Ceres Seq. ID no. 13648569
  misc_feature: MA Experiment ID: 20000171 Result: Down-regulated in Transcription
  misc_feature: MA Experiment 20000171 PARAMETER Experiment Name: At_42deg_Heat_P Parameter: Age (day) Value: 14
  misc_feature: MA Experiment 20000171 PARAMETER Experiment Name: At_42deg_Heat_P Parameter: Organism Value: A. thaliana
  misc_feature: MA Experiment 20000171 PARAMETER Experiment Name: At_42deg_Heat_P Parameter: Plant Line Value: WS
  misc_feature: MA Experiment 20000171 PARAMETER Experiment Name: At_42deg_Heat_P Parameter: Temperature (deg C) Value: 42 vs. 22
  misc_feature: MA Experiment 20000171 PARAMETER Experiment Name: At_42deg_Heat_P Parameter: Timepoint (hr) Value: 1
  misc_feature: MA Experiment 20000171 PARAMETER Experiment Name: At_42deg_Heat_P Parameter: Tissue Value: Aerial
  misc_feature: MA Experiment ID: 20000173 Result: Down-regulated in Transcription
  misc_feature: MA Experiment 20000173 PARAMETER Experiment Name: At_42deg_Heat_P Parameter: Age (day) Value: 14
  misc_feature: MA Experiment 20000173 PARAMETER Experiment Name: At_42deg_Heat_P Parameter: Organism Value: A. thaliana
  misc_feature: MA Experiment 20000173 PARAMETER Experiment Name: At_42deg_Heat_P Parameter: Plant Line Value: WS
  misc_feature: MA Experiment 20000173 PARAMETER Experiment Name: At_42deg_Heat_P Parameter: Temperature (deg C) Value: 42 vs. 22
  misc_feature: MA Experiment 20000173 PARAMETER Experiment Name: At_42deg_Heat_P Parameter: Timepoint (hr) Value: 6
  misc_feature: MA Experiment 20000173 PARAMETER Experiment Name: At_42deg_Heat_P Parameter: Tissue Value: Aerial
  misc_feature: MA Experiment ID: 20000184 Result: Down-regulated in Transcription
  misc_feature: MA Experiment 20000184 PARAMETER Experiment Name: At_Shoots__P Parameter: Age (day) Value: 7
  misc_feature: MA Experiment 20000184 PARAMETER Experiment Name: At_Shoots__P Parameter: Tissue Value: Shoots vs. Whole Plant
  misc_feature: MA Experiment ID: 20000437 Result: Down-regulated in Transcription
  misc_feature: MA Experiment 20000437 PARAMETER Experiment Name: At_Drought_P Parameter: Age (day) Value: 8
  misc_feature: MA Experiment 20000437 PARAMETER Experiment Name: At_Drought_P Parameter: Organism Value: A. thaliana
  misc_feature: MA Experiment 20000437 PARAMETER Experiment Name: At_Drought_P Parameter: Plant Line Value: WS
  misc_feature: MA Experiment 20000437 PARAMETER Experiment Name: At_Drought_P Parameter: Timepoint (hr) Value: 24
  misc_feature: MA Experiment 20000437 PARAMETER Experiment Name: At_Drought_P Parameter: Tissue Value: Whole Plant
  misc_feature: MA Experiment 20000437 PARAMETER Experiment Name: At_Drought_P Parameter: Treatment Value: Drought vs. No Drought
  misc_feature: MA Experiment ID: 20001451 Result: Down-regulated in Transcription
  misc_feature: MA Experiment 20001451 PARAMETER Experiment Name: At_Far-red-induction_P Parameter: Age (day) Value: 7
  misc_feature: MA Experiment 20001451 PARAMETER Experiment Name: At_Far-red-induction_P Parameter: Light Value: Far-red vs. White
  misc_feature: MA Experiment 20001451 PARAMETER Experiment Name: At_Far-red-induction_P Parameter: Organism Value: A. thaliana
  misc_feature: MA Experiment 20001451 PARAMETER Experiment Name: At_Far-red-induction_P Parameter: Plant Line Value: Columbia
  misc_feature: MA Experiment 20001451 PARAMETER Experiment Name: At_Far-red-induction_P Parameter: Timepoint (hr) Value: 24
  misc_feature: MA Experiment 20001451 PARAMETER Experiment Name: At_Far-red-induction_P Parameter: Tissue Value: Whole Plant
  misc_feature: MA Experiment ID: 20001911 Result: Down-regulated in Transcription
  misc_feature: MA Experiment 20001911 PARAMETER Experiment Name: At_Drought_Reproduction_P Parameter: Age (day) Value: 40
  misc_feature: MA Experiment 20001911 PARAMETER Experiment Name: At_Drought_Reproduction_P Parameter: Organism Value: A. thaliana
  misc_feature: MA Experiment 20001911 PARAMETER Experiment Name: At_Drought_Reproduction_P Parameter: Plant Line Value: WS
  misc_feature: MA Experiment 20001911 PARAMETER Experiment Name: At_Drought_Reproduction_P Parameter: Timepoint (day) Value: 10
  misc_feature: MA Experiment 20001911 PARAMETER Experiment Name: At_Drought_Reproduction_P Parameter: Tissue Value: Flowers
  misc_feature: MA Experiment 20001911 PARAMETER Experiment Name: At_Drought_Reproduction_P Parameter: Treatment Value: Drought vs. No Drought
gaaaaaacacactgcaattgagatcgatttcgactgtaagtgaactttgattgccgcgaagattactcaaatcgccggacacaagtttttcagtgaattccattggcatagaactcgagagaaagagacacagagagagagagagatctaacaagagtcaaagtttctgactttttcgcattctttttgagatcgagttctgtttttgttggcgtgtgagatgaattcttaagaaggaagaagaagaagaaggaaagatgcgtagagagatctcgtttttgctacagcccaggtgtcttcttcttctcgttgccctaacgattttcctcgtcttcgcgctcttcaacaccggaaaagatgaggagaagcaagtaattgaagatcatgaaatcaccaacagggtttttctcgatgttgatattgatggccaacgcttaggcaggattgttatcggactatatggcactgttgtacccaaaactgtagaaaatttcagggctttatgcacaggggagaagggtaaaacctcaagcggaaagcctttacattataagggaacaccatttcatcgtataatatctggatttgtaatccaaggaggagacattatccatggtgatggaaaaagtagtgactcaatctatggtggaacctttcctgacgaaaatttcaagatacagcattcacacgcaggtatggtagcaatggctaatacaggaccggattctaatggctcgcagttctttatcactactgttaaggctagctggttggaaggagaacatgtggtgttgggaaaggtgatacaaggaatggacaatgtattcgccattgaaggtggagctggaacttacagtggcaaacccaggaagaaagttgtgattgctgattctggagagatccctaaagacaaatgggatgaagagagatgacaaagacaaacctaagatacacagcactacgacaaatctggttctgttcctgtgagattctgtctctgtattttctttctatttatagttttgcacatgtgatgatctgaattctgaacgcaatgccactgtagttagtgtttaaagctgggcctggaagcatctgtagcttttcacttgaggtttttctagactttatttatatgatttttagttcactctacttcagttatgtagatatatttattatg

SEQ ID NO: 50210 - protein, 224 aa, Arabidopsis thaliana
  peptide (1)..(224): Ceres Seq. ID no. 13648570
  misc_feature (48)..(215): Homolog of NCBI NO: 17566266 NR Description: CYcloPhilin family CYP-7 (18.4 kD) (cyp-7)
  misc_feature (48)..(215): Homolog of NCBI NO: 39582839 NR Description: Hypothetical protein CBG18577 [Caenorhabditis
  misc_feature (38)..(215): Homolog of NCBI NO: 18410386 NR Description: cyclophilin-related protein [Arabidopsis
  misc_feature (15)..(215): Homolog of NCBI NO: 5731960 NR Description: cyclophilin B [Dictyostelium discoideum]
  misc_feature (18)..(216): Homolog of NCBI NO: 15237739 NR Description: cyclophilin ROC7 [Arabidopsis thaliana]
  misc_feature (13)..(216): Homolog of NCBI NO: 32351008 NR Description: cyclophilin [Triticum aestivum]
  misc_feature (21)..(216): Homolog of NCBI NO: 21554007 NR Description: cyclophilin [Arabidopsis thaliana]
  misc_feature (21)..(216): Homolog of NCBI NO: 15227674 NR Description: cyclophilin [Arabidopsis thaliana]
  misc_feature (21)..(216): Homolog of NCBI NO: 11270326 NR Description: peptidylprolyl isomerase (EC 5.2.1.8) CYP5
  misc_feature (1)..(224): Homolog of NCBI NO: 15236227 NR Description: cyclophilin - like protein [Arabidopsis thaliana]
MRREISFLLQPRCLLLLVALTIFLVFALFNTGKDEEKQVIEDHEITNRVFLDVDIDGQRLGRIVIGLYGTVVPKTVENFRALCTGEKGKTSSGKPLHYKGTPFHRIISGFVIQGGDIIHGDGKSSDSIYGGTFPDENFKIQHSHAGMVAMANTGPDSNGSQFFITTVKASWLEGEHVVLGKVIQGMDNVFAIEGGAGTYSGKPRKKVVIADSGEIPKDKWDEER

SEQ ID NO: 50211 - DNA, 1490 bp, Arabidopsis thaliana
  misc_feature (1)..(1490): Ceres Seq. ID no. 13648163
  misc_feature: MA Experiment ID: 20000179 Result: Up-regulated in Transcription
  misc_feature: MA Experiment 20000179 PARAMETER Experiment Name: At_Germinating_Seeds_P Parameter: Age (hr) Value: 6 vs. 0
  misc_feature: MA Experiment 20000179 PARAMETER Experiment Name: At_Germinating_Seeds_P Parameter: Tissue Value: Germinating Seeds
  misc_feature: MA Experiment ID: 20000182 Result: Up-regulated in Transcription
  misc_feature: MA Experiment 20000182 PARAMETER Experiment Name: At_2mM_SA_P Parameter: Age (day) Value: 14
  misc_feature: MA Experiment 20000182 PARAMETER Experiment Name: At_2mM_SA_P Parameter: Organism Value: A. thaliana
  misc_feature: MA Experiment 20000182 PARAMETER Experiment Name: At_2mM_SA_P Parameter: Plant Line Value: WS
  misc_feature: MA Experiment 20000182 PARAMETER Experiment Name: At_2mM_SA_P Parameter: Timepoint (hr) Value: 6
  misc_feature: MA Experiment 20000182 PARAMETER Experiment Name: At_2mM_SA_P Parameter: Tissue Value: Aerial
  misc_feature: MA Experiment 20000182 PARAMETER Experiment Name: At_2mM_SA_P Parameter: Treatment Value: 2mM SA vs. No Treatment
aatcaaccttgtgaaaaaaaaaaaaaacttttgattccctcttcttctaaaagccatgaaaccgattcaatctccttctggagtagcttcacctatgaagaaccgtttacgcaaacgtcctgacctaagcttaccactcccacaccgcgacgtcgctctcgccgtacctctccctctcccacctccttcttcctcttcatccgctccggcgtcttcctccgcgatctcaaccaacatctccgccgctaaaagcttatccgagctagaacgagtgaaccgaatcggaagcggagccggaggaacggtttacaaagtaatccacactccgacgtcacgtcctttcgctctcaaagtgatttacggaaaccacgaagataccgtgagacgtcagatctgtagagagatcgagatcttaagaagtgttgatcatccaaacgttgtgaaatgtcacgatatgtttgatcataacggtgagatccaggttttgcttgagtttatggatcaaggatctcttgaaggagctcatatatggcaagaacaggaattagctgatctctctcgtcagattcttagtggattagcttatcttcatcgtcgtcatatcgttcatcgtgatatcaaaccttcgaatcttcttataaactcagctaaaaatgtgaaaattgctgattttggtgtgagtaggatcttggcacaaacaatggatccttgtaattcatctgttggtactattgcttatatgagtcctgagaggattaatactgatttgaatcatggtcgttacgatggttatgctggagatgtttggagtttaggtgttagtatcttggagttttacttggggaggtttccttttgctgtgagtagacaaggtgattgggctagtcttatgtgtgctatttgtatgtctcagccacctgaagctccggctacggcgtctcaggagtttcgtcactttgtttcttgttgtttacagagtgatcctcctaagagatggtcagctcaacagcttttgcagcatcctttcatacttaaagctaccggtggtcctaatctccgtcaaatgttgccgccgcctcgtcctcttccttctgcctcttagtgtttctaccattttcgtctttcttgtttttcaatttttcgtagtttttcctgacatttttccataagttttgcataccccaagcaaagataatgagaagagtagaagaacaatgtggtttgtgattggggtatgagtcgtcaggaagaaactcagtttgtggttagggtttattgagtctttatcttatgctgctaagcttgatttgtcttatgggtaatgaagaatgttttgctagaaatggaaacaaaaaaatagacaagaagaattcttatggtttaagagtgattttagctggatttgcttatattattgtttatataaggaagtaaatggaggatctttcattggataattctcattaataaagcttcttcctttaattctc

SEQ ID NO: 50212 - protein, 348 aa, Arabidopsis thaliana
  peptide (1)..(348): Ceres Seq. ID no. 13648164
  misc_feature (70)..(325): Pfam Name: Protein kinase domain Pfam Description: Protein kinase domain
  misc_feature (17)..(325): Homolog of NCBI NO: 15221060 NR Description: mitogen-activated protein kinase kinase (MAPKK),
  misc_feature (35)..(325): Homolog of NCBI NO: 15219482 NR Description: mitogen-activated protein kinase kinase (MAPKK),
  misc_feature (1)..(341): Homolog of NCBI NO: 14719279 NR Description: MAP kinase kinase [Zea mays]
  misc_feature (1)..(346): Homolog of NCBI NO: 15528439 NR Description: MEK map kinase kinsae [Medicago sativa subsp. x
  misc_feature (6)..(341): Homolog of NCBI NO: 12484128 NR Description: mitogen-activated protein kinase 2 [Nicotiana
  misc_feature (7)..(348): Homolog of NCBI NO: 33563103 NR Description: mitogen-activated protein kinase kinase [Solanum
  misc_feature (1)..(348): Homolog of NCBI NO: 15217998 NR Description: mitogen-activated protein kinase kinase (MAPKK),
  misc_feature (14)..(348): Homolog of NCBI NO: 19698851 NR Description: MAP kinase kinase 5 [Arabidopsis thaliana]
  misc_feature (1)..(348): Homolog of NCBI NO: 25287595 NR Description: mitogen-activated protein kinase kinase (EC
  misc_feature (1)..(348): Homolog of NCBI NO: 15232491 NR Description: mitogen-activated protein kinase kinase (MAPKK),
MKPIQSPSGVASPMKNRLRKRPDLSLPLPHRDVALAVPLPLPPPSSSSSAPASSSAISTNISAAKSLSELERVNRIGSGAGGTVYKVIHTPTSRPFALKVIYGNHEDTVRRQICREIEILRSVDHPNVVKCHDMFDHNGEIQVLLEFMDQGSLEGAHIWQEQELADLSRQILSGLAYLHRRHIVHRDIKPSNLLINSAKNVKIADFGVSRILAQTMDPCNSSVGTIAYMSPERINTDLNHGRYDGYAGDVWSLGVSILEFYLGRFPFAVSRQGDWASLMCAICMSQPPEAPATASQEFRHFVSCCLQSDPPKRWSAQQLLQHPFILKATGGPNLRQMLPPPRPLPSAS

SEQ ID NO: 50213 - protein, 335 aa, Arabidopsis thaliana
  peptide (1)..(335): Ceres Seq. ID no. 13648165
  misc_feature (57)..(312): Pfam Name: Protein kinase domain Pfam Description: Protein kinase domain
  misc_feature (4)..(312): Homolog of NCBI NO: 15221060 NR Description: mitogen-activated protein kinase kinase (MAPKK),
  misc_feature (22)..(312): Homolog of NCBI NO: 15219482 NR Description: mitogen-activated protein kinase kinase (MAPKK),
  misc_feature (1)..(328): Homolog of NCBI NO: 14719279 NR Description: MAP kinase kinase [Zea mays]
  misc_feature (1)..(333): Homolog of NCBI NO: 15528439 NR Description: MEK map kinase kinsae [Medicago sativa subsp. x
  misc_feature (1)..(328): Homolog of NCBI NO: 12484128 NR Description: mitogen-activated protein kinase 2 [Nicotiana
  misc_feature (1)..(335): Homolog of NCBI NO: 33563103 NR Description: mitogen-activated protein kinase kinase [Solanum
  misc_feature (1)..(335): Homolog of NCBI NO: 15217998 NR Description: mitogen-activated protein kinase kinase (MAPKK),
  misc_feature (1)..(335): Homolog of NCBI NO: 19698851 NR Description: MAP kinase kinase 5 [Arabidopsis thaliana]
  misc_feature (1)..(335): Homolog of NCBI NO: 25287595 NR Description: mitogen-activated protein kinase kinase (EC
  misc_feature (1)..(335): Homolog of NCBI NO: 15232491 NR Description: mitogen-activated protein kinase kinase (MAPKK),
MKNRLRKRPDLSLPLPHRDVALAVPLPLPPPSSSSSAPASSSAISTNISAAKSLSELERVNRIGSGAGGTVYKVIHTPTSRPFALKVIYGNHEDTVRRQICREIEILRSVDHPNVVKCHDMFDHNGEIQVLLEFMDQGSLEGAHIWQEQELADLSRQILSGLAYLHRRHIVHRDIKPSNLLINSAKNVKIADFGVSRILAQTMDPCNSSVGTIAYMSPERINTDLNHGRYDGYAGDVWSLGVSILEFYLGRFPFAVSRQGDWASLMCAICMSQPPEAPATASQEFRHFVSCCLQSDPPKRWSAQQLLQHPFILKATGGPNLRQMLPPPRPLPSAS

SEQ ID NO: 50214 - protein, 215 aa, Arabidopsis thaliana
  peptide (1)..(215): Ceres Seq. ID no. 13648166
  misc_feature (1)..(192): Pfam Name: Protein kinase domain Pfam Description: Protein kinase domain
  misc_feature (1)..(192): Homolog of NCBI NO: 15221060 NR Description: mitogen-activated protein kinase kinase (MAPKK),
  misc_feature (1)..(192): Homolog of NCBI NO: 15219482 NR Description: mitogen-activated protein kinase kinase (MAPKK),
  misc_feature (1)..(208): Homolog of NCBI NO: 14719279 NR Description: MAP kinase kinase [Zea mays]
  misc_feature (1)..(213): Homolog of NCBI NO: 15528439 NR Description: MEK map kinase kinsae [Medicago sativa subsp. x
  misc_feature (1)..(208): Homolog of NCBI NO: 12484128 NR Description: mitogen-activated protein kinase 2 [Nicotiana
  misc_feature (1)..(215): Homolog of NCBI NO: 33563103 NR Description: mitogen-activated protein kinase kinase [Solanum
  misc_feature (1)..(215): Homolog of NCBI NO: 15217998 NR Description: mitogen-activated protein kinase kinase (MAPKK),
  misc_feature (1)..(215): Homolog of NCBI NO: 19698851 NR Description: MAP kinase kinase 5 [Arabidopsis thaliana]
  misc_feature (1)..(215): Homolog of NCBI NO: 25287595 NR Description: mitogen-activated protein kinase kinase (EC
  misc_feature (1)..(215): Homolog of NCBI NO: 15232491 NR Description: mitogen-activated protein kinase kinase (MAPKK),
MFDHNGEIQVLLEFMDQGSLEGAHIWQEQELADLSRQILSGLAYLHRRHIVHRDIKPSNLLINSAKNVKIADFGVSRILAQTMDPCNSSVGTIAYMSPERINTDLNHGRYDGYAGDVWSLGVSILEFYLGRFPFAVSRQGDWASLMCAICMSQPPEAPATASQEFRHFVSCCLQSDPPKRWSAQQLLQHPFILKATGGPNLRQMLPPPRPLPSAS

SEQ ID NO: 50215 - DNA, 1757 bp, Arabidopsis thaliana
  misc_feature (1)..(1757): Ceres Seq. ID no. 15179687
  misc_feature: MA Experiment ID: 20000264 Result: Up-regulated in Transcription
  misc_feature: MA Experiment 20000264 PARAMETER Experiment Name: At_Open_Flower_P Parameter: Age (day) Value: 21
  misc_feature: MA Experiment 20000264 PARAMETER Experiment Name: At_Open_Flower_P Parameter: Plant Line Value: WS
  misc_feature: MA Experiment 20000264 PARAMETER Experiment Name: At_Open_Flower_P Parameter: Tissue Value: Open Flower vs. Whole Plant
  misc_feature: MA Experiment ID: 20000265 Result: Up-regulated in Transcription
  misc_feature: MA Experiment 20000265 PARAMETER Experiment Name: At_Open_Flower_P Parameter: Age (day) Value: 21
  misc_feature: MA Experiment 20000265 PARAMETER Experiment Name: At_Open_Flower_P Parameter: Plant Line Value: WS
  misc_feature: MA Experiment 20000265 PARAMETER Experiment Name: At_Open_Flower_P Parameter: Tissue Value: Closed Flower vs. Whole Plant
  misc_feature: MA Experiment ID: 20000286 Result: Up-regulated in Transcription
  misc_feature: MA Experiment 20000286 PARAMETER Experiment Name: At_Open_Flower_P Parameter: Age (day) Value: 21
  misc_feature: MA Experiment 20000286 PARAMETER Experiment Name: At_Open_Flower_P Parameter: Plant Line Value: WS
  misc_feature: MA Experiment 20000286 PARAMETER Experiment Name: At_Open_Flower_P Parameter: Tissue Value: Half Open vs. Whole Plant
  misc_feature: MA Experiment ID: 20000794 Result: Up-regulated in Transcription
  misc_feature: MA Experiment 20000794 PARAMETER Experiment Name: At_Petals_P Parameter: Age (day) Value: 23-25 days
  misc_feature: MA Experiment 20000794 PARAMETER Experiment Name: At_Petals_P Parameter: Plant Line Value: WS
  misc_feature: MA Experiment 20000794 PARAMETER Experiment Name: At_Petals_P Parameter: Tissue Value: Petals vs. Whole plant
  misc_feature: MA Experiment ID: 20001757 Result: Down-regulated in Transcription
  misc_feature: MA Experiment 20001757 PARAMETER Experiment Name: At_50mM_NH4NO3_L-to-H_P Parameter: Timepoint (hr) Value: 6
  misc_feature: MA Experiment 20001757 PARAMETER Experiment Name: At_50mM_NH4NO3_L-to-H_P Parameter: Tissue Value: Leaf
  misc_feature: MA Experiment 20001757 PARAMETER Experiment Name: At_50mM_NH4NO3_L-to-H_P Parameter: Treatment Value: 50mM NH4NO3 vs 100mM Mannitol
  misc_feature: MA Experiment ID: 20001910 Result: Up-regulated in Transcription
  misc_feature: MA Experiment 20001910 PARAMETER Experiment Name: At_Drought_Reproduction_P Parameter: Age (day) Value: 37
  misc_feature: MA Experiment 20001910 PARAMETER Experiment Name: At_Drought_Reproduction_P Parameter: Organism Value: A. thaliana
  misc_feature: MA Experiment 20001910 PARAMETER Experiment Name: At_Drought_Reproduction_P Parameter: Plant Line Value: WS
  misc_feature: MA Experiment 20001910 PARAMETER Experiment Name: At_Drought_Reproduction_P Parameter: Timepoint (day) Value: 7
  misc_feature: MA Experiment 20001910 PARAMETER Experiment Name: At_Drought_Reproduction_P Parameter: Tissue Value: Flowers
  misc_feature: MA Experiment 20001910 PARAMETER Experiment Name: At_Drought_Reproduction_P Parameter: Treatment Value: Drought vs. No Drought
aaatctaattttaaatctaccttttcttttgtttttttctctcctcacaaattactcaatttatagttgttaattttttgaggagaacaagaaggtggtagtattatttcaaaatgtttacggaagctgatagcattcctagggcaaaatatgccaacatgatgcattctgatccgaatctttcctccacgatgacccaacaaacagaggaagagtatggtatacgcaatagcagtgcatctgcggttggcacggggatgtatgatagaatgagttgtgaaggttctccaatgatgatgtctccttggaaccaagcaactccatttactcaaacacaatggtctactgtagaagaaaacctaccccaaaatggccttattggctcgcttgtccgtgaagaaggtcacatctattcattagcggccacaaaagatcttctttatactggctctgatagcaaaaacatacgtgtgtggaagaatctaaaggagttcagtgcattcaaatgtaacagtggattggttaaggccattgtgatttcaggggagaagattttcacaggtcaccaagacggaaagattcgagtttggaaagtctcccctaagaaccagagcttgcacaaacgttctggaacattaccaactttgaaagatatattcaaggcatctctcaaaccaagaaactatgttgaggtgaagaaacaccgcactgctctctggatcaaacacgccgatgctgtttcatgtttaagcctaaatgatgagcaagggttgttgtattctgcttcatgggaccggaccattaaggtgtggaggattgctgattcaaaatgtctagaatcaatcccagctcatgatgatgctgtaaactcggtggtatcaacaacggaagcgattgttttctctggatcagccgatgggacagtcaaggcatggaagagagaccaacaaggaaaatacacaaagcatacactaatgcaaacattaacaaagcaagaaagcgcagtcacagctttggctgtaagcaagaatggtgcggcagtgtactttggttcgagtgatggtttggtcaatttttgggagagggagaaacagttgaactacggtggtattctcaagggccacaagcttgctgttctttgcctagaagtggcagggagtcttgtttttagcggatctgctgataagacaatatgtgtgtggaagagagatggaaatattcatacatgcctctctgtactaacaggtcacacaggtcctgtgaaatgtttggcagtagaagcagaccgtgaagcctccgaacgtcgggacaaaaaatggattgtatatagtggaagcttggataagtcagtaaaagtatggggagtttcagaatctttcattgacatgaaccagatgagtatgatgcaacagcaacaacagcaacatgttatatcacattctgaaccattcatgtctgatggcagtttctcttcatcagctggtggagctagcagccatcgaagacactaatcatggtttgtgatttgaccatcaaataccaactgtgtctgaattattcatttgtttgttgttaaatttgaatggaaagaaaaagaaagaaaaatctagttatgatgcagtgttgtacaatatggaggtgaatttgaactaattttttctttttcttttttatcataaaggtttgttgtaatttttttatattttgtgatgaaaacctgtaactctatcaaacttcataataattaattttgttgc

SEQ ID NO: 50216 - protein, 465 aa, Arabidopsis thaliana
  peptide (1)..(465): Ceres Seq. ID no. 15179688
  misc_feature (371)..(417): Pfam Name: WD domain, G-beta repeat Pfam Description: WD domain, G-beta repeat
  misc_feature (34)..(419): Homolog of NCBI NO: 18395507 NR Description: transducin / WD-40 repeat protein family
  misc_feature (89)..(423): Homolog of NCBI NO: 15221675 NR Description: transducin / WD-40 repeat protein family
  misc_feature (63)..(434): Homolog of NCBI NO: 15229740 NR Description: transducin / WD-40 repeat protein family
  misc_feature (58)..(420): Homolog of NCBI NO: 17979259 NR Description: At1g49450/F13F21_11 [Arabidopsis thaliana]
  misc_feature (86)..(418): Homolog of NCBI NO: 15220271 NR Description: transducin / WD-40 repeat protein family
  misc_feature (58)..(420): Homolog of NCBI NO: 15222143 NR Description: transducin / WD-40 repeat protein family
  misc_feature (84)..(424): Homolog of NCBI NO: 31126785 NR Description: putative WD repeat-protein
  misc_feature (60)..(421): Homolog of NCBI NO: 15230244 NR Description: transducin / WD-40 repeat protein family
  misc_feature (9)..(454): Homolog of NCBI NO: 15235354 NR Description: transducin / WD-40 repeat protein family
  misc_feature (1)..(465): Homolog of NCBI NO: 15225317 NR Description: transducin / WD-40 repeat protein family
MFTEADSIPRAKYANMMHSDPNLSSTMTQQTEEEYGIRNSSASAVGTGMYDRMSCEGSPMMMSPWNQATPFTQTQWSTVEENLPQNGLIGSLVREEGHIYSLAATKDLLYTGSDSKNIRVWKNLKEFSAFKCNSGLVKAIVISGEKIFTGHQDGKIRVWKVSPKNQSLHKRSGTLPTLKDIFKASLKPRNYVEVKKHRTALWIKHADAVSCLSLNDEQGLLYSASWDRTIKVWRIADSKCLESIPAHDDAVNSVVSTTEAIVFSGSADGTVKAWKRDQQGKYTKHTLMQTLTKQESAVTALAVSKNGAAVYFGSSDGLVNFWEREKQLNYGGILKGHKLAVLCLEVAGSLVFSGSADKTICVWKRDGNIHTCLSVLTGHTGPVKCLAVEADREASERRDKKWIVYSGSLDKSVKVWGVSESFIDMNQMSMMQQQQQQHVISHSEPFMSDGSFSSSAGGASSHRRH

SEQ ID NO: 50217 - protein, 450 aa, Arabidopsis thaliana
  peptide (1)..(450): Ceres Seq. ID no. 15179689
  misc_feature (356)..(402): Pfam Name: WD domain, G-beta repeat Pfam Description: WD domain, G-beta repeat
  misc_feature (19)..(404): Homolog of NCBI NO: 18395507 NR Description: transducin / WD-40 repeat protein family
  misc_feature (74)..(408): Homolog of NCBI NO: 15221675 NR Description: transducin / WD-40 repeat protein family
  misc_feature (48)..(419): Homolog of NCBI NO: 15229740 NR Description: transducin / WD-40 repeat protein family
  misc_feature (43)..(405): Homolog of NCBI NO: 17979259 NR Description: At1g49450/F13F21_11 [Arabidopsis thaliana]
  misc_feature (71)..(403): Homolog of NCBI NO: 15220271 NR Description: transducin / WD-40 repeat protein family
  misc_feature (43)..(405): Homolog of NCBI NO: 15222143 NR Description: transducin / WD-40 repeat protein family
  misc_feature (69)..(409): Homolog of NCBI NO: 31126785 NR Description: putative WD repeat-protein
  misc_feature (45)..(406): Homolog of NCBI NO: 15230244 NR Description: transducin / WD-40 repeat protein family
  misc_feature (1)..(439): Homolog of NCBI NO: 15235354 NR Description: transducin / WD-40 repeat protein family
  misc_feature (1)..(450): Homolog of NCBI NO: 15225317 NR Description: transducin / WD-40 repeat protein family
MMHSDPNLSSTMTQQTEEEYGIRNSSASAVGTGMYDRMSCEGSPMMMSPWNQATPFTQTQWSTVEENLPQNGLIGSLVREEGHIYSLAATKDLLYTGSDSKNIRVWKNLKEFSAFKCNSGLVKAIVISGEKIFTGHQDGKIRVWKVSPKNQSLHKRSGTLPTLKDIFKASLKPRNYVEVKKHRTALWIKHADAVSCLSLNDEQGLLYSASWDRTIKVWRIADSKCLESIPAHDDAVNSVVSTTEAIVFSGSADGTVKAWKRDQQGKYTKHTLMQTLTKQESAVTALAVSKNGAAVYFGSSDGLVNFWEREKQLNYGGILKGHKLAVLCLEVAGSLVFSGSADKTICVWKRDGNIHTCLSVLTGHTGPVKCLAVEADREASERRDKKWIVYSGSLDKSVKVWGVSESFIDMNQMSMMQQQQQQHVISHSEPFMSDGSFSSSAGGASSHRRH

SEQ ID NO: 50218 - protein, 449 aa, Arabidopsis thaliana
  peptide (1)..(449): Ceres Seq. ID no. 15179690
  misc_feature (355)..(401): Pfam Name: WD domain, G-beta repeat Pfam Description: WD domain, G-beta repeat
  misc_feature (18)..(403): Homolog of NCBI NO: 18395507 NR Description: transducin / WD-40 repeat protein family
  misc_feature (73)..(407): Homolog of NCBI NO: 15221675 NR Description: transducin / WD-40 repeat protein family
  misc_feature (47)..(418): Homolog of NCBI NO: 15229740 NR Description: transducin / WD-40 repeat protein family
  misc_feature (42)..(404): Homolog of NCBI NO: 17979259 NR Description: At1g49450/F13F21_11 [Arabidopsis thaliana]
  misc_feature (70)..(402): Homolog of NCBI NO: 15220271 NR Description: transducin / WD-40 repeat protein family
  misc_feature (42)..(404): Homolog of NCBI NO: 15222143 NR Description: transducin / WD-40 repeat protein family
  misc_feature (68)..(408): Homolog of NCBI NO: 31126785 NR Description: putative WD repeat-protein
  misc_feature (44)..(405): Homolog of NCBI NO: 15230244 NR Description: transducin / WD-40 repeat protein family
  misc_feature (1)..(438): Homolog of NCBI NO: 15235354 NR Description: transducin / WD-40 repeat protein family
  misc_feature (1)..(449): Homolog of NCBI NO: 15225317 NR Description: transducin / WD-40 repeat protein family
MHSDPNLSSTMTQQTEEEYGIRNSSASAVGTGMYDRMSCEGSPMMMSPWNQATPFTQTQWSTVEENLPQNGLIGSLVREEGHIYSLAATKDLLYTGSDSKNIRVWKNLKEFSAFKCNSGLVKAIVISGEKIFTGHQDGKIRVWKVSPKNQSLHKRSGTLPTLKDIFKASLKPRNYVEVKKHRTALWIKHADAVSCLSLNDEQGLLYSASWDRTIKVWRIADSKCLESIPAHDDAVNSVVSTTEAIVFSGSADGTVKAWKRDQQGKYTKHTLMQTLTKQESAVTALAVSKNGAAVYFGSSDGLVNFWEREKQLNYGGILKGHKLAVLCLEVAGSLVFSGSADKTICVWKRDGNIHTCLSVLTGHTGPVKCLAVEADREASERRDKKWIVYSGSLDKSVKVWGVSESFIDMNQMSMMQQQQQQHVISHSEPFMSDGSFSSSAGGASSHRRH

SEQ ID NO: 50219 - DNA, 1859 bp, Arabidopsis thaliana; identical to SEQ ID NO: 50014
  misc_feature (1)..(1859): Ceres Seq. ID no. 12602423
  misc_feature: MA Experiment ID: 20000166 Result: Up-regulated in Transcription
  misc_feature: MA Experiment 20000166 PARAMETER Experiment Name: At_100uM_ABA_P Parameter: Age (day) Value: 14
  misc_feature: MA Experiment 20000166 PARAMETER Experiment Name: At_100uM_ABA_P Parameter: Organism Value: A. thaliana
  misc_feature: MA Experiment 20000166 PARAMETER Experiment Name: At_100uM_ABA_P Parameter: Plant Line Value: WS
  misc_feature: MA Experiment 20000166 PARAMETER Experiment Name: At_100uM_ABA_P Parameter: Timepoint (hr) Value: 1
  misc_feature: MA Experiment 20000166 PARAMETER Experiment Name: At_100uM_ABA_P Parameter: Tissue Value: Aerial
  misc_feature: MA Experiment 20000166 PARAMETER Experiment Name: At_100uM_ABA_P Parameter: Treatment Value: 100uM ABA vs. No Treatment
  misc_feature: MA Experiment ID: 20000234 Result: Up-regulated in Transcription
  misc_feature: MA Experiment 20000234 PARAMETER Experiment Name: At_Siliques_P Parameter: Age (day) Value: 21
  misc_feature: MA Experiment 20000234 PARAMETER Experiment Name: At_Siliques_P Parameter: Organism Value: A. thaliana
  misc_feature: MA Experiment 20000234 PARAMETER Experiment Name: At_Siliques_P Parameter: Plant Line Value: WS
  misc_feature: MA Experiment 20000234 PARAMETER Experiment Name: At_Siliques_P Parameter: Tissue Value: Less Than 5mm Siliques vs. Whole Plant
  misc_feature: MA Experiment ID: 20000267 Result: Up-regulated in Transcription
  misc_feature: MA Experiment 20000267 PARAMETER Experiment Name: At_Drought_P Parameter: Age (day) Value: 7
  misc_feature: MA Experiment 20000267 PARAMETER Experiment Name: At_Drought_P Parameter: Organism Value: A. thaliana
  misc_feature: MA Experiment 20000267 PARAMETER Experiment Name: At_Drought_P Parameter: Plant Line Value: WS
  misc_feature: MA Experiment 20000267 PARAMETER Experiment Name: At_Drought_P Parameter: Timepoint (hr) Value: 6
  misc_feature: MA Experiment 20000267 PARAMETER Experiment Name: At_Drought_P Parameter: Tissue Value: Whole Plant
  misc_feature: MA Experiment 20000267 PARAMETER Experiment Name: At_Drought_P Parameter: Treatment Value: Drought vs. No Drought
  misc_feature: MA Experiment ID: 20000436 Result: Up-regulated in Transcription
  misc_feature: MA Experiment 20000436 PARAMETER Experiment Name: At_Drought_P Parameter: Age (day) Value: 7
  misc_feature: MA Experiment 20000436 PARAMETER Experiment Name: At_Drought_P Parameter: Organism Value: A. thaliana
  misc_feature: MA Experiment 20000436 PARAMETER Experiment Name: At_Drought_P Parameter: Plant Line Value: WS
  misc_feature: MA Experiment 20000436 PARAMETER Experiment Name: At_Drought_P Parameter: Timepoint (hr) Value: 12
  misc_feature: MA Experiment 20000436 PARAMETER Experiment Name: At_Drought_P Parameter: Tissue Value: Whole Plant
  misc_feature: MA Experiment 20000436 PARAMETER Experiment Name: At_Drought_P Parameter: Treatment Value: Drought vs. No Drought
  misc_feature: MA Experiment ID: 20000453 Result: Up-regulated in Transcription
  misc_feature: MA Experiment 20000453 PARAMETER Experiment Name: At_100uM_ABA_P Parameter: Age (day) Value: 15
  misc_feature: MA Experiment 20000453 PARAMETER Experiment Name: At_100uM_ABA_P Parameter: Organism Value: A. thaliana
  misc_feature: MA Experiment 20000453 PARAMETER Experiment Name: At_100uM_ABA_P Parameter: Plant Line Value: WS
  misc_feature: MA Experiment 20000453 PARAMETER Experiment Name: At_100uM_ABA_P Parameter: Timepoint (hr) Value: 24
  misc_feature: MA Experiment 20000453 PARAMETER Experiment Name: At_100uM_ABA_P Parameter: Tissue Value: Aerial
  misc_feature: MA Experiment 20000453 PARAMETER Experiment Name: At_100uM_ABA_P Parameter: Treatment Value: 100uM ABA vs. No Treatment
  misc_feature: MA Experiment ID: 20000495 Result: Down-regulated in Transcription
  misc_feature: MA Experiment 20000495 PARAMETER Experiment Name: At_Guard_Cells_P Parameter: Harvest Date Value: 8/2/2002
  misc_feature: MA Experiment 20000495 PARAMETER Experiment Name: At_Guard_Cells_P Parameter: Organism Value: A. thaliana
  misc_feature: MA Experiment 20000495 PARAMETER Experiment Name: At_Guard_Cells_P Parameter: Tissue Value: Guard Cells vs. Leaves
  misc_feature: MA Experiment ID: 20000794 Result: Up-regulated in Transcription
  misc_feature: MA Experiment 20000794 PARAMETER Experiment Name: At_Petals_P Parameter: Age (day) Value: 23-25 days
  misc_feature: MA Experiment 20000794 PARAMETER Experiment Name: At_Petals_P Parameter: Plant Line Value: WS
  misc_feature: MA Experiment 20000794 PARAMETER Experiment Name: At_Petals_P Parameter: Tissue Value: Petals vs. Whole plant
  misc_feature: MA Experiment ID: 20001247 Result: Up-regulated in Transcription
  misc_feature: MA Experiment 20001247 PARAMETER Experiment Name: At_Far-red-induction_P Parameter: Age (day) Value: 7
  misc_feature: MA Experiment 20001247 PARAMETER Experiment Name: At_Far-red-induction_P Parameter: Light Value: Far-red vs. White
  misc_feature: MA Experiment 20001247 PARAMETER Experiment Name: At_Far-red-induction_P Parameter: Organism Value: A. thaliana
  misc_feature: MA Experiment 20001247 PARAMETER Experiment Name: At_Far-red-induction_P Parameter: Plant Line Value: Columbia
  misc_feature: MA Experiment 20001247 PARAMETER Experiment Name: At_Far-red-induction_P Parameter: Timepoint (hr) Value: 1
  misc_feature: MA Experiment 20001247 PARAMETER Experiment Name: At_Far-red-induction_P Parameter: Tissue Value: Whole Plant
  misc_feature: MA Experiment ID: 20001248 Result: Down-regulated in Transcription
  misc_feature: MA Experiment 20001248 PARAMETER Experiment Name: At_Far-red-induction_P Parameter: Age (day) Value: 7
  misc_feature: MA Experiment 20001248 PARAMETER Experiment Name: At_Far-red-induction_P Parameter: Light Value: Far-red vs. White
  misc_feature: MA Experiment 20001248 PARAMETER Experiment Name: At_Far-red-induction_P Parameter: Organism Value: A. thaliana
  misc_feature: MA Experiment 20001248 PARAMETER Experiment Name: At_Far-red-induction_P Parameter: Plant Line Value: Columbia
  misc_feature: MA Experiment 20001248 PARAMETER Experiment Name: At_Far-red-induction_P Parameter: Timepoint (hr) Value: 4
  misc_feature: MA Experiment 20001248 PARAMETER Experiment Name: At_Far-red-induction_P Parameter: Tissue Value: Whole Plant
  misc_feature: MA Experiment ID: 20001560 Result: Up-regulated in Transcription
  misc_feature: MA Experiment 20001560 PARAMETER Experiment Name: At_Drought_Soil_Dry_P Parameter: Age (day) Value: 28
  misc_feature: MA Experiment 20001560 PARAMETER Experiment Name: At_Drought_Soil_Dry_P Parameter: Organism Value: A. thaliana
  misc_feature: MA Experiment 20001560 PARAMETER Experiment Name: At_Drought_Soil_Dry_P Parameter: Plant Line Value: WS
  misc_feature: MA Experiment 20001560 PARAMETER Experiment Name: At_Drought_Soil_Dry_P Parameter: Post Timepoint (hr) Value: None
  misc_feature: MA Experiment 20001560 PARAMETER Experiment Name: At_Drought_Soil_Dry_P Parameter: Post-Treatment Value: None
  misc_feature: MA Experiment 20001560 PARAMETER Experiment Name: At_Drought_Soil_Dry_P Parameter: Timepoint (day) Value: 14
  misc_feature: MA Experiment 20001560 PARAMETER Experiment Name: At_Drought_Soil_Dry_P Parameter: Treatment Value: Drought vs. No Drought
  misc_feature: MA Experiment ID: 20001757 Result: Down-regulated in Transcription
  misc_feature: MA Experiment 20001757 PARAMETER Experiment Name: At_50mM_NH4NO3_L-to-H_P Parameter: Timepoint (hr) Value: 6
  misc_feature: MA Experiment 20001757 PARAMETER Experiment Name: At_50mM_NH4NO3_L-to-H_P Parameter: Tissue Value: Leaf
  misc_feature: MA Experiment 20001757 PARAMETER Experiment Name: At_50mM_NH4NO3_L-to-H_P Parameter: Treatment Value: 50mM NH4NO3 vs 100mM Mannitol
  misc_feature: MA Experiment ID: 20001904 Result: Up-regulated in Transcription
  misc_feature: MA Experiment 20001904 PARAMETER Experiment Name: At_Drought_Reproduction_P Parameter: Age (day) Value: 37
  misc_feature: MA Experiment 20001904 PARAMETER Experiment Name: At_Drought_Reproduction_P Parameter: Organism Value: A. thaliana
  misc_feature: MA Experiment 20001904 PARAMETER Experiment Name: At_Drought_Reproduction_P Parameter: Plant Line Value: WS
  misc_feature: MA Experiment 20001904 PARAMETER Experiment Name: At_Drought_Reproduction_P Parameter: Timepoint (day) Value: 7
  misc_feature: MA Experiment 20001904 PARAMETER Experiment Name: At_Drought_Reproduction_P Parameter: Tissue Value: Rosettes
  misc_feature: MA Experiment 20001904 PARAMETER Experiment Name: At_Drought_Reproduction_P Parameter: Treatment Value: Drought vs. No Drought
  misc_feature: MA Experiment ID: 20001905 Result: Up-regulated in Transcription
  misc_feature: MA Experiment 20001905 PARAMETER Experiment Name: At_Drought_Reproduction_P Parameter: Age (day) Value: 40
  misc_feature: MA Experiment 20001905 PARAMETER Experiment Name: At_Drought_Reproduction_P Parameter: Organism Value: A. thaliana
  misc_feature: MA Experiment 20001905 PARAMETER Experiment Name: At_Drought_Reproduction_P Parameter: Plant Line Value: WS
  misc_feature: MA Experiment 20001905 PARAMETER Experiment Name: At_Drought_Reproduction_P Parameter: Timepoint (day) Value: 10
  misc_feature: MA Experiment 20001905 PARAMETER Experiment Name: At_Drought_Reproduction_P Parameter: Tissue Value: Rosettes
  misc_feature: MA Experiment 20001905 PARAMETER Experiment Name: At_Drought_Reproduction_P Parameter: Treatment Value: Drought vs. No Drought

SEQ ID NO: 50220 - protein, 504 aa, Arabidopsis thaliana; identical to SEQ ID NO: 50015
  peptide (1)..(504): Ceres Seq. ID no. 12602424
  misc_feature (90)..(468): Pfam Name: Plant protein family Pfam Description: Plant protein family
  misc_feature (90)..(468): Pfam Name: Plant protein family Pfam Description: Plant protein family
  misc_feature (282)..(502): Homolog of NCBI NO: 15293043 NR Description: putative growth regulator protein [Arabidopsis
  misc_feature (72)..(463): Homolog of NCBI NO: 7488844 NR Description: RT17-1 protein homolog - garden pea
  misc_feature (80)..(504): Homolog of NCBI NO: 15233855 NR Description: PsRT17-1 like protein; protein id: At4g24530.1
  misc_feature (33)..(72): Homolog of NCBI NO: 15144512 NR Description: putative auxin growth promotor protein
  misc_feature (107)..(502): Homolog of NCBI NO: 15144512 NR Description: putative auxin growth promotor protein
  misc_feature (282)..(502): Homolog of NCBI NO: 15293043 NR Description: putative growth regulator protein [Arabidopsis
  misc_feature (80)..(504): Homolog of NCBI NO: 15233855 NR Description: PsRT17-1 like protein; protein id: At4g24530.1
  misc_feature (107)..(502): Homolog of NCBI NO: 15144512 NR Description: putative auxin growth promotor protein
  misc_feature (1)..(504): Homolog of NCBI NO: 22328073 NR Description: putative protein
  misc_feature (1)..(504): Homolog of NCBI NO: 20260536 NR Description: unknown protein [Arabidopsis thaliana]
  misc_feature (51)..(504): Homolog of NCBI NO: 9759627 NR Description: contains similarity to auxin-independent growth
  misc_feature (1)..(52): Homolog of NCBI NO: 9759627 NR Description: contains similarity to auxin-independent growth
  misc_feature (27)..(504): Homolog of NCBI NO: 31711716 NR Description: At4g24530 [Arabidopsis thaliana]
  misc_feature (33)..(72): Homolog of NCBI NO: 15144512 NR Description: putative auxin growth promotor protein
  misc_feature (72)..(463): Homolog of NCBI NO: 7488844 NR Description: RT17-1 protein homolog - garden pea
  misc_feature (27)..(504): Homolog of NCBI NO: 31711716 NR Description: At4g24530 [Arabidopsis thaliana]
  misc_feature (1)..(52): Homolog of NCBI NO: 9759627 NR Description: contains similarity to auxin-independent growth
  misc_feature (51)..(504): Homolog of NCBI NO: 9759627 NR Description: contains similarity to auxin-independent growth
  misc_feature (1)..(504): Homolog of NCBI NO: 20260536 NR Description: unknown protein [Arabidopsis thaliana]
  misc_feature (1)..(504): Homolog of NCBI NO: 22328073 NR Description: putative protein

SEQ ID NO: 50221 - protein, 490 aa, Arabidopsis thaliana; identical to SEQ ID NO: 50016
  peptide (1)..(490): Ceres Seq. ID no. 12602425
  misc_feature (76)..(454): Pfam Name: Plant protein family Pfam Description: Plant protein family
  misc_feature (76)..(454): Pfam Name: Plant protein family Pfam Description: Plant protein family
  misc_feature (268)..(488): Homolog of NCBI NO: 15293043 NR Description: putative growth regulator protein [Arabidopsis
  misc_feature (58)..(449): Homolog of NCBI NO: 7488844 NR Description: RT17-1 protein homolog - garden pea
  misc_feature (66)..(490): Homolog of NCBI NO: 15233855 NR Description: PsRT17-1 like protein; protein id: At4g24530.1
  misc_feature (19)..(58): Homolog of NCBI NO: 15144512 NR Description: putative auxin growth promotor protein
  misc_feature (93)..(488): Homolog of NCBI NO: 15144512 NR Description: putative auxin growth promotor protein
  misc_feature (268)..(488): Homolog of NCBI NO: 15293043 NR Description: putative growth regulator protein [Arabidopsis
  misc_feature (66)..(490): Homolog of NCBI NO: 15233855 NR Description: PsRT17-1 like protein; protein id: At4g24530.1
  misc_feature (93)..(488): Homolog of NCBI NO: 15144512 NR Description: putative auxin growth promotor protein
  misc_feature (1)..(490): Homolog of NCBI NO: 22328073 NR Description: putative protein
  misc_feature (1)..(490): Homolog of NCBI NO: 20260536 NR Description: unknown protein [Arabidopsis thaliana]
  misc_feature (37)..(490): Homolog of NCBI NO: 9759627 NR Description: contains similarity to auxin-independent growth
  misc_feature (1)..(38): Homolog of NCBI NO: 9759627 NR Description: contains similarity to auxin-independent growth
  misc_feature (13)..(490): Homolog of NCBI NO: 31711716 NR Description: At4g24530 [Arabidopsis thaliana]
  misc_feature (19)..(58): Homolog of NCBI NO: 15144512 NR Description: putative auxin growth promotor protein
  misc_feature (58)..(449): Homolog of NCBI NO: 7488844 NR Description: RT17-1 protein homolog - garden pea
  misc_feature (13)..(490): Homolog of NCBI NO: 31711716 NR Description: At4g24530 [Arabidopsis thaliana]
  misc_feature (1)..(38): Homolog of NCBI NO: 9759627 NR Description: contains similarity to auxin-independent growth
  misc_feature (37)..(490): Homolog of NCBI NO: 9759627 NR Description: contains similarity to auxin-independent growth
  misc_feature (1)..(490): Homolog of NCBI NO: 20260536 NR Description: unknown protein [Arabidopsis thaliana]
  misc_feature (1)..(490): Homolog of NCBI NO: 22328073 NR Description: putative protein

SEQ ID NO: 50222 - protein, 403 aa, Arabidopsis thaliana; identical to SEQ ID NO: 50017
  peptide (1)..(403): Ceres Seq. ID no. 12602426
  misc_feature (1)..(367): Pfam Name: Plant protein family Pfam Description: Plant protein family
  misc_feature (1)..(367): Pfam Name: Plant protein family Pfam Description: Plant protein family
  misc_feature (1)..(168): Homolog of NCBI NO: 15293043 NR Description: putative growth regulator protein [Arabidopsis
  misc_feature (181)..(401): Homolog of NCBI NO: 18399706 NR Description: growth regulator, putative
  misc_feature (181)..(401): Homolog of NCBI NO: 15293043 NR Description: putative growth regulator protein [Arabidopsis
  misc_feature (1)..(362): Homolog of NCBI NO: 7488844 NR Description: RT17-1 protein homolog - garden pea
  misc_feature (1)..(403): Homolog of NCBI NO: 15233855 NR Description: PsRT17-1 like protein; protein id: At4g24530.1
  misc_feature (1)..(168): Homolog of NCBI NO: 15293043 NR Description: putative growth regulator protein [Arabidopsis
  misc_feature (181)..(401): Homolog of NCBI NO: 15293043 NR Description: putative growth regulator protein [Arabidopsis
  misc_feature (1)..(403): Homolog of NCBI NO: 15233855 NR Description: PsRT17-1 like protein; protein id: At4g24530.1
  misc_feature (1)..(403): Homolog of NCBI NO: 22328073 NR Description: putative protein
  misc_feature (1)..(403): Homolog of NCBI NO: 20260536 NR Description: unknown protein [Arabidopsis thaliana]
  misc_feature (1)..(403): Homolog of NCBI NO: 9759627 NR Description: contains similarity to auxin-independent growth
  misc_feature (1)..(403): Homolog of NCBI NO: 31711716 NR Description: At4g24530 [Arabidopsis thaliana]
  misc_feature (6)..(401): Homolog of NCBI NO: 15144512 NR Description: putative auxin growth promotor protein
  misc_feature (1)..(362): Homolog of NCBI NO: 7488844 NR Description: RT17-1 protein homolog - garden pea
  misc_feature (181)..(401): Homolog of NCBI NO: 18399706 NR Description: growth regulator, putative
  misc_feature (6)..(401): Homolog of NCBI NO: 15144512 NR Description: putative auxin growth promotor protein
  misc_feature (1)..(403): Homolog of NCBI NO: 31711716 NR Description: At4g24530 [Arabidopsis thaliana]
  misc_feature (1)..(403): Homolog of NCBI NO: 9759627 NR Description: contains similarity to auxin-independent growth
  misc_feature (1)..(403): Homolog of NCBI NO: 20260536 NR Description: unknown protein [Arabidopsis thaliana]
  misc_feature (1)..(403): Homolog of NCBI NO: 22328073 NR Description: putative protein

SEQ ID NO: 50223 - DNA, 922 bp, Arabidopsis thaliana
  misc_feature (1)..(922): Ceres Seq. ID no. 13588916
  misc_feature: MA Experiment ID: 20000328 Result: Down-regulated in Transcription
  misc_feature: MA Experiment 20000328 PARAMETER Experiment Name: At_42deg_Heat_Sub_P Parameter: Age (day) Value: 14
  misc_feature: MA Experiment 20000328 PARAMETER Experiment Name: At_42deg_Heat_Sub_P Parameter: Organism Value: A. thaliana
  misc_feature: MA Experiment 20000328 PARAMETER Experiment Name: At_42deg_Heat_Sub_P Parameter: Plant Line Value: WS
  misc_feature: MA Experiment 20000328 PARAMETER Experiment Name: At_42deg_Heat_Sub_P Parameter: Temperature (deg C) Value: 42 vs. 22
  misc_feature: MA Experiment 20000328 PARAMETER Experiment Name: At_42deg_Heat_Sub_P Parameter: Timepoint (hr) Value: 6
  misc_feature: MA Experiment 20000328 PARAMETER Experiment Name: At_42deg_Heat_Sub_P Parameter: Tissue Value: Aerial
  misc_feature: MA Experiment ID: 20000329 Result: Up-regulated in Transcription
  misc_feature: MA Experiment 20000329 PARAMETER Experiment Name: At_4deg_Cold_Sub_P Parameter: Age (day) Value: 14
  misc_feature: MA Experiment 20000329 PARAMETER Experiment Name: At_4deg_Cold_Sub_P Parameter: Organism Value: A. thaliana
  misc_feature: MA Experiment 20000329 PARAMETER Experiment Name: At_4deg_Cold_Sub_P Parameter: Plant Line Value: WS
  misc_feature: MA Experiment 20000329 PARAMETER Experiment Name: At_4deg_Cold_Sub_P Parameter: Temperature (deg C) Value: 4 vs. 22
  misc_feature: MA Experiment 20000329 PARAMETER Experiment Name: At_4deg_Cold_Sub_P Parameter: Timepoint (hr) Value: 6
  misc_feature: MA Experiment 20000329 PARAMETER Experiment Name: At_4deg_Cold_Sub_P Parameter: Tissue Value: Aerial
  misc_feature: MA Experiment ID: 20000355 Result: Down-regulated in Transcription
  misc_feature: MA Experiment 20000355 PARAMETER Experiment Name: At_Siliques_Sub_P Parameter: Age (day) Value: 21
  misc_feature: MA Experiment 20000355 PARAMETER Experiment Name: At_Siliques_Sub_P Parameter: Organism Value: A. thaliana
  misc_feature: MA Experiment 20000355 PARAMETER Experiment Name: At_Siliques_Sub_P Parameter: Plant Line Value: WS
  misc_feature: MA Experiment 20000355 PARAMETER Experiment Name: At_Siliques_Sub_P Parameter: Tissue Value: Less Than 5mm Siliques vs. Whole Plant
  misc_feature: MA Experiment ID: 20001807 Result: Up-regulated in Transcription
  misc_feature: MA Experiment 20001807 PARAMETER Experiment Name: At_50mM_NH4NO3_L-to-H_Sub_P Parameter: Timepoint (hr) Value: 6
  misc_feature: MA Experiment 20001807 PARAMETER Experiment Name: At_50mM_NH4NO3_L-to-H_Sub_P Parameter: Tissue Value: Leaf
  misc_feature: MA Experiment 20001807 PARAMETER Experiment Name: At_50mM_NH4NO3_L-to-H_Sub_P Parameter: Treatment Value: 50mM NH4NO3 vs 100mM Mannitol
gtctctctgtctctttctctttctctctctctcagaaactctttctccaaaaatggcagaggcaagtttctatatcggagtcataggaaatgtaatctccgtactagttttcctctcaccagtggagacgttttggaaaatagtgaagcggagatcaacggaggagtacaaaagcttgccgtacatttgcacgttgttaggatcatcgctatggacatattacggcatcgtcactcccggagaatatcttgtctccaccgttaatggctttggtgctcttgttgaaaccatctacgtttcactttttctcttttatgcccctcgacatctcaagctgaaaacagtggtagtggtagcgatgttgaacgtgttttttccaatcgcggcgattgtggcaacgagaagtgcgtttgaagatgagaagatgcgttctcaatcaataggtttcatatctgctggtctaaacattataatgtatggttctccactttcagcaatgaaaacagtagtgacaacaaagagcgtgaaatacatgccgttttggttgtcgtttttcctcttcttaaacggcgcgatttgggctgtctatgctttactccaacacgacgttttcttactcgtgccaaatggagtggggtttgtgtttgggacaatgcaactcatactttatggaatttacagaaatgccaaaccggttggtttaagcaacggtttaagtgagattgctcaagatgaagaggaaggcctcacatcacgtgttgaacctctcctctcttaaatcccttttttttttatgtcaagagcttgttaattaatttgggtcttataaatacaaatctttatattttttgttacattattgtggtgtgcgattttgtgtacgttatttttttggacaaaattagattaatttgaagatgtt

SEQ ID NO: 50224 - protein, 258 aa, Arabidopsis thaliana
  peptide (1)..(258): Ceres Seq. ID no. 13588917
  misc_feature (23)..(110): Pfam Name: MtN3/saliva family Pfam Description: MtN3/saliva family
  misc_feature (22)..(258): Homolog of NCBI NO: 21593422 NR Description: senescence-associated protein (SAG29)
  misc_feature (22)..(258): Homolog of NCBI NO: 15240040 NR Description: nodulin MtN3 family protein [Arabidopsis
  misc_feature (21)..(247): Homolog of NCBI NO: 34907420 NR Description: P0018C10.36 [Oryza sativa (japonica
  misc_feature (25)..(226): Homolog of NCBI NO: 18413388 NR Description: nodulin MtN3 family protein [Arabidopsis
  misc_feature (14)..(231): Homolog of NCBI NO: 34912462 NR Description: MtN3-like protein [Oryza sativa (japonica
  misc_feature (14)..(231): Homolog of NCBI NO: 34912454 NR Description: P0681B11.31 [Oryza sativa (japonica
  misc_feature (18)..(257): Homolog of NCBI NO: 7485021 NR Description: hypothetical protein - Arabidopsis thaliana
  misc_feature (18)..(258): Homolog of NCBI NO: 30684193 NR Description: nodulin MtN3 family protein [Arabidopsis
  misc_feature (18)..(258): Homolog of NCBI NO: 30683457 NR Description: nodulin MtN3 family protein [Arabidopsis thaliana]
  misc_feature (18)..(258): Homolog of NCBI NO: 27754697 NR Description: putative cytochrome c oxidoreductase [Arabidopsis
SLCLFLFLSLSETLSPKMAEASFYIGVIGNVISVLVFLSPVETFWKIVKRRSTEEYKSLPYICTLLGSSLWTYYGIVTPGEYLVSTVNGFGALVETIYVSLFLFYAPRHLKLKTVVVVAMLNVFFPIAAIVATRSAFEDEKMRSQSIGFISAGLNIIMYGSPLSAMKTVVTTKSVKYMPFWLSFFLFLNGAIWAVYALLQHDVFLLVPNGVGFVFGTMQLILYGIYRNAKPVGLSNGLSEIAQDEEEGLTSRVEPLLS

SEQ ID NO: 50225 - protein, 241 aa, Arabidopsis thaliana
  peptide (1)..(241): Ceres Seq. ID no. 13588918
  misc_feature (6)..(93): Pfam Name: MtN3/saliva family Pfam Description: MtN3/saliva family
  misc_feature (5)..(241): Homolog of NCBI NO: 21593422 NR Description: senescence-associated protein (SAG29)
  misc_feature (5)..(241): Homolog of NCBI NO: 15240040 NR Description: nodulin MtN3 family protein [Arabidopsis
  misc_feature (4)..(230): Homolog of NCBI NO: 34907420 NR Description: P0018C10.36 [Oryza sativa (japonica
  misc_feature (8)..(209): Homolog of NCBI NO: 18413388 NR Description: nodulin MtN3 family protein [Arabidopsis
  misc_feature (1)..(214): Homolog of NCBI NO: 34912462 NR Description: MtN3-like protein [Oryza sativa (japonica
  misc_feature (1)..(214): Homolog of NCBI NO: 34912454 NR Description: P0681B11.31 [Oryza sativa (japonica
  misc_feature (1)..(240): Homolog of NCBI NO: 7485021 NR Description: hypothetical protein - Arabidopsis thaliana
  misc_feature (1)..(241): Homolog of NCBI NO: 30684193 NR Description: nodulin MtN3 family protein [Arabidopsis
  misc_feature (1)..(241): Homolog of NCBI NO: 30683457 NR Description: nodulin MtN3 family protein [Arabidopsis thaliana]
  misc_feature (1)..(241): Homolog of NCBI NO: 27754697 NR Description: putative cytochrome c oxidoreductase [Arabidopsis
MAEASFYIGVIGNVISVLVFLSPVETFWKIVKRRSTEEYKSLPYICTLLGSSLWTYYGIVTPGEYLVSTVNGFGALVETIYVSLFLFYAPRHLKLKTVVVVAMLNVFFPIAAIVATRSAFEDEKMRSQSIGFISAGLNIIMYGSPLSAMKTVVTTKSVKYMPFWLSFFLFLNGAIWAVYALLQHDVFLLVPNGVGFVFGTMQLILYGIYRNAKPVGLSNGLSEIAQDEEEGLTSRVEPLLS

SEQ ID NO: 50226 - protein, 139 aa, Arabidopsis thaliana
  peptide (1)..(139): Ceres Seq. ID no. 13588919
  misc_feature (1)..(139): Homolog of NCBI NO: 21593422 NR Description: senescence-associated protein (SAG29)
  misc_feature (1)..(139): Homolog of NCBI NO: 15240040 NR Description: nodulin MtN3 family protein [Arabidopsis
  misc_feature (1)..(128): Homolog of NCBI NO: 34907420 NR Description: P0018C10.36 [Oryza sativa (japonica
  misc_feature (1)..(107): Homolog of NCBI NO: 18413388 NR Description: nodulin MtN3 family protein [Arabidopsis
  misc_feature (1)..(112): Homolog of NCBI NO: 34912462 NR Description: MtN3-like protein [Oryza sativa (japonica
  misc_feature (1)..(112): Homolog of NCBI NO: 34912454 NR Description: P0681B11.31 [Oryza sativa (japonica
  misc_feature (1)..(138): Homolog of NCBI NO: 7485021 NR Description: hypothetical protein - Arabidopsis thaliana
  misc_feature (1)..(139): Homolog of NCBI NO: 30684193 NR Description: nodulin MtN3 family protein [Arabidopsis
  misc_feature (1)..(139): Homolog of NCBI NO: 30683457 NR Description: nodulin MtN3 family protein [Arabidopsis thaliana]
  misc_feature (1)..(139): Homolog of NCBI NO: 27754697 NR Description: putative cytochrome c oxidoreductase [Arabidopsis
MLNVFFPIAAIVATRSAFEDEKMRSQSIGFISAGLNIIMYGSPLSAMKTVVTTKSVKYMPFWLSFFLFLNGAIWAVYALLQHDVFLLVPNGVGFVFGTMQLILYGIYRNAKPVGLSNGLSEIAQDEEEGLTSRVEPLLS

SEQ ID NO: 50227 - DNA, 756 bp, Arabidopsis thaliana
  misc_feature (1)..(756): Ceres Seq. ID no. 13588920
  misc_feature: MA Experiment ID: 20000185 Result: Down-regulated in Transcription
  misc_feature: MA Experiment 20000185 PARAMETER Experiment Name: At_Roots__P Parameter: Age (day) Value: 7 vs. 21
  misc_feature: MA Experiment 20000185 PARAMETER Experiment Name: At_Roots__P Parameter: Organism Value: A. thaliana
  misc_feature: MA Experiment 20000185 PARAMETER Experiment Name: At_Roots__P Parameter: Tissue Value: Roots vs. Whole Plant
  misc_feature: MA Experiment ID: 20000439 Result: Down-regulated in Transcription
  misc_feature: MA Experiment 20000439 PARAMETER Experiment Name: At_Roots__P Parameter: Age (day) Value: 14 vs. 21
  misc_feature: MA Experiment 20000439 PARAMETER Experiment Name: At_Roots__P Parameter: Organism Value: A. thaliana
  misc_feature: MA Experiment 20000439 PARAMETER Experiment Name: At_Roots__P Parameter: Tissue Value: Roots vs. Whole Plant
  misc_feature: MA Experiment ID: 20001757 Result: Up-regulated in Transcription
  misc_feature: MA Experiment 20001757 PARAMETER Experiment Name: At_50mM_NH4NO3_L-to-H_P Parameter: Timepoint (hr) Value: 6
  misc_feature: MA Experiment 20001757 PARAMETER Experiment Name: At_50mM_NH4NO3_L-to-H_P Parameter: Tissue Value: Leaf
  misc_feature: MA Experiment 20001757 PARAMETER Experiment Name: At_50mM_NH4NO3_L-to-H_P Parameter: Treatment Value: 50mM NH4NO3 vs 100mM Mannitol
aaaattagcttccggttttatcttctcgaattcagaaaaaagcccttgtccaatatctctctactcgtacaacaatggcgtcgatggctgcaaccaccaatttcaccaaatctatgctctttccattctctcatgtttcaggaaatgcgagcttgaattcgcagagaagaacatggccaaagcagtacaagtctaaaaatggttacaggtctcttcgagtgaatggattatttggaggtggaaacaaagataataacagtgaagatggacaatcaaaggcaggaatatttggtaatatgcagaatatgtatgagactgtgaagaaagctcaaatggttgttcaagtggaagctgtacgtgttcaaaaagagttagctgccgcagaatttgatggttattgtgcaggcgagcttgtcaaggttacgttatcaggtaaccagcaaccaatccgtactgatattaccgaggcagcaatggaactaggttccgaaaaactatcacaacttgtcacagaagcatacaaggacgcacacgccaagagtgtggtggctatgaaagagagaatgagtgaccttgcgcagagcttaggaatgccaccgggtctcagcgaaggaatgaagtaagaagctgtttttgttgtttcatttcaactttcaggtatgagaggttcggctttttttgtttgtttgtatatcagtcaggcagaagcaaagagctttgtactctactcttatggaattatatataaaagattcg

SEQ ID NO: 50228 - protein, 182 aa, Arabidopsis thaliana
  peptide (1)..(182): Ceres Seq. ID no. 15220921
  misc_feature (82)..(174): Pfam Name: Uncharacterised BCR, YbaB family COG0718 Pfam Description: Uncharacterised BCR, YbaB family COG0718
  misc_feature (65)..(177): Homolog of NCBI NO: 22298265 NR Description: ORF_ID:tlr0723~hypothetical protein
  misc_feature (65)..(174): Homolog of NCBI NO: 23124992 NR Description: hypothetical protein [Nostoc punctiforme]
  misc_feature (59)..(174): Homolog of NCBI NO: 23040346 NR Description: hypothetical protein [Trichodesmium erythraeum
  misc_feature (73)..(177): Homolog of NCBI NO: 24414799 NR Description: hypothetical protein [Synechococcus sp. PCC 7942]
  misc_feature (65)..(174): Homolog of NCBI NO: 17232559 NR Description: hypothetical protein [Nostoc sp. PCC 7120]
  misc_feature (21)..(176): Homolog of NCBI NO: 28207763 NR Description: CR084 protein [Chlamydomonas reinhardtii]
  misc_feature (1)..(182): Homolog of NCBI NO: 21553866 NR Description: unknown [Arabidopsis thaliana]
  misc_feature (1)..(182): Homolog of NCBI NO: 15234797 NR Description: expressed protein [Arabidopsis thaliana]
  misc_feature (4)..(182): Homolog of NCBI NO: 25412184 NR Description: hypothetical protein At2g24020 [imported] -
  misc_feature (1)..(182): Homolog of NCBI NO: 18400436 NR Description: expressed protein [Arabidopsis thaliana]
MASMAATTNFTKSMLFPFSHVSGNASLNSQRRTWPKQYKSKNGYRSLRVNGLFGGGNKDNNSEDGQSKAGIFGNMQNMYETVKKAQMVVQVEAVRVQKELAAAEFDGYCAGELVKVTLSGNQQPIRTDITEAAMELGSEKLSQLVTEAYKDAHAKSVVAMKERMSDLAQSLGMPPGLSEGMK

SEQ ID NO: 50229 - protein, 179 aa, Arabidopsis thaliana
  peptide (1)..(179): Ceres Seq. ID no. 15220922
  misc_feature (79)..(171): Pfam Name: Uncharacterised BCR, YbaB family COG0718 Pfam Description: Uncharacterised BCR, YbaB family COG0718
  misc_feature (62)..(174): Homolog of NCBI NO: 22298265 NR Description: ORF_ID:tlr0723~hypothetical protein
  misc_feature (62)..(171): Homolog of NCBI NO: 23124992 NR Description: hypothetical protein [Nostoc punctiforme]
  misc_feature (56)..(171): Homolog of NCBI NO: 23040346 NR Description: hypothetical protein [Trichodesmium erythraeum
  misc_feature (70)..(174): Homolog of NCBI NO: 24414799 NR Description: hypothetical protein [Synechococcus sp. PCC 7942]
  misc_feature (62)..(171): Homolog of NCBI NO: 17232559 NR Description: hypothetical protein [Nostoc sp. PCC 7120]
  misc_feature (18)..(173): Homolog of NCBI NO: 28207763 NR Description: CR084 protein [Chlamydomonas reinhardtii]
  misc_feature (1)..(179): Homolog of NCBI NO: 21553866 NR Description: unknown [Arabidopsis thaliana]
  misc_feature (1)..(179): Homolog of NCBI NO: 15234797 NR Description: expressed protein [Arabidopsis thaliana]
  misc_feature (1)..(179): Homolog of NCBI NO: 25412184 NR Description: hypothetical protein At2g24020 [imported] -
  misc_feature (1)..(179): Homolog of NCBI NO: 18400436 NR Description: expressed protein [Arabidopsis thaliana]
MAATTNFTKSMLFPFSHVSGNASLNSQRRTWPKQYKSKNGYRSLRVNGLFGGGNKDNNSEDGQSKAGIFGNMQNMYETVKKAQMVVQVEAVRVQKELAAAEFDGYCAGELVKVTLSGNQQPIRTDITEAAMELGSEKLSQLVTEAYKDAHAKSVVAMKERMSDLAQSLGMPPGLSEGMK

SEQ ID NO: 50230 - protein, 169 aa, Arabidopsis thaliana
  peptide (1)..(169): Ceres Seq. ID no. 15220923
  misc_feature (69)..(161): Pfam Name: Uncharacterised BCR, YbaB family COG0718 Pfam Description: Uncharacterised BCR, YbaB family COG0718
  misc_feature (52)..(164): Homolog of NCBI NO: 22298265 NR Description: ORF_ID:tlr0723~hypothetical protein
  misc_feature (52)..(161): Homolog of NCBI NO: 23124992 NR Description: hypothetical protein [Nostoc punctiforme]
  misc_feature (46)..(161): Homolog of NCBI NO: 23040346 NR Description: hypothetical protein [Trichodesmium erythraeum
  misc_feature (60)..(164): Homolog of NCBI NO: 24414799 NR Description: hypothetical protein [Synechococcus sp. PCC 7942]
  misc_feature (52)..(161): Homolog of NCBI NO: 17232559 NR Description: hypothetical protein [Nostoc sp. PCC 7120]
  misc_feature (8)..(163): Homolog of NCBI NO: 28207763 NR Description: CR084 protein [Chlamydomonas reinhardtii]
  misc_feature (1)..(169): Homolog of NCBI NO: 21553866 NR Description: unknown [Arabidopsis thaliana]
  misc_feature (1)..(169): Homolog of NCBI NO: 15234797 NR Description: expressed protein [Arabidopsis thaliana]
  misc_feature (1)..(169): Homolog of NCBI NO: 25412184 NR Description: hypothetical protein At2g24020 [imported] -
  misc_feature (1)..(169): Homolog of NCBI NO: 18400436 NR Description: expressed protein [Arabidopsis thaliana]
MLFPFSHVSGNASLNSQRRTWPKQYKSKNGYRSLRVNGLFGGGNKDNNSEDGQSKAGIFGNMQNMYETVKKAQMVVQVEAVRVQKELAAAEFDGYCAGELVKVTLSGNQQPIRTDITEAAMELGSEKLSQLVTEAYKDAHAKSVVAMKERMSDLAQSLGMPPGLSEGMK

SEQ ID NO: 50231 - DNA, 1730 bp, Arabidopsis thaliana
  misc_feature (1)..(1730): Ceres Seq. ID no. 12591398
  misc_feature: MA Experiment ID: 20000451 Result: Up-regulated in Transcription
  misc_feature: MA Experiment 20000451 PARAMETER Experiment Name: At_CS6879_Shoots-Roots_P Parameter: Age (day) Value: 14
  misc_feature: MA Experiment 20000451 PARAMETER Experiment Name: At_CS6879_Shoots-Roots_P Parameter: Organism Value: A. thaliana
  misc_feature: MA Experiment 20000451 PARAMETER Experiment Name: At_CS6879_Shoots-Roots_P Parameter: Plant Line Value: CS6879 vs. WS
  misc_feature: MA Experiment 20000451 PARAMETER Experiment Name: At_CS6879_Shoots-Roots_P Parameter: Tissue Value: Roots
atgtttcgttttccggtaagtcttggaggaggtccacgtgagaatctgaagccatcagatgagcagcatcaacgtgcggtggtgaatgaggttgactttttccgatcagcggagaagagagatagggtttcacgtgaagaacaaaacattatcgccgatgagactcatagggttcatgtcaaaagggagaattcacgtgttgatgatcatgacgatcgttctactgatcacatcaatattggacttaatcttctcactgcgaatacgggaagcgacgagtcaatggtggatgatggattgtctgtggatatggaagagaaacgtacaaagtgtgagaatgcacaacttcgcgaagagctaaagaaggcgagtgaagataatcaaagactaaagcaaatgctaagtcaaacaaccaacaacttcaattccttgcagatgcaacttgttgctgtcatgaggcaacaagaagatcatcatcacctagctacgaccgagaacaatgacaatgtaaagaaccgacatgaagtgcctgaaatggttccaagacagttcatcgatttgggaccgcattctgacgaagtgtcgtccgaggagaggacgacggttcggtcgggatctcctccctcgcttctagagaaatctagctcacgtcaaaacggaaagagagtgcttgtaagagaagaaagcccggaaaccgaatccaacggctggagaaaccctaacaaagttcctaaacaccatgcatcatccagcatttgcggtggcaatggcagtgaaaatgcaagtagcaaggtcattgagcaagcggccgccgaagccaccatgcgtaaagcccgtgtctcggttcgtgctcgatccgaagctcccatgttaagcgatggatgtcaatggagaaaatacggacaaaaaatggcgaaaggaaacccgtgccctcgagcttattaccgttgcacaatggctgttggatgtcctgttcgcaagcaagtgcaacgttgcgcggaagatagaaccattctcataacaacctacgaaggaaaccataaccatccattacctcctgcggctatgaacatggcttcaactacaacagcagccgcaagcatgcttctctcaggctccaccatgtcgaaccaagacggtttaatgaacccaacaaatctcttggctcgaaccatattaccgtgttcctcaagcatggctactatctcagcctctgcaccattcccaaccattacattagacctcacagagtcacccaacgggaacaatccaaccaataacccgctgatgcaattctctcaacggtctggtttggtggagttgaaccaatcggttttgcctcatatgatgggtcaggctttgtactacaaccaacagtctaagttttcgggtttacatatgccgtctcagccgctaaacgctggtgagagtgttagcgccgctactgccgcaatcgcctccaatcccaactttgccgcggctctagctgcagccataacttcgattatcaacggttcgaacaatcagcagaatgggaacaacaataacagtaatgttacaacgagcaacgttgacaataggcaataacatttttttataagttttagttagggactttttatcggtcgattttgttttgtttttcttttattacattattttttagttacggcttttttttgttttttcttttctttcccaaacaacaagtattgagagcaattcccccc

SEQ ID NO: 50232 - protein, 528 aa, Arabidopsis thaliana
  peptide (1)..(528): Ceres Seq. ID no. 12591399
  misc_feature (291)..(351): Pfam Name: WRKY DNA -binding domain Pfam Description: WRKY DNA -binding domain
  misc_feature (291)..(525): Homolog of NCBI NO: 7488096 NR Description: probable DNA-binding protein T15B16.12 -
  misc_feature (296)..(518): Homolog of NCBI NO: 13506739 NR Description: WRKY DNA-binding protein 6 [Arabidopsis thaliana]
  misc_feature (114)..(484): Homolog of NCBI NO: 5042446 NR Description: putative WRKY DNA binding protein
  misc_feature (329)..(518): Homolog of NCBI NO: 25404372 NR Description: hypothetical protein F19K23.22 [imported] -
  misc_feature (23)..(235): Homolog of NCBI NO: 25404372 NR Description: hypothetical protein F19K23.22 [imported] -
  misc_feature (30)..(484): Homolog of NCBI NO: 34904618 NR Description: putative WRKY DNA binding protein
  misc_feature (20)..(518): Homolog of NCBI NO: 18407554 NR Description: WRKY family transcription factor
  misc_feature (110)..(528): Homolog of NCBI NO: 11357339 NR Description: hypothetical protein AT4g22070 - Arabidopsis
  misc_feature (1)..(528): Homolog of NCBI NO: 18415833 NR Description: WRKY family transcription factor
  misc_feature (1)..(528): Homolog of NCBI NO: 15233516 NR Description: WRKY family transcription factor
MFRFPVSLGGGPRENLKPSDEQHQRAVVNEVDFFRSAEKRDRVSREEQNIIADETHRVHVKRENSRVDDHDDRSTDHINIGLNLLTANTGSDESMVDDGLSVDMEEKRTKCENAQLREELKKASEDNQRLKQMLSQTTNNFNSLQMQLVAVMRQQEDHHHLATTENNDNVKNRHEVPEMVPRQFIDLGPHSDEVSSEERTTVRSGSPPSLLEKSSSRQNGKRVLVREESPETESNGWRNPNKVPKHHASSSICGGNGSENASSKVIEQAAAEATMRKARVSVRARSEAPMLSDGCQWRKYGQKMAKGNPCPRAYYRCTMAVGCPVRKQVQRCAEDRTILITTYEGNHNHPLPPAAMNMASTTTAAASMLLSGSTMSNQDGLMNPTNLLARTILPCSSSMATISASAPFPTITLDLTESPNGNNPTNNPLMQFSQRSGLVELNQSVLPHMMGQALYYNQQSKFSGLHMPSQPLNAGESVSAATAAIASNPNFAAALAAAITSIINGSNNQQNGNNNNSNVTTSNVDNRQ

SEQ ID NO: 50233 - protein, 434 aa, Arabidopsis thaliana
  peptide (1)..(434): Ceres Seq. ID no. 12591400
  misc_feature (197)..(257): Pfam Name: WRKY DNA -binding domain Pfam Description: WRKY DNA -binding domain
  misc_feature (197)..(431): Homolog of NCBI NO: 7488096 NR Description: probable DNA-binding protein T15B16.12 -
  misc_feature (202)..(424): Homolog of NCBI NO: 13506739 NR Description: WRKY DNA-binding protein 6 [Arabidopsis thaliana]
  misc_feature (20)..(390): Homolog of NCBI NO: 5042446 NR Description: putative WRKY DNA binding protein
  misc_feature (235)..(424): Homolog of NCBI NO: 25404372 NR Description: hypothetical protein F19K23.22 [imported] -
  misc_feature (1)..(141): Homolog of NCBI NO: 25404372 NR Description: hypothetical protein F19K23.22 [imported] -
  misc_feature (1)..(390): Homolog of NCBI NO: 34904618 NR Description: putative WRKY DNA binding protein
  misc_feature (1)..(424): Homolog of NCBI NO: 18407554 NR Description: WRKY family transcription factor
  misc_feature (16)..(434): Homolog of NCBI NO: 11357339 NR Description: hypothetical protein AT4g22070 - Arabidopsis
  misc_feature (1)..(434): Homolog of NCBI NO: 18415833 NR Description: WRKY family transcription factor
  misc_feature (1)..(434): Homolog of NCBI NO: 15233516 NR Description: WRKY family transcription factor
MVDDGLSVDMEEKRTKCENAQLREELKKASEDNQRLKQMLSQTTNNFNSLQMQLVAVMRQQEDHHHLATTENNDNVKNRHEVPEMVPRQFIDLGPHSDEVSSEERTTVRSGSPPSLLEKSSSRQNGKRVLVREESPETESNGWRNPNKVPKHHASSSICGGNGSENASSKVIEQAAAEATMRKARVSVRARSEAPMLSDGCQWRKYGQKMAKGNPCPRAYYRCTMAVGCPVRKQVQRCAEDRTILITTYEGNHNHPLPPAAMNMASTTTAAASMLLSGSTMSNQDGLMNPTNLLARTILPCSSSMATISASAPFPTITLDLTESPNGNNPTNNPLMQFSQRSGLVELNQSVLPHMMGQALYYNQQSKFSGLHMPSQPLNAGESVSAATAAIASNPNFAAALAAAITSIINGSNNQQNGNNNNSNVTTSNVDNRQ

SEQ ID NO: 50234 - protein, 425 aa, Arabidopsis thaliana
  peptide (1)..(425): Ceres Seq. ID no. 12591401
  misc_feature (188)..(248): Pfam Name: WRKY DNA -binding domain Pfam Description: WRKY DNA -binding domain
  misc_feature (188)..(422): Homolog of NCBI NO: 7488096 NR Description: probable DNA-binding protein T15B16.12 -
  misc_feature (193)..(415): Homolog of NCBI NO: 13506739 NR Description: WRKY DNA-binding protein 6 [Arabidopsis thaliana]
  misc_feature (11)..(381): Homolog of NCBI NO: 5042446 NR Description: putative WRKY DNA binding protein
  misc_feature (226)..(415): Homolog of NCBI NO: 25404372 NR Description: hypothetical protein F19K23.22 [imported] -
  misc_feature (1)..(132): Homolog of NCBI NO: 25404372 NR Description: hypothetical protein F19K23.22 [imported] -
  misc_feature (1)..(381): Homolog of NCBI NO: 34904618 NR Description: putative WRKY DNA binding protein
  misc_feature (1)..(415): Homolog of NCBI NO: 18407554 NR Description: WRKY family transcription factor
  misc_feature (7)..(425): Homolog of NCBI NO: 11357339 NR Description: hypothetical protein AT4g22070 - Arabidopsis
  misc_feature (1)..(425): Homolog of NCBI NO: 18415833 NR Description: WRKY family transcription factor
  misc_feature (1)..(425): Homolog of NCBI NO: 15233516 NR Description: WRKY family transcription factor
MEEKRTKCENAQLREELKKASEDNQRLKQMLSQTTNNFNSLQMQLVAVMRQQEDHHHLATTENNDNVKNRHEVPEMVPRQFIDLGPHSDEVSSEERTTVRSGSPPSLLEKSSSRQNGKRVLVREESPETESNGWRNPNKVPKHHASSSICGGNGSENASSKVIEQAAAEATMRKARVSVRARSEAPMLSDGCQWRKYGQKMAKGNPCPRAYYRCTMAVGCPVRKQVQRCAEDRTILITTYEGNHNHPLPPAAMNMASTTTAAASMLLSGSTMSNQDGLMNPTNLLARTILPCSSSMATISASAPFPTITLDLTESPNGNNPTNNPLMQFSQRSGLVELNQSVLPHMMGQALYYNQQSKFSGLHMPSQPLNAGESVSAATAAIASNPNFAAALAAAITSIINGSNNQQNGNNNNSNVTTSNVDNRQ

SEQ ID NO: 50235 - DNA, 1390 bp, Arabidopsis thaliana
  misc_feature (1)..(1390): Ceres Seq. ID no. 12605710
gaaaacagaacctcgacattaacctaaacctaagagcaaagcaaatcgacggcgacgggaaaatagaaccgcagatctctgtctcctctctctctcgtaactgtttgttcgatggcaccgaagaaggcggaggaagtggtcgaaagccctcctgtttccagtgaagaagaagaatctggctcatctggagaagaatctgaatcttctgctgaagttccgaagaaagtcgagtcttcgcaaaagcctgaatctgactctgaaggcgaatctgaatcggagtccagttctgggcccgagcccgagtccgagcctgctaagacgatcaagctgaagcctgttgggactaaaccaattccagagacgtctggatctgccgcgactgtacctgagagttcaacggctaagcgtcctttgaaggaagctgctcctgaagctattaagaagcagaagacatcggacactgagcatgtgaagaagccgataactaatgatgaggttaagaagatttcttcagaggatgctaagaagatgtttcagagattgttcagtgagacggatgaaatcgctttgcttcaaggtattattgatttcacatctaccaaaggagatccttatgaggatattgatgctttttgcatttatgtgaagaaactgatcgatttcgatgctaccaaaaaccaaattgttactaaacttcagaggttgaagaagaagtttaataatgctgtgaagaattctcttaagaagggaaagactgaagatgatattgagtttgctaaagatcttgagcaaaaaggttttgaattgtccagaaagatttggggaagcaatggtgttttggttactggtaaatcatcaaggaagaaagttggaggaacacctgcaccgaaagagatgaagttagtagctcactctactcccaagaaacaacaagaagaagcgaagaaaccggaaagaacagaggcaaaggttgtgaacacaggtctctccattggtaaagagattgcatcgttcctcaatgcagataatgggagttcttgtggtttggatgaatccacattaactgcggtttgggcaaaggttgcggatggagctgagaagagagaagtggaggagaaatggaagaagcttaaggctaagcagtttgagctatgtttgcagaggtctggactcgtgaatgaaactgcaaagatgatattcaaagcctatgaatcttgagcggtttgtctttttacttttttagtatgcatctttgagtcttttttgtattgtgcattttagcttgtgaaactaatccttatgtaagtcttttttcgtattttctttatgcccctatgttggatgtttggtttgggtatatgacccttttatttattactcttgttcggtt

SEQ ID NO: 50236 - protein, 368 aa, Arabidopsis thaliana
  peptide (1)..(368): Ceres Seq. ID no. 12605711
  misc_feature (139)..(239): Pfam Name: Protein of unknown function, DUF573 Pfam Description: Protein of unknown function, DUF573
  misc_feature (10)..(335): Homolog of NCBI NO: 25350269 NR Description: protein T23J18.17 [imported] - Arabidopsis
  misc_feature (10)..(335): Homolog of NCBI NO: 15220413 NR Description: hypthetical protein; protein id: At1g11510.1
  misc_feature (2)..(365): Homolog of NCBI NO: 21593409 NR Description: unknown [Arabidopsis thaliana]
  misc_feature (2)..(365): Homolog of NCBI NO: 18407307 NR Description: expressed protein
  misc_feature (39)..(364): Homolog of NCBI NO: 15234115 NR Description: hypothetical protein; protein id: At4g01260.1
  misc_feature (264)..(365): Homolog of NCBI NO: 15236717 NR Description: hypothetical protein; protein id: At4g00130.1
  misc_feature (75)..(189): Homolog of NCBI NO: 15236717 NR Description: hypothetical protein; protein id: At4g00130.1
  misc_feature (140)..(368): Homolog of NCBI NO: 14423518 NR Description: putative protein [Arabidopsis thaliana]
  misc_feature (140)..(368): Homolog of NCBI NO: 24899707 NR Description: putative protein [Arabidopsis thaliana]
  misc_feature (1)..(368): Homolog of NCBI NO: 15234971 NR Description: putative protein
MAPKKAEEVVESPPVSSEEEESGSSGEESESSAEVPKKVESSQKPESDSEGESESESSSGPEPESEPAKTIKLKPVGTKPIPETSGSAATVPESSTAKRPLKEAAPEAIKKQKTSDTEHVKKPITNDEVKKISSEDAKKMFQRLFSETDEIALLQGIIDFTSTKGDPYEDIDAFCIYVKKLIDFDATKNQIVTKLQRLKKKFNNAVKNSLKKGKTEDDIEFAKDLEQKGFELSRKIWGSNGVLVTGKSSRKKVGGTPAPKEMKLVAHSTPKKQQEEAKKPERTEAKVVNTGLSIGKEIASFLNADNGSSCGLDESTLTAVWAKVADGAEKREVEEKWKKLKAKQFELCLQRSGLVNETAKMIFKAYES

SEQ ID NO: 50237 - protein, 229 aa, Arabidopsis thaliana
  peptide (1)..(229): Ceres Seq. ID no. 12605712
  misc_feature (1)..(100): Pfam Name: Protein of unknown function, DUF573 Pfam Description: Protein of unknown function, DUF573
  misc_feature (1)..(196): Homolog of NCBI NO: 25350269 NR Description: protein T23J18.17 [imported] - Arabidopsis
  misc_feature (1)..(196): Homolog of NCBI NO: 15220413 NR Description: hypthetical protein; protein id: At1g11510.1
  misc_feature (1)..(226): Homolog of NCBI NO: 21593409 NR Description: unknown [Arabidopsis thaliana]
  misc_feature (1)..(226): Homolog of NCBI NO: 18407307 NR Description: expressed protein
  misc_feature (1)..(225): Homolog of NCBI NO: 15234115 NR Description: hypothetical protein; protein id: At4g01260.1
  misc_feature (125)..(226): Homolog of NCBI NO: 15236717 NR Description: hypothetical protein; protein id: At4g00130.1
  misc_feature (1)..(50): Homolog of NCBI NO: 15236717 NR Description: hypothetical protein; protein id: At4g00130.1
  misc_feature (1)..(229): Homolog of NCBI NO: 14423518 NR Description: putative protein [Arabidopsis thaliana]
  misc_feature (1)..(229): Homolog of NCBI NO: 24899707 NR Description: putative protein [Arabidopsis thaliana]
  misc_feature (1)..(229): Homolog of NCBI NO: 15234971 NR Description: putative protein
MFQRLFSETDEIALLQGIIDFTSTKGDPYEDIDAFCIYVKKLIDFDATKNQIVTKLQRLKKKFNNAVKNSLKKGKTEDDIEFAKDLEQKGFELSRKIWGSNGVLVTGKSSRKKVGGTPAPKEMKLVAHSTPKKQQEEAKKPERTEAKVVNTGLSIGKEIASFLNADNGSSCGLDESTLTAVWAKVADGAEKREVEEKWKKLKAKQFELCLQRSGLVNETAKMIFKAYES

SEQ ID NO: 50238 - DNA, 1869 bp, Arabidopsis thaliana; identical to SEQ ID NO: 45919
  misc_feature (1)..(1869): Ceres Seq. ID no. 13591695
  misc_feature: MA Experiment ID: 20000184 Result: Down-regulated in Transcription
  misc_feature: MA Experiment 20000184 PARAMETER Experiment Name: At_Shoots__P Parameter: Age (day) Value: 7
  misc_feature: MA Experiment 20000184 PARAMETER Experiment Name: At_Shoots__P Parameter: Tissue Value: Shoots vs. Whole Plant
  misc_feature: MA Experiment ID: 20000437 Result: Up-regulated in Transcription
  misc_feature: MA Experiment 20000437 PARAMETER Experiment Name: At_Drought_P Parameter: Age (day) Value: 8
  misc_feature: MA Experiment 20000437 PARAMETER Experiment Name: At_Drought_P Parameter: Organism Value: A. thaliana
  misc_feature: MA Experiment 20000437 PARAMETER Experiment Name: At_Drought_P Parameter: Plant Line Value: WS
  misc_feature: MA Experiment 20000437 PARAMETER Experiment Name: At_Drought_P Parameter: Timepoint (hr) Value: 24
  misc_feature: MA Experiment 20000437 PARAMETER Experiment Name: At_Drought_P Parameter: Tissue Value: Whole Plant
  misc_feature: MA Experiment 20000437 PARAMETER Experiment Name: At_Drought_P Parameter: Treatment Value: Drought vs. No Drought
  misc_feature: MA Experiment ID: 20000438 Result: Down-regulated in Transcription
  misc_feature: MA Experiment 20000438 PARAMETER Experiment Name: At_Shoots__P Parameter: Age (day) Value: 14
  misc_feature: MA Experiment 20000438 PARAMETER Experiment Name: At_Shoots__P Parameter: Tissue Value: Shoots vs. Whole Plant
  misc_feature: MA Experiment ID: 20001905 Result: Up-regulated in Transcription
  misc_feature: MA Experiment 20001905 PARAMETER Experiment Name: At_Drought_Reproduction_P Parameter: Age (day) Value: 40
  misc_feature: MA Experiment 20001905 PARAMETER Experiment Name: At_Drought_Reproduction_P Parameter: Organism Value: A. thaliana
  misc_feature: MA Experiment 20001905 PARAMETER Experiment Name: At_Drought_Reproduction_P Parameter: Plant Line Value: WS
  misc_feature: MA Experiment 20001905 PARAMETER Experiment Name: At_Drought_Reproduction_P Parameter: Timepoint (day) Value: 10
  misc_feature: MA Experiment 20001905 PARAMETER Experiment Name: At_Drought_Reproduction_P Parameter: Tissue Value: Rosettes
  misc_feature: MA Experiment 20001905 PARAMETER Experiment Name: At_Drought_Reproduction_P Parameter: Treatment Value: Drought vs. No Drought

SEQ ID NO: 50239 - protein, 419 aa, Arabidopsis thaliana; identical to SEQ ID NO: 45920
  peptide (1)..(419): Ceres Seq. ID no. 13591696
  misc_feature (73)..(406): Pfam Name: NAD dependent epimerase/dehydratase family Pfam Description: NAD dependent epimerase/dehydratase family
  misc_feature (73)..(406): Pfam Name: NAD dependent epimerase/dehydratase family Pfam Description: NAD dependent epimerase/dehydratase family
  misc_feature (245)..(408): Homolog of NCBI NO: 5852089 NR Description: zwh12.1 [Oryza sativa (indica cultivar-group)]
  misc_feature (22)..(410): Homolog of NCBI NO: 26106016 NR Description: UDP-galactose 4-epimerase-like protein
  misc_feature (16)..(410): Homolog of NCBI NO: 27529690 NR Description: UDP-galactose 4-epimerase-like protein
  misc_feature (22)..(409): Homolog of NCBI NO: 15241503 NR Description: NAD-dependent epimerase/dehydratase family
  misc_feature (22)..(410): Homolog of NCBI NO: 27260937 NR Description: OJ1417_E01.21 [Oryza sativa (japonica
  misc_feature (245)..(408): Homolog of NCBI NO: 5852089 NR Description: zwh12.1 [Oryza sativa (indica cultivar-group)]
  misc_feature (16)..(410): Homolog of NCBI NO: 27529690 NR Description: UDP-galactose 4-epimerase-like protein
  misc_feature (22)..(410): Homolog of NCBI NO: 27260937 NR Description: OJ1417_E01.21 [Oryza sativa (japonica
  misc_feature (1)..(419): Homolog of NCBI NO: 22329866 NR Description: NAD-dependent epimerase/dehydratase family
  misc_feature (1)..(419): Homolog of NCBI NO: 24417398 NR Description: unknown [Arabidopsis thaliana]
  misc_feature (34)..(419): Homolog of NCBI NO: 7437275 NR Description: probable UDPglucose 4-epimerase (EC 5.1.3.2)
  misc_feature (34)..(409): Homolog of NCBI NO: 15237098 NR Description: NAD-dependent epimerase/dehydratase family
  misc_feature (1)..(410): Homolog of NCBI NO: 25553524 NR Description: UDP-galactose 4-epimerase-like protein
  misc_feature (22)..(409): Homolog of NCBI NO: 15241503 NR Description: NAD-dependent epimerase/dehydratase family
  misc_feature (22)..(410): Homolog of NCBI NO: 26106016 NR Description: UDP-galactose 4-epimerase-like protein
  misc_feature (1)..(410): Homolog of NCBI NO: 25553524 NR Description: UDP-galactose 4-epimerase-like protein
  misc_feature (34)..(409): Homolog of NCBI NO: 15237098 NR Description: NAD-dependent epimerase/dehydratase family
  misc_feature (34)..(419): Homolog of NCBI NO: 7437275 NR Description: probable UDPglucose 4-epimerase (EC 5.1.3.2)
  misc_feature (1)..(419): Homolog of NCBI NO: 24417398 NR Description: unknown [Arabidopsis thaliana]
  misc_feature (1)..(419): Homolog of NCBI NO: 22329866 NR Description: NAD-dependent epimerase/dehydratase family

SEQ ID NO: 50240 - protein, 403 aa, Arabidopsis thaliana; identical to SEQ ID NO: 45921
  peptide (1)..(403): Ceres Seq. ID no. 13591697
  misc_feature (57)..(390): Pfam Name: NAD dependent epimerase/dehydratase family Pfam Description: NAD dependent epimerase/dehydratase family
  misc_feature (57)..(390): Pfam Name: NAD dependent epimerase/dehydratase family Pfam Description: NAD dependent epimerase/dehydratase family
  misc_feature (229)..(392): Homolog of NCBI NO: 5852089 NR Description: zwh12.1 [Oryza sativa (indica cultivar-group)]
  misc_feature (6)..(394): Homolog of NCBI NO: 26106016 NR Description: UDP-galactose 4-epimerase-like protein
  misc_feature (1)..(394): Homolog of NCBI NO: 27529690 NR Description: UDP-galactose 4-epimerase-like protein
  misc_feature (6)..(393): Homolog of NCBI NO: 15241503 NR Description: NAD-dependent epimerase/dehydratase family
  misc_feature (6)..(394): Homolog of NCBI NO: 27260937 NR Description: OJ1417_E01.21 [Oryza sativa (japonica
  misc_feature (229)..(392): Homolog of NCBI NO: 5852089 NR Description: zwh12.1 [Oryza sativa (indica cultivar-group)]
  misc_feature (1)..(394): Homolog of NCBI NO: 27529690 NR Description: UDP-galactose 4-epimerase-like protein
  misc_feature (6)..(394): Homolog of NCBI NO: 27260937 NR Description: OJ1417_E01.21 [Oryza sativa (japonica
  misc_feature (1)..(403): Homolog of NCBI NO: 22329866 NR Description: NAD-dependent epimerase/dehydratase family
  misc_feature (1)..(403): Homolog of NCBI NO: 24417398 NR Description: unknown [Arabidopsis thaliana]
  misc_feature (18)..(403): Homolog of NCBI NO: 7437275 NR Description: probable UDPglucose 4-epimerase (EC 5.1.3.2)
  misc_feature (18)..(393): Homolog of NCBI NO: 15237098 NR Description: NAD-dependent epimerase/dehydratase family
  misc_feature (1)..(394): Homolog of NCBI NO: 25553524 NR Description: UDP-galactose 4-epimerase-like protein
  misc_feature (6)..(393): Homolog of NCBI NO: 15241503 NR Description: NAD-dependent epimerase/dehydratase family
  misc_feature (6)..(394): Homolog of NCBI NO: 26106016 NR Description: UDP-galactose 4-epimerase-like protein
  misc_feature (1)..(394): Homolog of NCBI NO: 25553524 NR Description: UDP-galactose 4-epimerase-like protein
  misc_feature (18)..(393): Homolog of NCBI NO: 15237098 NR Description: NAD-dependent epimerase/dehydratase family
  misc_feature (18)..(403): Homolog of NCBI NO: 7437275 NR Description: probable UDPglucose 4-epimerase (EC 5.1.3.2)
  misc_feature (1)..(403): Homolog of NCBI NO: 24417398 NR Description: unknown [Arabidopsis thaliana]
  misc_feature (1)..(403): Homolog of NCBI NO: 22329866 NR Description: NAD-dependent epimerase/dehydratase family

SEQ ID NO: 50241 - protein, 370 aa, Arabidopsis thaliana; identical to SEQ ID NO: 45922
  peptide (1)..(370): Ceres Seq. ID no. 13591698
  misc_feature (24)..(357): Pfam Name: NAD dependent epimerase/dehydratase family Pfam Description: NAD dependent epimerase/dehydratase family
  misc_feature (24)..(357): Pfam Name: NAD dependent epimerase/dehydratase family Pfam Description: NAD dependent epimerase/dehydratase family
  misc_feature (196)..(359): Homolog of NCBI NO: 5852089 NR Description: zwh12.1 [Oryza sativa (indica cultivar-group)]
  misc_feature (1)..(361): Homolog of NCBI NO: 26106016 NR Description: UDP-galactose 4-epimerase-like protein
  misc_feature (1)..(361): Homolog of NCBI NO: 27529690 NR Description: UDP-galactose 4-epimerase-like protein
  misc_feature (1)..(360): Homolog of NCBI NO: 15241503 NR Description: NAD-dependent epimerase/dehydratase family
  misc_feature (1)..(361): Homolog of NCBI NO: 27260937 NR Description: OJ1417_E01.21 [Oryza sativa (japonica
  misc_feature (196)..(359): Homolog of NCBI NO: 5852089 NR Description: zwh12.1 [Oryza sativa (indica cultivar-group)]
  misc_feature (1)..(361): Homolog of NCBI NO: 27529690 NR Description: UDP-galactose 4-epimerase-like protein
  misc_feature (1)..(361): Homolog of NCBI NO: 27260937 NR Description: OJ1417_E01.21 [Oryza sativa (japonica
  misc_feature (1)..(370): Homolog of NCBI NO: 22329866 NR Description: NAD-dependent epimerase/dehydratase family
  misc_feature (1)..(370): Homolog of NCBI NO: 24417398 NR Description: unknown [Arabidopsis thaliana]
  misc_feature (1)..(370): Homolog of NCBI NO: 7437275 NR Description: probable UDPglucose 4-epimerase (EC 5.1.3.2)
  misc_feature (1)..(360): Homolog of NCBI NO: 15237098 NR Description: NAD-dependent epimerase/dehydratase family
  misc_feature (1)..(361): Homolog of NCBI NO: 25553524 NR Description: UDP-galactose 4-epimerase-like protein
  misc_feature (1)..(360): Homolog of NCBI NO: 15241503 NR Description: NAD-dependent epimerase/dehydratase family
  misc_feature (1)..(361): Homolog of NCBI NO: 26106016 NR Description: UDP-galactose 4-epimerase-like protein
  misc_feature (1)..(361): Homolog of NCBI NO: 25553524 NR Description: UDP-galactose 4-epimerase-like protein
  misc_feature (1)..(360): Homolog of NCBI NO: 15237098 NR Description: NAD-dependent epimerase/dehydratase family
  misc_feature (1)..(370): Homolog of NCBI NO: 7437275 NR Description: probable UDPglucose 4-epimerase (EC 5.1.3.2)
  misc_feature (1)..(370): Homolog of NCBI NO: 24417398 NR Description: unknown [Arabidopsis thaliana]
  misc_feature (1)..(370): Homolog of NCBI NO: 22329866 NR Description: NAD-dependent epimerase/dehydratase family

SEQ ID NO: 50242 - DNA, 813 bp, Arabidopsis thaliana
  misc_feature (1)..(813): Ceres Seq. ID no. 13647966
  misc_feature: MA Experiment ID: 20000180 Result: Up-regulated in Transcription
  misc_feature: MA Experiment 20000180 PARAMETER Experiment Name: At_Germinating_Seeds_P Parameter: Age (hr) Value: 24 vs. 0
  misc_feature: MA Experiment 20000180 PARAMETER Experiment Name: At_Germinating_Seeds_P Parameter: Tissue Value: Germinating Seeds
  misc_feature: MA Experiment ID: 20000184 Result: Up-regulated in Transcription
  misc_feature: MA Experiment 20000184 PARAMETER Experiment Name: At_Shoots__P Parameter: Age (day) Value: 7
  misc_feature: MA Experiment 20000184 PARAMETER Experiment Name: At_Shoots__P Parameter: Tissue Value: Shoots vs. Whole Plant
  misc_feature: MA Experiment ID: 20000185 Result: Down-regulated in Transcription
  misc_feature: MA Experiment 20000185 PARAMETER Experiment Name: At_Roots__P Parameter: Age (day) Value: 7 vs. 21
  misc_feature: MA Experiment 20000185 PARAMETER Experiment Name: At_Roots__P Parameter: Organism Value: A. thaliana
  misc_feature: MA Experiment 20000185 PARAMETER Experiment Name: At_Roots__P Parameter: Tissue Value: Roots vs. Whole Plant
  misc_feature: MA Experiment ID: 20000436 Result: Down-regulated in Transcription
  misc_feature: MA Experiment 20000436 PARAMETER Experiment Name: At_Drought_P Parameter: Age (day) Value: 7
  misc_feature: MA Experiment 20000436 PARAMETER Experiment Name: At_Drought_P Parameter: Organism Value: A. thaliana
  misc_feature: MA Experiment 20000436 PARAMETER Experiment Name: At_Drought_P Parameter: Plant Line Value: WS
  misc_feature: MA Experiment 20000436 PARAMETER Experiment Name: At_Drought_P Parameter: Timepoint (hr) Value: 12
  misc_feature: MA Experiment 20000436 PARAMETER Experiment Name: At_Drought_P Parameter: Tissue Value: Whole Plant
  misc_feature: MA Experiment 20000436 PARAMETER Experiment Name: At_Drought_P Parameter: Treatment Value: Drought vs. No Drought
  misc_feature: MA Experiment ID: 20000437 Result: Down-regulated in Transcription
  misc_feature: MA Experiment 20000437 PARAMETER Experiment Name: At_Drought_P Parameter: Age (day) Value: 8
  misc_feature: MA Experiment 20000437 PARAMETER Experiment Name: At_Drought_P Parameter: Organism Value: A. thaliana
  misc_feature: MA Experiment 20000437 PARAMETER Experiment Name: At_Drought_P Parameter: Plant Line Value: WS
  misc_feature: MA Experiment 20000437 PARAMETER Experiment Name: At_Drought_P Parameter: Timepoint (hr) Value: 24
  misc_feature: MA Experiment 20000437 PARAMETER Experiment Name: At_Drought_P Parameter: Tissue Value: Whole Plant
  misc_feature: MA Experiment 20000437 PARAMETER Experiment Name: At_Drought_P Parameter: Treatment Value: Drought vs. No Drought
  misc_feature: MA Experiment ID: 20000438 Result: Up-regulated in Transcription
  misc_feature: MA Experiment 20000438 PARAMETER Experiment Name: At_Shoots__P Parameter: Age (day) Value: 14
  misc_feature: MA Experiment 20000438 PARAMETER Experiment Name: At_Shoots__P Parameter: Tissue Value: Shoots vs. Whole Plant
  misc_feature: MA Experiment ID: 20000439 Result: Down-regulated in Transcription
  misc_feature: MA Experiment 20000439 PARAMETER Experiment Name: At_Roots__P Parameter: Age (day) Value: 14 vs. 21
  misc_feature: MA Experiment 20000439 PARAMETER Experiment Name: At_Roots__P Parameter: Organism Value: A. thaliana
  misc_feature: MA Experiment 20000439 PARAMETER Experiment Name: At_Roots__P Parameter: Tissue Value: Roots vs. Whole Plant
  misc_feature: MA Experiment ID: 20000496 Result: Down-regulated in Transcription
  misc_feature: MA Experiment 20000496 PARAMETER Experiment Name: At_Guard_Cells_P Parameter: Harvest Date Value: 7/19/2002
  misc_feature: MA Experiment 20000496 PARAMETER Experiment Name: At_Guard_Cells_P Parameter: Organism Value: Canola
  misc_feature: MA Experiment 20000496 PARAMETER Experiment Name: At_Guard_Cells_P Parameter: Tissue Value: Guard Cells vs. Leaves
  misc_feature: MA Experiment ID: 20000527 Result: Up-regulated in Transcription
  misc_feature: MA Experiment 20000527 PARAMETER Experiment Name: At_10percent_PEG_P Parameter: Age (day) Value: 20
  misc_feature: MA Experiment 20000527 PARAMETER Experiment Name: At_10percent_PEG_P Parameter: Organism Value: A. thaliana
  misc_feature: MA Experiment 20000527 PARAMETER Experiment Name: At_10percent_PEG_P Parameter: Plant Line Value: WS
  misc_feature: MA Experiment 20000527 PARAMETER Experiment Name: At_10percent_PEG_P Parameter: Timepoint (day) Value: 20
  misc_feature: MA Experiment 20000527 PARAMETER Experiment Name: At_10percent_PEG_P Parameter: Tissue Value: Whole Plant
  misc_feature: MA Experiment 20000527 PARAMETER Experiment Name: At_10percent_PEG_P Parameter: Treatment Value: 10percent PEG vs. No Treatment
  misc_feature: MA Experiment ID: 20000794 Result: Down-regulated in Transcription
  misc_feature: MA Experiment 20000794 PARAMETER Experiment Name: At_Petals_P Parameter: Age (day) Value: 23-25 days
  misc_feature: MA Experiment 20000794 PARAMETER Experiment Name: At_Petals_P Parameter: Plant Line Value: WS
  misc_feature: MA Experiment 20000794 PARAMETER Experiment Name: At_Petals_P Parameter: Tissue Value: Petals vs. Whole plant
  misc_feature: MA Experiment ID: 20001757 Result: Up-regulated in Transcription
  misc_feature: MA Experiment 20001757 PARAMETER Experiment Name: At_50mM_NH4NO3_L-to-H_P Parameter: Timepoint (hr) Value: 6
  misc_feature: MA Experiment 20001757 PARAMETER Experiment Name: At_50mM_NH4NO3_L-to-H_P Parameter: Tissue Value: Leaf
  misc_feature: MA Experiment 20001757 PARAMETER Experiment Name: At_50mM_NH4NO3_L-to-H_P Parameter: Treatment Value: 50mM NH4NO3 vs 100mM Mannitol
  misc_feature: MA Experiment ID: 20001905 Result: Down-regulated in Transcription
  misc_feature: MA Experiment 20001905 PARAMETER Experiment Name: At_Drought_Reproduction_P Parameter: Age (day) Value: 40
  misc_feature: MA Experiment 20001905 PARAMETER Experiment Name: At_Drought_Reproduction_P Parameter: Organism Value: A. thaliana
  misc_feature: MA Experiment 20001905 PARAMETER Experiment Name: At_Drought_Reproduction_P Parameter: Plant Line Value: WS
  misc_feature: MA Experiment 20001905 PARAMETER Experiment Name: At_Drought_Reproduction_P Parameter: Timepoint (day) Value: 10
  misc_feature: MA Experiment 20001905 PARAMETER Experiment Name: At_Drought_Reproduction_P Parameter: Tissue Value: Rosettes
  misc_feature: MA Experiment 20001905 PARAMETER Experiment Name: At_Drought_Reproduction_P Parameter: Treatment Value: Drought vs. No Drought
  misc_feature: MA Experiment ID: 20001906 Result: Down-regulated in Transcription
  misc_feature: MA Experiment 20001906 PARAMETER Experiment Name: At_Drought_Reproduction_P Parameter: Age (day) Value: 35
  misc_feature: MA Experiment 20001906 PARAMETER Experiment Name: At_Drought_Reproduction_P Parameter: Organism Value: A. thaliana
  misc_feature: MA Experiment 20001906 PARAMETER Experiment Name: At_Drought_Reproduction_P Parameter: Plant Line Value: WS
  misc_feature: MA Experiment 20001906 PARAMETER Experiment Name: At_Drought_Reproduction_P Parameter: Timepoint (day) Value: 5
  misc_feature: MA Experiment 20001906 PARAMETER Experiment Name: At_Drought_Reproduction_P Parameter: Tissue Value: Siliques
  misc_feature: MA Experiment 20001906 PARAMETER Experiment Name: At_Drought_Reproduction_P Parameter: Treatment Value: Drought vs. No Drought
  misc_feature: MA Experiment ID: 20001911 Result: Down-regulated in Transcription
  misc_feature: MA Experiment 20001911 PARAMETER Experiment Name: At_Drought_Reproduction_P Parameter: Age (day) Value: 40
  misc_feature: MA Experiment 20001911 PARAMETER Experiment Name: At_Drought_Reproduction_P Parameter: Organism Value: A. thaliana
  misc_feature: MA Experiment 20001911 PARAMETER Experiment Name: At_Drought_Reproduction_P Parameter: Plant Line Value: WS
  misc_feature: MA Experiment 20001911 PARAMETER Experiment Name: At_Drought_Reproduction_P Parameter: Timepoint (day) Value: 10
  misc_feature: MA Experiment 20001911 PARAMETER Experiment Name: At_Drought_Reproduction_P Parameter: Tissue Value: Flowers
  misc_feature: MA Experiment 20001911 PARAMETER Experiment Name: At_Drought_Reproduction_P Parameter: Treatment Value: Drought vs. No Drought
gagagaagataatgagctccttggggttttcagttggaacttgttctcctccaagtgagaaaagaaaatgcagatttcttgtgaataatagcttaaacaaagcagaggctattaacttgagaaacaagcaaaaagtttcttctgatcctgagttaagttttgcccaattatcctcatgtggtagaagagaagcaattattggttttggtttctctattggcttgcttgataatgtttctgcattagccgaaacaacttcttgtgaattctctgtgtctccttctggtcttgctttttgtgataaagttgttggttatggtcctgaagctgttaaagggcaactaatcaaggcacattatgtagggaagttggagaatgggaaagtctttgataatagctataatcgagggaaacctcttactttccgaattggtgttggtgaggtgataaaaggttgggatcaaggaatccttggctctgatggaattcctcctatgcttactggtgggaaacgaacattgaggattcctccagaactcgcgtatggtgatcgaggcgcaggttgcaaaggaggctcatgccttattcctccagcttcggttcttctctttgacattgagtacataggtaaagcttgagagagcttttttgcttttgctttgccttttctgagccatatcatactcttgtttgaatcatccttatagaagaaaaaaatatgtctattattttttctactatgtaatcaagtgaatatctcagctttttctatcaaaaaaaaaaaaaaaaaaaactcgagggggggcccggtac

SEQ ID NO: 50243 - protein, 211 aa, Arabidopsis thaliana
  peptide (1)..(211): Ceres Seq. ID no. 13647967
  misc_feature (104)..(208): Pfam Name: FKBP-type peptidyl-prolyl cis-trans isomerase Pfam Description: FKBP-type peptidyl-prolyl cis-trans isomerase
  misc_feature (92)..(209): Homolog of NCBI NO: 22298646 NR Description: FKBP-type peptidyl-prolyl cis-trans isomerase
  misc_feature (80)..(211): Homolog of NCBI NO: 23053670 NR Description: hypothetical protein [Geobacter metallireducens]
  misc_feature (89)..(209): Homolog of NCBI NO: 37520410 NR Description: FKBP-type peptidyl-prolyl cis-trans isomerase
  misc_feature (77)..(209): Homolog of NCBI NO: 33862614 NR Description: FKBP-type peptidyl-prolyl cis-trans isomerase
  misc_feature (91)..(208): Homolog of NCBI NO: 33866159 NR Description: FKBP-type peptidyl-prolyl cis-trans isomerase
  misc_feature (79)..(209): Homolog of NCBI NO: 16329650 NR Description: FKBP-type peptidyl-prolyl cis-trans isomerase
  misc_feature (87)..(208): Homolog of NCBI NO: 18420509 NR Description: immunophilin / FKBP-type peptidyl-prolyl
  misc_feature (104)..(179): Homolog of NCBI NO: 6686802 NR Description: FKBP like protein [Arabidopsis thaliana]
  misc_feature (4)..(211): Homolog of NCBI NO: 21535744 NR Description: FK506 binding protein 1 [Arabidopsis thaliana]
  misc_feature (4)..(211): Homolog of NCBI NO: 15242472 NR Description: immunophilin / FKBP-type peptidyl-prolyl
EKIMSSLGFSVGTCSPPSEKRKCRFLVNNSLNKAEAINLRNKQKVSSDPELSFAQLSSCGRREAIIGFGFSIGLLDNVSALAETTSCEFSVSPSGLAFCDKVVGYGPEAVKGQLIKAHYVGKLENGKVFDNSYNRGKPLTFRIGVGEVIKGWDQGILGSDGIPPMLTGGKRTLRIPPELAYGDRGAGCKGGSCLIPPASVLLFDIEYIGKA

SEQ ID NO: 50244 - protein, 208 aa, Arabidopsis thaliana
  peptide (1)..(208): Ceres Seq. ID no. 13647968
  misc_feature (101)..(205): Pfam Name: FKBP-type peptidyl-prolyl cis-trans isomerase Pfam Description: FKBP-type peptidyl-prolyl cis-trans isomerase
  misc_feature (89)..(206): Homolog of NCBI NO: 22298646 NR Description: FKBP-type peptidyl-prolyl cis-trans isomerase
  misc_feature (77)..(208): Homolog of NCBI NO: 23053670 NR Description: hypothetical protein [Geobacter metallireducens]
  misc_feature (86)..(206): Homolog of NCBI NO: 37520410 NR Description: FKBP-type peptidyl-prolyl cis-trans isomerase
  misc_feature (74)..(206): Homolog of NCBI NO: 33862614 NR Description: FKBP-type peptidyl-prolyl cis-trans isomerase
  misc_feature (88)..(205): Homolog of NCBI NO: 33866159 NR Description: FKBP-type peptidyl-prolyl cis-trans isomerase
  misc_feature (76)..(206): Homolog of NCBI NO: 16329650 NR Description: FKBP-type peptidyl-prolyl cis-trans isomerase
  misc_feature (84)..(205): Homolog of NCBI NO: 18420509 NR Description: immunophilin / FKBP-type peptidyl-prolyl
  misc_feature (101)..(176): Homolog of NCBI NO: 6686802 NR Description: FKBP like protein [Arabidopsis thaliana]
  misc_feature (1)..(208): Homolog of NCBI NO: 21535744 NR Description: FK506 binding protein 1 [Arabidopsis thaliana]
  misc_feature (1)..(208): Homolog of NCBI NO: 15242472 NR Description: immunophilin / FKBP-type peptidyl-prolyl
MSSLGFSVGTCSPPSEKRKCRFLVNNSLNKAEAINLRNKQKVSSDPELSFAQLSSCGRREAIIGFGFSIGLLDNVSALAETTSCEFSVSPSGLAFCDKVVGYGPEAVKGQLIKAHYVGKLENGKVFDNSYNRGKPLTFRIGVGEVIKGWDQGILGSDGIPPMLTGGKRTLRIPPELAYGDRGAGCKGGSCLIPPASVLLFDIEYIGKA

SEQ ID NO: 50245 - DNA, 1694 bp, Arabidopsis thaliana; identical to SEQ ID NO: 44789
  misc_feature (1)..(1694): Ceres Seq. ID no. 12455338
  misc_feature: MA Experiment ID: 20000171 Result: Down-regulated in Transcription
  misc_feature: MA Experiment 20000171 PARAMETER Experiment Name: At_42deg_Heat_P Parameter: Age (day) Value: 14
  misc_feature: MA Experiment 20000171 PARAMETER Experiment Name: At_42deg_Heat_P Parameter: Organism Value: A. thaliana
  misc_feature: MA Experiment 20000171 PARAMETER Experiment Name: At_42deg_Heat_P Parameter: Plant Line Value: WS
  misc_feature: MA Experiment 20000171 PARAMETER Experiment Name: At_42deg_Heat_P Parameter: Temperature (deg C) Value: 42 vs. 22
  misc_feature: MA Experiment 20000171 PARAMETER Experiment Name: At_42deg_Heat_P Parameter: Timepoint (hr) Value: 1
  misc_feature: MA Experiment 20000171 PARAMETER Experiment Name: At_42deg_Heat_P Parameter: Tissue Value: Aerial
  misc_feature: MA Experiment ID: 20000234 Result: Up-regulated in Transcription
  misc_feature: MA Experiment 20000234 PARAMETER Experiment Name: At_Siliques_P Parameter: Age (day) Value: 21
  misc_feature: MA Experiment 20000234 PARAMETER Experiment Name: At_Siliques_P Parameter: Organism Value: A. thaliana
  misc_feature: MA Experiment 20000234 PARAMETER Experiment Name: At_Siliques_P Parameter: Plant Line Value: WS
  misc_feature: MA Experiment 20000234 PARAMETER Experiment Name: At_Siliques_P Parameter: Tissue Value: Less Than 5mm Siliques vs. Whole Plant
  misc_feature: MA Experiment ID: 20000235 Result: Up-regulated in Transcription
  misc_feature: MA Experiment 20000235 PARAMETER Experiment Name: At_Siliques_P Parameter: Age (day) Value: 21
  misc_feature: MA Experiment 20000235 PARAMETER Experiment Name: At_Siliques_P Parameter: Organism Value: A. thaliana
  misc_feature: MA Experiment 20000235 PARAMETER Experiment Name: At_Siliques_P Parameter: Plant Line Value: WS
  misc_feature: MA Experiment 20000235 PARAMETER Experiment Name: At_Siliques_P Parameter: Tissue Value: 5-10mm Siliques vs. Whole Plant
  misc_feature: MA Experiment ID: 20000794 Result: Down-regulated in Transcription
  misc_feature: MA Experiment 20000794 PARAMETER Experiment Name: At_Petals_P Parameter: Age (day) Value: 23-25 days
  misc_feature: MA Experiment 20000794 PARAMETER Experiment Name: At_Petals_P Parameter: Plant Line Value: WS
  misc_feature: MA Experiment 20000794 PARAMETER Experiment Name: At_Petals_P Parameter: Tissue Value: Petals vs. Whole plant
  misc_feature: MA Experiment ID: 20001247 Result: Up-regulated in Transcription
  misc_feature: MA Experiment 20001247 PARAMETER Experiment Name: At_Far-red-induction_P Parameter: Age (day) Value: 7
  misc_feature: MA Experiment 20001247 PARAMETER Experiment Name: At_Far-red-induction_P Parameter: Light Value: Far-red vs. White
  misc_feature: MA Experiment 20001247 PARAMETER Experiment Name: At_Far-red-induction_P Parameter: Organism Value: A. thaliana
  misc_feature: MA Experiment 20001247 PARAMETER Experiment Name: At_Far-red-induction_P Parameter: Plant Line Value: Columbia
  misc_feature: MA Experiment 20001247 PARAMETER Experiment Name: At_Far-red-induction_P Parameter: Timepoint (hr) Value: 1
  misc_feature: MA Experiment 20001247 PARAMETER Experiment Name: At_Far-red-induction_P Parameter: Tissue Value: Whole Plant
  misc_feature: MA Experiment ID: 20001451 Result: Up-regulated in Transcription
  misc_feature: MA Experiment 20001451 PARAMETER Experiment Name: At_Far-red-induction_P Parameter: Age (day) Value: 7
  misc_feature: MA Experiment 20001451 PARAMETER Experiment Name: At_Far-red-induction_P Parameter: Light Value: Far-red vs. White
  misc_feature: MA Experiment 20001451 PARAMETER Experiment Name: At_Far-red-induction_P Parameter: Organism Value: A. thaliana
  misc_feature: MA Experiment 20001451 PARAMETER Experiment Name: At_Far-red-induction_P Parameter: Plant Line Value: Columbia
  misc_feature: MA Experiment 20001451 PARAMETER Experiment Name: At_Far-red-induction_P Parameter: Timepoint (hr) Value: 24
  misc_feature: MA Experiment 20001451 PARAMETER Experiment Name: At_Far-red-induction_P Parameter: Tissue Value: Whole Plant
  misc_feature: MA Experiment ID: 20001560 Result: Up-regulated in Transcription
  misc_feature: MA Experiment 20001560 PARAMETER Experiment Name: At_Drought_Soil_Dry_P Parameter: Age (day) Value: 28
  misc_feature: MA Experiment 20001560 PARAMETER Experiment Name: At_Drought_Soil_Dry_P Parameter: Organism Value: A. thaliana
  misc_feature: MA Experiment 20001560 PARAMETER Experiment Name: At_Drought_Soil_Dry_P Parameter: Plant Line Value: WS
  misc_feature: MA Experiment 20001560 PARAMETER Experiment Name: At_Drought_Soil_Dry_P Parameter: Post Timepoint (hr) Value: None
  misc_feature: MA Experiment 20001560 PARAMETER Experiment Name: At_Drought_Soil_Dry_P Parameter: Post-Treatment Value: None
  misc_feature: MA Experiment 20001560 PARAMETER Experiment Name: At_Drought_Soil_Dry_P Parameter: Timepoint (day) Value: 14
  misc_feature: MA Experiment 20001560 PARAMETER Experiment Name: At_Drought_Soil_Dry_P Parameter: Treatment Value: Drought vs. No Drought
  misc_feature: MA Experiment ID: 20001911 Result: Down-regulated in Transcription
  misc_feature: MA Experiment 20001911 PARAMETER Experiment Name: At_Drought_Reproduction_P Parameter: Age (day) Value: 40
  misc_feature: MA Experiment 20001911 PARAMETER Experiment Name: At_Drought_Reproduction_P Parameter: Organism Value: A. thaliana
  misc_feature: MA Experiment 20001911 PARAMETER Experiment Name: At_Drought_Reproduction_P Parameter: Plant Line Value: WS
  misc_feature: MA Experiment 20001911 PARAMETER Experiment Name: At_Drought_Reproduction_P Parameter: Timepoint (day) Value: 10
  misc_feature: MA Experiment 20001911 PARAMETER Experiment Name: At_Drought_Reproduction_P Parameter: Tissue Value: Flowers
  misc_feature: MA Experiment 20001911 PARAMETER Experiment Name: At_Drought_Reproduction_P Parameter: Treatment Value: Drought vs. No Drought

SEQ ID NO: 50246 - protein, 460 aa, Arabidopsis thaliana; identical to SEQ ID NO: 44790
  peptide (1)..(460): Ceres Seq. ID no. 12455339
  misc_feature (50)..(190): Pfam Name: Fasciclin domain Pfam Description: Fasciclin domain
  misc_feature (50)..(190): Pfam Name: Fasciclin domain Pfam Description: Fasciclin domain
  misc_feature (45)..(438): Homolog of NCBI NO: 27819499 NR Description: putative arabinogalactan-protein
  misc_feature (124)..(442): Homolog of NCBI NO: 7486009 NR Description: hypothetical protein F22O6.250 - Arabidopsis
  misc_feature (49)..(421): Homolog of NCBI NO: 34899886 NR Description: OJ1714_H10.26 [Oryza sativa (japonica
  misc_feature (49)..(453): Homolog of NCBI NO: 33146739 NR Description: GPI-anchored protein -like
  misc_feature (25)..(442): Homolog of NCBI NO: 6041822 NR Description: unknown protein [Arabidopsis thaliana]
  misc_feature (45)..(438): Homolog of NCBI NO: 27819499 NR Description: putative arabinogalactan-protein
  misc_feature (49)..(421): Homolog of NCBI NO: 34899886 NR Description: OJ1714_H10.26 [Oryza sativa (japonica
  misc_feature (25)..(442): Homolog of NCBI NO: 6041822 NR Description: unknown protein [Arabidopsis thaliana]
  misc_feature (16)..(460): Homolog of NCBI NO: 30686588 NR Description: expressed protein [Arabidopsis thaliana]
  misc_feature (16)..(443): Homolog of NCBI NO: 25370583 NR Description: hypothetical protein At2g35860 [imported] -
  misc_feature (23)..(460): Homolog of NCBI NO: 15231197 NR Description: unknown protein; protein id: At3g52370.1
  misc_feature (25)..(454): Homolog of NCBI NO: 18399319 NR Description: expressed protein
  misc_feature (25)..(445): Homolog of NCBI NO: 15240029 NR Description: putative protein; protein id: At5g06390.1
  misc_feature (49)..(453): Homolog of NCBI NO: 33146739 NR Description: GPI-anchored protein -like
  misc_feature (124)..(442): Homolog of NCBI NO: 7486009 NR Description: hypothetical protein F22O6.250 - Arabidopsis
  misc_feature (25)..(445): Homolog of NCBI NO: 15240029 NR Description: putative protein; protein id: At5g06390.1
  misc_feature (25)..(454): Homolog of NCBI NO: 18399319 NR Description: expressed protein
  misc_feature (23)..(460): Homolog of NCBI NO: 15231197 NR Description: unknown protein; protein id: At3g52370.1
  misc_feature (16)..(443): Homolog of NCBI NO: 25370583 NR Description: hypothetical protein At2g35860 [imported] -
  misc_feature (16)..(460): Homolog of NCBI NO: 30686588 NR Description: expressed protein [Arabidopsis thaliana]

SEQ ID NO: 50247 - protein, 445 aa, Arabidopsis thaliana; identical to SEQ ID NO: 44791
  peptide (1)..(445): Ceres Seq. ID no. 12455340
  misc_feature (35)..(175): Pfam Name: Fasciclin domain Pfam Description: Fasciclin domain
  misc_feature (35)..(175): Pfam Name: Fasciclin domain Pfam Description: Fasciclin domain
  misc_feature (30)..(423): Homolog of NCBI NO: 27819499 NR Description: putative arabinogalactan-protein
  misc_feature (109)..(427): Homolog of NCBI NO: 7486009 NR Description: hypothetical protein F22O6.250 - Arabidopsis
  misc_feature (34)..(406): Homolog of NCBI NO: 34899886 NR Description: OJ1714_H10.26 [Oryza sativa (japonica
  misc_feature (34)..(438): Homolog of NCBI NO: 33146739 NR Description: GPI-anchored protein -like
  misc_feature (10)..(427): Homolog of NCBI NO: 6041822 NR Description: unknown protein [Arabidopsis thaliana]
  misc_feature (30)..(423): Homolog of NCBI NO: 27819499 NR Description: putative arabinogalactan-protein
  misc_feature (34)..(406): Homolog of NCBI NO: 34899886 NR Description: OJ1714_H10.26 [Oryza sativa (japonica
  misc_feature (10)..(427): Homolog of NCBI NO: 6041822 NR Description: unknown protein [Arabidopsis thaliana]
  misc_feature (1)..(445): Homolog of NCBI NO: 30686588 NR Description: expressed protein [Arabidopsis thaliana]
  misc_feature (1)..(428): Homolog of NCBI NO: 25370583 NR Description: hypothetical protein At2g35860 [imported] -
  misc_feature (8)..(445): Homolog of NCBI NO: 15231197 NR Description: unknown protein; protein id: At3g52370.1
  misc_feature (10)..(439): Homolog of NCBI NO: 18399319 NR Description: expressed protein
  misc_feature (10)..(430): Homolog of NCBI NO: 15240029 NR Description: putative protein; protein id: At5g06390.1
  misc_feature (34)..(438): Homolog of NCBI NO: 33146739 NR Description: GPI-anchored protein -like
  misc_feature (109)..(427): Homolog of NCBI NO: 7486009 NR Description: hypothetical protein F22O6.250 - Arabidopsis
  misc_feature (10)..(430): Homolog of NCBI NO: 15240029 NR Description: putative protein; protein id: At5g06390.1
  misc_feature (10)..(439): Homolog of NCBI NO: 18399319 NR Description: expressed protein
  misc_feature (8)..(445): Homolog of NCBI NO: 15231197 NR Description: unknown protein; protein id: At3g52370.1
  misc_feature (1)..(428): Homolog of NCBI NO: 25370583 NR Description: hypothetical protein At2g35860 [imported] -
  misc_feature (1)..(445): Homolog of NCBI NO: 30686588 NR Description: expressed protein [Arabidopsis thaliana]

SEQ ID NO: 50248 - protein, 337 aa, Arabidopsis thaliana; identical to SEQ ID NO: 44792
  peptide (1)..(337): Ceres Seq. ID no. 12455341
  misc_feature (1)..(67): Pfam Name: Fasciclin domain Pfam Description: Fasciclin domain
  misc_feature (1)..(67): Pfam Name: Fasciclin domain Pfam Description: Fasciclin domain
  misc_feature (1)..(315): Homolog of NCBI NO: 27819499 NR Description: putative arabinogalactan-protein
  misc_feature (1)..(319): Homolog of NCBI NO: 7486009 NR Description: hypothetical protein F22O6.250 - Arabidopsis
  misc_feature (1)..(298): Homolog of NCBI NO: 34899886 NR Description: OJ1714_H10.26 [Oryza sativa (japonica
  misc_feature (1)..(330): Homolog of NCBI NO: 33146739 NR Description: GPI-anchored protein -like
  misc_feature (1)..(319): Homolog of NCBI NO: 6041822 NR Description: unknown protein [Arabidopsis thaliana]
  misc_feature (1)..(315): Homolog of NCBI NO: 27819499 NR Description: putative arabinogalactan-protein
  misc_feature (1)..(298): Homolog of NCBI NO: 34899886 NR Description: OJ1714_H10.26 [Oryza sativa (japonica
  misc_feature (1)..(319): Homolog of NCBI NO: 6041822 NR Description: unknown protein [Arabidopsis thaliana]
  misc_feature (1)..(337): Homolog of NCBI NO: 30686588 NR Description: expressed protein [Arabidopsis thaliana]
  misc_feature (1)..(320): Homolog of NCBI NO: 25370583 NR Description: hypothetical protein At2g35860 [imported] -
  misc_feature (1)..(337): Homolog of NCBI NO: 15231197 NR Description: unknown protein; protein id: At3g52370.1
  misc_feature (1)..(331): Homolog of NCBI NO: 18399319 NR Description: expressed protein
  misc_feature (1)..(322): Homolog of NCBI NO: 15240029 NR Description: putative protein; protein id: At5g06390.1
  misc_feature (1)..(330): Homolog of NCBI NO: 33146739 NR Description: GPI-anchored protein -like
  misc_feature (1)..(319): Homolog of NCBI NO: 7486009 NR Description: hypothetical protein F22O6.250 - Arabidopsis
  misc_feature (1)..(322): Homolog of NCBI NO: 15240029 NR Description: putative protein; protein id: At5g06390.1
  misc_feature (1)..(331): Homolog of NCBI NO: 18399319 NR Description: expressed protein
  misc_feature (1)..(337): Homolog of NCBI NO: 15231197 NR Description: unknown protein; protein id: At3g52370.1
  misc_feature (1)..(320): Homolog of NCBI NO: 25370583 NR Description: hypothetical protein At2g35860 [imported] -
  misc_feature (1)..(337): Homolog of NCBI NO: 30686588 NR Description: expressed protein [Arabidopsis thaliana]

SEQ ID NO: 50249 - DNA, 1501 bp, Arabidopsis thaliana
  misc_feature (1)..(1501): Ceres Seq. ID no. 12591410
  misc_feature: MA Experiment ID: 20000182 Result: Up-regulated in Transcription
  misc_feature: MA Experiment 20000182 PARAMETER Experiment Name: At_2mM_SA_P Parameter: Age (day) Value: 14
  misc_feature: MA Experiment 20000182 PARAMETER Experiment Name: At_2mM_SA_P Parameter: Organism Value: A. thaliana
  misc_feature: MA Experiment 20000182 PARAMETER Experiment Name: At_2mM_SA_P Parameter: Plant Line Value: WS
  misc_feature: MA Experiment 20000182 PARAMETER Experiment Name: At_2mM_SA_P Parameter: Timepoint (hr) Value: 6
  misc_feature: MA Experiment 20000182 PARAMETER Experiment Name: At_2mM_SA_P Parameter: Tissue Value: Aerial
  misc_feature: MA Experiment 20000182 PARAMETER Experiment Name: At_2mM_SA_P Parameter: Treatment Value: 2mM SA vs. No Treatment
  misc_feature: MA Experiment ID: 20000496 Result: Up-regulated in Transcription
  misc_feature: MA Experiment 20000496 PARAMETER Experiment Name: At_Guard_Cells_P Parameter: Harvest Date Value: 7/19/2002
  misc_feature: MA Experiment 20000496 PARAMETER Experiment Name: At_Guard_Cells_P Parameter: Organism Value: Canola
  misc_feature: MA Experiment 20000496 PARAMETER Experiment Name: At_Guard_Cells_P Parameter: Tissue Value: Guard Cells vs. Leaves
agatatctgaaatttccctcgatttgattagtgggatcaccaataccaagataaaatctgaagtttagttcattgactcaatagtatttgagtcttggggctcgaaatgattttgattttgatttcttaccgatcttcgagtttccaaagctaagcacttttatcaaatttagggtctttttacttttccaaattatatttttctgtttttggggacgaatttggctttctttctatataacccgcgagcgagacagagaccttgaccctcacctaaacctcaaaaaccaaattttgaccccaaaagccatctcttttagcaatcagattactttgaaactttctctgggtatctgagatttcttcattatttatataaatcatctaatcgaaatctactgcgacgatcggcgaagaatcggaaacacaaaaatggggtgttgcgcgagcaatacagctggtggttcaaaggctaatcggatctcacgctggcgatctacaggcattgttggtctccgcgactccaaattgaagacatttcctgatgaagtgattgaaatggagagagcagtgcgaacacttgatctaacacacaataagattgctgatgttcctggagaaatcagcaagttaatcaatatgcagcgtctgttaatagctgataatctagttgagcgccttccggggaatctagggaagcttcaatctctcaaagttttgatgcttgatggaaaccgcatcagctgtttgcctgatgaattgggccagttggtaaggcttgagcaactatcaatctcaagaaatatgctcatatacttgcccgatactattggtagtctccgcaatctactgctgttgaatgtctcaaataacagattgaaatcccttcctgaatcagtagggagctgtgcttctttagaagaagtacaggctaatgataacgttgttgaagagcttcctgcatcactctgcaatctgattcagttaaagtcgctttccttagacaataatcaagtgaaccagattccagatggattgctgatacattgcaagagtctgcaaaacctttctttgcataacaatcctatttccatggatcagtttcagctgatggaaggataccaagactttgaagagaggagaaagaagaaatttgataagcaaatcgattcgaatgtgatgatgggctctaaagcacttgatgtaggcgttgataaatgaaaactgtcttcacatctccttactttgtcggttcggtgaatgaggatcatcgtttcgtgtaagaaatattgttgtaaaactctctctctctctttctctcgtctgcaagatttagaatctctgttactgtcacaccaattcttatgaacacatacatatgtacgtttgtatactctatcaaggcgtgtctgtatatgtatatgtgcgtgtgtgtatacaaatcatataggcagaccgattcttggctttggcccttatattgagatgacgattctacttc

SEQ ID NO: 50250 - protein, 262 aa, Arabidopsis thaliana
  peptide (1)..(262): Ceres Seq. ID no. 12591411
  misc_feature (184)..(207): Pfam Name: Leucine Rich Repeat Pfam Description: Leucine Rich Repeat
  misc_feature (17)..(220): Homolog of NCBI NO: 24216022 NR Description: Leucine-rich repeat containing protein
  misc_feature (17)..(225): Homolog of NCBI NO: 24215664 NR Description: Leucine-rich repeat containing protein
  misc_feature (25)..(243): Homolog of NCBI NO: 24216021 NR Description: Leucine-rich repeat containing protein
  misc_feature (25)..(219): Homolog of NCBI NO: 24215152 NR Description: Leucine-rich repeat containing protein
  misc_feature (17)..(220): Homolog of NCBI NO: 24216020 NR Description: Leucine-rich repeat containing protein
  misc_feature (15)..(262): Homolog of NCBI NO: 7445541 NR Description: hypothetical protein At2g30100 [imported] -
  misc_feature (15)..(262): Homolog of NCBI NO: 30684470 NR Description: unknown protein, leucine-rich repeat -related
  misc_feature (1)..(261): Homolog of NCBI NO: 37534990 NR Description: putative leucine-rich repeat protein
  misc_feature (1)..(259): Homolog of NCBI NO: 11357392 NR Description: hypothetical protein F13G24.110 - Arabidopsis
  misc_feature (1)..(262): Homolog of NCBI NO: 22326653 NR Description: putative protein
MGCCASNTAGGSKANRISRWRSTGIVGLRDSKLKTFPDEVIEMERAVRTLDLTHNKIADVPGEISKLINMQRLLIADNLVERLPGNLGKLQSLKVLMLDGNRISCLPDELGQLVRLEQLSISRNMLIYLPDTIGSLRNLLLLNVSNNRLKSLPESVGSCASLEEVQANDNVVEELPASLCNLIQLKSLSLDNNQVNQIPDGLLIHCKSLQNLSLHNNPISMDQFQLMEGYQDFEERRKKKFDKQIDSNVMMGSKALDVGVDK

SEQ ID NO: 50251 - protein, 220 aa, Arabidopsis thaliana
  peptide (1)..(220): Ceres Seq. ID no. 12591412
  misc_feature (142)..(165): Pfam Name: Leucine Rich Repeat Pfam Description: Leucine Rich Repeat
  misc_feature (1)..(178): Homolog of NCBI NO: 24216022 NR Description: Leucine-rich repeat containing protein
  misc_feature (1)..(183): Homolog of NCBI NO: 24215664 NR Description: Leucine-rich repeat containing protein
  misc_feature (1)..(201): Homolog of NCBI NO: 24216021 NR Description: Leucine-rich repeat containing protein
  misc_feature (1)..(177): Homolog of NCBI NO: 24215152 NR Description: Leucine-rich repeat containing protein
  misc_feature (1)..(178): Homolog of NCBI NO: 24216020 NR Description: Leucine-rich repeat containing protein
  misc_feature (1)..(220): Homolog of NCBI NO: 7445541 NR Description: hypothetical protein At2g30100 [imported] -
  misc_feature (1)..(220): Homolog of NCBI NO: 30684470 NR Description: unknown protein, leucine-rich repeat -related
  misc_feature (1)..(219): Homolog of NCBI NO: 37534990 NR Description: putative leucine-rich repeat protein
  misc_feature (1)..(217): Homolog of NCBI NO: 11357392 NR Description: hypothetical protein F13G24.110 - Arabidopsis
  misc_feature (1)..(220): Homolog of NCBI NO: 22326653 NR Description: putative protein
MERAVRTLDLTHNKIADVPGEISKLINMQRLLIADNLVERLPGNLGKLQSLKVLMLDGNRISCLPDELGQLVRLEQLSISRNMLIYLPDTIGSLRNLLLLNVSNNRLKSLPESVGSCASLEEVQANDNVVEELPASLCNLIQLKSLSLDNNQVNQIPDGLLIHCKSLQNLSLHNNPISMDQFQLMEGYQDFEERRKKKFDKQIDSNVMMGSKALDVGVDK

SEQ ID NO: 50252 - protein, 193 aa, Arabidopsis thaliana
  peptide (1)..(193): Ceres Seq. ID no. 12591413
  misc_feature (115)..(138): Pfam Name: Leucine Rich Repeat Pfam Description: Leucine Rich Repeat
  misc_feature (1)..(151): Homolog of NCBI NO: 24216022 NR Description: Leucine-rich repeat containing protein
  misc_feature (1)..(156): Homolog of NCBI NO: 24215664 NR Description: Leucine-rich repeat containing protein
  misc_feature (1)..(174): Homolog of NCBI NO: 24216021 NR Description: Leucine-rich repeat containing protein
  misc_feature (1)..(150): Homolog of NCBI NO: 24215152 NR Description: Leucine-rich repeat containing protein
  misc_feature (1)..(151): Homolog of NCBI NO: 24216020 NR Description: Leucine-rich repeat containing protein
  misc_feature (1)..(193): Homolog of NCBI NO: 7445541 NR Description: hypothetical protein At2g30100 [imported] -
  misc_feature (1)..(193): Homolog of NCBI NO: 30684470 NR Description: unknown protein, leucine-rich repeat -related
  misc_feature (1)..(192): Homolog of NCBI NO: 37534990 NR Description: putative leucine-rich repeat protein
  misc_feature (1)..(190): Homolog of NCBI NO: 11357392 NR Description: hypothetical protein F13G24.110 - Arabidopsis
  misc_feature (1)..(193): Homolog of NCBI NO: 22326653 NR Description: putative protein
MQRLLIADNLVERLPGNLGKLQSLKVLMLDGNRISCLPDELGQLVRLEQLSISRNMLIYLPDTIGSLRNLLLLNVSNNRLKSLPESVGSCASLEEVQANDNVVEELPASLCNLIQLKSLSLDNNQVNQIPDGLLIHCKSLQNLSLHNNPISMDQFQLMEGYQDFEERRKKKFDKQIDSNVMMGSKALDVGVDK

SEQ ID NO: 50253 - DNA, 781 bp, Arabidopsis thaliana
  misc_feature (1)..(781): Ceres Seq. ID no. 12602329
  misc_feature: MA Experiment ID: 20000437 Result: Down-regulated in Transcription
  misc_feature: MA Experiment 20000437 PARAMETER Experiment Name: At_Drought_P Parameter: Age (day) Value: 8
  misc_feature: MA Experiment 20000437 PARAMETER Experiment Name: At_Drought_P Parameter: Organism Value: A. thaliana
  misc_feature: MA Experiment 20000437 PARAMETER Experiment Name: At_Drought_P Parameter: Plant Line Value: WS
  misc_feature: MA Experiment 20000437 PARAMETER Experiment Name: At_Drought_P Parameter: Timepoint (hr) Value: 24
  misc_feature: MA Experiment 20000437 PARAMETER Experiment Name: At_Drought_P Parameter: Tissue Value: Whole Plant
  misc_feature: MA Experiment 20000437 PARAMETER Experiment Name: At_Drought_P Parameter: Treatment Value: Drought vs. No Drought
  misc_feature: MA Experiment ID: 20000794 Result: Down-regulated in Transcription
  misc_feature: MA Experiment 20000794 PARAMETER Experiment Name: At_Petals_P Parameter: Age (day) Value: 23-25 days
  misc_feature: MA Experiment 20000794 PARAMETER Experiment Name: At_Petals_P Parameter: Plant Line Value: WS
  misc_feature: MA Experiment 20000794 PARAMETER Experiment Name: At_Petals_P Parameter: Tissue Value: Petals vs. Whole plant
  misc_feature: MA Experiment ID: 20001558 Result: Up-regulated in Transcription
  misc_feature: MA Experiment 20001558 PARAMETER Experiment Name: At_Drought_Soil_Dry_P Parameter: Age (day) Value: 27
  misc_feature: MA Experiment 20001558 PARAMETER Experiment Name: At_Drought_Soil_Dry_P Parameter: Organism Value: A. thaliana
  misc_feature: MA Experiment 20001558 PARAMETER Experiment Name: At_Drought_Soil_Dry_P Parameter: Plant Line Value: WS
  misc_feature: MA Experiment 20001558 PARAMETER Experiment Name: At_Drought_Soil_Dry_P Parameter: Post Timepoint (hr) Value: 6
  misc_feature: MA Experiment 20001558 PARAMETER Experiment Name: At_Drought_Soil_Dry_P Parameter: Post-Treatment Value: Re-Water vs. No Drought
  misc_feature: MA Experiment 20001558 PARAMETER Experiment Name: At_Drought_Soil_Dry_P Parameter: Timepoint (day) Value: 13
  misc_feature: MA Experiment 20001558 PARAMETER Experiment Name: At_Drought_Soil_Dry_P Parameter: Treatment Value: Drought vs. No Drought
  misc_feature: MA Experiment ID: 20001560 Result: Up-regulated in Transcription
  misc_feature: MA Experiment 20001560 PARAMETER Experiment Name: At_Drought_Soil_Dry_P Parameter: Age (day) Value: 28
  misc_feature: MA Experiment 20001560 PARAMETER Experiment Name: At_Drought_Soil_Dry_P Parameter: Organism Value: A. thaliana
  misc_feature: MA Experiment 20001560 PARAMETER Experiment Name: At_Drought_Soil_Dry_P Parameter: Plant Line Value: WS
  misc_feature: MA Experiment 20001560 PARAMETER Experiment Name: At_Drought_Soil_Dry_P Parameter: Post Timepoint (hr) Value: None
  misc_feature: MA Experiment 20001560 PARAMETER Experiment Name: At_Drought_Soil_Dry_P Parameter: Post-Treatment Value: None
  misc_feature: MA Experiment 20001560 PARAMETER Experiment Name: At_Drought_Soil_Dry_P Parameter: Timepoint (day) Value: 14
  misc_feature: MA Experiment 20001560 PARAMETER Experiment Name: At_Drought_Soil_Dry_P Parameter: Treatment Value: Drought vs. No Drought
  misc_feature: MA Experiment ID: 20001757 Result: Up-regulated in Transcription
  misc_feature: MA Experiment 20001757 PARAMETER Experiment Name: At_50mM_NH4NO3_L-to-H_P Parameter: Timepoint (hr) Value: 6
  misc_feature: MA Experiment 20001757 PARAMETER Experiment Name: At_50mM_NH4NO3_L-to-H_P Parameter: Tissue Value: Leaf
  misc_feature: MA Experiment 20001757 PARAMETER Experiment Name: At_50mM_NH4NO3_L-to-H_P Parameter: Treatment Value: 50mM NH4NO3 vs 100mM Mannitol
ctggagaagccttcacttttcgtccaagccgctaaaaatgaagcacaacaacgttatcccgagctcacactttcgcaagcactggcagaattatgtcaagacttggtttaaccagcctgccaggaagacaaggagacgtgttgctagacagaagaaggctgtgaagatcttccctcgtcccacctctggtcctctccgacctgttgttcatggtcagacacttaagtacaacatgaaagttagagctggaaaaggattcactcttgaagagcttaaggttgctggtatcccaaagaagttggctccaacaatcggaatttctgttgatcaccgacgcaagaaccgttctttggagggtcttcagtccaatgtccaaaggttaaagacttacaaggctaagttggtggtgttccctcgccgttcccgtcaagtcaaggctggtgattctactccagaggagcttgccaatgctactcaagttcaaggtgattacatgccaattgccagtgtcaaggcagctatggagctagttaagctgactgcagatttgaaggcgttcaaggcttacgataagattcgtttggagcgcacaaacgcacgtcatgctggtgccagagccaagagggctgccgaggctgagaaagaagagaagaagtaaaattcgttgctttatagagcttaatcattcttgaattcttgttcttctggtttttgattttgtgcacgactctgttttctttttggtgcggtttatcaatacatagatctcaaaggtttctgg

SEQ ID NO: 50254 - protein, 218 aa, Arabidopsis thaliana
  peptide (1)..(218): Ceres Seq. ID no. 12602330
  misc_feature (17)..(195): Pfam Name: Ribosomal protein L13e Pfam Description: Ribosomal protein L13e
  misc_feature (13)..(218): Homolog of NCBI NO: 12580867 NR Description: 60S ribosomal protein L13E [Picea abies]
  misc_feature (13)..(218): Homolog of NCBI NO: 18873677 NR Description: putative cold-induced protein
  misc_feature (13)..(218): Homolog of NCBI NO: 34897952 NR Description: ESTs AU077873(S1878),D40121(S1878) correspond to region of the predicted gene.~Similar to Arabidopsis thaliana 60S
  misc_feature (13)..(218): Homolog of NCBI NO: 7441102 NR Description: ribosomal protein L13.A, cytosolic - rape
  misc_feature (13)..(218): Homolog of NCBI NO: 730449 NR Description: 60S RIBOSOMAL PROTEIN L13-1 (COLD INDUCED PROTEIN
  misc_feature (13)..(218): Homolog of NCBI NO: 7441103 NR Description: ribosomal protein L13.B, cytosolic - rape
  misc_feature (13)..(218): Homolog of NCBI NO: 730450 NR Description: 60S RIBOSOMAL PROTEIN L13-2 (COLD INDUCED PROTEIN
  misc_feature (13)..(218): Homolog of NCBI NO: 21537149 NR Description: 60S ribosomal protein L13, BBC1 protein
  misc_feature (13)..(218): Homolog of NCBI NO: 15229064 NR Description: 60S ribosomal protein L13, BBC1 protein
  misc_feature (13)..(218): Homolog of NCBI NO: 15237847 NR Description: 60S ribosomal protein L13
WRSLHFSSKPLKMKHNNVIPSSHFRKHWQNYVKTWFNQPARKTRRRVARQKKAVKIFPRPTSGPLRPVVHGQTLKYNMKVRAGKGFTLEELKVAGIPKKLAPTIGISVDHRRKNRSLEGLQSNVQRLKTYKAKLVVFPRRSRQVKAGDSTPEELANATQVQGDYMPIASVKAAMELVKLTADLKAFKAYDKIRLERTNARHAGARAKRAAEAEKEEKK

SEQ ID NO: 50255 - protein, 206 aa, Arabidopsis thaliana
  peptide (1)..(206): Ceres Seq. ID no. 12602331
  misc_feature (5)..(183): Pfam Name: Ribosomal protein L13e Pfam Description: Ribosomal protein L13e
  misc_feature (1)..(206): Homolog of NCBI NO: 12580867 NR Description: 60S ribosomal protein L13E [Picea abies]
  misc_feature (1)..(206): Homolog of NCBI NO: 18873677 NR Description: putative cold-induced protein
  misc_feature (1)..(206): Homolog of NCBI NO: 34897952 NR Description: ESTs AU077873(S1878),D40121(S1878) correspond to region of the predicted gene.~Similar to Arabidopsis thaliana 60S
  misc_feature (1)..(206): Homolog of NCBI NO: 7441102 NR Description: ribosomal protein L13.A, cytosolic - rape
  misc_feature (1)..(206): Homolog of NCBI NO: 730449 NR Description: 60S RIBOSOMAL PROTEIN L13-1 (COLD INDUCED PROTEIN
  misc_feature (1)..(206): Homolog of NCBI NO: 7441103 NR Description: ribosomal protein L13.B, cytosolic - rape
  misc_feature (1)..(206): Homolog of NCBI NO: 730450 NR Description: 60S RIBOSOMAL PROTEIN L13-2 (COLD INDUCED PROTEIN
  misc_feature (1)..(206): Homolog of NCBI NO: 21537149 NR Description: 60S ribosomal protein L13, BBC1 protein
  misc_feature (1)..(206): Homolog of NCBI NO: 15229064 NR Description: 60S ribosomal protein L13, BBC1 protein
  misc_feature (1)..(206): Homolog of NCBI NO: 15237847 NR Description: 60S ribosomal protein L13
MKHNNVIPSSHFRKHWQNYVKTWFNQPARKTRRRVARQKKAVKIFPRPTSGPLRPVVHGQTLKYNMKVRAGKGFTLEELKVAGIPKKLAPTIGISVDHRRKNRSLEGLQSNVQRLKTYKAKLVVFPRRSRQVKAGDSTPEELANATQVQGDYMPIASVKAAMELVKLTADLKAFKAYDKIRLERTNARHAGARAKRAAEAEKEEKK

SEQ ID NO: 50256 - protein, 141 aa, Arabidopsis thaliana
  peptide (1)..(141): Ceres Seq. ID no. 12602332
  misc_feature (1)..(118): Pfam Name: Ribosomal protein L13e Pfam Description: Ribosomal protein L13e
  misc_feature (1)..(141): Homolog of NCBI NO: 12580867 NR Description: 60S ribosomal protein L13E [Picea abies]
  misc_feature (1)..(141): Homolog of NCBI NO: 18873677 NR Description: putative cold-induced protein
  misc_feature (1)..(141): Homolog of NCBI NO: 34897952 NR Description: ESTs AU077873(S1878),D40121(S1878) correspond to region of the predicted gene.~Similar to Arabidopsis thaliana 60S
  misc_feature (1)..(141): Homolog of NCBI NO: 7441102 NR Description: ribosomal protein L13.A, cytosolic - rape
  misc_feature (1)..(141): Homolog of NCBI NO: 730449 NR Description: 60S RIBOSOMAL PROTEIN L13-1 (COLD INDUCED PROTEIN
  misc_feature (1)..(141): Homolog of NCBI NO: 7441103 NR Description: ribosomal protein L13.B, cytosolic - rape
  misc_feature (1)..(141): Homolog of NCBI NO: 730450 NR Description: 60S RIBOSOMAL PROTEIN L13-2 (COLD INDUCED PROTEIN
  misc_feature (1)..(141): Homolog of NCBI NO: 21537149 NR Description: 60S ribosomal protein L13, BBC1 protein
  misc_feature (1)..(141): Homolog of NCBI NO: 15229064 NR Description: 60S ribosomal protein L13, BBC1 protein
  misc_feature (1)..(141): Homolog of NCBI NO: 15237847 NR Description: 60S ribosomal protein L13
MKVRAGKGFTLEELKVAGIPKKLAPTIGISVDHRRKNRSLEGLQSNVQRLKTYKAKLVVFPRRSRQVKAGDSTPEELANATQVQGDYMPIASVKAAMELVKLTADLKAFKAYDKIRLERTNARHAGARAKRAAEAEKEEKK

SEQ ID NO: 50257 - DNA, 1589 bp, Arabidopsis thaliana
  misc_feature (1)..(1589): Ceres Seq. ID no. 13588147
  misc_feature: MA Experiment ID: 20000169 Result: Up-regulated in Transcription
  misc_feature: MA Experiment 20000169 PARAMETER Experiment Name: At_100uM_ABA_P Parameter: Age (day) Value: 14
  misc_feature: MA Experiment 20000169 PARAMETER Experiment Name: At_100uM_ABA_P Parameter: Organism Value: A. thaliana
  misc_feature: MA Experiment 20000169 PARAMETER Experiment Name: At_100uM_ABA_P Parameter: Plant Line Value: WS
  misc_feature: MA Experiment 20000169 PARAMETER Experiment Name: At_100uM_ABA_P Parameter: Timepoint (hr) Value: 6
  misc_feature: MA Experiment 20000169 PARAMETER Experiment Name: At_100uM_ABA_P Parameter: Tissue Value: Aerial
  misc_feature: MA Experiment 20000169 PARAMETER Experiment Name: At_100uM_ABA_P Parameter: Treatment Value: 100uM ABA vs. No Treatment
  misc_feature: MA Experiment ID: 20000184 Result: Down-regulated in Transcription
  misc_feature: MA Experiment 20000184 PARAMETER Experiment Name: At_Shoots__P Parameter: Age (day) Value: 7
  misc_feature: MA Experiment 20000184 PARAMETER Experiment Name: At_Shoots__P Parameter: Tissue Value: Shoots vs. Whole Plant
  misc_feature: MA Experiment ID: 20000185 Result: Down-regulated in Transcription
  misc_feature: MA Experiment 20000185 PARAMETER Experiment Name: At_Roots__P Parameter: Age (day) Value: 7 vs. 21
  misc_feature: MA Experiment 20000185 PARAMETER Experiment Name: At_Roots__P Parameter: Organism Value: A. thaliana
  misc_feature: MA Experiment 20000185 PARAMETER Experiment Name: At_Roots__P Parameter: Tissue Value: Roots vs. Whole Plant
  misc_feature: MA Experiment ID: 20000234 Result: Down-regulated in Transcription
  misc_feature: MA Experiment 20000234 PARAMETER Experiment Name: At_Siliques_P Parameter: Age (day) Value: 21
  misc_feature: MA Experiment 20000234 PARAMETER Experiment Name: At_Siliques_P Parameter: Organism Value: A. thaliana
  misc_feature: MA Experiment 20000234 PARAMETER Experiment Name: At_Siliques_P Parameter: Plant Line Value: WS
  misc_feature: MA Experiment 20000234 PARAMETER Experiment Name: At_Siliques_P Parameter: Tissue Value: Less Than 5mm Siliques vs. Whole Plant
  misc_feature: MA Experiment ID: 20000264 Result: Down-regulated in Transcription
  misc_feature: MA Experiment 20000264 PARAMETER Experiment Name: At_Open_Flower_P Parameter: Age (day) Value: 21
  misc_feature: MA Experiment 20000264 PARAMETER Experiment Name: At_Open_Flower_P Parameter: Plant Line Value: WS
  misc_feature: MA Experiment 20000264 PARAMETER Experiment Name: At_Open_Flower_P Parameter: Tissue Value: Open Flower vs. Whole Plant
  misc_feature: MA Experiment ID: 20000265 Result: Down-regulated in Transcription
  misc_feature: MA Experiment 20000265 PARAMETER Experiment Name: At_Open_Flower_P Parameter: Age (day) Value: 21
  misc_feature: MA Experiment 20000265 PARAMETER Experiment Name: At_Open_Flower_P Parameter: Plant Line Value: WS
  misc_feature: MA Experiment 20000265 PARAMETER Experiment Name: At_Open_Flower_P Parameter: Tissue Value: Closed Flower vs. Whole Plant
  misc_feature: MA Experiment ID: 20000286 Result: Down-regulated in Transcription
  misc_feature: MA Experiment 20000286 PARAMETER Experiment Name: At_Open_Flower_P Parameter: Age (day) Value: 21
  misc_feature: MA Experiment 20000286 PARAMETER Experiment Name: At_Open_Flower_P Parameter: Plant Line Value: WS
  misc_feature: MA Experiment 20000286 PARAMETER Experiment Name: At_Open_Flower_P Parameter: Tissue Value: Half Open vs. Whole Plant
  misc_feature: MA Experiment ID: 20000437 Result: Up-regulated in Transcription
  misc_feature: MA Experiment 20000437 PARAMETER Experiment Name: At_Drought_P Parameter: Age (day) Value: 8
  misc_feature: MA Experiment 20000437 PARAMETER Experiment Name: At_Drought_P Parameter: Organism Value: A. thaliana
  misc_feature: MA Experiment 20000437 PARAMETER Experiment Name: At_Drought_P Parameter: Plant Line Value: WS
  misc_feature: MA Experiment 20000437 PARAMETER Experiment Name: At_Drought_P Parameter: Timepoint (hr) Value: 24
  misc_feature: MA Experiment 20000437 PARAMETER Experiment Name: At_Drought_P Parameter: Tissue Value: Whole Plant
  misc_feature: MA Experiment 20000437 PARAMETER Experiment Name: At_Drought_P Parameter: Treatment Value: Drought vs. No Drought
  misc_feature: MA Experiment ID: 20000439 Result: Down-regulated in Transcription
  misc_feature: MA Experiment 20000439 PARAMETER Experiment Name: At_Roots__P Parameter: Age (day) Value: 14 vs. 21
  misc_feature: MA Experiment 20000439 PARAMETER Experiment Name: At_Roots__P Parameter: Organism Value: A. thaliana
  misc_feature: MA Experiment 20000439 PARAMETER Experiment Name: At_Roots__P Parameter: Tissue Value: Roots vs. Whole Plant
  misc_feature: MA Experiment ID: 20000794 Result: Down-regulated in Transcription
  misc_feature: MA Experiment 20000794 PARAMETER Experiment Name: At_Petals_P Parameter: Age (day) Value: 23-25 days
  misc_feature: MA Experiment 20000794 PARAMETER Experiment Name: At_Petals_P Parameter: Plant Line Value: WS
  misc_feature: MA Experiment 20000794 PARAMETER Experiment Name: At_Petals_P Parameter: Tissue Value: Petals vs. Whole plant
  misc_feature: MA Experiment ID: 20001556 Result: Up-regulated in Transcription
  misc_feature: MA Experiment 20001556 PARAMETER Experiment Name: At_Drought_Soil_Dry_P Parameter: Age (day) Value: 26
  misc_feature: MA Experiment 20001556 PARAMETER Experiment Name: At_Drought_Soil_Dry_P Parameter: Organism Value: A. thaliana
  misc_feature: MA Experiment 20001556 PARAMETER Experiment Name: At_Drought_Soil_Dry_P Parameter: Plant Line Value: WS
  misc_feature: MA Experiment 20001556 PARAMETER Experiment Name: At_Drought_Soil_Dry_P Parameter: Post Timepoint (hr) Value: None
  misc_feature: MA Experiment 20001556 PARAMETER Experiment Name: At_Drought_Soil_Dry_P Parameter: Post-Treatment Value: None
  misc_feature: MA Experiment 20001556 PARAMETER Experiment Name: At_Drought_Soil_Dry_P Parameter: Timepoint (day) Value: 12
  misc_feature: MA Experiment 20001556 PARAMETER Experiment Name: At_Drought_Soil_Dry_P Parameter: Treatment Value: Drought vs. No Drought
  misc_feature: MA Experiment ID: 20001559 Result: Up-regulated in Transcription
  misc_feature: MA Experiment 20001559 PARAMETER Experiment Name: At_Drought_Soil_Dry_P Parameter: Age (day) Value: 28
  misc_feature: MA Experiment 20001559 PARAMETER Experiment Name: At_Drought_Soil_Dry_P Parameter: Organism Value: A. thaliana
  misc_feature: MA Experiment 20001559 PARAMETER Experiment Name: At_Drought_Soil_Dry_P Parameter: Plant Line Value: WS
  misc_feature: MA Experiment 20001559 PARAMETER Experiment Name: At_Drought_Soil_Dry_P Parameter: Post Timepoint (hr) Value: 29
  misc_feature: MA Experiment 20001559 PARAMETER Experiment Name: At_Drought_Soil_Dry_P Parameter: Post-Treatment Value: Re-Water vs. No Drought
  misc_feature: MA Experiment 20001559 PARAMETER Experiment Name: At_Drought_Soil_Dry_P Parameter: Timepoint (day) Value: 14
  misc_feature: MA Experiment 20001559 PARAMETER Experiment Name: At_Drought_Soil_Dry_P Parameter: Treatment Value: Drought vs. No Drought
  misc_feature: MA Experiment ID: 20001904 Result: Up-regulated in Transcription
  misc_feature: MA Experiment 20001904 PARAMETER Experiment Name: At_Drought_Reproduction_P Parameter: Age (day) Value: 37
  misc_feature: MA Experiment 20001904 PARAMETER Experiment Name: At_Drought_Reproduction_P Parameter: Organism Value: A. thaliana
  misc_feature: MA Experiment 20001904 PARAMETER Experiment Name: At_Drought_Reproduction_P Parameter: Plant Line Value: WS
  misc_feature: MA Experiment 20001904 PARAMETER Experiment Name: At_Drought_Reproduction_P Parameter: Timepoint (day) Value: 7
  misc_feature: MA Experiment 20001904 PARAMETER Experiment Name: At_Drought_Reproduction_P Parameter: Tissue Value: Rosettes
  misc_feature: MA Experiment 20001904 PARAMETER Experiment Name: At_Drought_Reproduction_P Parameter: Treatment Value: Drought vs. No Drought
  misc_feature: MA Experiment ID: 20001906 Result: Up-regulated in Transcription
  misc_feature: MA Experiment 20001906 PARAMETER Experiment Name: At_Drought_Reproduction_P Parameter: Age (day) Value: 35
  misc_feature: MA Experiment 20001906 PARAMETER Experiment Name: At_Drought_Reproduction_P Parameter: Organism Value: A. thaliana
  misc_feature: MA Experiment 20001906 PARAMETER Experiment Name: At_Drought_Reproduction_P Parameter: Plant Line Value: WS
  misc_feature: MA Experiment 20001906 PARAMETER Experiment Name: At_Drought_Reproduction_P Parameter: Timepoint (day) Value: 5
  misc_feature: MA Experiment 20001906 PARAMETER Experiment Name: At_Drought_Reproduction_P Parameter: Tissue Value: Siliques
  misc_feature: MA Experiment 20001906 PARAMETER Experiment Name: At_Drought_Reproduction_P Parameter: Treatment Value: Drought vs. No Drought
  misc_feature: MA Experiment ID: 20001908 Result: Up-regulated in Transcription
  misc_feature: MA Experiment 20001908 PARAMETER Experiment Name: At_Drought_Reproduction_P Parameter: Age (day) Value: 40
  misc_feature: MA Experiment 20001908 PARAMETER Experiment Name: At_Drought_Reproduction_P Parameter: Organism Value: A. thaliana
  misc_feature: MA Experiment 20001908 PARAMETER Experiment Name: At_Drought_Reproduction_P Parameter: Plant Line Value: WS
  misc_feature: MA Experiment 20001908 PARAMETER Experiment Name: At_Drought_Reproduction_P Parameter: Timepoint (day) Value: 10
  misc_feature: MA Experiment 20001908 PARAMETER Experiment Name: At_Drought_Reproduction_P Parameter: Tissue Value: Siliques
  misc_feature: MA Experiment 20001908 PARAMETER Experiment Name: At_Drought_Reproduction_P Parameter: Treatment Value: Drought vs. No Drought
  misc_feature: MA Experiment ID: 20001910 Result: Up-regulated in Transcription
  misc_feature: MA Experiment 20001910 PARAMETER Experiment Name: At_Drought_Reproduction_P Parameter: Age (day) Value: 37
  misc_feature: MA Experiment 20001910 PARAMETER Experiment Name: At_Drought_Reproduction_P Parameter: Organism Value: A. thaliana
  misc_feature: MA Experiment 20001910 PARAMETER Experiment Name: At_Drought_Reproduction_P Parameter: Plant Line Value: WS
  misc_feature: MA Experiment 20001910 PARAMETER Experiment Name: At_Drought_Reproduction_P Parameter: Timepoint (day) Value: 7
  misc_feature: MA Experiment 20001910 PARAMETER Experiment Name: At_Drought_Reproduction_P Parameter: Tissue Value: Flowers
  misc_feature: MA Experiment 20001910 PARAMETER Experiment Name: At_Drought_Reproduction_P Parameter: Treatment Value: Drought vs. No Drought
  misc_feature: MA Experiment ID: 20001911 Result: Up-regulated in Transcription
  misc_feature: MA Experiment 20001911 PARAMETER Experiment Name: At_Drought_Reproduction_P Parameter: Age (day) Value: 40
  misc_feature: MA Experiment 20001911 PARAMETER Experiment Name: At_Drought_Reproduction_P Parameter: Organism Value: A. thaliana
  misc_feature: MA Experiment 20001911 PARAMETER Experiment Name: At_Drought_Reproduction_P Parameter: Plant Line Value: WS
  misc_feature: MA Experiment 20001911 PARAMETER Experiment Name: At_Drought_Reproduction_P Parameter: Timepoint (day) Value: 10
  misc_feature: MA Experiment 20001911 PARAMETER Experiment Name: At_Drought_Reproduction_P Parameter: Tissue Value: Flowers
  misc_feature: MA Experiment 20001911 PARAMETER Experiment Name: At_Drought_Reproduction_P Parameter: Treatment Value: Drought vs. No Drought
gacgtgcttattaccactagcgagcgttatcgcttcgcagattcagtcaaaaacaagaaacaggagcttgtcttctccccgagattagaagaaggactaacatgaaatttgagcttgttttcatcccctatcccggaatcggtcatctccgatcaacggtagaaatggcaaagctactagtggaccgtgaaactcgtctctctatctccgttatcatccttcctttcatttccgaaggcgaagtcggtgcttccgattacatcgcagccctctccgcctcatccaacaaccgcctccgctacgaagttatctccgccgtagatcaaccaaccatcgagatgacgacaattgaaatccatatgaagaaccaagaaccaaaggtgagaagcaccgttgcaaaactccttgaagactattcgtctaaaccggactcgccgaagatcgctggctttgttctagacatgttttgcacttcgatggtagatgtagcgaacgagtttggtttcccgagttatatgttttacacctccagtgccgggattctctcagttacatatcatgttcaaatgttgtgcgatgagaacaagtacgatgttagtgaaaatgattatgcagactcggaagctgtgttgaactttccgagtttgagtcgtccttatccggtgaagtgtcttcctcacgctctggcagctaatatgtggctcccggtgtttgtaaaccaagcgagaaagtttagggagatgaaaggtattttggtaaatactgttgctgagcttgaaccttatgtgttaaagtttctttctagtagtgatactcctcctgtttatcctgttggaccattgttgcatcttgagaaccaacgtgatgattctaaggacgagaaacggttggagattatacggtggttggatcagcaaccaccaagttcggttgtgtttctctgctttgggagcatgggaggcttcggtgaggaacaagtaagagagatcgcaatcgcgttagagcgaagtgggcaccggtttctctggtctcttcgtcgcgcatctccgaatatattcaaagaacttccaggagagtttactaatctagaggaagttctcccggaaggattctttgatcgaacgaaagatataggtaaagtgattggatgggctccacaagtagccgttcttgcgaatccggctataggaggtttcgtaactcattgcgggtggaattctacgctagagagtctttggtttggtgttccaacagctgcatggccgttatacgcagagcagaagttcaatgctttcttaatggtggaggagcttggattggcggtggagataaggaagtattggcgaggtgaacatttggcgggattaccgacggctactgtgacagcggaggagatagagaaagcaatcatgtgtctaatggaacaagatagtgacgtgaggaaaagagtgaaggatatgagcgagaaatgccatgtggctttaatggatggtggatcgtcgcgtactgcgttgcaaaagtttattgaagaggttgcgaagaatatagtttcactagataaggaatttgagcatgtagctcttaaatga

SEQ ID NO: 50258 - protein, 495 aa, Arabidopsis thaliana
  peptide (1)..(495): Ceres Seq. ID no. 13588148
  misc_feature (23)..(482): Pfam Name: UDP-glucoronosyl and UDP-glucosyl transferase Pfam Description: UDP-glucoronosyl and UDP-glucosyl transferase
  misc_feature (1)..(482): Homolog of NCBI NO: 15233149 NR Description: UDP-glycosyltransferase family [Arabidopsis
  misc_feature (1)..(482): Homolog of NCBI NO: 15233151 NR Description: glycosyltransferase family [Arabidopsis thaliana]
  misc_feature (58)..(488): Homolog of NCBI NO: 15233155 NR Description: UDP-glycosyltransferase family [Arabidopsis
  misc_feature (1)..(482): Homolog of NCBI NO: 15233761 NR Description: UDP-glycosyltransferase family [Arabidopsis
  misc_feature (2)..(30): Homolog of NCBI NO: 7488111 NR Description: probable glucosyltransferase - Arabidopsis
  misc_feature (48)..(482): Homolog of NCBI NO: 7488111 NR Description: probable glucosyltransferase - Arabidopsis
  misc_feature (1)..(488): Homolog of NCBI NO: 11994645 NR Description: UTP-glucose glucosyltransferase [Arabidopsis
  misc_feature (2)..(482): Homolog of NCBI NO: 15233158 NR Description: glycosyltransferase family [Arabidopsis thaliana]
  misc_feature (1)..(495): Homolog of NCBI NO: 15233157 NR Description: glycosyltransferase family [Arabidopsis thaliana]
  misc_feature (1)..(495): Homolog of NCBI NO: 11994646 NR Description: UTP-glucose glucosyltransferase [Arabidopsis
MKFELVFIPYPGIGHLRSTVEMAKLLVDRETRLSISVIILPFISEGEVGASDYIAALSASSNNRLRYEVISAVDQPTIEMTTIEIHMKNQEPKVRSTVAKLLEDYSSKPDSPKIAGFVLDMFCTSMVDVANEFGFPSYMFYTSSAGILSVTYHVQMLCDENKYDVSENDYADSEAVLNFPSLSRPYPVKCLPHALAANMWLPVFVNQARKFREMKGILVNTVAELEPYVLKFLSSSDTPPVYPVGPLLHLENQRDDSKDEKRLEIIRWLDQQPPSSVVFLCFGSMGGFGEEQVREIAIALERSGHRFLWSLRRASPNIFKELPGEFTNLEEVLPEGFFDRTKDIGKVIGWAPQVAVLANPAIGGFVTHCGWNSTLESLWFGVPTAAWPLYAEQKFNAFLMVEELGLAVEIRKYWRGEHLAGLPTATVTAEEIEKAIMCLMEQDSDVRKRVKDMSEKCHVALMDGGSSRTALQKFIEEVAKNIVSLDKEFEHVALK

SEQ ID NO: 50259 - protein, 474 aa, Arabidopsis thaliana
  peptide (1)..(474): Ceres Seq. ID no. 13588149
  misc_feature (2)..(461): Pfam Name: UDP-glucoronosyl and UDP-glucosyl transferase Pfam Description: UDP-glucoronosyl and UDP-glucosyl transferase
  misc_feature (100)..(461): Homolog of NCBI NO: 30683191 NR Description: UDP-glycosyltransferase family [Arabidopsis
  misc_feature (1)..(461): Homolog of NCBI NO: 15233149 NR Description: UDP-glycosyltransferase family [Arabidopsis
  misc_feature (1)..(461): Homolog of NCBI NO: 15233151 NR Description: glycosyltransferase family [Arabidopsis thaliana]
  misc_feature (37)..(467): Homolog of NCBI NO: 15233155 NR Description: UDP-glycosyltransferase family [Arabidopsis
  misc_feature (1)..(461): Homolog of NCBI NO: 15233761 NR Description: UDP-glycosyltransferase family [Arabidopsis
  misc_feature (27)..(461): Homolog of NCBI NO: 7488111 NR Description: probable glucosyltransferase - Arabidopsis
  misc_feature (1)..(467): Homolog of NCBI NO: 11994645 NR Description: UTP-glucose glucosyltransferase [Arabidopsis
  misc_feature (1)..(461): Homolog of NCBI NO: 15233158 NR Description: glycosyltransferase family [Arabidopsis thaliana]
  misc_feature (1)..(474): Homolog of NCBI NO: 15233157 NR Description: glycosyltransferase family [Arabidopsis thaliana]
  misc_feature (1)..(474): Homolog of NCBI NO: 11994646 NR Description: UTP-glucose glucosyltransferase [Arabidopsis
MAKLLVDRETRLSISVIILPFISEGEVGASDYIAALSASSNNRLRYEVISAVDQPTIEMTTIEIHMKNQEPKVRSTVAKLLEDYSSKPDSPKIAGFVLDMFCTSMVDVANEFGFPSYMFYTSSAGILSVTYHVQMLCDENKYDVSENDYADSEAVLNFPSLSRPYPVKCLPHALAANMWLPVFVNQARKFREMKGILVNTVAELEPYVLKFLSSSDTPPVYPVGPLLHLENQRDDSKDEKRLEIIRWLDQQPPSSVVFLCFGSMGGFGEEQVREIAIALERSGHRFLWSLRRASPNIFKELPGEFTNLEEVLPEGFFDRTKDIGKVIGWAPQVAVLANPAIGGFVTHCGWNSTLESLWFGVPTAAWPLYAEQKFNAFLMVEELGLAVEIRKYWRGEHLAGLPTATVTAEEIEKAIMCLMEQDSDVRKRVKDMSEKCHVALMDGGSSRTALQKFIEEVAKNIVSLDKEFEHVALK

SEQ ID NO: 50260 - protein, 416 aa, Arabidopsis thaliana
  peptide (1)..(416): Ceres Seq. ID no. 13588150
  misc_feature (1)..(403): Pfam Name: UDP-glucoronosyl and UDP-glucosyl transferase Pfam Description: UDP-glucoronosyl and UDP-glucosyl transferase
  misc_feature (42)..(403): Homolog of NCBI NO: 30683191 NR Description: UDP-glycosyltransferase family [Arabidopsis
  misc_feature (1)..(403): Homolog of NCBI NO: 15233149 NR Description: UDP-glycosyltransferase family [Arabidopsis
  misc_feature (1)..(403): Homolog of NCBI NO: 15233151 NR Description: glycosyltransferase family [Arabidopsis thaliana]
  misc_feature (1)..(409): Homolog of NCBI NO: 15233155 NR Description: UDP-glycosyltransferase family [Arabidopsis
  misc_feature (1)..(403): Homolog of NCBI NO: 15233761 NR Description: UDP-glycosyltransferase family [Arabidopsis
  misc_feature (1)..(403): Homolog of NCBI NO: 7488111 NR Description: probable glucosyltransferase - Arabidopsis
  misc_feature (1)..(409): Homolog of NCBI NO: 11994645 NR Description: UTP-glucose glucosyltransferase [Arabidopsis
  misc_feature (1)..(403): Homolog of NCBI NO: 15233158 NR Description: glycosyltransferase family [Arabidopsis thaliana]
  misc_feature (1)..(416): Homolog of NCBI NO: 15233157 NR Description: glycosyltransferase family [Arabidopsis thaliana]
  misc_feature (1)..(416): Homolog of NCBI NO: 11994646 NR Description: UTP-glucose glucosyltransferase [Arabidopsis
MTTIEIHMKNQEPKVRSTVAKLLEDYSSKPDSPKIAGFVLDMFCTSMVDVANEFGFPSYMFYTSSAGILSVTYHVQMLCDENKYDVSENDYADSEAVLNFPSLSRPYPVKCLPHALAANMWLPVFVNQARKFREMKGILVNTVAELEPYVLKFLSSSDTPPVYPVGPLLHLENQRDDSKDEKRLEIIRWLDQQPPSSVVFLCFGSMGGFGEEQVREIAIALERSGHRFLWSLRRASPNIFKELPGEFTNLEEVLPEGFFDRTKDIGKVIGWAPQVAVLANPAIGGFVTHCGWNSTLESLWFGVPTAAWPLYAEQKFNAFLMVEELGLAVEIRKYWRGEHLAGLPTATVTAEEIEKAIMCLMEQDSDVRKRVKDMSEKCHVALMDGGSSRTALQKFIEEVAKNIVSLDKEFEHVALK

SEQ ID NO: 50261 - DNA, 1371 bp, Arabidopsis thaliana
  misc_feature (1)..(1371): Ceres Seq. ID no. 12591422
  misc_feature: MA Experiment ID: 108435 Result: Down-regulated in Transcription
  misc_feature: MA Experiment 108435 PARAMETER Experiment Name: At_stm_Mutants_cDNA_P Parameter: Plant Line Value: wt Landsburg vs stm
  misc_feature: MA Experiment 108435 PARAMETER Experiment Name: At_stm_Mutants_cDNA_P Parameter: Tissue Value: Shoot Apical Meristem Region
  misc_feature: MA Experiment ID: 108461 Result: Up-regulated in Transcription
  misc_feature: MA Experiment 108461 PARAMETER Experiment Name: At_Germinating_Seeds_cDNA_P Parameter: Age (day) Value: 1 vs. 0
  misc_feature: MA Experiment 108461 PARAMETER Experiment Name: At_Germinating_Seeds_cDNA_P Parameter: Tissue Value: Germinating Seeds
  misc_feature: MA Experiment ID: 108462 Result: Up-regulated in Transcription
  misc_feature: MA Experiment 108462 PARAMETER Experiment Name: At_Germinating_Seeds_cDNA_P Parameter: Age (day) Value: 2 vs. 0
  misc_feature: MA Experiment 108462 PARAMETER Experiment Name: At_Germinating_Seeds_cDNA_P Parameter: Tissue Value: Germinating Seeds
  misc_feature: MA Experiment ID: 108488 Result: Up-regulated in Transcription
  misc_feature: MA Experiment ID: 108595 Result: Down-regulated in Transcription
  misc_feature: MA Experiment 108595 PARAMETER Experiment Name: At_Ler-pi_Ovule_cDNA_P Parameter: Plant Line Value: null
  misc_feature: MA Experiment ID: 20000069 Result: Down-regulated in Transcription
  misc_feature: MA Experiment 20000069 PARAMETER Experiment Name: At_100uM_ABA_Mutants_cDNA_P Parameter: Plant Line Value: CS23
  misc_feature: MA Experiment 20000069 PARAMETER Experiment Name: At_100uM_ABA_Mutants_cDNA_P Parameter: Timepoint (hr) Value: 6
  misc_feature: MA Experiment 20000069 PARAMETER Experiment Name: At_100uM_ABA_Mutants_cDNA_P Parameter: Tissue Value: Aerial
  misc_feature: MA Experiment 20000069 PARAMETER Experiment Name: At_100uM_ABA_Mutants_cDNA_P Parameter: Treatment Value: 100uM ABA vs. No Treatment
  misc_feature: MA Experiment ID: 20000086 Result: Down-regulated in Transcription
  misc_feature: MA Experiment 20000086 PARAMETER Experiment Name: At_100uM_ABA_Mutants_cDNA_P Parameter: Plant Line Value: CS22
  misc_feature: MA Experiment 20000086 PARAMETER Experiment Name: At_100uM_ABA_Mutants_cDNA_P Parameter: Timepoint (hr) Value: 6
  misc_feature: MA Experiment 20000086 PARAMETER Experiment Name: At_100uM_ABA_Mutants_cDNA_P Parameter: Tissue Value: Aerial
  misc_feature: MA Experiment 20000086 PARAMETER Experiment Name: At_100uM_ABA_Mutants_cDNA_P Parameter: Treatment Value: 100uM ABA vs. No Treatment
  misc_feature: MA Experiment ID: 20000087 Result: Down-regulated in Transcription
  misc_feature: MA Experiment 20000087 PARAMETER Experiment Name: At_100uM_ABA_Mutants_cDNA_P Parameter: Plant Line Value: WS
  misc_feature: MA Experiment 20000087 PARAMETER Experiment Name: At_100uM_ABA_Mutants_cDNA_P Parameter: Timepoint (hr) Value: 6
  misc_feature: MA Experiment 20000087 PARAMETER Experiment Name: At_100uM_ABA_Mutants_cDNA_P Parameter: Tissue Value: Aerial
  misc_feature: MA Experiment 20000087 PARAMETER Experiment Name: At_100uM_ABA_Mutants_cDNA_P Parameter: Treatment Value: 100uM ABA vs. No Treatment
aaccagagccatcatcatccttccaatggctattacttgagaactcttctgattaaacatagcaacaacaacaactcttcttctcctctctttctcacttcaatttagcgatggctgcaactgcaatctcttctctttccttcccagctttgggtcaatcggacaagatctccaatttcgcatcttctcgtcctctcgcctccgcaattcgcatctgcacaaagttttctcgcctttctttgaattcgcgttccacttcgaaatctcttattcactgcatgtccaatgttaccgccgatgtgcctcctgtatcagagacaaagtcgaaattcctaaaagcttacaagcgacccatcccgagtatctacaacacggttttgcaggagctcattgtccagcagcatttgatgaggtataagaagacttatcgttatgatcctgtttttgcccttggatttgtcactgtatatgatcagctcatggaaggatatccgagtgatcaagaccgagatgccatttttaaggcttacattgaagccttgaatgaggatcctaagcaataccgaattgatgctcagaagatggaggaatgggcacgaagtcagacttctgcttcactagttgacttttcctctaaagaaggagatattgaagcagttcttaaggacattgcaggaagagctggtagtaaggaggggtttagttacagcaggttcttcgctgttgggctctttcgtttgcttgagcttgcaagtgctactgatccaactgtcttggacaagctttgtgcatccctaaatatcaacaagaaaagcgtggatcgggacctggatgtgtatcgtaacctgctttcaaagcttgtccaagccaaggaattgcttaaggagtatgtcgagagggagaagaagaagcaaggagaaagagcccaatctcagaaggctaacgaaacaatctccaagtgtctgggagatactctatataacccatctttcttggttgaacggaaatcttagaaaatcatttgtgacttctttttttgttttcttagcaacaactatgcccaagaacatatatatctcatttctaagaacatttcagacgtgtatatgtttgctttttttcctttcaattacatgagtttacataaccnccgnaaactaaattacagataattagttacagcaggttcttcgctgttgggctctttcgtttgcttgagcttgcaagtgctactgatccaactgtcttggacaagctttgtgcatccctaaatatcaacaagaaaagcgtggatcgggacctggatgtgtatcgtaacctgctttcaaagcttgtccaagccaaggaattgcttaaggagtatgtcgagag

SEQ ID NO: 50262 - protein, 300 aa, Arabidopsis thaliana
  peptide (1)..(300): Ceres Seq. ID no. 12591423
  misc_feature (67)..(274): Homolog of NCBI NO: 16330615 NR Description: hypothetical protein [Synechocystis sp. PCC 6803]
  misc_feature (67)..(275): Homolog of NCBI NO: 37520969 NR Description: hypothetical protein glr1400 [Gloeobacter
  misc_feature (67)..(282): Homolog of NCBI NO: 22298677 NR Description: ORF_ID:tlr1134~hypothetical protein
  misc_feature (63)..(277): Homolog of NCBI NO: 23124166 NR Description: hypothetical protein [Nostoc punctiforme]
  misc_feature (67)..(273): Homolog of NCBI NO: 17228142 NR Description: hypothetical protein [Nostoc sp. PCC 7120]
  misc_feature (67)..(282): Homolog of NCBI NO: 23041708 NR Description: hypothetical protein [Trichodesmium erythraeum
  misc_feature (5)..(283): Homolog of NCBI NO: 29367385 NR Description: inositol phosphatase-like protein
  misc_feature (5)..(290): Homolog of NCBI NO: 33469614 NR Description: light-regulated chloroplast-localized protein
  misc_feature (1)..(300): Homolog of NCBI NO: 21592994 NR Description: unknown [Arabidopsis thaliana]
  misc_feature (1)..(300): Homolog of NCBI NO: 18399513 NR Description: expressed protein
MAATAISSLSFPALGQSDKISNFASSRPLASAIRICTKFSRLSLNSRSTSKSLIHCMSNVTADVPPVSETKSKFLKAYKRPIPSIYNTVLQELIVQQHLMRYKKTYRYDPVFALGFVTVYDQLMEGYPSDQDRDAIFKAYIEALNEDPKQYRIDAQKMEEWARSQTSASLVDFSSKEGDIEAVLKDIAGRAGSKEGFSYSRFFAVGLFRLLELASATDPTVLDKLCASLNINKKSVDRDLDVYRNLLSKLVQAKELLKEYVEREKKKQGERAQSQKANETISKCLGDTLYNPSFLVERKS

SEQ ID NO: 50263 - protein, 244 aa, Arabidopsis thaliana
  peptide (1)..(244): Ceres Seq. ID no. 12591424
  misc_feature (11)..(218): Homolog of NCBI NO: 16330615 NR Description: hypothetical protein [Synechocystis sp. PCC 6803]
  misc_feature (11)..(219): Homolog of NCBI NO: 37520969 NR Description: hypothetical protein glr1400 [Gloeobacter
  misc_feature (11)..(226): Homolog of NCBI NO: 22298677 NR Description: ORF_ID:tlr1134~hypothetical protein
  misc_feature (7)..(221): Homolog of NCBI NO: 23124166 NR Description: hypothetical protein [Nostoc punctiforme]
  misc_feature (11)..(217): Homolog of NCBI NO: 17228142 NR Description: hypothetical protein [Nostoc sp. PCC 7120]
  misc_feature (11)..(226): Homolog of NCBI NO: 23041708 NR Description: hypothetical protein [Trichodesmium erythraeum
  misc_feature (1)..(227): Homolog of NCBI NO: 29367385 NR Description: inositol phosphatase-like protein
  misc_feature (1)..(234): Homolog of NCBI NO: 33469614 NR Description: light-regulated chloroplast-localized protein
  misc_feature (1)..(244): Homolog of NCBI NO: 21592994 NR Description: unknown [Arabidopsis thaliana]
  misc_feature (1)..(244): Homolog of NCBI NO: 18399513 NR Description: expressed protein
MSNVTADVPPVSETKSKFLKAYKRPIPSIYNTVLQELIVQQHLMRYKKTYRYDPVFALGFVTVYDQLMEGYPSDQDRDAIFKAYIEALNEDPKQYRIDAQKMEEWARSQTSASLVDFSSKEGDIEAVLKDIAGRAGSKEGFSYSRFFAVGLFRLLELASATDPTVLDKLCASLNINKKSVDRDLDVYRNLLSKLVQAKELLKEYVEREKKKQGERAQSQKANETISKCLGDTLYNPSFLVERKS

SEQ ID NO: 50264 - protein, 201 aa, Arabidopsis thaliana
  peptide (1)..(201): Ceres Seq. ID no. 12591425
  misc_feature (1)..(175): Homolog of NCBI NO: 16330615 NR Description: hypothetical protein [Synechocystis sp. PCC 6803]
  misc_feature (1)..(176): Homolog of NCBI NO: 37520969 NR Description: hypothetical protein glr1400 [Gloeobacter
  misc_feature (1)..(183): Homolog of NCBI NO: 22298677 NR Description: ORF_ID:tlr1134~hypothetical protein
  misc_feature (1)..(178): Homolog of NCBI NO: 23124166 NR Description: hypothetical protein [Nostoc punctiforme]
  misc_feature (1)..(174): Homolog of NCBI NO: 17228142 NR Description: hypothetical protein [Nostoc sp. PCC 7120]
  misc_feature (1)..(183): Homolog of NCBI NO: 23041708 NR Description: hypothetical protein [Trichodesmium erythraeum
  misc_feature (1)..(184): Homolog of NCBI NO: 29367385 NR Description: inositol phosphatase-like protein
  misc_feature (1)..(191): Homolog of NCBI NO: 33469614 NR Description: light-regulated chloroplast-localized protein
  misc_feature (1)..(201): Homolog of NCBI NO: 21592994 NR Description: unknown [Arabidopsis thaliana]
  misc_feature (1)..(201): Homolog of NCBI NO: 18399513 NR Description: expressed protein
MRYKKTYRYDPVFALGFVTVYDQLMEGYPSDQDRDAIFKAYIEALNEDPKQYRIDAQKMEEWARSQTSASLVDFSSKEGDIEAVLKDIAGRAGSKEGFSYSRFFAVGLFRLLELASATDPTVLDKLCASLNINKKSVDRDLDVYRNLLSKLVQAKELLKEYVEREKKKQGERAQSQKANETISKCLGDTLYNPSFLVERKS

SEQ ID NO: 50265 - DNA, 1182 bp, Arabidopsis thaliana
  misc_feature (1)..(1182): Ceres Seq. ID no. 13588151
  misc_feature: MA Experiment ID: 20000227 Result: Down-regulated in Transcription
  misc_feature: MA Experiment 20000227 PARAMETER Experiment Name: At_Root-Tips-vs-Tops_P Parameter: Tissue Value: Root Tips vs. Root Tops
  misc_feature: MA Experiment ID: 20000439 Result: Up-regulated in Transcription
  misc_feature: MA Experiment 20000439 PARAMETER Experiment Name: At_Roots__P Parameter: Age (day) Value: 14 vs. 21
  misc_feature: MA Experiment 20000439 PARAMETER Experiment Name: At_Roots__P Parameter: Organism Value: A. thaliana
  misc_feature: MA Experiment 20000439 PARAMETER Experiment Name: At_Roots__P Parameter: Tissue Value: Roots vs. Whole Plant
  misc_feature: MA Experiment ID: 20001904 Result: Up-regulated in Transcription
  misc_feature: MA Experiment 20001904 PARAMETER Experiment Name: At_Drought_Reproduction_P Parameter: Age (day) Value: 37
  misc_feature: MA Experiment 20001904 PARAMETER Experiment Name: At_Drought_Reproduction_P Parameter: Organism Value: A. thaliana
  misc_feature: MA Experiment 20001904 PARAMETER Experiment Name: At_Drought_Reproduction_P Parameter: Plant Line Value: WS
  misc_feature: MA Experiment 20001904 PARAMETER Experiment Name: At_Drought_Reproduction_P Parameter: Timepoint (day) Value: 7
  misc_feature: MA Experiment 20001904 PARAMETER Experiment Name: At_Drought_Reproduction_P Parameter: Tissue Value: Rosettes
  misc_feature: MA Experiment 20001904 PARAMETER Experiment Name: At_Drought_Reproduction_P Parameter: Treatment Value: Drought vs. No Drought
acaaaacctcttagagagcattcactttcaagaagaaaaaaacaagcagacaagaaaatgggatgtttcggaccatcaaaggcttcaagaacaagaaacaatgaacatgacaagatgacacgacaaaacccctctcatcaacctcaaaccatgagagctgaagaagttctgttgcagattcctagatgtagagtccatctcataggcgaatccgaggcggtggagcttgcctctggtgatttcaagctcgttaaggtctcagacaacggtgtaactctagctatgatcgtgagaatcggacatgaccttcagtggccagtgattagagatgagccagtggtaaaacttgacgcccgtgattacctcttcactctcccggttaaagacggtgatccacttagctacggggtcactttctctggcgatgacagagacgtagccctcgtgaacagtctgaagttgcttgaccaattcttgagtgagaattcttgtttctcgtctacggcttcgagtaaggttaacaatggaatcgactggcaagagtttgcgccgaggattgaagattacaacaacgttgttgctaaggctattgctggaggaacaggacatatcattagaggaatctttagtctcagtaatgcttactctaaccaggttcacaagggaggcgacataatgattacaaaggctgaggagagccagagaaatggaagttacaacaatggaaactccagtggtaatgagaagaaaaatgggatcaacacacaccttcaacgagtgaggaagctgtcaaaggcgactgagaatctgagcaagacgatgttgaatggtgcgggagttgtgagcggctctgtgatggtccctatgatgaagtcgaaaccagggatggccttcttttcgatggttccaggggaggtcctcttagcttcacttgatgcccttaataaaatactagatgcaactgaagctgcagagagacaaactctatctgcaacatccagggctgctaccagaatggtcagtgagaggtttggagataacgcaggggaggccaccggagatgttctagcaacagcgggccacgcagctggaactgcctggaatgttctcaagatccgtaagactttctatccttcatcttctcttacatcaggaatcgtcaaaaatgctccaagaaagtga

SEQ ID NO: 50266 - protein, 393 aa, Arabidopsis thaliana
  peptide (1)..(393): Ceres Seq. ID no. 13588152
  misc_feature (179)..(388): Homolog of NCBI NO: 7486396 NR Description: hypothetical protein F4B14.250 - Arabidopsis
  misc_feature (33)..(178): Homolog of NCBI NO: 18419759 NR Description: hypothetical protein [Arabidopsis thaliana]
  misc_feature (179)..(393): Homolog of NCBI NO: 18419759 NR Description: hypothetical protein [Arabidopsis thaliana]
  misc_feature (45)..(170): Homolog of NCBI NO: 34910728 NR Description: P0690B02.29 [Oryza sativa (japonica
  misc_feature (179)..(392): Homolog of NCBI NO: 34910728 NR Description: P0690B02.29 [Oryza sativa (japonica
  misc_feature (23)..(335): Homolog of NCBI NO: 30683270 NR Description: expressed protein [Arabidopsis thaliana]
  misc_feature (26)..(393): Homolog of NCBI NO: 7488048 NR Description: probable allene oxide synthase - Arabidopsis
  misc_feature (23)..(393): Homolog of NCBI NO: 25407536 NR Description: hypothetical protein AT4g15450 [imported] -
  misc_feature (23)..(393): Homolog of NCBI NO: 26450712 NR Description: unknown protein [Arabidopsis thaliana]
  misc_feature (20)..(393): Homolog of NCBI NO: 15233098 NR Description: expressed protein [Arabidopsis thaliana]
TKPLREHSLSRRKKQADKKMGCFGPSKASRTRNNEHDKMTRQNPSHQPQTMRAEEVLLQIPRCRVHLIGESEAVELASGDFKLVKVSDNGVTLAMIVRIGHDLQWPVIRDEPVVKLDARDYLFTLPVKDGDPLSYGVTFSGDDRDVALVNSLKLLDQFLSENSCFSSTASSKVNNGIDWQEFAPRIEDYNNVVAKAIAGGTGHIIRGIFSLSNAYSNQVHKGGDIMITKAEESQRNGSYNNGNSSGNEKKNGINTHLQRVRKLSKATENLSKTMLNGAGVVSGSVMVPMMKSKPGMAFFSMVPGEVLLASLDALNKILDATEAAERQTLSATSRAATRMVSERFGDNAGEATGDVLATAGHAAGTAWNVLKIRKTFYPSSSLTSGIVKNAPRK

SEQ ID NO: 50267 - protein, 374 aa, Arabidopsis thaliana
  peptide (1)..(374): Ceres Seq. ID no. 13588153
  misc_feature (160)..(369): Homolog of NCBI NO: 7486396 NR Description: hypothetical protein F4B14.250 - Arabidopsis
  misc_feature (14)..(159): Homolog of NCBI NO: 18419759 NR Description: hypothetical protein [Arabidopsis thaliana]
  misc_feature (160)..(374): Homolog of NCBI NO: 18419759 NR Description: hypothetical protein [Arabidopsis thaliana]
  misc_feature (26)..(151): Homolog of NCBI NO: 34910728 NR Description: P0690B02.29 [Oryza sativa (japonica
  misc_feature (160)..(373): Homolog of NCBI NO: 34910728 NR Description: P0690B02.29 [Oryza sativa (japonica
  misc_feature (4)..(316): Homolog of NCBI NO: 30683270 NR Description: expressed protein [Arabidopsis thaliana]
  misc_feature (7)..(374): Homolog of NCBI NO: 7488048 NR Description: probable allene oxide synthase - Arabidopsis
  misc_feature (4)..(374): Homolog of NCBI NO: 25407536 NR Description: hypothetical protein AT4g15450 [imported] -
  misc_feature (4)..(374): Homolog of NCBI NO: 26450712 NR Description: unknown protein [Arabidopsis thaliana]
  misc_feature (1)..(374): Homolog of NCBI NO: 15233098 NR Description: expressed protein [Arabidopsis thaliana]
MGCFGPSKASRTRNNEHDKMTRQNPSHQPQTMRAEEVLLQIPRCRVHLIGESEAVELASGDFKLVKVSDNGVTLAMIVRIGHDLQWPVIRDEPVVKLDARDYLFTLPVKDGDPLSYGVTFSGDDRDVALVNSLKLLDQFLSENSCFSSTASSKVNNGIDWQEFAPRIEDYNNVVAKAIAGGTGHIIRGIFSLSNAYSNQVHKGGDIMITKAEESQRNGSYNNGNSSGNEKKNGINTHLQRVRKLSKATENLSKTMLNGAGVVSGSVMVPMMKSKPGMAFFSMVPGEVLLASLDALNKILDATEAAERQTLSATSRAATRMVSERFGDNAGEATGDVLATAGHAAGTAWNVLKIRKTFYPSSSLTSGIVKNAPRK

SEQ ID NO: 50268 - protein, 355 aa, Arabidopsis thaliana
  peptide (1)..(355): Ceres Seq. ID no. 13588154
  misc_feature (141)..(350): Homolog of NCBI NO: 7486396 NR Description: hypothetical protein F4B14.250 - Arabidopsis
  misc_feature (1)..(140): Homolog of NCBI NO: 18419759 NR Description: hypothetical protein [Arabidopsis thaliana]
  misc_feature (141)..(355): Homolog of NCBI NO: 18419759 NR Description: hypothetical protein [Arabidopsis thaliana]
  misc_feature (7)..(132): Homolog of NCBI NO: 34910728 NR Description: P0690B02.29 [Oryza sativa (japonica
  misc_feature (141)..(354): Homolog of NCBI NO: 34910728 NR Description: P0690B02.29 [Oryza sativa (japonica
  misc_feature (1)..(297): Homolog of NCBI NO: 30683270 NR Description: expressed protein [Arabidopsis thaliana]
  misc_feature (1)..(355): Homolog of NCBI NO: 7488048 NR Description: probable allene oxide synthase - Arabidopsis
  misc_feature (1)..(355): Homolog of NCBI NO: 25407536 NR Description: hypothetical protein AT4g15450 [imported] -
  misc_feature (1)..(355): Homolog of NCBI NO: 26450712 NR Description: unknown protein [Arabidopsis thaliana]
  misc_feature (1)..(355): Homolog of NCBI NO: 15233098 NR Description: expressed protein [Arabidopsis thaliana]
MTRQNPSHQPQTMRAEEVLLQIPRCRVHLIGESEAVELASGDFKLVKVSDNGVTLAMIVRIGHDLQWPVIRDEPVVKLDARDYLFTLPVKDGDPLSYGVTFSGDDRDVALVNSLKLLDQFLSENSCFSSTASSKVNNGIDWQEFAPRIEDYNNVVAKAIAGGTGHIIRGIFSLSNAYSNQVHKGGDIMITKAEESQRNGSYNNGNSSGNEKKNGINTHLQRVRKLSKATENLSKTMLNGAGVVSGSVMVPMMKSKPGMAFFSMVPGEVLLASLDALNKILDATEAAERQTLSATSRAATRMVSERFGDNAGEATGDVLATAGHAAGTAWNVLKIRKTFYPSSSLTSGIVKNAPRK

SEQ ID NO: 50269 - DNA, 1217 bp, Arabidopsis thaliana
  misc_feature (1)..(1217): Ceres Seq. ID no. 13593610
  misc_feature: MA Experiment ID: 20000184 Result: Down-regulated in Transcription
  misc_feature: MA Experiment 20000184 PARAMETER Experiment Name: At_Shoots__P Parameter: Age (day) Value: 7
  misc_feature: MA Experiment 20000184 PARAMETER Experiment Name: At_Shoots__P Parameter: Tissue Value: Shoots vs. Whole Plant
  misc_feature: MA Experiment ID: 20000185 Result: Down-regulated in Transcription
  misc_feature: MA Experiment 20000185 PARAMETER Experiment Name: At_Roots__P Parameter: Age (day) Value: 7 vs. 21
  misc_feature: MA Experiment 20000185 PARAMETER Experiment Name: At_Roots__P Parameter: Organism Value: A. thaliana
  misc_feature: MA Experiment 20000185 PARAMETER Experiment Name: At_Roots__P Parameter: Tissue Value: Roots vs. Whole Plant
  misc_feature: MA Experiment ID: 20000439 Result: Down-regulated in Transcription
  misc_feature: MA Experiment 20000439 PARAMETER Experiment Name: At_Roots__P Parameter: Age (day) Value: 14 vs. 21
  misc_feature: MA Experiment 20000439 PARAMETER Experiment Name: At_Roots__P Parameter: Organism Value: A. thaliana
  misc_feature: MA Experiment 20000439 PARAMETER Experiment Name: At_Roots__P Parameter: Tissue Value: Roots vs. Whole Plant
  misc_feature: MA Experiment ID: 20001450 Result: Down-regulated in Transcription
  misc_feature: MA Experiment 20001450 PARAMETER Experiment Name: At_Far-red-induction_P Parameter: Age (day) Value: 7
  misc_feature: MA Experiment 20001450 PARAMETER Experiment Name: At_Far-red-induction_P Parameter: Light Value: Far-red vs. White
  misc_feature: MA Experiment 20001450 PARAMETER Experiment Name: At_Far-red-induction_P Parameter: Organism Value: A. thaliana
  misc_feature: MA Experiment 20001450 PARAMETER Experiment Name: At_Far-red-induction_P Parameter: Plant Line Value: Columbia
  misc_feature: MA Experiment 20001450 PARAMETER Experiment Name: At_Far-red-induction_P Parameter: Timepoint (hr) Value: 8
  misc_feature: MA Experiment 20001450 PARAMETER Experiment Name: At_Far-red-induction_P Parameter: Tissue Value: Whole Plant
  misc_feature: MA Experiment ID: 20001451 Result: Down-regulated in Transcription
  misc_feature: MA Experiment 20001451 PARAMETER Experiment Name: At_Far-red-induction_P Parameter: Age (day) Value: 7
  misc_feature: MA Experiment 20001451 PARAMETER Experiment Name: At_Far-red-induction_P Parameter: Light Value: Far-red vs. White
  misc_feature: MA Experiment 20001451 PARAMETER Experiment Name: At_Far-red-induction_P Parameter: Organism Value: A. thaliana
  misc_feature: MA Experiment 20001451 PARAMETER Experiment Name: At_Far-red-induction_P Parameter: Plant Line Value: Columbia
  misc_feature: MA Experiment 20001451 PARAMETER Experiment Name: At_Far-red-induction_P Parameter: Timepoint (hr) Value: 24
  misc_feature: MA Experiment 20001451 PARAMETER Experiment Name: At_Far-red-induction_P Parameter: Tissue Value: Whole Plant
  misc_feature: MA Experiment ID: 20001556 Result: Up-regulated in Transcription
  misc_feature: MA Experiment 20001556 PARAMETER Experiment Name: At_Drought_Soil_Dry_P Parameter: Age (day) Value: 26
  misc_feature: MA Experiment 20001556 PARAMETER Experiment Name: At_Drought_Soil_Dry_P Parameter: Organism Value: A. thaliana
  misc_feature: MA Experiment 20001556 PARAMETER Experiment Name: At_Drought_Soil_Dry_P Parameter: Plant Line Value: WS
  misc_feature: MA Experiment 20001556 PARAMETER Experiment Name: At_Drought_Soil_Dry_P Parameter: Post Timepoint (hr) Value: None
  misc_feature: MA Experiment 20001556 PARAMETER Experiment Name: At_Drought_Soil_Dry_P Parameter: Post-Treatment Value: None
  misc_feature: MA Experiment 20001556 PARAMETER Experiment Name: At_Drought_Soil_Dry_P Parameter: Timepoint (day) Value: 12
  misc_feature: MA Experiment 20001556 PARAMETER Experiment Name: At_Drought_Soil_Dry_P Parameter: Treatment Value: Drought vs. No Drought
gcaaaagccagaacagcttttaaattgcaatggtctcttcggttttatccatccctccacaaacttgtctacttccacgattacccatctctgattctgtcaattgcaaatcgaaaatcgtgtactgtctctccacaagtgtccgaggaagctccgtcaagagacaatccacggccagaactcgcagtttcactgagacaaatcgtcgaacaccttccgtgcaatccaaacatgaattctgggaagatccagatgatggtagcgacagtgaaaacgaatatgaaggagaagaagaagatggtattgggaatgatttagataacgagagtgattgggaagatgactcgagagtacaaaagcttactactacagacaactacgaggaagagcttgcaaaagaggttgaacaacttcttgaacctgaagaaagagtaattcttcagcaaaatgagaaaccaaatctcaagatgatctcaacaaagagttggaagccacttcagacacttgctctgtcaatgcagattcagttaatggataatcttattgaaaacggactagacattgatgatgttgacaaggacaaccaaaccgctcttcacaaagcaatcattggtaaaaaagaagcggtgattagtcatcttttgaggaaaggagctaatccgcatcttcaagatcgggacggtgcagctccgattcattatgcagttcaagttggagccttgcagactgtaaaactactattcaagtacaatgtagacgtcaatgttgcagataatgaaggatggactccgttacatatagctgtacaaagccgaaatcgagacattacaaagatattgttgaccaatggtgctgataaaacaagacgaacaaaggatgggaaattagctttggacttggctctgtgctttggaagagatttcaagtcatatgatctggtcaagctattgaagattatgcccaccggggatatatagaaagagctggtgagattttgaatgatcaggttgagattactaaactgcatttgccattgcttggtttgattgtaatctacaccggtataagtggttaaggtagaagaaacccgattgagtttgtaattactgcttttatatattcgtggatgaacttgttattcgggtgtgtgtatcataatgtgcataacaaagatacacattgttatgtcatatatattaaattacaagcattgcaag

SEQ ID NO: 50270 - protein, 315 aa, Arabidopsis thaliana
  peptide (1)..(315): Ceres Seq. ID no. 15221226
  misc_feature (250)..(282): Pfam Name: Ankyrin repeat Pfam Description: Ankyrin repeat
  misc_feature (153)..(297): Homolog of NCBI NO: 18777724 NR Description: cyclin dependent kinase inhibitor 2C
  misc_feature (155)..(308): Homolog of NCBI NO: 28274854 NR Description: ankyrin repeat protein E4_8 [synthetic construct]
  misc_feature (171)..(308): Homolog of NCBI NO: 28274850 NR Description: ankyrin repeat protein E3_19 [synthetic construct]
  misc_feature (155)..(308): Homolog of NCBI NO: 28274852 NR Description: ankyrin repeat protein E4_2 [synthetic construct]
  misc_feature (171)..(308): Homolog of NCBI NO: 28373666 NR Description: Chain A, Sank E3_5: An Artificial Ankyrin Repeat
  misc_feature (108)..(291): Homolog of NCBI NO: 322461 NR Description: ankyrin-repeat protein - Arabidopsis thaliana
  misc_feature (123)..(308): Homolog of NCBI NO: 22758264 NR Description: Putative ankyrin-repeat protein
  misc_feature (108)..(315): Homolog of NCBI NO: 30698188 NR Description: expressed protein [Arabidopsis thaliana]
  misc_feature (108)..(315): Homolog of NCBI NO: 26450056 NR Description: unknown protein [Arabidopsis thaliana]
  misc_feature (1)..(315): Homolog of NCBI NO: 15242597 NR Description: ankyrin repeat protein EMB506 [Arabidopsis
MVSSVLSIPPQTCLLPRLPISDSVNCKSKIVYCLSTSVRGSSVKRQSTARTRSFTETNRRTPSVQSKHEFWEDPDDGSDSENEYEGEEEDGIGNDLDNESDWEDDSRVQKLTTTDNYEEELAKEVEQLLEPEERVILQQNEKPNLKMISTKSWKPLQTLALSMQIQLMDNLIENGLDIDDVDKDNQTALHKAIIGKKEAVISHLLRKGANPHLQDRDGAAPIHYAVQVGALQTVKLLFKYNVDVNVADNEGWTPLHIAVQSRNRDITKILLTNGADKTRRTKDGKLALDLALCFGRDFKSYDLVKLLKIMPTGDI

SEQ ID NO: 50271 - protein, 169 aa, Arabidopsis thaliana
  peptide (1)..(169): Ceres Seq. ID no. 15221227
  misc_feature (104)..(136): Pfam Name: Ankyrin repeat Pfam Description: Ankyrin repeat
  misc_feature (7)..(151): Homolog of NCBI NO: 18777724 NR Description: cyclin dependent kinase inhibitor 2C
  misc_feature (9)..(162): Homolog of NCBI NO: 28274854 NR Description: ankyrin repeat protein E4_8 [synthetic construct]
  misc_feature (25)..(162): Homolog of NCBI NO: 28274850 NR Description: ankyrin repeat protein E3_19 [synthetic construct]
  misc_feature (9)..(162): Homolog of NCBI NO: 28274852 NR Description: ankyrin repeat protein E4_2 [synthetic construct]
  misc_feature (25)..(162): Homolog of NCBI NO: 28373666 NR Description: Chain A, Sank E3_5: An Artificial Ankyrin Repeat
  misc_feature (1)..(145): Homolog of NCBI NO: 322461 NR Description: ankyrin-repeat protein - Arabidopsis thaliana
  misc_feature (1)..(162): Homolog of NCBI NO: 22758264 NR Description: Putative ankyrin-repeat protein
  misc_feature (1)..(169): Homolog of NCBI NO: 30698188 NR Description: expressed protein [Arabidopsis thaliana]
  misc_feature (1)..(169): Homolog of NCBI NO: 26450056 NR Description: unknown protein [Arabidopsis thaliana]
  misc_feature (1)..(169): Homolog of NCBI NO: 15242597 NR Description: ankyrin repeat protein EMB506 [Arabidopsis
MISTKSWKPLQTLALSMQIQLMDNLIENGLDIDDVDKDNQTALHKAIIGKKEAVISHLLRKGANPHLQDRDGAAPIHYAVQVGALQTVKLLFKYNVDVNVADNEGWTPLHIAVQSRNRDITKILLTNGADKTRRTKDGKLALDLALCFGRDFKSYDLVKLLKIMPTGDI

SEQ ID NO: 50272 - DNA, 1568 bp, Arabidopsis thaliana; identical to SEQ ID NO: 47266
  misc_feature (1)..(1568): Ceres Seq. ID no. 12591434
  misc_feature: MA Experiment ID: 20000227 Result: Down-regulated in Transcription
  misc_feature: MA Experiment 20000227 PARAMETER Experiment Name: At_Root-Tips-vs-Tops_P Parameter: Tissue Value: Root Tips vs. Root Tops
  misc_feature: MA Experiment ID: 20000451 Result: Down-regulated in Transcription
  misc_feature: MA Experiment 20000451 PARAMETER Experiment Name: At_CS6879_Shoots-Roots_P Parameter: Age (day) Value: 14
  misc_feature: MA Experiment 20000451 PARAMETER Experiment Name: At_CS6879_Shoots-Roots_P Parameter: Organism Value: A. thaliana
  misc_feature: MA Experiment 20000451 PARAMETER Experiment Name: At_CS6879_Shoots-Roots_P Parameter: Plant Line Value: CS6879 vs. WS
  misc_feature: MA Experiment 20000451 PARAMETER Experiment Name: At_CS6879_Shoots-Roots_P Parameter: Tissue Value: Roots

SEQ ID NO: 50273 - protein, 456 aa, Arabidopsis thaliana; identical to SEQ ID NO: 47267
  peptide (1)..(456): Ceres Seq. ID no. 12591435
  misc_feature (210)..(443): Pfam Name: Phosphoribulokinase / Uridine kinase family Pfam Description: Phosphoribulokinase / Uridine kinase family
  misc_feature (210)..(443): Pfam Name: Phosphoribulokinase / Uridine kinase family Pfam Description: Phosphoribulokinase / Uridine kinase family
  misc_feature (353)..(453): Homolog of NCBI NO: 34911206 NR Description: P0019E03.19 [Oryza sativa (japonica
  misc_feature (59)..(329): Homolog of NCBI NO: 34911206 NR Description: P0019E03.19 [Oryza sativa (japonica
  misc_feature (93)..(242): Homolog of NCBI NO: 25406658 NR Description: unknown protein F5I6.13 [imported] - Arabidopsis
  misc_feature (237)..(456): Homolog of NCBI NO: 25406658 NR Description: unknown protein F5I6.13 [imported] - Arabidopsis
  misc_feature (300)..(456): Homolog of NCBI NO: 21537005 NR Description: unknown [Arabidopsis thaliana]
  misc_feature (353)..(453): Homolog of NCBI NO: 34911206 NR Description: P0019E03.19 [Oryza sativa (japonica
  misc_feature (93)..(242): Homolog of NCBI NO: 25406658 NR Description: unknown protein F5I6.13 [imported] - Arabidopsis
  misc_feature (300)..(456): Homolog of NCBI NO: 21537005 NR Description: unknown [Arabidopsis thaliana]
  misc_feature (1)..(456): Homolog of NCBI NO: 30699506 NR Description: auxin-regulated protein [Arabidopsis thaliana]
  misc_feature (1)..(456): Homolog of NCBI NO: 16226442 NR Description: At1g80380/F5I6_13 [Arabidopsis thaliana]
  misc_feature (1)..(207): Homolog of NCBI NO: 18412831 NR Description: auxin-regulated protein
  misc_feature (300)..(456): Homolog of NCBI NO: 18412831 NR Description: auxin-regulated protein
  misc_feature (1)..(207): Homolog of NCBI NO: 21537005 NR Description: unknown [Arabidopsis thaliana]
  misc_feature (237)..(456): Homolog of NCBI NO: 25406658 NR Description: unknown protein F5I6.13 [imported] - Arabidopsis
  misc_feature (59)..(329): Homolog of NCBI NO: 34911206 NR Description: P0019E03.19 [Oryza sativa (japonica
  misc_feature (1)..(207): Homolog of NCBI NO: 21537005 NR Description: unknown [Arabidopsis thaliana]
  misc_feature (300)..(456): Homolog of NCBI NO: 18412831 NR Description: auxin-regulated protein
  misc_feature (1)..(207): Homolog of NCBI NO: 18412831 NR Description: auxin-regulated protein
  misc_feature (1)..(456): Homolog of NCBI NO: 16226442 NR Description: At1g80380/F5I6_13 [Arabidopsis thaliana]
  misc_feature (1)..(456): Homolog of NCBI NO: 30699506 NR Description: auxin-regulated protein [Arabidopsis thaliana]

SEQ ID NO: 50274 - protein, 364 aa, Arabidopsis thaliana; identical to SEQ ID NO: 47268
  peptide (1)..(364): Ceres Seq. ID no. 12591436
  misc_feature (118)..(351): Pfam Name: Phosphoribulokinase / Uridine kinase family Pfam Description: Phosphoribulokinase / Uridine kinase family
  misc_feature (118)..(351): Pfam Name: Phosphoribulokinase / Uridine kinase family Pfam Description: Phosphoribulokinase / Uridine kinase family
  misc_feature (261)..(361): Homolog of NCBI NO: 34911206 NR Description: P0019E03.19 [Oryza sativa (japonica
  misc_feature (1)..(237): Homolog of NCBI NO: 34911206 NR Description: P0019E03.19 [Oryza sativa (japonica
  misc_feature (1)..(150): Homolog of NCBI NO: 25406658 NR Description: unknown protein F5I6.13 [imported] - Arabidopsis
  misc_feature (145)..(364): Homolog of NCBI NO: 25406658 NR Description: unknown protein F5I6.13 [imported] - Arabidopsis
  misc_feature (208)..(364): Homolog of NCBI NO: 21537005 NR Description: unknown [Arabidopsis thaliana]
  misc_feature (261)..(361): Homolog of NCBI NO: 34911206 NR Description: P0019E03.19 [Oryza sativa (japonica
  misc_feature (1)..(150): Homolog of NCBI NO: 25406658 NR Description: unknown protein F5I6.13 [imported] - Arabidopsis
  misc_feature (208)..(364): Homolog of NCBI NO: 21537005 NR Description: unknown [Arabidopsis thaliana]
  misc_feature (1)..(364): Homolog of NCBI NO: 30699506 NR Description: auxin-regulated protein [Arabidopsis thaliana]
  misc_feature (1)..(364): Homolog of NCBI NO: 16226442 NR Description: At1g80380/F5I6_13 [Arabidopsis thaliana]
  misc_feature (1)..(115): Homolog of NCBI NO: 18412831 NR Description: auxin-regulated protein
  misc_feature (208)..(364): Homolog of NCBI NO: 18412831 NR Description: auxin-regulated protein
  misc_feature (1)..(115): Homolog of NCBI NO: 21537005 NR Description: unknown [Arabidopsis thaliana]
  misc_feature (145)..(364): Homolog of NCBI NO: 25406658 NR Description: unknown protein F5I6.13 [imported] - Arabidopsis
  misc_feature (1)..(237): Homolog of NCBI NO: 34911206 NR Description: P0019E03.19 [Oryza sativa (japonica
  misc_feature (1)..(115): Homolog of NCBI NO: 21537005 NR Description: unknown [Arabidopsis thaliana]
  misc_feature (208)..(364): Homolog of NCBI NO: 18412831 NR Description: auxin-regulated protein
  misc_feature (1)..(115): Homolog of NCBI NO: 18412831 NR Description: auxin-regulated protein
  misc_feature (1)..(364): Homolog of NCBI NO: 16226442 NR Description: At1g80380/F5I6_13 [Arabidopsis thaliana]
  misc_feature (1)..(364): Homolog of NCBI NO: 30699506 NR Description: auxin-regulated protein [Arabidopsis thaliana]

SEQ ID NO: 50275 - DNA, 1616 bp, Arabidopsis thaliana; identical to SEQ ID NO: 47055
  misc_feature (1)..(1616): Ceres Seq. ID no. 12575638
  misc_feature: MA Experiment ID: 20000234 Result: Down-regulated in Transcription
  misc_feature: MA Experiment 20000234 PARAMETER Experiment Name: At_Siliques_P Parameter: Age (day) Value: 21
  misc_feature: MA Experiment 20000234 PARAMETER Experiment Name: At_Siliques_P Parameter: Organism Value: A. thaliana
  misc_feature: MA Experiment 20000234 PARAMETER Experiment Name: At_Siliques_P Parameter: Plant Line Value: WS
  misc_feature: MA Experiment 20000234 PARAMETER Experiment Name: At_Siliques_P Parameter: Tissue Value: Less Than 5mm Siliques vs. Whole Plant
  misc_feature: MA Experiment ID: 20000235 Result: Down-regulated in Transcription
  misc_feature: MA Experiment 20000235 PARAMETER Experiment Name: At_Siliques_P Parameter: Age (day) Value: 21
  misc_feature: MA Experiment 20000235 PARAMETER Experiment Name: At_Siliques_P Parameter: Organism Value: A. thaliana
  misc_feature: MA Experiment 20000235 PARAMETER Experiment Name: At_Siliques_P Parameter: Plant Line Value: WS
  misc_feature: MA Experiment 20000235 PARAMETER Experiment Name: At_Siliques_P Parameter: Tissue Value: 5-10mm Siliques vs. Whole Plant
  misc_feature: MA Experiment ID: 20000265 Result: Up-regulated in Transcription
  misc_feature: MA Experiment 20000265 PARAMETER Experiment Name: At_Open_Flower_P Parameter: Age (day) Value: 21
  misc_feature: MA Experiment 20000265 PARAMETER Experiment Name: At_Open_Flower_P Parameter: Plant Line Value: WS
  misc_feature: MA Experiment 20000265 PARAMETER Experiment Name: At_Open_Flower_P Parameter: Tissue Value: Closed Flower vs. Whole Plant
  misc_feature: MA Experiment ID: 20000438 Result: Down-regulated in Transcription
  misc_feature: MA Experiment 20000438 PARAMETER Experiment Name: At_Shoots__P Parameter: Age (day) Value: 14
  misc_feature: MA Experiment 20000438 PARAMETER Experiment Name: At_Shoots__P Parameter: Tissue Value: Shoots vs. Whole Plant
  misc_feature: MA Experiment ID: 20000439 Result: Up-regulated in Transcription
  misc_feature: MA Experiment 20000439 PARAMETER Experiment Name: At_Roots__P Parameter: Age (day) Value: 14 vs. 21
  misc_feature: MA Experiment 20000439 PARAMETER Experiment Name: At_Roots__P Parameter: Organism Value: A. thaliana
  misc_feature: MA Experiment 20000439 PARAMETER Experiment Name: At_Roots__P Parameter: Tissue Value: Roots vs. Whole Plant
  misc_feature: MA Experiment ID: 20000496 Result: Down-regulated in Transcription
  misc_feature: MA Experiment 20000496 PARAMETER Experiment Name: At_Guard_Cells_P Parameter: Harvest Date Value: 7/19/2002
  misc_feature: MA Experiment 20000496 PARAMETER Experiment Name: At_Guard_Cells_P Parameter: Organism Value: Canola
  misc_feature: MA Experiment 20000496 PARAMETER Experiment Name: At_Guard_Cells_P Parameter: Tissue Value: Guard Cells vs. Leaves
  misc_feature: MA Experiment ID: 20000527 Result: Down-regulated in Transcription
  misc_feature: MA Experiment 20000527 PARAMETER Experiment Name: At_10percent_PEG_P Parameter: Age (day) Value: 20
  misc_feature: MA Experiment 20000527 PARAMETER Experiment Name: At_10percent_PEG_P Parameter: Organism Value: A. thaliana
  misc_feature: MA Experiment 20000527 PARAMETER Experiment Name: At_10percent_PEG_P Parameter: Plant Line Value: WS
  misc_feature: MA Experiment 20000527 PARAMETER Experiment Name: At_10percent_PEG_P Parameter: Timepoint (day) Value: 20
  misc_feature: MA Experiment 20000527 PARAMETER Experiment Name: At_10percent_PEG_P Parameter: Tissue Value: Whole Plant
  misc_feature: MA Experiment 20000527 PARAMETER Experiment Name: At_10percent_PEG_P Parameter: Treatment Value: 10percent PEG vs. No Treatment
  misc_feature: MA Experiment ID: 20000794 Result: Up-regulated in Transcription
  misc_feature: MA Experiment 20000794 PARAMETER Experiment Name: At_Petals_P Parameter: Age (day) Value: 23-25 days
  misc_feature: MA Experiment 20000794 PARAMETER Experiment Name: At_Petals_P Parameter: Plant Line Value: WS
  misc_feature: MA Experiment 20000794 PARAMETER Experiment Name: At_Petals_P Parameter: Tissue Value: Petals vs. Whole plant
  misc_feature: MA Experiment ID: 20001904 Result: Up-regulated in Transcription
  misc_feature: MA Experiment 20001904 PARAMETER Experiment Name: At_Drought_Reproduction_P Parameter: Age (day) Value: 37
  misc_feature: MA Experiment 20001904 PARAMETER Experiment Name: At_Drought_Reproduction_P Parameter: Organism Value: A. thaliana
  misc_feature: MA Experiment 20001904 PARAMETER Experiment Name: At_Drought_Reproduction_P Parameter: Plant Line Value: WS
  misc_feature: MA Experiment 20001904 PARAMETER Experiment Name: At_Drought_Reproduction_P Parameter: Timepoint (day) Value: 7
  misc_feature: MA Experiment 20001904 PARAMETER Experiment Name: At_Drought_Reproduction_P Parameter: Tissue Value: Rosettes
  misc_feature: MA Experiment 20001904 PARAMETER Experiment Name: At_Drought_Reproduction_P Parameter: Treatment Value: Drought vs. No Drought
  misc_feature: MA Experiment ID: 20001905 Result: Up-regulated in Transcription
  misc_feature: MA Experiment 20001905 PARAMETER Experiment Name: At_Drought_Reproduction_P Parameter: Age (day) Value: 40
  misc_feature: MA Experiment 20001905 PARAMETER Experiment Name: At_Drought_Reproduction_P Parameter: Organism Value: A. thaliana
  misc_feature: MA Experiment 20001905 PARAMETER Experiment Name: At_Drought_Reproduction_P Parameter: Plant Line Value: WS
  misc_feature: MA Experiment 20001905 PARAMETER Experiment Name: At_Drought_Reproduction_P Parameter: Timepoint (day) Value: 10
  misc_feature: MA Experiment 20001905 PARAMETER Experiment Name: At_Drought_Reproduction_P Parameter: Tissue Value: Rosettes
  misc_feature: MA Experiment 20001905 PARAMETER Experiment Name: At_Drought_Reproduction_P Parameter: Treatment Value: Drought vs. No Drought

SEQ ID NO: 50276 - protein, 499 aa, Arabidopsis thaliana; identical to SEQ ID NO: 47056
  peptide (1)..(499): Ceres Seq. ID no. 12575639
  misc_feature (123)..(449): Pfam Name: Exostosin family Pfam Description: Exostosin family
  misc_feature (123)..(449): Pfam Name: Exostosin family Pfam Description: Exostosin family
  misc_feature (115)..(494): Homolog of NCBI NO: 34899802 NR Description: OJ1092_A07.9 [Oryza sativa (japonica
  misc_feature (113)..(494): Homolog of NCBI NO: 30686300 NR Description: Exostosin family [Arabidopsis thaliana]
  misc_feature (364)..(481): Homolog of NCBI NO: 7487224 NR Description: hypothetical protein T1F15.13 - Arabidopsis
  misc_feature (115)..(382): Homolog of NCBI NO: 7487224 NR Description: hypothetical protein T1F15.13 - Arabidopsis
  misc_feature (109)..(498): Homolog of NCBI NO: 19386797 NR Description: OJ1485_B09.5 [Oryza sativa (japonica
  misc_feature (115)..(494): Homolog of NCBI NO: 34899802 NR Description: OJ1092_A07.9 [Oryza sativa (japonica
  misc_feature (364)..(481): Homolog of NCBI NO: 7487224 NR Description: hypothetical protein T1F15.13 - Arabidopsis
  misc_feature (109)..(498): Homolog of NCBI NO: 19386797 NR Description: OJ1485_B09.5 [Oryza sativa (japonica
  misc_feature (1)..(499): Homolog of NCBI NO: 15228598 NR Description: Exostosin family; protein id: At3g03650.1
  misc_feature (109)..(496): Homolog of NCBI NO: 15230692 NR Description: Exostosin family; protein id: At3g45400.1
  misc_feature (121)..(497): Homolog of NCBI NO: 18410670 NR Description: Exostosin family
  misc_feature (121)..(497): Homolog of NCBI NO: 25406363 NR Description: F25A4.34 [imported] - Arabidopsis thaliana
  misc_feature (115)..(498): Homolog of NCBI NO: 22330483 NR Description: Exostosin family; protein id: At1g67410.1
  misc_feature (115)..(382): Homolog of NCBI NO: 7487224 NR Description: hypothetical protein T1F15.13 - Arabidopsis
  misc_feature (113)..(494): Homolog of NCBI NO: 30686300 NR Description: Exostosin family [Arabidopsis thaliana]
  misc_feature (115)..(498): Homolog of NCBI NO: 22330483 NR Description: Exostosin family; protein id: At1g67410.1
  misc_feature (121)..(497): Homolog of NCBI NO: 25406363 NR Description: F25A4.34 [imported] - Arabidopsis thaliana
  misc_feature (121)..(497): Homolog of NCBI NO: 18410670 NR Description: Exostosin family
  misc_feature (109)..(496): Homolog of NCBI NO: 15230692 NR Description: Exostosin family; protein id: At3g45400.1
  misc_feature (1)..(499): Homolog of NCBI NO: 15228598 NR Description: Exostosin family; protein id: At3g03650.1

SEQ ID NO: 50277 - protein, 400 aa, Arabidopsis thaliana; identical to SEQ ID NO: 47057
  peptide (1)..(400): Ceres Seq. ID no. 12575640
  misc_feature (24)..(350): Pfam Name: Exostosin family Pfam Description: Exostosin family
  misc_feature (24)..(350): Pfam Name: Exostosin family Pfam Description: Exostosin family
  misc_feature (16)..(395): Homolog of NCBI NO: 34899802 NR Description: OJ1092_A07.9 [Oryza sativa (japonica
  misc_feature (14)..(395): Homolog of NCBI NO: 30686300 NR Description: Exostosin family [Arabidopsis thaliana]
  misc_feature (265)..(382): Homolog of NCBI NO: 7487224 NR Description: hypothetical protein T1F15.13 - Arabidopsis
  misc_feature (16)..(283): Homolog of NCBI NO: 7487224 NR Description: hypothetical protein T1F15.13 - Arabidopsis
  misc_feature (10)..(399): Homolog of NCBI NO: 19386797 NR Description: OJ1485_B09.5 [Oryza sativa (japonica
  misc_feature (16)..(395): Homolog of NCBI NO: 34899802 NR Description: OJ1092_A07.9 [Oryza sativa (japonica
  misc_feature (265)..(382): Homolog of NCBI NO: 7487224 NR Description: hypothetical protein T1F15.13 - Arabidopsis
  misc_feature (10)..(399): Homolog of NCBI NO: 19386797 NR Description: OJ1485_B09.5 [Oryza sativa (japonica
  misc_feature (1)..(400): Homolog of NCBI NO: 15228598 NR Description: Exostosin family; protein id: At3g03650.1
  misc_feature (10)..(397): Homolog of NCBI NO: 15230692 NR Description: Exostosin family; protein id: At3g45400.1
  misc_feature (22)..(398): Homolog of NCBI NO: 18410670 NR Description: Exostosin family
  misc_feature (22)..(398): Homolog of NCBI NO: 25406363 NR Description: F25A4.34 [imported] - Arabidopsis thaliana
  misc_feature (16)..(399): Homolog of NCBI NO: 22330483 NR Description: Exostosin family; protein id: At1g67410.1
  misc_feature (16)..(283): Homolog of NCBI NO: 7487224 NR Description: hypothetical protein T1F15.13 - Arabidopsis
  misc_feature (14)..(395): Homolog of NCBI NO: 30686300 NR Description: Exostosin family [Arabidopsis thaliana]
  misc_feature (16)..(399): Homolog of NCBI NO: 22330483 NR Description: Exostosin family; protein id: At1g67410.1
  misc_feature (22)..(398): Homolog of NCBI NO: 25406363 NR Description: F25A4.34 [imported] - Arabidopsis thaliana
  misc_feature (22)..(398): Homolog of NCBI NO: 18410670 NR Description: Exostosin family
  misc_feature (10)..(397): Homolog of NCBI NO: 15230692 NR Description: Exostosin family; protein id: At3g45400.1
  misc_feature (1)..(400): Homolog of NCBI NO: 15228598 NR Description: Exostosin family; protein id: At3g03650.1

SEQ ID NO: 50278 - protein, 375 aa, Arabidopsis thaliana; identical to SEQ ID NO: 47058
  peptide (1)..(375): Ceres Seq. ID no. 12575641
  misc_feature (1)..(325): Pfam Name: Exostosin family Pfam Description: Exostosin family
  misc_feature (1)..(325): Pfam Name: Exostosin family Pfam Description: Exostosin family
  misc_feature (1)..(370): Homolog of NCBI NO: 34899802 NR Description: OJ1092_A07.9 [Oryza sativa (japonica
  misc_feature (1)..(370): Homolog of NCBI NO: 30686300 NR Description: Exostosin family [Arabidopsis thaliana]
  misc_feature (240)..(357): Homolog of NCBI NO: 7487224 NR Description: hypothetical protein T1F15.13 - Arabidopsis
  misc_feature (1)..(258): Homolog of NCBI NO: 7487224 NR Description: hypothetical protein T1F15.13 - Arabidopsis
  misc_feature (1)..(374): Homolog of NCBI NO: 19386797 NR Description: OJ1485_B09.5 [Oryza sativa (japonica
  misc_feature (1)..(370): Homolog of NCBI NO: 34899802 NR Description: OJ1092_A07.9 [Oryza sativa (japonica
  misc_feature (240)..(357): Homolog of NCBI NO: 7487224 NR Description: hypothetical protein T1F15.13 - Arabidopsis
  misc_feature (1)..(374): Homolog of NCBI NO: 19386797 NR Description: OJ1485_B09.5 [Oryza sativa (japonica
  misc_feature (1)..(375): Homolog of NCBI NO: 15228598 NR Description: Exostosin family; protein id: At3g03650.1
  misc_feature (1)..(372): Homolog of NCBI NO: 15230692 NR Description: Exostosin family; protein id: At3g45400.1
  misc_feature (1)..(373): Homolog of NCBI NO: 18410670 NR Description: Exostosin family
  misc_feature (1)..(373): Homolog of NCBI NO: 25406363 NR Description: F25A4.34 [imported] - Arabidopsis thaliana
  misc_feature (1)..(374): Homolog of NCBI NO: 22330483 NR Description: Exostosin family; protein id: At1g67410.1
  misc_feature (1)..(258): Homolog of NCBI NO: 7487224 NR Description: hypothetical protein T1F15.13 - Arabidopsis
  misc_feature (1)..(370): Homolog of NCBI NO: 30686300 NR Description: Exostosin family [Arabidopsis thaliana]
  misc_feature (1)..(374): Homolog of NCBI NO: 22330483 NR Description: Exostosin family; protein id: At1g67410.1
  misc_feature (1)..(373): Homolog of NCBI NO: 25406363 NR Description: F25A4.34 [imported] - Arabidopsis thaliana
  misc_feature (1)..(373): Homolog of NCBI NO: 18410670 NR Description: Exostosin family
  misc_feature (1)..(372): Homolog of NCBI NO: 15230692 NR Description: Exostosin family; protein id: At3g45400.1
  misc_feature (1)..(375): Homolog of NCBI NO: 15228598 NR Description: Exostosin family; protein id: At3g03650.1

SEQ ID NO: 50279 - DNA, 1424 bp, Arabidopsis thaliana
  misc_feature (1)..(1424): Ceres Seq. ID no. 12606113
  misc_feature: MA Experiment ID: 20000184 Result: Up-regulated in Transcription
  misc_feature: MA Experiment 20000184 PARAMETER Experiment Name: At_Shoots__P Parameter: Age (day) Value: 7
  misc_feature: MA Experiment 20000184 PARAMETER Experiment Name: At_Shoots__P Parameter: Tissue Value: Shoots vs. Whole Plant
  misc_feature: MA Experiment ID: 20000185 Result: Down-regulated in Transcription
  misc_feature: MA Experiment 20000185 PARAMETER Experiment Name: At_Roots__P Parameter: Age (day) Value: 7 vs. 21
  misc_feature: MA Experiment 20000185 PARAMETER Experiment Name: At_Roots__P Parameter: Organism Value: A. thaliana
  misc_feature: MA Experiment 20000185 PARAMETER Experiment Name: At_Roots__P Parameter: Tissue Value: Roots vs. Whole Plant
  misc_feature: MA Experiment ID: 20000438 Result: Up-regulated in Transcription
  misc_feature: MA Experiment 20000438 PARAMETER Experiment Name: At_Shoots__P Parameter: Age (day) Value: 14
  misc_feature: MA Experiment 20000438 PARAMETER Experiment Name: At_Shoots__P Parameter: Tissue Value: Shoots vs. Whole Plant
  misc_feature: MA Experiment ID: 20000439 Result: Down-regulated in Transcription
  misc_feature: MA Experiment 20000439 PARAMETER Experiment Name: At_Roots__P Parameter: Age (day) Value: 14 vs. 21
  misc_feature: MA Experiment 20000439 PARAMETER Experiment Name: At_Roots__P Parameter: Organism Value: A. thaliana
  misc_feature: MA Experiment 20000439 PARAMETER Experiment Name: At_Roots__P Parameter: Tissue Value: Roots vs. Whole Plant
  misc_feature: MA Experiment ID: 20000495 Result: Down-regulated in Transcription
  misc_feature: MA Experiment 20000495 PARAMETER Experiment Name: At_Guard_Cells_P Parameter: Harvest Date Value: 8/2/2002
  misc_feature: MA Experiment 20000495 PARAMETER Experiment Name: At_Guard_Cells_P Parameter: Organism Value: A. thaliana
  misc_feature: MA Experiment 20000495 PARAMETER Experiment Name: At_Guard_Cells_P Parameter: Tissue Value: Guard Cells vs. Leaves
  misc_feature: MA Experiment ID: 20000496 Result: Down-regulated in Transcription
  misc_feature: MA Experiment 20000496 PARAMETER Experiment Name: At_Guard_Cells_P Parameter: Harvest Date Value: 7/19/2002
  misc_feature: MA Experiment 20000496 PARAMETER Experiment Name: At_Guard_Cells_P Parameter: Organism Value: Canola
  misc_feature: MA Experiment 20000496 PARAMETER Experiment Name: At_Guard_Cells_P Parameter: Tissue Value: Guard Cells vs. Leaves
  misc_feature: MA Experiment ID: 20001450 Result: Down-regulated in Transcription
  misc_feature: MA Experiment 20001450 PARAMETER Experiment Name: At_Far-red-induction_P Parameter: Age (day) Value: 7
  misc_feature: MA Experiment 20001450 PARAMETER Experiment Name: At_Far-red-induction_P Parameter: Light Value: Far-red vs. White
  misc_feature: MA Experiment 20001450 PARAMETER Experiment Name: At_Far-red-induction_P Parameter: Organism Value: A. thaliana
  misc_feature: MA Experiment 20001450 PARAMETER Experiment Name: At_Far-red-induction_P Parameter: Plant Line Value: Columbia
  misc_feature: MA Experiment 20001450 PARAMETER Experiment Name: At_Far-red-induction_P Parameter: Timepoint (hr) Value: 8
  misc_feature: MA Experiment 20001450 PARAMETER Experiment Name: At_Far-red-induction_P Parameter: Tissue Value: Whole Plant
  misc_feature: MA Experiment ID: 20001451 Result: Down-regulated in Transcription
  misc_feature: MA Experiment 20001451 PARAMETER Experiment Name: At_Far-red-induction_P Parameter: Age (day) Value: 7
  misc_feature: MA Experiment 20001451 PARAMETER Experiment Name: At_Far-red-induction_P Parameter: Light Value: Far-red vs. White
  misc_feature: MA Experiment 20001451 PARAMETER Experiment Name: At_Far-red-induction_P Parameter: Organism Value: A. thaliana
  misc_feature: MA Experiment 20001451 PARAMETER Experiment Name: At_Far-red-induction_P Parameter: Plant Line Value: Columbia
  misc_feature: MA Experiment 20001451 PARAMETER Experiment Name: At_Far-red-induction_P Parameter: Timepoint (hr) Value: 24
  misc_feature: MA Experiment 20001451 PARAMETER Experiment Name: At_Far-red-induction_P Parameter: Tissue Value: Whole Plant
  misc_feature: MA Experiment ID: 20001557 Result: Down-regulated in Transcription
  misc_feature: MA Experiment 20001557 PARAMETER Experiment Name: At_Drought_Soil_Dry_P Parameter: Age (day) Value: 27
  misc_feature: MA Experiment 20001557 PARAMETER Experiment Name: At_Drought_Soil_Dry_P Parameter: Organism Value: A. thaliana
  misc_feature: MA Experiment 20001557 PARAMETER Experiment Name: At_Drought_Soil_Dry_P Parameter: Plant Line Value: WS
  misc_feature: MA Experiment 20001557 PARAMETER Experiment Name: At_Drought_Soil_Dry_P Parameter: Post Timepoint (hr) Value: 3
  misc_feature: MA Experiment 20001557 PARAMETER Experiment Name: At_Drought_Soil_Dry_P Parameter: Post-Treatment Value: Re-Water vs. No Drought
  misc_feature: MA Experiment 20001557 PARAMETER Experiment Name: At_Drought_Soil_Dry_P Parameter: Timepoint (day) Value: 13
  misc_feature: MA Experiment 20001557 PARAMETER Experiment Name: At_Drought_Soil_Dry_P Parameter: Treatment Value: Drought vs. No Drought
  misc_feature: MA Experiment ID: 20001904 Result: Down-regulated in Transcription
  misc_feature: MA Experiment 20001904 PARAMETER Experiment Name: At_Drought_Reproduction_P Parameter: Age (day) Value: 37
  misc_feature: MA Experiment 20001904 PARAMETER Experiment Name: At_Drought_Reproduction_P Parameter: Organism Value: A. thaliana
  misc_feature: MA Experiment 20001904 PARAMETER Experiment Name: At_Drought_Reproduction_P Parameter: Plant Line Value: WS
  misc_feature: MA Experiment 20001904 PARAMETER Experiment Name: At_Drought_Reproduction_P Parameter: Timepoint (day) Value: 7
  misc_feature: MA Experiment 20001904 PARAMETER Experiment Name: At_Drought_Reproduction_P Parameter: Tissue Value: Rosettes
  misc_feature: MA Experiment 20001904 PARAMETER Experiment Name: At_Drought_Reproduction_P Parameter: Treatment Value: Drought vs. No Drought
  misc_feature: MA Experiment ID: 20001905 Result: Down-regulated in Transcription
  misc_feature: MA Experiment 20001905 PARAMETER Experiment Name: At_Drought_Reproduction_P Parameter: Age (day) Value: 40
  misc_feature: MA Experiment 20001905 PARAMETER Experiment Name: At_Drought_Reproduction_P Parameter: Organism Value: A. thaliana
  misc_feature: MA Experiment 20001905 PARAMETER Experiment Name: At_Drought_Reproduction_P Parameter: Plant Line Value: WS
  misc_feature: MA Experiment 20001905 PARAMETER Experiment Name: At_Drought_Reproduction_P Parameter: Timepoint (day) Value: 10
  misc_feature: MA Experiment 20001905 PARAMETER Experiment Name: At_Drought_Reproduction_P Parameter: Tissue Value: Rosettes
  misc_feature: MA Experiment 20001905 PARAMETER Experiment Name: At_Drought_Reproduction_P Parameter: Treatment Value: Drought vs. No Drought
  misc_feature: MA Experiment ID: 20001906 Result: Down-regulated in Transcription
  misc_feature: MA Experiment 20001906 PARAMETER Experiment Name: At_Drought_Reproduction_P Parameter: Age (day) Value: 35
  misc_feature: MA Experiment 20001906 PARAMETER Experiment Name: At_Drought_Reproduction_P Parameter: Organism Value: A. thaliana
  misc_feature: MA Experiment 20001906 PARAMETER Experiment Name: At_Drought_Reproduction_P Parameter: Plant Line Value: WS
  misc_feature: MA Experiment 20001906 PARAMETER Experiment Name: At_Drought_Reproduction_P Parameter: Timepoint (day) Value: 5
  misc_feature: MA Experiment 20001906 PARAMETER Experiment Name: At_Drought_Reproduction_P Parameter: Tissue Value: Siliques
  misc_feature: MA Experiment 20001906 PARAMETER Experiment Name: At_Drought_Reproduction_P Parameter: Treatment Value: Drought vs. No Drought
accaatcaaaaatgtctttgctctctcctcttcctctgctccactcattctcctccaccgtcgccacaaaatccaccgcctctagaatcactgccacgccgtcgaaaatccgcttctctgtcataaacgccacgtcggagaatggaaacagcggtggtagtaaaaacgatcgtgatgaggatccatcttttaacccatttggtttcgttacagacaatccgtctagccggagtgcaattcagttaccagagtctccggcggaagacggtaatgtcggccaaatgctctacaggactgaagataaaggtaaagagtatggctcaactatcaaatctgggaagcttagatggtttgtgagagagactggatcaaaggagagtcgtcgaggaaccattgtatttgttcatggagctcctactcagtcttttagctacagaactgtcatgtctgagttgtcagatgctggatttcattgctttgcacctgactggataggattcggattcagtgacaaaccgcagcctggatacggttttaattacacagaaaaagagtaccatgaggcgtttgataaactgcttgaagtgctagaggtcaaatctcctttctttcttgttgttcagggatttcttgtaggttcatatggtttaacttgggctttgaaaaatccaagcaaggttgagaaactcgcgatccttaatagtccgctgaccgtttcatccccagttcccggattatttaagcagctgaggattcccctgtttggtgaattcacctgccaaaatgctatcttggccgagcggttcattgaaggaggtagcccctacgtcctgaagaatgagaaagctgatgtgtatcgtctaccatatttgtcaagcggagggcctggctttgccttgctcgagactgcgaagaagatcaactttggagacacattgagtcaaattgcaaatgggttttcatcaggcagctgggataaacctacgcttctggcttggggaatagctgataaatatctgcctcagtctatagcagaggaatttgagaaacagaacccccaaaatgttaagcttcgactcatcgaaggtgctgggcatttgcctcaagaagactggccagagaaagtagttgctgccctccgagcatttttctgacttccaaatacaacaaaaaaggacagaggtactgttttggtggggtgtttagagtcttacctctttgatggatgtgtgcaaagcttcacattgctctttggagaggctagaagcagtctgcaacgggtggattctggcctgcgaaaaaaataaactagaattaatcgtacagcatgtaaacccgtttcttctgtcgtcaaatgtacagaaaacaaaagtggatactttgtgaatcaaatgagtggttacatagatgctttacttcatttc

SEQ ID NO: 50280 - protein, 383 aa, Arabidopsis thaliana
  peptide (1)..(383): Ceres Seq. ID no. 12606114
  misc_feature (156)..(381): Pfam Name: alpha/beta hydrolase fold Pfam Description: alpha/beta hydrolase fold
  misc_feature (102)..(375): Homolog of NCBI NO: 18413878 NR Description: hydrolase-like protein
  misc_feature (102)..(375): Homolog of NCBI NO: 21537159 NR Description: hydrolase-like protein [Arabidopsis thaliana]
  misc_feature (107)..(382): Homolog of NCBI NO: 37522378 NR Description: hypothetical protein glr2809 [Gloeobacter
  misc_feature (108)..(383): Homolog of NCBI NO: 16329713 NR Description: unknown protein [Synechocystis sp. PCC 6803]
  misc_feature (114)..(382): Homolog of NCBI NO: 23130266 NR Description: hypothetical protein [Nostoc punctiforme]
  misc_feature (112)..(382): Homolog of NCBI NO: 23041852 NR Description: hypothetical protein [Trichodesmium erythraeum
  misc_feature (104)..(382): Homolog of NCBI NO: 17228848 NR Description: putative hydrolase [Nostoc sp. PCC 7120]
  misc_feature (2)..(382): Homolog of NCBI NO: 38344893 NR Description: OSJNBa0033G05.17 [Oryza sativa (japonica
  misc_feature (4)..(383): Homolog of NCBI NO: 25405562 NR Description: hypothetical protein F6D8.27 [imported] -
  misc_feature (4)..(383): Homolog of NCBI NO: 22330196 NR Description: hypothetical protein
QSKMSLLSPLPLLHSFSSTVATKSTASRITATPSKIRFSVINATSENGNSGGSKNDRDEDPSFNPFGFVTDNPSSRSAIQLPESPAEDGNVGQMLYRTEDKGKEYGSTIKSGKLRWFVRETGSKESRRGTIVFVHGAPTQSFSYRTVMSELSDAGFHCFAPDWIGFGFSDKPQPGYGFNYTEKEYHEAFDKLLEVLEVKSPFFLVVQGFLVGSYGLTWALKNPSKVEKLAILNSPLTVSSPVPGLFKQLRIPLFGEFTCQNAILAERFIEGGSPYVLKNEKADVYRLPYLSSGGPGFALLETAKKINFGDTLSQIANGFSSGSWDKPTLLAWGIADKYLPQSIAEEFEKQNPQNVKLRLIEGAGHLPQEDWPEKVVAALRAFF

SEQ ID NO: 50281 - protein, 380 aa, Arabidopsis thaliana
  peptide (1)..(380): Ceres Seq. ID no. 12606115
  misc_feature (153)..(378): Pfam Name: alpha/beta hydrolase fold Pfam Description: alpha/beta hydrolase fold
  misc_feature (99)..(372): Homolog of NCBI NO: 18413878 NR Description: hydrolase-like protein
  misc_feature (99)..(372): Homolog of NCBI NO: 21537159 NR Description: hydrolase-like protein [Arabidopsis thaliana]
  misc_feature (104)..(379): Homolog of NCBI NO: 37522378 NR Description: hypothetical protein glr2809 [Gloeobacter
  misc_feature (105)..(380): Homolog of NCBI NO: 16329713 NR Description: unknown protein [Synechocystis sp. PCC 6803]
  misc_feature (111)..(379): Homolog of NCBI NO: 23130266 NR Description: hypothetical protein [Nostoc punctiforme]
  misc_feature (109)..(379): Homolog of NCBI NO: 23041852 NR Description: hypothetical protein [Trichodesmium erythraeum
  misc_feature (101)..(379): Homolog of NCBI NO: 17228848 NR Description: putative hydrolase [Nostoc sp. PCC 7120]
  misc_feature (1)..(379): Homolog of NCBI NO: 38344893 NR Description: OSJNBa0033G05.17 [Oryza sativa (japonica
  misc_feature (1)..(380): Homolog of NCBI NO: 25405562 NR Description: hypothetical protein F6D8.27 [imported] -
  misc_feature (1)..(380): Homolog of NCBI NO: 22330196 NR Description: hypothetical protein
MSLLSPLPLLHSFSSTVATKSTASRITATPSKIRFSVINATSENGNSGGSKNDRDEDPSFNPFGFVTDNPSSRSAIQLPESPAEDGNVGQMLYRTEDKGKEYGSTIKSGKLRWFVRETGSKESRRGTIVFVHGAPTQSFSYRTVMSELSDAGFHCFAPDWIGFGFSDKPQPGYGFNYTEKEYHEAFDKLLEVLEVKSPFFLVVQGFLVGSYGLTWALKNPSKVEKLAILNSPLTVSSPVPGLFKQLRIPLFGEFTCQNAILAERFIEGGSPYVLKNEKADVYRLPYLSSGGPGFALLETAKKINFGDTLSQIANGFSSGSWDKPTLLAWGIADKYLPQSIAEEFEKQNPQNVKLRLIEGAGHLPQEDWPEKVVAALRAFF

SEQ ID NO: 50282 - protein, 290 aa, Arabidopsis thaliana
  peptide (1)..(290): Ceres Seq. ID no. 12606116
  misc_feature (63)..(288): Pfam Name: alpha/beta hydrolase fold Pfam Description: alpha/beta hydrolase fold
  misc_feature (9)..(282): Homolog of NCBI NO: 18413878 NR Description: hydrolase-like protein
  misc_feature (9)..(282): Homolog of NCBI NO: 21537159 NR Description: hydrolase-like protein [Arabidopsis thaliana]
  misc_feature (14)..(289): Homolog of NCBI NO: 37522378 NR Description: hypothetical protein glr2809 [Gloeobacter
  misc_feature (15)..(290): Homolog of NCBI NO: 16329713 NR Description: unknown protein [Synechocystis sp. PCC 6803]
  misc_feature (21)..(289): Homolog of NCBI NO: 23130266 NR Description: hypothetical protein [Nostoc punctiforme]
  misc_feature (19)..(289): Homolog of NCBI NO: 23041852 NR Description: hypothetical protein [Trichodesmium erythraeum
  misc_feature (11)..(289): Homolog of NCBI NO: 17228848 NR Description: putative hydrolase [Nostoc sp. PCC 7120]
  misc_feature (1)..(289): Homolog of NCBI NO: 38344893 NR Description: OSJNBa0033G05.17 [Oryza sativa (japonica
  misc_feature (1)..(290): Homolog of NCBI NO: 25405562 NR Description: hypothetical protein F6D8.27 [imported] -
  misc_feature (1)..(290): Homolog of NCBI NO: 22330196 NR Description: hypothetical protein
MLYRTEDKGKEYGSTIKSGKLRWFVRETGSKESRRGTIVFVHGAPTQSFSYRTVMSELSDAGFHCFAPDWIGFGFSDKPQPGYGFNYTEKEYHEAFDKLLEVLEVKSPFFLVVQGFLVGSYGLTWALKNPSKVEKLAILNSPLTVSSPVPGLFKQLRIPLFGEFTCQNAILAERFIEGGSPYVLKNEKADVYRLPYLSSGGPGFALLETAKKINFGDTLSQIANGFSSGSWDKPTLLAWGIADKYLPQSIAEEFEKQNPQNVKLRLIEGAGHLPQEDWPEKVVAALRAFF

SEQ ID NO: 50283 - DNA, 1077 bp, Arabidopsis thaliana
  misc_feature (1)..(1077): Ceres Seq. ID no. 12605757
  misc_feature: MA Experiment ID: 20000171 Result: Up-regulated in Transcription
  misc_feature: MA Experiment 20000171 PARAMETER Experiment Name: At_42deg_Heat_P Parameter: Age (day) Value: 14
  misc_feature: MA Experiment 20000171 PARAMETER Experiment Name: At_42deg_Heat_P Parameter: Organism Value: A. thaliana
  misc_feature: MA Experiment 20000171 PARAMETER Experiment Name: At_42deg_Heat_P Parameter: Plant Line Value: WS
  misc_feature: MA Experiment 20000171 PARAMETER Experiment Name: At_42deg_Heat_P Parameter: Temperature (deg C) Value: 42 vs. 22
  misc_feature: MA Experiment 20000171 PARAMETER Experiment Name: At_42deg_Heat_P Parameter: Timepoint (hr) Value: 1
  misc_feature: MA Experiment 20000171 PARAMETER Experiment Name: At_42deg_Heat_P Parameter: Tissue Value: Aerial
  misc_feature: MA Experiment ID: 20000173 Result: Up-regulated in Transcription
  misc_feature: MA Experiment 20000173 PARAMETER Experiment Name: At_42deg_Heat_P Parameter: Age (day) Value: 14
  misc_feature: MA Experiment 20000173 PARAMETER Experiment Name: At_42deg_Heat_P Parameter: Organism Value: A. thaliana
  misc_feature: MA Experiment 20000173 PARAMETER Experiment Name: At_42deg_Heat_P Parameter: Plant Line Value: WS
  misc_feature: MA Experiment 20000173 PARAMETER Experiment Name: At_42deg_Heat_P Parameter: Temperature (deg C) Value: 42 vs. 22
  misc_feature: MA Experiment 20000173 PARAMETER Experiment Name: At_42deg_Heat_P Parameter: Timepoint (hr) Value: 6
  misc_feature: MA Experiment 20000173 PARAMETER Experiment Name: At_42deg_Heat_P Parameter: Tissue Value: Aerial
  misc_feature: MA Experiment ID: 20000235 Result: Down-regulated in Transcription
  misc_feature: MA Experiment 20000235 PARAMETER Experiment Name: At_Siliques_P Parameter: Age (day) Value: 21
  misc_feature: MA Experiment 20000235 PARAMETER Experiment Name: At_Siliques_P Parameter: Organism Value: A. thaliana
  misc_feature: MA Experiment 20000235 PARAMETER Experiment Name: At_Siliques_P Parameter: Plant Line Value: WS
  misc_feature: MA Experiment 20000235 PARAMETER Experiment Name: At_Siliques_P Parameter: Tissue Value: 5-10mm Siliques vs. Whole Plant
  misc_feature: MA Experiment ID: 20000286 Result: Down-regulated in Transcription
  misc_feature: MA Experiment 20000286 PARAMETER Experiment Name: At_Open_Flower_P Parameter: Age (day) Value: 21
  misc_feature: MA Experiment 20000286 PARAMETER Experiment Name: At_Open_Flower_P Parameter: Plant Line Value: WS
  misc_feature: MA Experiment 20000286 PARAMETER Experiment Name: At_Open_Flower_P Parameter: Tissue Value: Half Open vs. Whole Plant
  misc_feature: MA Experiment ID: 20000437 Result: Up-regulated in Transcription
  misc_feature: MA Experiment 20000437 PARAMETER Experiment Name: At_Drought_P Parameter: Age (day) Value: 8
  misc_feature: MA Experiment 20000437 PARAMETER Experiment Name: At_Drought_P Parameter: Organism Value: A. thaliana
  misc_feature: MA Experiment 20000437 PARAMETER Experiment Name: At_Drought_P Parameter: Plant Line Value: WS
  misc_feature: MA Experiment 20000437 PARAMETER Experiment Name: At_Drought_P Parameter: Timepoint (hr) Value: 24
  misc_feature: MA Experiment 20000437 PARAMETER Experiment Name: At_Drought_P Parameter: Tissue Value: Whole Plant
  misc_feature: MA Experiment 20000437 PARAMETER Experiment Name: At_Drought_P Parameter: Treatment Value: Drought vs. No Drought
  misc_feature: MA Experiment ID: 20000496 Result: Up-regulated in Transcription
  misc_feature: MA Experiment 20000496 PARAMETER Experiment Name: At_Guard_Cells_P Parameter: Harvest Date Value: 7/19/2002
  misc_feature: MA Experiment 20000496 PARAMETER Experiment Name: At_Guard_Cells_P Parameter: Organism Value: Canola
  misc_feature: MA Experiment 20000496 PARAMETER Experiment Name: At_Guard_Cells_P Parameter: Tissue Value: Guard Cells vs. Leaves
  misc_feature: MA Experiment ID: 20001450 Result: Up-regulated in Transcription
  misc_feature: MA Experiment 20001450 PARAMETER Experiment Name: At_Far-red-induction_P Parameter: Age (day) Value: 7
  misc_feature: MA Experiment 20001450 PARAMETER Experiment Name: At_Far-red-induction_P Parameter: Light Value: Far-red vs. White
  misc_feature: MA Experiment 20001450 PARAMETER Experiment Name: At_Far-red-induction_P Parameter: Organism Value: A. thaliana
  misc_feature: MA Experiment 20001450 PARAMETER Experiment Name: At_Far-red-induction_P Parameter: Plant Line Value: Columbia
  misc_feature: MA Experiment 20001450 PARAMETER Experiment Name: At_Far-red-induction_P Parameter: Timepoint (hr) Value: 8
  misc_feature: MA Experiment 20001450 PARAMETER Experiment Name: At_Far-red-induction_P Parameter: Tissue Value: Whole Plant
  misc_feature: MA Experiment ID: 20001451 Result: Up-regulated in Transcription
  misc_feature: MA Experiment 20001451 PARAMETER Experiment Name: At_Far-red-induction_P Parameter: Age (day) Value: 7
  misc_feature: MA Experiment 20001451 PARAMETER Experiment Name: At_Far-red-induction_P Parameter: Light Value: Far-red vs. White
  misc_feature: MA Experiment 20001451 PARAMETER Experiment Name: At_Far-red-induction_P Parameter: Organism Value: A. thaliana
  misc_feature: MA Experiment 20001451 PARAMETER Experiment Name: At_Far-red-induction_P Parameter: Plant Line Value: Columbia
  misc_feature: MA Experiment 20001451 PARAMETER Experiment Name: At_Far-red-induction_P Parameter: Timepoint (hr) Value: 24
  misc_feature: MA Experiment 20001451 PARAMETER Experiment Name: At_Far-red-induction_P Parameter: Tissue Value: Whole Plant
  misc_feature: MA Experiment ID: 20001911 Result: Up-regulated in Transcription
  misc_feature: MA Experiment 20001911 PARAMETER Experiment Name: At_Drought_Reproduction_P Parameter: Age (day) Value: 40
  misc_feature: MA Experiment 20001911 PARAMETER Experiment Name: At_Drought_Reproduction_P Parameter: Organism Value: A. thaliana
  misc_feature: MA Experiment 20001911 PARAMETER Experiment Name: At_Drought_Reproduction_P Parameter: Plant Line Value: WS
  misc_feature: MA Experiment 20001911 PARAMETER Experiment Name: At_Drought_Reproduction_P Parameter: Timepoint (day) Value: 10
  misc_feature: MA Experiment 20001911 PARAMETER Experiment Name: At_Drought_Reproduction_P Parameter: Tissue Value: Flowers
  misc_feature: MA Experiment 20001911 PARAMETER Experiment Name: At_Drought_Reproduction_P Parameter: Treatment Value: Drought vs. No Drought
gtctccttctccgtgtccttctctctctctctctcgaagttcatcaatggctcttcatccacaccttcaagactccaagaatttcagagacttttgcggaatcgacggccagatttcgccggaattaggatttaaccgctcagagaatctccatgatcaatctcagcatcctccatatattcctccatttcatgttgctggttttgcaccgggaccggtggttcaaattgatggttctgatggtggtaatggagctgactttgagtggaactatggtcttggtcttgaaccaagacgtgagaggataaaggaacaagatttcttggaaaacaattctcagatatcttctattgattttttgcaagctcggtctgtatcaaccggattgggtctgtctcttgacaatgctcgtgtcgcttcttctgatggctctgcgttgttgtcgcttgttggagacgatattgatcgcgagttacagcggcaagatgcagatatcgataggtttctcaagattcagggggatcagttacggcatgctatcctcgacaagatcaagaggggtcaacagaaaacggtgtcactaatggaggaaaaagttgttcagaaactccgtgagaaagatgaggagctagagaggataaaccgaaagaacaaggaactcgaggtgcgaatggaacagctgacaatggaagctgaggcatggcagcaacgtgcaaagtacaacgagaatatgattgctgcactcaactacaatcttgaccgagctcaaggtcggccaagagatagcattgaaggatgtggagacagtgaagtagatgacacagcttcttgcttcaatgggagagacaacagcaacaataacacgaagacgatgatgatgtgcaggttttgtggagtgagagaaatgtgtatgttgttgttgccatgtaatcatatgtgtttgtgtaaggagtgtgagaggaagcttagctcttgtcctttgtgtcagtcttctaagtttctaggtatggaagtatacatgtgattgtgatttgactaaactaatgtctaattagttaacaaacgaactttatttgt

SEQ ID NO: 50284 - protein, 340 aa, Arabidopsis thaliana
  peptide (1)..(340): Ceres Seq. ID no. 12605758
  misc_feature (294)..(328): Pfam Name: Zinc finger, C3HC4 type (RING finger) Pfam Description: Zinc finger, C3HC4 type (RING finger)
  misc_feature (168)..(339): Homolog of NCBI NO: 6573749 NR Description: F20B24.9 [Arabidopsis thaliana]
  misc_feature (103)..(254): Homolog of NCBI NO: 29368618 NR Description: S-ribonuclease-binding protein SBP1-like protein
  misc_feature (110)..(339): Homolog of NCBI NO: 25404279 NR Description: hypothetical protein F8A5.13 [imported] -
  misc_feature (110)..(339): Homolog of NCBI NO: 15219772 NR Description: unknown protein; protein id: At1g60610.1
  misc_feature (98)..(339): Homolog of NCBI NO: 21536706 NR Description: S-ribonuclease binding protein SBP1, putative
  misc_feature (98)..(339): Homolog of NCBI NO: 15220181 NR Description: S-ribonuclease binding protein SBP1, putative
  misc_feature (94)..(340): Homolog of NCBI NO: 34902144 NR Description: unknown protein [Oryza sativa (japonica
  misc_feature (23)..(340): Homolog of NCBI NO: 40807658 NR Description: S-RNase-binding protein [Solanum chacoense]
  misc_feature (34)..(340): Homolog of NCBI NO: 6760451 NR Description: S-ribonuclease binding protein SBP1 [Petunia x
  misc_feature (16)..(340): Homolog of NCBI NO: 15220096 NR Description: S-ribonuclease binding protein SBP1, putative
SPSPCPSLSLSRSSSMALHPHLQDSKNFRDFCGIDGQISPELGFNRSENLHDQSQHPPYIPPFHVAGFAPGPVVQIDGSDGGNGADFEWNYGLGLEPRRERIKEQDFLENNSQISSIDFLQARSVSTGLGLSLDNARVASSDGSALLSLVGDDIDRELQRQDADIDRFLKIQGDQLRHAILDKIKRGQQKTVSLMEEKVVQKLREKDEELERINRKNKELEVRMEQLTMEAEAWQQRAKYNENMIAALNYNLDRAQGRPRDSIEGCGDSEVDDTASCFNGRDNSNNNTKTMMMCRFCGVREMCMLLLPCNHMCLCKECERKLSSCPLCQSSKFLGMEVYM

SEQ ID NO: 50285 - protein, 325 aa, Arabidopsis thaliana
  peptide (1)..(325): Ceres Seq. ID no. 12605759
  misc_feature (279)..(313): Pfam Name: Zinc finger, C3HC4 type (RING finger) Pfam Description: Zinc finger, C3HC4 type (RING finger)
  misc_feature (153)..(324): Homolog of NCBI NO: 6573749 NR Description: F20B24.9 [Arabidopsis thaliana]
  misc_feature (88)..(239): Homolog of NCBI NO: 29368618 NR Description: S-ribonuclease-binding protein SBP1-like protein
  misc_feature (95)..(324): Homolog of NCBI NO: 25404279 NR Description: hypothetical protein F8A5.13 [imported] -
  misc_feature (95)..(324): Homolog of NCBI NO: 15219772 NR Description: unknown protein; protein id: At1g60610.1
  misc_feature (83)..(324): Homolog of NCBI NO: 21536706 NR Description: S-ribonuclease binding protein SBP1, putative
  misc_feature (83)..(324): Homolog of NCBI NO: 15220181 NR Description: S-ribonuclease binding protein SBP1, putative
  misc_feature (79)..(325): Homolog of NCBI NO: 34902144 NR Description: unknown protein [Oryza sativa (japonica
  misc_feature (8)..(325): Homolog of NCBI NO: 40807658 NR Description: S-RNase-binding protein [Solanum chacoense]
  misc_feature (19)..(325): Homolog of NCBI NO: 6760451 NR Description: S-ribonuclease binding protein SBP1 [Petunia x
  misc_feature (1)..(325): Homolog of NCBI NO: 15220096 NR Description: S-ribonuclease binding protein SBP1, putative
MALHPHLQDSKNFRDFCGIDGQISPELGFNRSENLHDQSQHPPYIPPFHVAGFAPGPVVQIDGSDGGNGADFEWNYGLGLEPRRERIKEQDFLENNSQISSIDFLQARSVSTGLGLSLDNARVASSDGSALLSLVGDDIDRELQRQDADIDRFLKIQGDQLRHAILDKIKRGQQKTVSLMEEKVVQKLREKDEELERINRKNKELEVRMEQLTMEAEAWQQRAKYNENMIAALNYNLDRAQGRPRDSIEGCGDSEVDDTASCFNGRDNSNNNTKTMMMCRFCGVREMCMLLLPCNHMCLCKECERKLSSCPLCQSSKFLGMEVYM

SEQ ID NO: 50286 - DNA, 1893 bp, Arabidopsis thaliana
  misc_feature (1)..(1893): Ceres Seq. ID no. 13588159
  misc_feature: MA Experiment ID: 20000265 Result: Up-regulated in Transcription
  misc_feature: MA Experiment 20000265 PARAMETER Experiment Name: At_Open_Flower_P Parameter: Age (day) Value: 21
  misc_feature: MA Experiment 20000265 PARAMETER Experiment Name: At_Open_Flower_P Parameter: Plant Line Value: WS
  misc_feature: MA Experiment 20000265 PARAMETER Experiment Name: At_Open_Flower_P Parameter: Tissue Value: Closed Flower vs. Whole Plant
  misc_feature: MA Experiment ID: 20001910 Result: Down-regulated in Transcription
  misc_feature: MA Experiment 20001910 PARAMETER Experiment Name: At_Drought_Reproduction_P Parameter: Age (day) Value: 37
  misc_feature: MA Experiment 20001910 PARAMETER Experiment Name: At_Drought_Reproduction_P Parameter: Organism Value: A. thaliana
  misc_feature: MA Experiment 20001910 PARAMETER Experiment Name: At_Drought_Reproduction_P Parameter: Plant Line Value: WS
  misc_feature: MA Experiment 20001910 PARAMETER Experiment Name: At_Drought_Reproduction_P Parameter: Timepoint (day) Value: 7
  misc_feature: MA Experiment 20001910 PARAMETER Experiment Name: At_Drought_Reproduction_P Parameter: Tissue Value: Flowers
  misc_feature: MA Experiment 20001910 PARAMETER Experiment Name: At_Drought_Reproduction_P Parameter: Treatment Value: Drought vs. No Drought
atggagagtaatatgcaaaacttgttggagaaattgaggcctcttgtgggtgcaagggcttgggattattgtgttctttggagactaaacgaagaccaaaggtttgtgaagtggatgggatgttgttgtggtgggacagaactcatagcggagaatggaacagaagagtttagctacggaggttgtagggatgttatgtttcatcatcctcggaccaaatcttgtgaatttctttcccatcttccagcttccatacctcttgattccgggatatatgcggagactcttctgactaaccagactggttggttgagtgagagctcagaaccaagttttatgcaggaaacaatctgtactagggttttgattcctataccgggaggactagtggagctctttgcgaccagacatgtcgctgaagatcagaacgtggtggattttgtaatgggacattgcaacatgttgatggacgattctgtaacgataaacatgatggtagcagacgaggtcgaatcgaagccgtacgggatgttatccggtgacatccagcaaaagggttccaaagaagaagatatgatgaatctcccttcgtcttacgatatctctgctgatcagatccgactcaatttcttgcctcagatgagtgattacgagacacaacacttgaagatgaagagtgattatcatcatcaagccttggggtatctcccagagaatggtaacaaggaaatgatgggtatgaacccatttaacacggtggaagaagatgggattccagtgattggagagcctagcttgcttgtgaatgaacagcaagttgttaacgataaggatatgaatgagaacggtagggtggattcagggtcggattgcagcgaccagattgatgatgaagatgatccaaagtacaagaagaagtcaggaaaaggatctcaagccaagaacctgatggctgagagacggaggaggaagaagctaaacgataggctttatgctctccggtcgcttgttcccaggataaccaagttggacagggcgtcgattcttggcgatgcaatcaactacgttaaggagttgcagaatgaggcaaaggagcttcaagacgagcttgaagagaactcagagactgaggatggatctaataggccacaaggagggatgagcctgaacgggacagtggtcactgggtttcacccggggctttcatgtaactccaacgttcctagcgtgaagcaagatgttgatcttgagaattccaatgataaaggacaagaaatggagccacaggtggacgtggctcagttagatggcagagagtttttcgtaaaggtgatttgcgaatacaaaccaggaggcttcacaaggctaatggaggcactggattctcttggactagaagtcacaaatgctaacacgactcgctacctcagcctggtctccaatgtcttcaaagtcgagaaaaatgataacgagatggtccaagctgaacacgtaaggaactcgttgctggaaataacccggaacacatctagaggatggcaagatgatcagatggctacaggctctatgcaaaacgaaaagaacgaagttgattatcaacactatgatgatcaccagcatcacaatggtcatcatcacccatttgatcaccagatgaatcagagcgctcatcatcatcaccaccaccaacacatcaaccattaccacaaccaataaggaccaattccccaaagctataaagatgtctgctttacaagcaaaagaaacattctgcatcaacaaactttgaagatcttttcatttcaagatatataaggataaaaggaatgtcagttcgagaacagttcctgtatccaataccaggaataaaccaaagcgaaacaactttcccct

SEQ ID NO: 50287 - protein, 571 aa, Arabidopsis thaliana
  peptide (1)..(571): Ceres Seq. ID no. 15220853
  misc_feature (313)..(360): Pfam Name: Helix-loop-helix DNA-binding domain Pfam Description: Helix-loop-helix DNA-binding domain
  misc_feature (263)..(504): Homolog of NCBI NO: 25513489 NR Description: F13K23.12 protein - Arabidopsis thaliana
  misc_feature (309)..(503): Homolog of NCBI NO: 34907076 NR Description: OSJNBa0093F16.27 [Oryza sativa (japonica
  misc_feature (240)..(504): Homolog of NCBI NO: 22331357 NR Description: bHLH protein family [Arabidopsis thaliana]
  misc_feature (295)..(486): Homolog of NCBI NO: 5091557 NR Description: T10O24.26 [Arabidopsis thaliana]
  misc_feature (6)..(198): Homolog of NCBI NO: 5091557 NR Description: T10O24.26 [Arabidopsis thaliana]
  misc_feature (419)..(486): Homolog of NCBI NO: 15218590 NR Description: bHLH protein [Arabidopsis thaliana]
  misc_feature (295)..(377): Homolog of NCBI NO: 15218590 NR Description: bHLH protein [Arabidopsis thaliana]
  misc_feature (6)..(198): Homolog of NCBI NO: 15218590 NR Description: bHLH protein [Arabidopsis thaliana]
  misc_feature (138)..(571): Homolog of NCBI NO: 25411751 NR Description: bHLH transcription factor [imported] -
  misc_feature (5)..(571): Homolog of NCBI NO: 27650307 NR Description: bHLH transcription factor [Brassica napus]
MESNMQNLLEKLRPLVGARAWDYCVLWRLNEDQRFVKWMGCCCGGTELIAENGTEEFSYGGCRDVMFHHPRTKSCEFLSHLPASIPLDSGIYAETLLTNQTGWLSESSEPSFMQETICTRVLIPIPGGLVELFATRHVAEDQNVVDFVMGHCNMLMDDSVTINMMVADEVESKPYGMLSGDIQQKGSKEEDMMNLPSSYDISADQIRLNFLPQMSDYETQHLKMKSDYHHQALGYLPENGNKEMMGMNPFNTVEEDGIPVIGEPSLLVNEQQVVNDKDMNENGRVDSGSDCSDQIDDEDDPKYKKKSGKGSQAKNLMAERRRRKKLNDRLYALRSLVPRITKLDRASILGDAINYVKELQNEAKELQDELEENSETEDGSNRPQGGMSLNGTVVTGFHPGLSCNSNVPSVKQDVDLENSNDKGQEMEPQVDVAQLDGREFFVKVICEYKPGGFTRLMEALDSLGLEVTNANTTRYLSLVSNVFKVEKNDNEMVQAEHVRNSLLEITRNTSRGWQDDQMATGSMQNEKNEVDYQHYDDHQHHNGHHHPFDHQMNQSAHHHHHHQHINHYHNQ

SEQ ID NO: 50288 - protein, 567 aa, Arabidopsis thaliana
  peptide (1)..(567): Ceres Seq. ID no. 15220854
  misc_feature (309)..(356): Pfam Name: Helix-loop-helix DNA-binding domain Pfam Description: Helix-loop-helix DNA-binding domain
  misc_feature (259)..(500): Homolog of NCBI NO: 25513489 NR Description: F13K23.12 protein - Arabidopsis thaliana
  misc_feature (305)..(499): Homolog of NCBI NO: 34907076 NR Description: OSJNBa0093F16.27 [Oryza sativa (japonica
  misc_feature (236)..(500): Homolog of NCBI NO: 22331357 NR Description: bHLH protein family [Arabidopsis thaliana]
  misc_feature (291)..(482): Homolog of NCBI NO: 5091557 NR Description: T10O24.26 [Arabidopsis thaliana]
  misc_feature (2)..(194): Homolog of NCBI NO: 5091557 NR Description: T10O24.26 [Arabidopsis thaliana]
  misc_feature (415)..(482): Homolog of NCBI NO: 15218590 NR Description: bHLH protein [Arabidopsis thaliana]
  misc_feature (291)..(373): Homolog of NCBI NO: 15218590 NR Description: bHLH protein [Arabidopsis thaliana]
  misc_feature (2)..(194): Homolog of NCBI NO: 15218590 NR Description: bHLH protein [Arabidopsis thaliana]
  misc_feature (134)..(567): Homolog of NCBI NO: 25411751 NR Description: bHLH transcription factor [imported] -
  misc_feature (1)..(567): Homolog of NCBI NO: 27650307 NR Description: bHLH transcription factor [Brassica napus]
MQNLLEKLRPLVGARAWDYCVLWRLNEDQRFVKWMGCCCGGTELIAENGTEEFSYGGCRDVMFHHPRTKSCEFLSHLPASIPLDSGIYAETLLTNQTGWLSESSEPSFMQETICTRVLIPIPGGLVELFATRHVAEDQNVVDFVMGHCNMLMDDSVTINMMVADEVESKPYGMLSGDIQQKGSKEEDMMNLPSSYDISADQIRLNFLPQMSDYETQHLKMKSDYHHQALGYLPENGNKEMMGMNPFNTVEEDGIPVIGEPSLLVNEQQVVNDKDMNENGRVDSGSDCSDQIDDEDDPKYKKKSGKGSQAKNLMAERRRRKKLNDRLYALRSLVPRITKLDRASILGDAINYVKELQNEAKELQDELEENSETEDGSNRPQGGMSLNGTVVTGFHPGLSCNSNVPSVKQDVDLENSNDKGQEMEPQVDVAQLDGREFFVKVICEYKPGGFTRLMEALDSLGLEVTNANTTRYLSLVSNVFKVEKNDNEMVQAEHVRNSLLEITRNTSRGWQDDQMATGSMQNEKNEVDYQHYDDHQHHNGHHHPFDHQMNQSAHHHHHHQHINHYHNQ

SEQ ID NO: 50289 - protein, 533 aa, Arabidopsis thaliana
  peptide (1)..(533): Ceres Seq. ID no. 15220855
  misc_feature (275)..(322): Pfam Name: Helix-loop-helix DNA-binding domain Pfam Description: Helix-loop-helix DNA-binding domain
  misc_feature (225)..(466): Homolog of NCBI NO: 25513489 NR Description: F13K23.12 protein - Arabidopsis thaliana
  misc_feature (271)..(465): Homolog of NCBI NO: 34907076 NR Description: OSJNBa0093F16.27 [Oryza sativa (japonica
  misc_feature (202)..(466): Homolog of NCBI NO: 22331357 NR Description: bHLH protein family [Arabidopsis thaliana]
  misc_feature (257)..(448): Homolog of NCBI NO: 5091557 NR Description: T10O24.26 [Arabidopsis thaliana]
  misc_feature (1)..(160): Homolog of NCBI NO: 5091557 NR Description: T10O24.26 [Arabidopsis thaliana]
  misc_feature (381)..(448): Homolog of NCBI NO: 15218590 NR Description: bHLH protein [Arabidopsis thaliana]
  misc_feature (257)..(339): Homolog of NCBI NO: 15218590 NR Description: bHLH protein [Arabidopsis thaliana]
  misc_feature (1)..(160): Homolog of NCBI NO: 15218590 NR Description: bHLH protein [Arabidopsis thaliana]
  misc_feature (100)..(533): Homolog of NCBI NO: 25411751 NR Description: bHLH transcription factor [imported] -
  misc_feature (1)..(533): Homolog of NCBI NO: 27650307 NR Description: bHLH transcription factor [Brassica napus]
MGCCCGGTELIAENGTEEFSYGGCRDVMFHHPRTKSCEFLSHLPASIPLDSGIYAETLLTNQTGWLSESSEPSFMQETICTRVLIPIPGGLVELFATRHVAEDQNVVDFVMGHCNMLMDDSVTINMMVADEVESKPYGMLSGDIQQKGSKEEDMMNLPSSYDISADQIRLNFLPQMSDYETQHLKMKSDYHHQALGYLPENGNKEMMGMNPFNTVEEDGIPVIGEPSLLVNEQQVVNDKDMNENGRVDSGSDCSDQIDDEDDPKYKKKSGKGSQAKNLMAERRRRKKLNDRLYALRSLVPRITKLDRASILGDAINYVKELQNEAKELQDELEENSETEDGSNRPQGGMSLNGTVVTGFHPGLSCNSNVPSVKQDVDLENSNDKGQEMEPQVDVAQLDGREFFVKVICEYKPGGFTRLMEALDSLGLEVTNANTTRYLSLVSNVFKVEKNDNEMVQAEHVRNSLLEITRNTSRGWQDDQMATGSMQNEKNEVDYQHYDDHQHHNGHHHPFDHQMNQSAHHHHHHQHINHYHNQ

SEQ ID NO: 50290 - DNA, 2104 bp, Arabidopsis thaliana
  misc_feature (1)..(2104): Ceres Seq. ID no. 13588160
  misc_feature: MA Experiment ID: 20000173 Result: Down-regulated in Transcription
  misc_feature: MA Experiment 20000173 PARAMETER Experiment Name: At_42deg_Heat_P Parameter: Age (day) Value: 14
  misc_feature: MA Experiment 20000173 PARAMETER Experiment Name: At_42deg_Heat_P Parameter: Organism Value: A. thaliana
  misc_feature: MA Experiment 20000173 PARAMETER Experiment Name: At_42deg_Heat_P Parameter: Plant Line Value: WS
  misc_feature: MA Experiment 20000173 PARAMETER Experiment Name: At_42deg_Heat_P Parameter: Temperature (deg C) Value: 42 vs. 22
  misc_feature: MA Experiment 20000173 PARAMETER Experiment Name: At_42deg_Heat_P Parameter: Timepoint (hr) Value: 6
  misc_feature: MA Experiment 20000173 PARAMETER Experiment Name: At_42deg_Heat_P Parameter: Tissue Value: Aerial
  misc_feature: MA Experiment ID: 20000794 Result: Up-regulated in Transcription
  misc_feature: MA Experiment 20000794 PARAMETER Experiment Name: At_Petals_P Parameter: Age (day) Value: 23-25 days
  misc_feature: MA Experiment 20000794 PARAMETER Experiment Name: At_Petals_P Parameter: Plant Line Value: WS
  misc_feature: MA Experiment 20000794 PARAMETER Experiment Name: At_Petals_P Parameter: Tissue Value: Petals vs. Whole plant
  misc_feature: MA Experiment ID: 20001560 Result: Down-regulated in Transcription
  misc_feature: MA Experiment 20001560 PARAMETER Experiment Name: At_Drought_Soil_Dry_P Parameter: Age (day) Value: 28
  misc_feature: MA Experiment 20001560 PARAMETER Experiment Name: At_Drought_Soil_Dry_P Parameter: Organism Value: A. thaliana
  misc_feature: MA Experiment 20001560 PARAMETER Experiment Name: At_Drought_Soil_Dry_P Parameter: Plant Line Value: WS
  misc_feature: MA Experiment 20001560 PARAMETER Experiment Name: At_Drought_Soil_Dry_P Parameter: Post Timepoint (hr) Value: None
  misc_feature: MA Experiment 20001560 PARAMETER Experiment Name: At_Drought_Soil_Dry_P Parameter: Post-Treatment Value: None
  misc_feature: MA Experiment 20001560 PARAMETER Experiment Name: At_Drought_Soil_Dry_P Parameter: Timepoint (day) Value: 14
  misc_feature: MA Experiment 20001560 PARAMETER Experiment Name: At_Drought_Soil_Dry_P Parameter: Treatment Value: Drought vs. No Drought
aggagaagaacatggtctccaactccgaaggacaaaaccgagagacgcggcgagaaagacggtgacttgacgtggtctatgggtggtggtgggaatctcgtcgacggtgttcgtcgatggctttttcagcgaccttcttcttcttcttcttcttcttcttccaacaataataataataatcacgaacaacccattttcaattcttcttctttctcttcttcctctaaccccaatcattccgctaactctggagagcttattattgaagaagatctcgatttctctggtctaacgcttattaacgttcctaaacgtaatcatttacctatggatcctcacaagaagggtgaaactgaattcttcacggagtatggagaagctaacaggtatcagattcaagaggttgttggcaaaggaagttatggtgttgtggcttctgctgttgactcacacactggagagagagttgcgatcaagaagatcaacgatgtgtttgagcatgtctccgatgctactaggattctcagagagatcaaattgcttcggttgcttcgtcatcctgatgttgtggagattaaacacatcatgttacctccttctcgcagagaattccgcgatatttatgttgtctttgagttgatggaatctgatcttcatcaagtgatcaaggcgaatgatgatttgactcctgagcattatcagtttttcttgtaccagcttcttcgtggtctgaaatatgttcacgcagctaatgtgtttcatcgggatttgaaaccgaagaacattctagctaatgctgattgcaaattgaagatctgtgattttgggctggctcgcgtttcttttaacgatgccccaaccgctatattttggactgattatgtagctactcggtggtatcgtgcccctgaactctgtggatcgtttttctccaaatatacccctgcgattgatatctggagtgtcggttgcatttttgcggaaatgcttttgggtaagcctttgtttcccgggaaaaacgttgtgcaccaattggatctaatgactgactttcttggtactccacctcctgagtcaatatcaaggattagaaatgaaaaggcgaggagatatcttagcagcatgaggaaaaaacaaccagtccctttctctcataaattccctaaagctgatcctttggctctccgccttctggaacgcctgcttgcctttgatccgaaagatcgtgcatcagctgaagatgcactagctgatccatatttcagtggtttgtcaaattcagagcgtgaaccaacaacacagccaatttcaaagcttgaatttgactttgagagaaagaagttagttaaagatgatgtcagagaattaatttaccgagagatattggaatatcatcctcagatgttggaggaataccttcgtggtggtgatcagcttagctttatgtacccaagtggggtagaccgatttaaaaggcaatttgctcatcttgaagaaaatcaaggtaaaccaggagcagcaggaggaggaagaagtactgcacttcacagacatcatgcttccttgccaagagagagagttcctgctccaaatggtgaaactgcagaagaaagcagtgatgttgagagaagagcagcagctgctgtggcttcaaccttggaatccgaggaagcagacaatggaggaggttacagtgctcgtaacctcatgaagagtgcaagcatcagcggttctaaatgcattggtgtccaatctaaaactgacaaagaggataccatagctgaggaagaagataatgaaacagttgcagagcttactgataaagttgcttctcttcacaattcttaaaaatgatttagttattttttttcttttcttttcttttttcacgaaagttttctggtgaaaagaaattggtttctccattcatccacatctatcttcgtggttgggtttgatttgttgtatttaatagttttgggggtttgatgaaactttaaataaaaacatcgatctccatgtaatttttttgtttctctcttttctttaaacactcatattttgaaattatttatatactattcagtattcactttgcttcagt

SEQ ID NO: 50291 - protein, 615 aa, Arabidopsis thaliana
  peptide (1)..(615): Ceres Seq. ID no. 15220856
  misc_feature (130)..(421): Pfam Name: Protein kinase domain Pfam Description: Protein kinase domain
  misc_feature (27)..(462): Homolog of NCBI NO: 18410420 NR Description: mitogen-activated protein kinase (MAPK), putative
  misc_feature (119)..(614): Homolog of NCBI NO: 5815410 NR Description: blast and wounding induced mitogen-activated
  misc_feature (119)..(614): Homolog of NCBI NO: 6689924 NR Description: MAP kinase homolog [Oryza sativa]
  misc_feature (68)..(613): Homolog of NCBI NO: 38174819 NR Description: putative MAP kinase [Hordeum vulgare subsp.
  misc_feature (110)..(613): Homolog of NCBI NO: 7106544 NR Description: ATMPK9 [Arabidopsis thaliana]
  misc_feature (110)..(613): Homolog of NCBI NO: 18401750 NR Description: mitogen-activated protein kinase (MAPK), putative
  misc_feature (81)..(613): Homolog of NCBI NO: 9294059 NR Description: MAP kinase [Arabidopsis thaliana]
  misc_feature (27)..(615): Homolog of NCBI NO: 25406284 NR Description: probable MAP kinase F25P22.9 [imported] -
  misc_feature (27)..(557): Homolog of NCBI NO: 7106542 NR Description: ATMPK8 [Arabidopsis thaliana]
  misc_feature (27)..(615): Homolog of NCBI NO: 8671782 NR Description: T10O22.12 [Arabidopsis thaliana]
RRRTWSPTPKDKTERRGEKDGDLTWSMGGGGNLVDGVRRWLFQRPSSSSSSSSSNNNNNNHEQPIFNSSSFSSSSNPNHSANSGELIIEEDLDFSGLTLINVPKRNHLPMDPHKKGETEFFTEYGEANRYQIQEVVGKGSYGVVASAVDSHTGERVAIKKINDVFEHVSDATRILREIKLLRLLRHPDVVEIKHIMLPPSRREFRDIYVVFELMESDLHQVIKANDDLTPEHYQFFLYQLLRGLKYVHAANVFHRDLKPKNILANADCKLKICDFGLARVSFNDAPTAIFWTDYVATRWYRAPELCGSFFSKYTPAIDIWSVGCIFAEMLLGKPLFPGKNVVHQLDLMTDFLGTPPPESISRIRNEKARRYLSSMRKKQPVPFSHKFPKADPLALRLLERLLAFDPKDRASAEDALADPYFSGLSNSEREPTTQPISKLEFDFERKKLVKDDVRELIYREILEYHPQMLEEYLRGGDQLSFMYPSGVDRFKRQFAHLEENQGKPGAAGGGRSTALHRHHASLPRERVPAPNGETAEESSDVERRAAAAVASTLESEEADNGGGYSARNLMKSASISGSKCIGVQSKTDKEDTIAEEEDNETVAELTDKVASLHNS

SEQ ID NO: 50292 - protein, 589 aa, Arabidopsis thaliana
  peptide (1)..(589): Ceres Seq. ID no. 15220857
  misc_feature (104)..(395): Pfam Name: Protein kinase domain Pfam Description: Protein kinase domain
  misc_feature (1)..(436): Homolog of NCBI NO: 18410420 NR Description: mitogen-activated protein kinase (MAPK), putative
  misc_feature (93)..(588): Homolog of NCBI NO: 5815410 NR Description: blast and wounding induced mitogen-activated
  misc_feature (93)..(588): Homolog of NCBI NO: 6689924 NR Description: MAP kinase homolog [Oryza sativa]
  misc_feature (42)..(587): Homolog of NCBI NO: 38174819 NR Description: putative MAP kinase [Hordeum vulgare subsp.
  misc_feature (84)..(587): Homolog of NCBI NO: 7106544 NR Description: ATMPK9 [Arabidopsis thaliana]
  misc_feature (84)..(587): Homolog of NCBI NO: 18401750 NR Description: mitogen-activated protein kinase (MAPK), putative
  misc_feature (55)..(587): Homolog of NCBI NO: 9294059 NR Description: MAP kinase [Arabidopsis thaliana]
  misc_feature (1)..(589): Homolog of NCBI NO: 25406284 NR Description: probable MAP kinase F25P22.9 [imported] -
  misc_feature (1)..(531): Homolog of NCBI NO: 7106542 NR Description: ATMPK8 [Arabidopsis thaliana]
  misc_feature (1)..(589): Homolog of NCBI NO: 8671782 NR Description: T10O22.12 [Arabidopsis thaliana]
MGGGGNLVDGVRRWLFQRPSSSSSSSSSNNNNNNHEQPIFNSSSFSSSSNPNHSANSGELIIEEDLDFSGLTLINVPKRNHLPMDPHKKGETEFFTEYGEANRYQIQEVVGKGSYGVVASAVDSHTGERVAIKKINDVFEHVSDATRILREIKLLRLLRHPDVVEIKHIMLPPSRREFRDIYVVFELMESDLHQVIKANDDLTPEHYQFFLYQLLRGLKYVHAANVFHRDLKPKNILANADCKLKICDFGLARVSFNDAPTAIFWTDYVATRWYRAPELCGSFFSKYTPAIDIWSVGCIFAEMLLGKPLFPGKNVVHQLDLMTDFLGTPPPESISRIRNEKARRYLSSMRKKQPVPFSHKFPKADPLALRLLERLLAFDPKDRASAEDALADPYFSGLSNSEREPTTQPISKLEFDFERKKLVKDDVRELIYREILEYHPQMLEEYLRGGDQLSFMYPSGVDRFKRQFAHLEENQGKPGAAGGGRSTALHRHHASLPRERVPAPNGETAEESSDVERRAAAAVASTLESEEADNGGGYSARNLMKSASISGSKCIGVQSKTDKEDTIAEEEDNETVAELTDKVASLHNS

SEQ ID NO: 50293 - protein, 506 aa, Arabidopsis thaliana
  peptide (1)..(506): Ceres Seq. ID no. 15220858
  misc_feature (21)..(312): Pfam Name: Protein kinase domain Pfam Description: Protein kinase domain
  misc_feature (1)..(353): Homolog of NCBI NO: 18410420 NR Description: mitogen-activated protein kinase (MAPK), putative
  misc_feature (10)..(505): Homolog of NCBI NO: 5815410 NR Description: blast and wounding induced mitogen-activated
  misc_feature (10)..(505): Homolog of NCBI NO: 6689924 NR Description: MAP kinase homolog [Oryza sativa]
  misc_feature (1)..(504): Homolog of NCBI NO: 38174819 NR Description: putative MAP kinase [Hordeum vulgare subsp.
  misc_feature (1)..(504): Homolog of NCBI NO: 7106544 NR Description: ATMPK9 [Arabidopsis thaliana]
  misc_feature (1)..(504): Homolog of NCBI NO: 18401750 NR Description: mitogen-activated protein kinase (MAPK), putative
  misc_feature (1)..(504): Homolog of NCBI NO: 9294059 NR Description: MAP kinase [Arabidopsis thaliana]
  misc_feature (1)..(506): Homolog of NCBI NO: 25406284 NR Description: probable MAP kinase F25P22.9 [imported] -
  misc_feature (1)..(448): Homolog of NCBI NO: 7106542 NR Description: ATMPK8 [Arabidopsis thaliana]
  misc_feature (1)..(506): Homolog of NCBI NO: 8671782 NR Description: T10O22.12 [Arabidopsis thaliana]
MDPHKKGETEFFTEYGEANRYQIQEVVGKGSYGVVASAVDSHTGERVAIKKINDVFEHVSDATRILREIKLLRLLRHPDVVEIKHIMLPPSRREFRDIYVVFELMESDLHQVIKANDDLTPEHYQFFLYQLLRGLKYVHAANVFHRDLKPKNILANADCKLKICDFGLARVSFNDAPTAIFWTDYVATRWYRAPELCGSFFSKYTPAIDIWSVGCIFAEMLLGKPLFPGKNVVHQLDLMTDFLGTPPPESISRIRNEKARRYLSSMRKKQPVPFSHKFPKADPLALRLLERLLAFDPKDRASAEDALADPYFSGLSNSEREPTTQPISKLEFDFERKKLVKDDVRELIYREILEYHPQMLEEYLRGGDQLSFMYPSGVDRFKRQFAHLEENQGKPGAAGGGRSTALHRHHASLPRERVPAPNGETAEESSDVERRAAAAVASTLESEEADNGGGYSARNLMKSASISGSKCIGVQSKTDKEDTIAEEEDNETVAELTDKVASLHNS

SEQ ID NO: 50294 - DNA, 1728 bp, Arabidopsis thaliana
  misc_feature (1)..(1728): Ceres Seq. ID no. 13588930
  misc_feature: MA Experiment ID: 20000166 Result: Up-regulated in Transcription
  misc_feature: MA Experiment 20000166 PARAMETER Experiment Name: At_100uM_ABA_P Parameter: Age (day) Value: 14
  misc_feature: MA Experiment 20000166 PARAMETER Experiment Name: At_100uM_ABA_P Parameter: Organism Value: A. thaliana
  misc_feature: MA Experiment 20000166 PARAMETER Experiment Name: At_100uM_ABA_P Parameter: Plant Line Value: WS
  misc_feature: MA Experiment 20000166 PARAMETER Experiment Name: At_100uM_ABA_P Parameter: Timepoint (hr) Value: 1
  misc_feature: MA Experiment 20000166 PARAMETER Experiment Name: At_100uM_ABA_P Parameter: Tissue Value: Aerial
  misc_feature: MA Experiment 20000166 PARAMETER Experiment Name: At_100uM_ABA_P Parameter: Treatment Value: 100uM ABA vs. No Treatment
  misc_feature: MA Experiment ID: 20000169 Result: Up-regulated in Transcription
  misc_feature: MA Experiment 20000169 PARAMETER Experiment Name: At_100uM_ABA_P Parameter: Age (day) Value: 14
  misc_feature: MA Experiment 20000169 PARAMETER Experiment Name: At_100uM_ABA_P Parameter: Organism Value: A. thaliana
  misc_feature: MA Experiment 20000169 PARAMETER Experiment Name: At_100uM_ABA_P Parameter: Plant Line Value: WS
  misc_feature: MA Experiment 20000169 PARAMETER Experiment Name: At_100uM_ABA_P Parameter: Timepoint (hr) Value: 6
  misc_feature: MA Experiment 20000169 PARAMETER Experiment Name: At_100uM_ABA_P Parameter: Tissue Value: Aerial
  misc_feature: MA Experiment 20000169 PARAMETER Experiment Name: At_100uM_ABA_P Parameter: Treatment Value: 100uM ABA vs. No Treatment
  misc_feature: MA Experiment ID: 20000171 Result: Down-regulated in Transcription
  misc_feature: MA Experiment 20000171 PARAMETER Experiment Name: At_42deg_Heat_P Parameter: Age (day) Value: 14
  misc_feature: MA Experiment 20000171 PARAMETER Experiment Name: At_42deg_Heat_P Parameter: Organism Value: A. thaliana
  misc_feature: MA Experiment 20000171 PARAMETER Experiment Name: At_42deg_Heat_P Parameter: Plant Line Value: WS
  misc_feature: MA Experiment 20000171 PARAMETER Experiment Name: At_42deg_Heat_P Parameter: Temperature (deg C) Value: 42 vs. 22
  misc_feature: MA Experiment 20000171 PARAMETER Experiment Name: At_42deg_Heat_P Parameter: Timepoint (hr) Value: 1
  misc_feature: MA Experiment 20000171 PARAMETER Experiment Name: At_42deg_Heat_P Parameter: Tissue Value: Aerial
  misc_feature: MA Experiment ID: 20000173 Result: Down-regulated in Transcription
  misc_feature: MA Experiment 20000173 PARAMETER Experiment Name: At_42deg_Heat_P Parameter: Age (day) Value: 14
  misc_feature: MA Experiment 20000173 PARAMETER Experiment Name: At_42deg_Heat_P Parameter: Organism Value: A. thaliana
  misc_feature: MA Experiment 20000173 PARAMETER Experiment Name: At_42deg_Heat_P Parameter: Plant Line Value: WS
  misc_feature: MA Experiment 20000173 PARAMETER Experiment Name: At_42deg_Heat_P Parameter: Temperature (deg C) Value: 42 vs. 22
  misc_feature: MA Experiment 20000173 PARAMETER Experiment Name: At_42deg_Heat_P Parameter: Timepoint (hr) Value: 6
  misc_feature: MA Experiment 20000173 PARAMETER Experiment Name: At_42deg_Heat_P Parameter: Tissue Value: Aerial
  misc_feature: MA Experiment ID: 20000180 Result: Up-regulated in Transcription
  misc_feature: MA Experiment 20000180 PARAMETER Experiment Name: At_Germinating_Seeds_P Parameter: Age (hr) Value: 24 vs. 0
  misc_feature: MA Experiment 20000180 PARAMETER Experiment Name: At_Germinating_Seeds_P Parameter: Tissue Value: Germinating Seeds
  misc_feature: MA Experiment ID: 20000264 Result: Down-regulated in Transcription
  misc_feature: MA Experiment 20000264 PARAMETER Experiment Name: At_Open_Flower_P Parameter: Age (day) Value: 21
  misc_feature: MA Experiment 20000264 PARAMETER Experiment Name: At_Open_Flower_P Parameter: Plant Line Value: WS
  misc_feature: MA Experiment 20000264 PARAMETER Experiment Name: At_Open_Flower_P Parameter: Tissue Value: Open Flower vs. Whole Plant
  misc_feature: MA Experiment ID: 20000267 Result: Up-regulated in Transcription
  misc_feature: MA Experiment 20000267 PARAMETER Experiment Name: At_Drought_P Parameter: Age (day) Value: 7
  misc_feature: MA Experiment 20000267 PARAMETER Experiment Name: At_Drought_P Parameter: Organism Value: A. thaliana
  misc_feature: MA Experiment 20000267 PARAMETER Experiment Name: At_Drought_P Parameter: Plant Line Value: WS
  misc_feature: MA Experiment 20000267 PARAMETER Experiment Name: At_Drought_P Parameter: Timepoint (hr) Value: 6
  misc_feature: MA Experiment 20000267 PARAMETER Experiment Name: At_Drought_P Parameter: Tissue Value: Whole Plant
  misc_feature: MA Experiment 20000267 PARAMETER Experiment Name: At_Drought_P Parameter: Treatment Value: Drought vs. No Drought
  misc_feature: MA Experiment ID: 20000286 Result: Down-regulated in Transcription
  misc_feature: MA Experiment 20000286 PARAMETER Experiment Name: At_Open_Flower_P Parameter: Age (day) Value: 21
  misc_feature: MA Experiment 20000286 PARAMETER Experiment Name: At_Open_Flower_P Parameter: Plant Line Value: WS
  misc_feature: MA Experiment 20000286 PARAMETER Experiment Name: At_Open_Flower_P Parameter: Tissue Value: Half Open vs. Whole Plant
  misc_feature: MA Experiment ID: 20000436 Result: Up-regulated in Transcription
  misc_feature: MA Experiment 20000436 PARAMETER Experiment Name: At_Drought_P Parameter: Age (day) Value: 7
  misc_feature: MA Experiment 20000436 PARAMETER Experiment Name: At_Drought_P Parameter: Organism Value: A. thaliana
  misc_feature: MA Experiment 20000436 PARAMETER Experiment Name: At_Drought_P Parameter: Plant Line Value: WS
  misc_feature: MA Experiment 20000436 PARAMETER Experiment Name: At_Drought_P Parameter: Timepoint (hr) Value: 12
  misc_feature: MA Experiment 20000436 PARAMETER Experiment Name: At_Drought_P Parameter: Tissue Value: Whole Plant
  misc_feature: MA Experiment 20000436 PARAMETER Experiment Name: At_Drought_P Parameter: Treatment Value: Drought vs. No Drought
  misc_feature: MA Experiment ID: 20000437 Result: Up-regulated in Transcription
  misc_feature: MA Experiment 20000437 PARAMETER Experiment Name: At_Drought_P Parameter: Age (day) Value: 8
  misc_feature: MA Experiment 20000437 PARAMETER Experiment Name: At_Drought_P Parameter: Organism Value: A. thaliana
  misc_feature: MA Experiment 20000437 PARAMETER Experiment Name: At_Drought_P Parameter: Plant Line Value: WS
  misc_feature: MA Experiment 20000437 PARAMETER Experiment Name: At_Drought_P Parameter: Timepoint (hr) Value: 24
  misc_feature: MA Experiment 20000437 PARAMETER Experiment Name: At_Drought_P Parameter: Tissue Value: Whole Plant
  misc_feature: MA Experiment 20000437 PARAMETER Experiment Name: At_Drought_P Parameter: Treatment Value: Drought vs. No Drought
  misc_feature: MA Experiment ID: 20000439 Result: Down-regulated in Transcription
  misc_feature: MA Experiment 20000439 PARAMETER Experiment Name: At_Roots__P Parameter: Age (day) Value: 14 vs. 21
  misc_feature: MA Experiment 20000439 PARAMETER Experiment Name: At_Roots__P Parameter: Organism Value: A. thaliana
  misc_feature: MA Experiment 20000439 PARAMETER Experiment Name: At_Roots__P Parameter: Tissue Value: Roots vs. Whole Plant
  misc_feature: MA Experiment ID: 20000453 Result: Up-regulated in Transcription
  misc_feature: MA Experiment 20000453 PARAMETER Experiment Name: At_100uM_ABA_P Parameter: Age (day) Value: 15
  misc_feature: MA Experiment 20000453 PARAMETER Experiment Name: At_100uM_ABA_P Parameter: Organism Value: A. thaliana
  misc_feature: MA Experiment 20000453 PARAMETER Experiment Name: At_100uM_ABA_P Parameter: Plant Line Value: WS
  misc_feature: MA Experiment 20000453 PARAMETER Experiment Name: At_100uM_ABA_P Parameter: Timepoint (hr) Value: 24
  misc_feature: MA Experiment 20000453 PARAMETER Experiment Name: At_100uM_ABA_P Parameter: Tissue Value: Aerial
  misc_feature: MA Experiment 20000453 PARAMETER Experiment Name: At_100uM_ABA_P Parameter: Treatment Value: 100uM ABA vs. No Treatment
  misc_feature: MA Experiment ID: 20000495 Result: Down-regulated in Transcription
  misc_feature: MA Experiment 20000495 PARAMETER Experiment Name: At_Guard_Cells_P Parameter: Harvest Date Value: 8/2/2002
  misc_feature: MA Experiment 20000495 PARAMETER Experiment Name: At_Guard_Cells_P Parameter: Organism Value: A. thaliana
  misc_feature: MA Experiment 20000495 PARAMETER Experiment Name: At_Guard_Cells_P Parameter: Tissue Value: Guard Cells vs. Leaves
  misc_feature: MA Experiment ID: 20000573 Result: Down-regulated in Transcription
  misc_feature: MA Experiment 20000573 PARAMETER Experiment Name: At_100uM_ABA_Mutants__P Parameter: Organism Value: A. thaliana
  misc_feature: MA Experiment 20000573 PARAMETER Experiment Name: At_100uM_ABA_Mutants__P Parameter: Plant Line Value: CS22 vs. Ler wt
  misc_feature: MA Experiment 20000573 PARAMETER Experiment Name: At_100uM_ABA_Mutants__P Parameter: Timepoint (hr) Value: N/A
  misc_feature: MA Experiment 20000573 PARAMETER Experiment Name: At_100uM_ABA_Mutants__P Parameter: Tissue Value: Whole Plant
  misc_feature: MA Experiment 20000573 PARAMETER Experiment Name: At_100uM_ABA_Mutants__P Parameter: Treatment Value: None
  misc_feature: MA Experiment ID: 20000794 Result: Down-regulated in Transcription
  misc_feature: MA Experiment 20000794 PARAMETER Experiment Name: At_Petals_P Parameter: Age (day) Value: 23-25 days
  misc_feature: MA Experiment 20000794 PARAMETER Experiment Name: At_Petals_P Parameter: Plant Line Value: WS
  misc_feature: MA Experiment 20000794 PARAMETER Experiment Name: At_Petals_P Parameter: Tissue Value: Petals vs. Whole plant
  misc_feature: MA Experiment ID: 20001247 Result: Up-regulated in Transcription
  misc_feature: MA Experiment 20001247 PARAMETER Experiment Name: At_Far-red-induction_P Parameter: Age (day) Value: 7
  misc_feature: MA Experiment 20001247 PARAMETER Experiment Name: At_Far-red-induction_P Parameter: Light Value: Far-red vs. White
  misc_feature: MA Experiment 20001247 PARAMETER Experiment Name: At_Far-red-induction_P Parameter: Organism Value: A. thaliana
  misc_feature: MA Experiment 20001247 PARAMETER Experiment Name: At_Far-red-induction_P Parameter: Plant Line Value: Columbia
  misc_feature: MA Experiment 20001247 PARAMETER Experiment Name: At_Far-red-induction_P Parameter: Timepoint (hr) Value: 1
  misc_feature: MA Experiment 20001247 PARAMETER Experiment Name: At_Far-red-induction_P Parameter: Tissue Value: Whole Plant
  misc_feature: MA Experiment ID: 20001248 Result: Down-regulated in Transcription
  misc_feature: MA Experiment 20001248 PARAMETER Experiment Name: At_Far-red-induction_P Parameter: Age (day) Value: 7
  misc_feature: MA Experiment 20001248 PARAMETER Experiment Name: At_Far-red-induction_P Parameter: Light Value: Far-red vs. White
  misc_feature: MA Experiment 20001248 PARAMETER Experiment Name: At_Far-red-induction_P Parameter: Organism Value: A. thaliana
  misc_feature: MA Experiment 20001248 PARAMETER Experiment Name: At_Far-red-induction_P Parameter: Plant Line Value: Columbia
  misc_feature: MA Experiment 20001248 PARAMETER Experiment Name: At_Far-red-induction_P Parameter: Timepoint (hr) Value: 4
  misc_feature: MA Experiment 20001248 PARAMETER Experiment Name: At_Far-red-induction_P Parameter: Tissue Value: Whole Plant
  misc_feature: MA Experiment ID: 20001554 Result: Up-regulated in Transcription
  misc_feature: MA Experiment 20001554 PARAMETER Experiment Name: At_Drought_Soil_Dry_P Parameter: Age (day) Value: 21
  misc_feature: MA Experiment 20001554 PARAMETER Experiment Name: At_Drought_Soil_Dry_P Parameter: Organism Value: A. thaliana
  misc_feature: MA Experiment 20001554 PARAMETER Experiment Name: At_Drought_Soil_Dry_P Parameter: Plant Line Value: WS
  misc_feature: MA Experiment 20001554 PARAMETER Experiment Name: At_Drought_Soil_Dry_P Parameter: Post Timepoint (hr) Value: None
  misc_feature: MA Experiment 20001554 PARAMETER Experiment Name: At_Drought_Soil_Dry_P Parameter: Post-Treatment Value: None
  misc_feature: MA Experiment 20001554 PARAMETER Experiment Name: At_Drought_Soil_Dry_P Parameter: Timepoint (day) Value: 7
  misc_feature: MA Experiment 20001554 PARAMETER Experiment Name: At_Drought_Soil_Dry_P Parameter: Treatment Value: Drought vs. No Drought
  misc_feature: MA Experiment ID: 20001555 Result: Up-regulated in Transcription
  misc_feature: MA Experiment 20001555 PARAMETER Experiment Name: At_Drought_Soil_Dry_P Parameter: Age (day) Value: 24
  misc_feature: MA Experiment 20001555 PARAMETER Experiment Name: At_Drought_Soil_Dry_P Parameter: Organism Value: A. thaliana
  misc_feature: MA Experiment 20001555 PARAMETER Experiment Name: At_Drought_Soil_Dry_P Parameter: Plant Line Value: WS
  misc_feature: MA Experiment 20001555 PARAMETER Experiment Name: At_Drought_Soil_Dry_P Parameter: Post Timepoint (hr) Value: None
  misc_feature: MA Experiment 20001555 PARAMETER Experiment Name: At_Drought_Soil_Dry_P Parameter: Post-Treatment Value: None
  misc_feature: MA Experiment 20001555 PARAMETER Experiment Name: At_Drought_Soil_Dry_P Parameter: Timepoint (day) Value: 10
  misc_feature: MA Experiment 20001555 PARAMETER Experiment Name: At_Drought_Soil_Dry_P Parameter: Treatment Value: Drought vs. No Drought
  misc_feature: MA Experiment ID: 20001904 Result: Up-regulated in Transcription
  misc_feature: MA Experiment 20001904 PARAMETER Experiment Name: At_Drought_Reproduction_P Parameter: Age (day) Value: 37
  misc_feature: MA Experiment 20001904 PARAMETER Experiment Name: At_Drought_Reproduction_P Parameter: Organism Value: A. thaliana
  misc_feature: MA Experiment 20001904 PARAMETER Experiment Name: At_Drought_Reproduction_P Parameter: Plant Line Value: WS
  misc_feature: MA Experiment 20001904 PARAMETER Experiment Name: At_Drought_Reproduction_P Parameter: Timepoint (day) Value: 7
  misc_feature: MA Experiment 20001904 PARAMETER Experiment Name: At_Drought_Reproduction_P Parameter: Tissue Value: Rosettes
  misc_feature: MA Experiment 20001904 PARAMETER Experiment Name: At_Drought_Reproduction_P Parameter: Treatment Value: Drought vs. No Drought
tatcccacaacaatctttgctacattttcatgcatttttaatcactcctctttctaactccaataaaaacacaataatggatcttcttgttatgctcctctctcttctcgtctcttatctcatcttcaagatctggaaacgcatagactccaagagagaccaaaactgctacatcttggactaccaatgtcacaaaccttccgatgatcgtatggtgaacactcaattcagcggtgatatcatccttcgaaacaaacaccttcggctcaacgagtacaagttcctcctcaaagccatcgttagttccggtatcggagagcaaacttacgcaccaaggctcttctttgagggccgtgaacagcgtcctacgctacaggatgggctctcggagatggaagagttttacatagacaccatcgagaaagtccttaagagaaacaaaatttcaccttcggagattgacatcctcgtagtcaacgtctcaatgctcaattcaacgccttcactatctgcaagaatcattaaccattacaaaatgagagaagacataaaagtcttcaacttgacggcgatgggatgtagcgcgagtgttatctccatagatattgtcaaaaacatcttcaaaacatacaagaacaagcttgctcttgtcgtgacctcagagtcacttagtcctaactggtacagcggaaacaaccggtccatgattcttgccaactgtttgttccgctctggtggctgcgctgttctcttgacgaacaagcgtagtctgagcaggagagccatgttcaagctaaggtgtttggtaaggacgcaccatggagccagagacgattcattcaacgcctgtgtccaaaaagaagacgagctaggacatatcggtgtccacttagacaagactcttccaaaagcagcgactcgtgctttcatagacaacctcaaagtcatcactcccaagattcttccggtaacagagcttttaaggtttatgttgtgtcttcttctcaagaagcttcgtagcagccctagcaaaggctcgacgaacgtgactcaggcagctccaaaggcaggggttaaagcagggattaacttcaagaccggtattgaccatttctgcattcacactggaggtaaagcggttatcgacgcgatcggttacagcctcgacttaaacgagtacgatcttgaaccggcgaggatgacgttacaccggtttggaaacacgtcagcgagtagcttgtggtatgttttggggtatatggaggcaaagaagaggctgaagagaggagatagagtgttcatgatcagctttggggcaggtttcaagtgcaatagttgcgtttgggaagttgtgagagatcttaacgttggagaagctgtagggaatgtgtggaatcattgcattaatcaatacccaccaaaatcgattttgaatccgtttttcgagaagtatggttggattcatgaagaagaagatcctgatactttcaagatgcccgaaggatttatgtgaatgttttcttgggaatcattgtaaacatacatatacagttacttcaaactgcaaatcccacaaaaggtgactatatagtttattttcctctttctttcttttattttatttaatgtggattctgaattgctacattttactctctctttctttctttttctttttttctaattggatgggaaagaaaatatgaatgacaaagatactgcgatata

SEQ ID NO: 50295 - protein, 503 aa, Arabidopsis thaliana
  peptide (1)..(503): Ceres Seq. ID no. 13588931
  misc_feature (312)..(452): Pfam Name: Chalcone and stilbene synthases, C-terminal domain Pfam Description: Chalcone and stilbene synthases, C-terminal
  misc_feature (6)..(474): Homolog of NCBI NO: 15226724 NR Description: very-long-chain fatty acid condensing enzyme
  misc_feature (20)..(476): Homolog of NCBI NO: 22329274 NR Description: fatty acid elongase 3-ketoacyl-CoA synthase 1
  misc_feature (20)..(476): Homolog of NCBI NO: 4091810 NR Description: fatty acid elongase 3-ketoacyl-CoA synthase 1
  misc_feature (45)..(490): Homolog of NCBI NO: 40882682 NR Description: putative fatty acid elongase
  misc_feature (26)..(490): Homolog of NCBI NO: 15238194 NR Description: beta-ketoacyl-CoA synthase family [Arabidopsis
  misc_feature (26)..(489): Homolog of NCBI NO: 40882703 NR Description: putative fatty acid elongase
  misc_feature (26)..(489): Homolog of NCBI NO: 37535300 NR Description: putative fatty acid elongase 3-ketoacyl-CoA
  misc_feature (26)..(503): Homolog of NCBI NO: 21536949 NR Description: putative fatty acid elongase [Arabidopsis
  misc_feature (26)..(503): Homolog of NCBI NO: 15226916 NR Description: beta-ketoacyl-CoA synthase family [Arabidopsis
  misc_feature (26)..(503): Homolog of NCBI NO: 15222994 NR Description: beta-ketoacyl-CoA synthase family [Arabidopsis
IPQQSLLHFHAFLITPLSNSNKNTIMDLLVMLLSLLVSYLIFKIWKRIDSKRDQNCYILDYQCHKPSDDRMVNTQFSGDIILRNKHLRLNEYKFLLKAIVSSGIGEQTYAPRLFFEGREQRPTLQDGLSEMEEFYIDTIEKVLKRNKISPSEIDILVVNVSMLNSTPSLSARIINHYKMREDIKVFNLTAMGCSASVISIDIVKNIFKTYKNKLALVVTSESLSPNWYSGNNRSMILANCLFRSGGCAVLLTNKRSLSRRAMFKLRCLVRTHHGARDDSFNACVQKEDELGHIGVHLDKTLPKAATRAFIDNLKVITPKILPVTELLRFMLCLLLKKLRSSPSKGSTNVTQAAPKAGVKAGINFKTGIDHFCIHTGGKAVIDAIGYSLDLNEYDLEPARMTLHRFGNTSASSLWYVLGYMEAKKRLKRGDRVFMISFGAGFKCNSCVWEVVRDLNVGEAVGNVWNHCINQYPPKSILNPFFEKYGWIHEEEDPDTFKMPEGFM

SEQ ID NO: 50296 - protein, 478 aa, Arabidopsis thaliana
  peptide (1)..(478): Ceres Seq. ID no. 13588932
  misc_feature (287)..(427): Pfam Name: Chalcone and stilbene synthases, C-terminal domain Pfam Description: Chalcone and stilbene synthases, C-terminal
  misc_feature (1)..(449): Homolog of NCBI NO: 15226724 NR Description: very-long-chain fatty acid condensing enzyme
  misc_feature (1)..(451): Homolog of NCBI NO: 22329274 NR Description: fatty acid elongase 3-ketoacyl-CoA synthase 1
  misc_feature (1)..(451): Homolog of NCBI NO: 4091810 NR Description: fatty acid elongase 3-ketoacyl-CoA synthase 1
  misc_feature (20)..(465): Homolog of NCBI NO: 40882682 NR Description: putative fatty acid elongase
  misc_feature (1)..(465): Homolog of NCBI NO: 15238194 NR Description: beta-ketoacyl-CoA synthase family [Arabidopsis
  misc_feature (1)..(464): Homolog of NCBI NO: 40882703 NR Description: putative fatty acid elongase
  misc_feature (1)..(464): Homolog of NCBI NO: 37535300 NR Description: putative fatty acid elongase 3-ketoacyl-CoA
  misc_feature (1)..(478): Homolog of NCBI NO: 21536949 NR Description: putative fatty acid elongase [Arabidopsis
  misc_feature (1)..(478): Homolog of NCBI NO: 15226916 NR Description: beta-ketoacyl-CoA synthase family [Arabidopsis
  misc_feature (1)..(478): Homolog of NCBI NO: 15222994 NR Description: beta-ketoacyl-CoA synthase family [Arabidopsis
MDLLVMLLSLLVSYLIFKIWKRIDSKRDQNCYILDYQCHKPSDDRMVNTQFSGDIILRNKHLRLNEYKFLLKAIVSSGIGEQTYAPRLFFEGREQRPTLQDGLSEMEEFYIDTIEKVLKRNKISPSEIDILVVNVSMLNSTPSLSARIINHYKMREDIKVFNLTAMGCSASVISIDIVKNIFKTYKNKLALVVTSESLSPNWYSGNNRSMILANCLFRSGGCAVLLTNKRSLSRRAMFKLRCLVRTHHGARDDSFNACVQKEDELGHIGVHLDKTLPKAATRAFIDNLKVITPKILPVTELLRFMLCLLLKKLRSSPSKGSTNVTQAAPKAGVKAGINFKTGIDHFCIHTGGKAVIDAIGYSLDLNEYDLEPARMTLHRFGNTSASSLWYVLGYMEAKKRLKRGDRVFMISFGAGFKCNSCVWEVVRDLNVGEAVGNVWNHCINQYPPKSILNPFFEKYGWIHEEEDPDTFKMPEGFM

SEQ ID NO: 50297 - protein, 473 aa, Arabidopsis thaliana
  peptide (1)..(473): Ceres Seq. ID no. 13588933
  misc_feature (282)..(422): Pfam Name: Chalcone and stilbene synthases, C-terminal domain Pfam Description: Chalcone and stilbene synthases, C-terminal
  misc_feature (1)..(444): Homolog of NCBI NO: 15226724 NR Description: very-long-chain fatty acid condensing enzyme
  misc_feature (1)..(446): Homolog of NCBI NO: 22329274 NR Description: fatty acid elongase 3-ketoacyl-CoA synthase 1
  misc_feature (1)..(446): Homolog of NCBI NO: 4091810 NR Description: fatty acid elongase 3-ketoacyl-CoA synthase 1
  misc_feature (15)..(460): Homolog of NCBI NO: 40882682 NR Description: putative fatty acid elongase
  misc_feature (1)..(460): Homolog of NCBI NO: 15238194 NR Description: beta-ketoacyl-CoA synthase family [Arabidopsis
  misc_feature (1)..(459): Homolog of NCBI NO: 40882703 NR Description: putative fatty acid elongase
  misc_feature (1)..(459): Homolog of NCBI NO: 37535300 NR Description: putative fatty acid elongase 3-ketoacyl-CoA
  misc_feature (1)..(473): Homolog of NCBI NO: 21536949 NR Description: putative fatty acid elongase [Arabidopsis
  misc_feature (1)..(473): Homolog of NCBI NO: 15226916 NR Description: beta-ketoacyl-CoA synthase family [Arabidopsis
  misc_feature (1)..(473): Homolog of NCBI NO: 15222994 NR Description: beta-ketoacyl-CoA synthase family [Arabidopsis
MLLSLLVSYLIFKIWKRIDSKRDQNCYILDYQCHKPSDDRMVNTQFSGDIILRNKHLRLNEYKFLLKAIVSSGIGEQTYAPRLFFEGREQRPTLQDGLSEMEEFYIDTIEKVLKRNKISPSEIDILVVNVSMLNSTPSLSARIINHYKMREDIKVFNLTAMGCSASVISIDIVKNIFKTYKNKLALVVTSESLSPNWYSGNNRSMILANCLFRSGGCAVLLTNKRSLSRRAMFKLRCLVRTHHGARDDSFNACVQKEDELGHIGVHLDKTLPKAATRAFIDNLKVITPKILPVTELLRFMLCLLLKKLRSSPSKGSTNVTQAAPKAGVKAGINFKTGIDHFCIHTGGKAVIDAIGYSLDLNEYDLEPARMTLHRFGNTSASSLWYVLGYMEAKKRLKRGDRVFMISFGAGFKCNSCVWEVVRDLNVGEAVGNVWNHCINQYPPKSILNPFFEKYGWIHEEEDPDTFKMPEGFM

SEQ ID NO: 50298 - DNA, 2198 bp, Arabidopsis thaliana
  misc_feature (1)..(2198): Ceres Seq. ID no. 13647994
  misc_feature: MA Experiment ID: 20000173 Result: Up-regulated in Transcription
  misc_feature: MA Experiment 20000173 PARAMETER Experiment Name: At_42deg_Heat_P Parameter: Age (day) Value: 14
  misc_feature: MA Experiment 20000173 PARAMETER Experiment Name: At_42deg_Heat_P Parameter: Organism Value: A. thaliana
  misc_feature: MA Experiment 20000173 PARAMETER Experiment Name: At_42deg_Heat_P Parameter: Plant Line Value: WS
  misc_feature: MA Experiment 20000173 PARAMETER Experiment Name: At_42deg_Heat_P Parameter: Temperature (deg C) Value: 42 vs. 22
  misc_feature: MA Experiment 20000173 PARAMETER Experiment Name: At_42deg_Heat_P Parameter: Timepoint (hr) Value: 6
  misc_feature: MA Experiment 20000173 PARAMETER Experiment Name: At_42deg_Heat_P Parameter: Tissue Value: Aerial
  misc_feature: MA Experiment ID: 20000495 Result: Down-regulated in Transcription
  misc_feature: MA Experiment 20000495 PARAMETER Experiment Name: At_Guard_Cells_P Parameter: Harvest Date Value: 8/2/2002
  misc_feature: MA Experiment 20000495 PARAMETER Experiment Name: At_Guard_Cells_P Parameter: Organism Value: A. thaliana
  misc_feature: MA Experiment 20000495 PARAMETER Experiment Name: At_Guard_Cells_P Parameter: Tissue Value: Guard Cells vs. Leaves
aactttattccgacgctaaccaacagattcacgaaaccctataaatacttagaaatccctaatcctcctctaaatccctaacttcttcccctacactctctcacacaattttctcgagaaattttccaatttcctttcgatttcgcccagaaatttcggtaactttcagattctgttcagaacgaagaaacttgttatttttggctacttctctccgattctgttcttcttgtagtagctgatcgcattccatgggtacttctcagagtcgtgaagatcgaatcagcgaatcggatacagaatccgattcagattactatgaagaagaagacgaggatcaatacgatgacgcgaagaagcaaggatcatcatctgtttctggtacaagaccgtctgattcttcttcttcttcaggaccaactgattcatcgtctctcgatattgagcagaagctaaaagccttgaagttgaaatacccatcttcttcttccgtaacacccaagatgaagaacgctgtgaagctttaccgccatatcgggggaaacacacccaaagcgaaatggatcgtttcggataagatgacatcatacaagtttgtgaaaacttcgtcagtggatggagaagatattgatgattatgatgattgtgaagaatcaggtgaaggaggtgagtctttttggtttctgggtgttggtactaaggttaaagctagggtttctacggatatgcagttgaaaatgtttggggatcaacgtagggttgactttgttagtaatggtgtttgggctttgaagttcttgacggatgaggattataggaagtttgttactaggtttcaggactatctgtttgagaatgtgtataagatcagggcaagtgaggagaatagagttaaagtgtatggtaaagatttcattgggtgggctaatcctgaggctgctgatgattctatgtgggaggatgctgaagctccacctgaggaagaggaaactcaggggaagaggaatacggatttgacggaagagtttgaagaggtggctaatggtggagtgcagagtttgactttgggagcgttggataattcgttcttggtgaatgattatggggttcaggtttataggaatatggagcgtggtattcatgggaaaggtgtgtgcgtgagatttgattctggaaactcaaagttcggatcagggtcaagccagacaacaccgaacaaggctcttttgatgagggcagagactaatatgatgctgatgagtccagctaaacaagggaaacctaactccactggtgttaagcagctcgatatagagtcagggaagattgttactgaatggaaatttgagaaagacgggactgaaatcacgatgagagacataacaaatgataccaaagggtcgcagctagatccatcagagtcaacgtttttgggattggatgacaataggctgtgtcaatgggacatgagggataggagaggtatagtgcagaacattgactctcccatcttggaatggactcaaggccatcagttctctagaggaacaaatttccagtgctttgcaactactggagatgggtcaatcgttgtgggatcacttgacggaaagataagactttactcaaagacctcaatgagaatggcaaaaacggcttttccagggctcggttcaccaattacacatgtggacgtttcttatgatgggaaatggatactgggcaccacagatacgtacttggttcttatttgcacccttttcacagacaaaaatggtctgacaaaaacaggctttagcggaagaatgggaaacaaaataccagcccctaggctgctgaagctaacaccactagattcacacttggcaggaaaagataataagtttcatggcggtcacttctcatgggtaactgagagtggaaagcaagagagacacatagtagcaacagtggggaaattcagtgtgatatgggacttggagcgggtgaagaacagtgcacacgaatgctataggaaccaacaaggactcaagagctgttactgctacaagatcttgttgaaggatgagtcaattgttgagagccgattcatgcacgataacttctccttctccggtaacaaatcgccagaagcaccgcttgtggttgccacgcctttgaaagtcagctccatcagcctctctggaaaacgactttaa

SEQ ID NO: 50299 - protein, 648 aa, Arabidopsis thaliana
  peptide (1)..(648): Ceres Seq. ID no. 13647995
  misc_feature (228)..(591): Homolog of NCBI NO: 28829296 NR Description: similar to hypothetical protein
  misc_feature (178)..(579): Homolog of NCBI NO: 40744400 NR Description: hypothetical protein AN3005.2 [Aspergillus
  misc_feature (16)..(579): Homolog of NCBI NO: 32419835 NR Description: hypothetical protein [Neurospora crassa]
  misc_feature (138)..(588): Homolog of NCBI NO: 19112010 NR Description: hypothetical protein [Schizosaccharomyces pombe]
  misc_feature (138)..(588): Homolog of NCBI NO: 7491392 NR Description: hypothetical protein SPBC1685.14c - fission yeast
  misc_feature (163)..(646): Homolog of NCBI NO: 729273 NR Description: CYPRO4 PROTEIN
  misc_feature (1)..(647): Homolog of NCBI NO: 15234174 NR Description: Dem -related protein [Arabidopsis thaliana]
  misc_feature (1)..(648): Homolog of NCBI NO: 7488984 NR Description: dem protein - tomato
  misc_feature (1)..(647): Homolog of NCBI NO: 37223344 NR Description: DEM2 [Lycopersicon esculentum]
  misc_feature (1)..(647): Homolog of NCBI NO: 37223342 NR Description: DEM2 [Lycopersicon esculentum]
MGTSQSREDRISESDTESDSDYYEEEDEDQYDDAKKQGSSSVSGTRPSDSSSSSGPTDSSSLDIEQKLKALKLKYPSSSSVTPKMKNAVKLYRHIGGNTPKAKWIVSDKMTSYKFVKTSSVDGEDIDDYDDCEESGEGGESFWFLGVGTKVKARVSTDMQLKMFGDQRRVDFVSNGVWALKFLTDEDYRKFVTRFQDYLFENVYKIRASEENRVKVYGKDFIGWANPEAADDSMWEDAEAPPEEEETQGKRNTDLTEEFEEVANGGVQSLTLGALDNSFLVNDYGVQVYRNMERGIHGKGVCVRFDSGNSKFGSGSSQTTPNKALLMRAETNMMLMSPAKQGKPNSTGVKQLDIESGKIVTEWKFEKDGTEITMRDITNDTKGSQLDPSESTFLGLDDNRLCQWDMRDRRGIVQNIDSPILEWTQGHQFSRGTNFQCFATTGDGSIVVGSLDGKIRLYSKTSMRMAKTAFPGLGSPITHVDVSYDGKWILGTTDTYLVLICTLFTDKNGLTKTGFSGRMGNKIPAPRLLKLTPLDSHLAGKDNKFHGGHFSWVTESGKQERHIVATVGKFSVIWDLERVKNSAHECYRNQQGLKSCYCYKILLKDESIVESRFMHDNFSFSGNKSPEAPLVVATPLKVSSISLSGKRL

SEQ ID NO: 50300 - protein, 564 aa, Arabidopsis thaliana
  peptide (1)..(564): Ceres Seq. ID no. 13647996
  misc_feature (144)..(507): Homolog of NCBI NO: 28829296 NR Description: similar to hypothetical protein
  misc_feature (94)..(495): Homolog of NCBI NO: 40744400 NR Description: hypothetical protein AN3005.2 [Aspergillus
  misc_feature (1)..(495): Homolog of NCBI NO: 32419835 NR Description: hypothetical protein [Neurospora crassa]
  misc_feature (54)..(504): Homolog of NCBI NO: 19112010 NR Description: hypothetical protein [Schizosaccharomyces pombe]
  misc_feature (54)..(504): Homolog of NCBI NO: 7491392 NR Description: hypothetical protein SPBC1685.14c - fission yeast
  misc_feature (79)..(562): Homolog of NCBI NO: 729273 NR Description: CYPRO4 PROTEIN
  misc_feature (1)..(563): Homolog of NCBI NO: 15234174 NR Description: Dem -related protein [Arabidopsis thaliana]
  misc_feature (1)..(564): Homolog of NCBI NO: 7488984 NR Description: dem protein - tomato
  misc_feature (1)..(563): Homolog of NCBI NO: 37223344 NR Description: DEM2 [Lycopersicon esculentum]
  misc_feature (1)..(563): Homolog of NCBI NO: 37223342 NR Description: DEM2 [Lycopersicon esculentum]
MKNAVKLYRHIGGNTPKAKWIVSDKMTSYKFVKTSSVDGEDIDDYDDCEESGEGGESFWFLGVGTKVKARVSTDMQLKMFGDQRRVDFVSNGVWALKFLTDEDYRKFVTRFQDYLFENVYKIRASEENRVKVYGKDFIGWANPEAADDSMWEDAEAPPEEEETQGKRNTDLTEEFEEVANGGVQSLTLGALDNSFLVNDYGVQVYRNMERGIHGKGVCVRFDSGNSKFGSGSSQTTPNKALLMRAETNMMLMSPAKQGKPNSTGVKQLDIESGKIVTEWKFEKDGTEITMRDITNDTKGSQLDPSESTFLGLDDNRLCQWDMRDRRGIVQNIDSPILEWTQGHQFSRGTNFQCFATTGDGSIVVGSLDGKIRLYSKTSMRMAKTAFPGLGSPITHVDVSYDGKWILGTTDTYLVLICTLFTDKNGLTKTGFSGRMGNKIPAPRLLKLTPLDSHLAGKDNKFHGGHFSWVTESGKQERHIVATVGKFSVIWDLERVKNSAHECYRNQQGLKSCYCYKILLKDESIVESRFMHDNFSFSGNKSPEAPLVVATPLKVSSISLSGKRL

SEQ ID NO: 50301 - protein, 539 aa, Arabidopsis thaliana
  peptide (1)..(539): Ceres Seq. ID no. 13647997
  misc_feature (119)..(482): Homolog of NCBI NO: 28829296 NR Description: similar to hypothetical protein
  misc_feature (69)..(470): Homolog of NCBI NO: 40744400 NR Description: hypothetical protein AN3005.2 [Aspergillus
  misc_feature (1)..(470): Homolog of NCBI NO: 32419835 NR Description: hypothetical protein [Neurospora crassa]
  misc_feature (29)..(479): Homolog of NCBI NO: 19112010 NR Description: hypothetical protein [Schizosaccharomyces pombe]
  misc_feature (29)..(479): Homolog of NCBI NO: 7491392 NR Description: hypothetical protein SPBC1685.14c - fission yeast
  misc_feature (54)..(537): Homolog of NCBI NO: 729273 NR Description: CYPRO4 PROTEIN
  misc_feature (1)..(538): Homolog of NCBI NO: 15234174 NR Description: Dem -related protein [Arabidopsis thaliana]
  misc_feature (1)..(539): Homolog of NCBI NO: 7488984 NR Description: dem protein - tomato
  misc_feature (1)..(538): Homolog of NCBI NO: 37223344 NR Description: DEM2 [Lycopersicon esculentum]
  misc_feature (1)..(538): Homolog of NCBI NO: 37223342 NR Description: DEM2 [Lycopersicon esculentum]
MTSYKFVKTSSVDGEDIDDYDDCEESGEGGESFWFLGVGTKVKARVSTDMQLKMFGDQRRVDFVSNGVWALKFLTDEDYRKFVTRFQDYLFENVYKIRASEENRVKVYGKDFIGWANPEAADDSMWEDAEAPPEEEETQGKRNTDLTEEFEEVANGGVQSLTLGALDNSFLVNDYGVQVYRNMERGIHGKGVCVRFDSGNSKFGSGSSQTTPNKALLMRAETNMMLMSPAKQGKPNSTGVKQLDIESGKIVTEWKFEKDGTEITMRDITNDTKGSQLDPSESTFLGLDDNRLCQWDMRDRRGIVQNIDSPILEWTQGHQFSRGTNFQCFATTGDGSIVVGSLDGKIRLYSKTSMRMAKTAFPGLGSPITHVDVSYDGKWILGTTDTYLVLICTLFTDKNGLTKTGFSGRMGNKIPAPRLLKLTPLDSHLAGKDNKFHGGHFSWVTESGKQERHIVATVGKFSVIWDLERVKNSAHECYRNQQGLKSCYCYKILLKDESIVESRFMHDNFSFSGNKSPEAPLVVATPLKVSSISLSGKRL

SEQ ID NO: 50302 - DNA, 1627 bp, Arabidopsis thaliana
  misc_feature (1)..(1627): Ceres Seq. ID no. 13588164
  misc_feature: MA Experiment ID: 20000182 Result: Up-regulated in Transcription
  misc_feature: MA Experiment 20000182 PARAMETER Experiment Name: At_2mM_SA_P Parameter: Age (day) Value: 14
  misc_feature: MA Experiment 20000182 PARAMETER Experiment Name: At_2mM_SA_P Parameter: Organism Value: A. thaliana
  misc_feature: MA Experiment 20000182 PARAMETER Experiment Name: At_2mM_SA_P Parameter: Plant Line Value: WS
  misc_feature: MA Experiment 20000182 PARAMETER Experiment Name: At_2mM_SA_P Parameter: Timepoint (hr) Value: 6
  misc_feature: MA Experiment 20000182 PARAMETER Experiment Name: At_2mM_SA_P Parameter: Tissue Value: Aerial
  misc_feature: MA Experiment 20000182 PARAMETER Experiment Name: At_2mM_SA_P Parameter: Treatment Value: 2mM SA vs. No Treatment
  misc_feature: MA Experiment ID: 20000184 Result: Down-regulated in Transcription
  misc_feature: MA Experiment 20000184 PARAMETER Experiment Name: At_Shoots__P Parameter: Age (day) Value: 7
  misc_feature: MA Experiment 20000184 PARAMETER Experiment Name: At_Shoots__P Parameter: Tissue Value: Shoots vs. Whole Plant
  misc_feature: MA Experiment ID: 20000235 Result: Down-regulated in Transcription
  misc_feature: MA Experiment 20000235 PARAMETER Experiment Name: At_Siliques_P Parameter: Age (day) Value: 21
  misc_feature: MA Experiment 20000235 PARAMETER Experiment Name: At_Siliques_P Parameter: Organism Value: A. thaliana
  misc_feature: MA Experiment 20000235 PARAMETER Experiment Name: At_Siliques_P Parameter: Plant Line Value: WS
  misc_feature: MA Experiment 20000235 PARAMETER Experiment Name: At_Siliques_P Parameter: Tissue Value: 5-10mm Siliques vs. Whole Plant
  misc_feature: MA Experiment ID: 20000264 Result: Down-regulated in Transcription
  misc_feature: MA Experiment 20000264 PARAMETER Experiment Name: At_Open_Flower_P Parameter: Age (day) Value: 21
  misc_feature: MA Experiment 20000264 PARAMETER Experiment Name: At_Open_Flower_P Parameter: Plant Line Value: WS
  misc_feature: MA Experiment 20000264 PARAMETER Experiment Name: At_Open_Flower_P Parameter: Tissue Value: Open Flower vs. Whole Plant
  misc_feature: MA Experiment ID: 20000265 Result: Down-regulated in Transcription
  misc_feature: MA Experiment 20000265 PARAMETER Experiment Name: At_Open_Flower_P Parameter: Age (day) Value: 21
  misc_feature: MA Experiment 20000265 PARAMETER Experiment Name: At_Open_Flower_P Parameter: Plant Line Value: WS
  misc_feature: MA Experiment 20000265 PARAMETER Experiment Name: At_Open_Flower_P Parameter: Tissue Value: Closed Flower vs. Whole Plant
  misc_feature: MA Experiment ID: 20000286 Result: Down-regulated in Transcription
  misc_feature: MA Experiment 20000286 PARAMETER Experiment Name: At_Open_Flower_P Parameter: Age (day) Value: 21
  misc_feature: MA Experiment 20000286 PARAMETER Experiment Name: At_Open_Flower_P Parameter: Plant Line Value: WS
  misc_feature: MA Experiment 20000286 PARAMETER Experiment Name: At_Open_Flower_P Parameter: Tissue Value: Half Open vs. Whole Plant
  misc_feature: MA Experiment ID: 20000438 Result: Down-regulated in Transcription
  misc_feature: MA Experiment 20000438 PARAMETER Experiment Name: At_Shoots__P Parameter: Age (day) Value: 14
  misc_feature: MA Experiment 20000438 PARAMETER Experiment Name: At_Shoots__P Parameter: Tissue Value: Shoots vs. Whole Plant
  misc_feature: MA Experiment ID: 20000439 Result: Down-regulated in Transcription
  misc_feature: MA Experiment 20000439 PARAMETER Experiment Name: At_Roots__P Parameter: Age (day) Value: 14 vs. 21
  misc_feature: MA Experiment 20000439 PARAMETER Experiment Name: At_Roots__P Parameter: Organism Value: A. thaliana
  misc_feature: MA Experiment 20000439 PARAMETER Experiment Name: At_Roots__P Parameter: Tissue Value: Roots vs. Whole Plant
  misc_feature: MA Experiment ID: 20000794 Result: Down-regulated in Transcription
  misc_feature: MA Experiment 20000794 PARAMETER Experiment Name: At_Petals_P Parameter: Age (day) Value: 23-25 days
  misc_feature: MA Experiment 20000794 PARAMETER Experiment Name: At_Petals_P Parameter: Plant Line Value: WS
  misc_feature: MA Experiment 20000794 PARAMETER Experiment Name: At_Petals_P Parameter: Tissue Value: Petals vs. Whole plant
atctctactttgacccgaccagcgaaagtgtaaattgaaagatagatagaaagaaagagccaactttaaaagcttagcggttgatttcgaaatctcgtcgccggcgcgtggagtcttttcgtcggacaacaacaagagaaaagagatttgtggtgttcttctgcttagaattgttgttttccatctccggcagtgagatttggtggagaattttgatttgtgatcgatggttaaggaaacagagtactacgatgtgctcggagttagcccaactgctacagaatctgagattaagaaagcttactacataaaggcacgccaagttcatcctgataagaaccctaatgatcctcaagctgcacacaatttccaggtcttgggagaggcctatcaagtgctaagtgattcaggacaacgccaagcttatgatgcatgtggcaagtcaggaatctcaactgatgcaatcatcgatcctgctgcaatatttgcaatgctatttggcagcgaactttttgaagggtacataggacagcttgctatggcatctatggcttcacttgatatcttcacggaaggggatcagtttgataccaaaaagatacaagaaaaattgaggattgttcagaaagaaagagaagacaagcttgctcagattctgaaagaccgactcaacgaatatgtaataaacaaagacgaatttatcagtaatgctgaagctgaagtagcaagactctcaaatgcagcttatggtgtggatatgttgaatacaattgggtatatatatgtaagacaagcagcaaaagagctagggaagaaagctatttatctcggagtaccattcattgctgaatggtttaggaacaaaggtcacttcatcaaatctcaattaacagctgcaacaggcgcatatgcgttgttccagttgcaggaggaaatgaaaaggcagctaaatactgaaggaaattatactgaggaggaacttgaggaataccttcaggcccataaaagagtgatgattgattcactgtggaagctcaatgtcgctgatatcgaagccactctttgtcgtgtttgtcagctggttcttcaagatccagaagccaaaagagaggagcttcgtacaagagcaagaggtttaaaagctctggggaggatctttcagagagccaaaacagctagtgagagtgatcctttagaaaatagtgaacctcaaaagttaaacggaaatggaaagaaccacgatgaggatacttctacatcaccaaaatccagtgaagcatctcactccacctctggtcctcaggaaccacaaagcccctacgtggaagaattcaaacttggagatgaacaattcaactattacttcccacgaccagcgccacctcctggcgcagggaaatactcttcctctggctatgattgattcaggtgagatcggggcatatatatatcagtcttagcatatttctattgcagttgtgtaccattatgtaaaattattccttttttcttttggttttggcttgttagaagaaaatgattgatgttgaaagcacatataaaagctcttttgtgataatgtatccatgtaaattattatgaaggtataatgacttagagtataaac

SEQ ID NO: 50303 - protein, 398 aa, Arabidopsis thaliana
  peptide (1)..(398): Ceres Seq. ID no. 13588165
  misc_feature (6)..(71): Pfam Name: DnaJ domain Pfam Description: DnaJ domain
  misc_feature (1)..(315): Homolog of NCBI NO: 15226572 NR Description: DnaJ protein family [Arabidopsis thaliana]
  misc_feature (1)..(327): Homolog of NCBI NO: 15234962 NR Description: DnaJ protein family [Arabidopsis thaliana]
  misc_feature (1)..(357): Homolog of NCBI NO: 30699227 NR Description: DnaJ protein family [Arabidopsis thaliana]
  misc_feature (89)..(393): Homolog of NCBI NO: 15982848 NR Description: At1g21080/T22I11_9 [Arabidopsis thaliana]
  misc_feature (1)..(130): Homolog of NCBI NO: 27817868 NR Description: OJ1081_B12.17 [Oryza sativa (japonica
  misc_feature (132)..(389): Homolog of NCBI NO: 27817868 NR Description: OJ1081_B12.17 [Oryza sativa (japonica
  misc_feature (1)..(393): Homolog of NCBI NO: 18394951 NR Description: DnaJ protein family [Arabidopsis thaliana]
  misc_feature (1)..(398): Homolog of NCBI NO: 2230757 NR Description: dnaJ-like protein [Arabidopsis thaliana]
  misc_feature (1)..(398): Homolog of NCBI NO: 26449747 NR Description: putative DnaJ protein [Arabidopsis thaliana]
  misc_feature (1)..(398): Homolog of NCBI NO: 15223142 NR Description: DnaJ protein family [Arabidopsis thaliana]
MVKETEYYDVLGVSPTATESEIKKAYYIKARQVHPDKNPNDPQAAHNFQVLGEAYQVLSDSGQRQAYDACGKSGISTDAIIDPAAIFAMLFGSELFEGYIGQLAMASMASLDIFTEGDQFDTKKIQEKLRIVQKEREDKLAQILKDRLNEYVINKDEFISNAEAEVARLSNAAYGVDMLNTIGYIYVRQAAKELGKKAIYLGVPFIAEWFRNKGHFIKSQLTAATGAYALFQLQEEMKRQLNTEGNYTEEELEEYLQAHKRVMIDSLWKLNVADIEATLCRVCQLVLQDPEAKREELRTRARGLKALGRIFQRAKTASESDPLENSEPQKLNGNGKNHDEDTSTSPKSSEASHSTSGPQEPQSPYVEEFKLGDEQFNYYFPRPAPPPGAGKYSSSGYD

SEQ ID NO: 50304 - protein, 310 aa, Arabidopsis thaliana
  peptide (1)..(310): Ceres Seq. ID no. 13588166
  misc_feature (1)..(227): Homolog of NCBI NO: 15226572 NR Description: DnaJ protein family [Arabidopsis thaliana]
  misc_feature (1)..(239): Homolog of NCBI NO: 15234962 NR Description: DnaJ protein family [Arabidopsis thaliana]
  misc_feature (1)..(269): Homolog of NCBI NO: 30699227 NR Description: DnaJ protein family [Arabidopsis thaliana]
  misc_feature (1)..(305): Homolog of NCBI NO: 15982848 NR Description: At1g21080/T22I11_9 [Arabidopsis thaliana]
  misc_feature (1)..(42): Homolog of NCBI NO: 27817868 NR Description: OJ1081_B12.17 [Oryza sativa (japonica
  misc_feature (44)..(301): Homolog of NCBI NO: 27817868 NR Description: OJ1081_B12.17 [Oryza sativa (japonica
  misc_feature (1)..(305): Homolog of NCBI NO: 18394951 NR Description: DnaJ protein family [Arabidopsis thaliana]
  misc_feature (1)..(310): Homolog of NCBI NO: 2230757 NR Description: dnaJ-like protein [Arabidopsis thaliana]
  misc_feature (1)..(310): Homolog of NCBI NO: 26449747 NR Description: putative DnaJ protein [Arabidopsis thaliana]
  misc_feature (1)..(310): Homolog of NCBI NO: 15223142 NR Description: DnaJ protein family [Arabidopsis thaliana]
MLFGSELFEGYIGQLAMASMASLDIFTEGDQFDTKKIQEKLRIVQKEREDKLAQILKDRLNEYVINKDEFISNAEAEVARLSNAAYGVDMLNTIGYIYVRQAAKELGKKAIYLGVPFIAEWFRNKGHFIKSQLTAATGAYALFQLQEEMKRQLNTEGNYTEEELEEYLQAHKRVMIDSLWKLNVADIEATLCRVCQLVLQDPEAKREELRTRARGLKALGRIFQRAKTASESDPLENSEPQKLNGNGKNHDEDTSTSPKSSEASHSTSGPQEPQSPYVEEFKLGDEQFNYYFPRPAPPPGAGKYSSSGYD

SEQ ID NO: 50305 - protein, 294 aa, Arabidopsis thaliana
  peptide (1)..(294): Ceres Seq. ID no. 13588167
  misc_feature (1)..(211): Homolog of NCBI NO: 15226572 NR Description: DnaJ protein family [Arabidopsis thaliana]
  misc_feature (1)..(223): Homolog of NCBI NO: 15234962 NR Description: DnaJ protein family [Arabidopsis thaliana]
  misc_feature (1)..(253): Homolog of NCBI NO: 30699227 NR Description: DnaJ protein family [Arabidopsis thaliana]
  misc_feature (1)..(289): Homolog of NCBI NO: 15982848 NR Description: At1g21080/T22I11_9 [Arabidopsis thaliana]
  misc_feature (1)..(26): Homolog of NCBI NO: 27817868 NR Description: OJ1081_B12.17 [Oryza sativa (japonica
  misc_feature (28)..(285): Homolog of NCBI NO: 27817868 NR Description: OJ1081_B12.17 [Oryza sativa (japonica
  misc_feature (1)..(289): Homolog of NCBI NO: 18394951 NR Description: DnaJ protein family [Arabidopsis thaliana]
  misc_feature (1)..(294): Homolog of NCBI NO: 2230757 NR Description: dnaJ-like protein [Arabidopsis thaliana]
  misc_feature (1)..(294): Homolog of NCBI NO: 26449747 NR Description: putative DnaJ protein [Arabidopsis thaliana]
  misc_feature (1)..(294): Homolog of NCBI NO: 15223142 NR Description: DnaJ protein family [Arabidopsis thaliana]
MASMASLDIFTEGDQFDTKKIQEKLRIVQKEREDKLAQILKDRLNEYVINKDEFISNAEAEVARLSNAAYGVDMLNTIGYIYVRQAAKELGKKAIYLGVPFIAEWFRNKGHFIKSQLTAATGAYALFQLQEEMKRQLNTEGNYTEEELEEYLQAHKRVMIDSLWKLNVADIEATLCRVCQLVLQDPEAKREELRTRARGLKALGRIFQRAKTASESDPLENSEPQKLNGNGKNHDEDTSTSPKSSEASHSTSGPQEPQSPYVEEFKLGDEQFNYYFPRPAPPPGAGKYSSSGYD

SEQ ID NO: 50306 - DNA, 1088 bp, Arabidopsis thaliana
  misc_feature (1)..(1088): Ceres Seq. ID no. 13588934
  misc_feature: MA Experiment ID: 20000264 Result: Up-regulated in Transcription
  misc_feature: MA Experiment 20000264 PARAMETER Experiment Name: At_Open_Flower_P Parameter: Age (day) Value: 21
  misc_feature: MA Experiment 20000264 PARAMETER Experiment Name: At_Open_Flower_P Parameter: Plant Line Value: WS
  misc_feature: MA Experiment 20000264 PARAMETER Experiment Name: At_Open_Flower_P Parameter: Tissue Value: Open Flower vs. Whole Plant
  misc_feature: MA Experiment ID: 20000286 Result: Up-regulated in Transcription
  misc_feature: MA Experiment 20000286 PARAMETER Experiment Name: At_Open_Flower_P Parameter: Age (day) Value: 21
  misc_feature: MA Experiment 20000286 PARAMETER Experiment Name: At_Open_Flower_P Parameter: Plant Line Value: WS
  misc_feature: MA Experiment 20000286 PARAMETER Experiment Name: At_Open_Flower_P Parameter: Tissue Value: Half Open vs. Whole Plant
  misc_feature: MA Experiment ID: 20001910 Result: Up-regulated in Transcription
  misc_feature: MA Experiment 20001910 PARAMETER Experiment Name: At_Drought_Reproduction_P Parameter: Age (day) Value: 37
  misc_feature: MA Experiment 20001910 PARAMETER Experiment Name: At_Drought_Reproduction_P Parameter: Organism Value: A. thaliana
  misc_feature: MA Experiment 20001910 PARAMETER Experiment Name: At_Drought_Reproduction_P Parameter: Plant Line Value: WS
  misc_feature: MA Experiment 20001910 PARAMETER Experiment Name: At_Drought_Reproduction_P Parameter: Timepoint (day) Value: 7
  misc_feature: MA Experiment 20001910 PARAMETER Experiment Name: At_Drought_Reproduction_P Parameter: Tissue Value: Flowers
  misc_feature: MA Experiment 20001910 PARAMETER Experiment Name: At_Drought_Reproduction_P Parameter: Treatment Value: Drought vs. No Drought
tcttccaaaaaagacaaaaaaattcttcccatcttcttcctcctaacaggcagaggatgatgatgatgatcttcatcaagattctcttgaacccaaaataatcgtcggaaagaacttgtttctgtatataattgcatacacttggtgaatctttttaaaagcaaaaaggaaaaaaaatgaatgatttattctctagttcgttcaagaagtacacggacctgaagcaacaggcccaaatggatgatattgagtcaggtaaagagacgatgaacctcgataagttctttgaggatgtcgaaaatgtcaaagatgacatgaaaggcgtagagactctttacaagagtcttcattattctaacgaagagtgcaaaactgtacacaatgccaagaaggtgaaggaactccgagcaaagatggatggagatgtcgctcaggtcctcaagagagtcaagatgatcaaacaaaagcttgaggcgcttgaaaaagcaaatgctaatagccgtaatgtctctggttgtggccctggctcttccaccgataggaccaggacgtctgttgttagtggactcgggaaaaagcttaaggacttgatggatagttttcaaggtctgcgtgcgcggatgaacgctgagtataaagaaaccgtagagcgcagatatttcacgataaccggagaacaggcagacgaacagacgattgagaacttgatttcgagtggtgaaagcgagaattttcttcagaaagcaatacaagaacaagggagaggccaaatattagacactatatcagagattcaagagagacacgacgcggtcaaagagatagagaagaatcttatagagcttcaccaagtgttcttagacatggcggctctggtggaatcacaaggtcagcaactaaatgacatagaaagccacgtctcgaaggcgagctcgttcgtgagaagagggacagaccagcttcaagatgcaagagaataccaaaagagctcgaggaaatggacttgttatgccattcttctcttcatagtcgttttcgctttgcttctcataccagccttacctcatatcatgctcatgttgaagtga

SEQ ID NO: 50307 - protein, 303 aa, Arabidopsis thaliana
  peptide (1)..(303): Ceres Seq. ID no. 13588935
  misc_feature (208)..(270): Pfam Name: SNARE domain Pfam Description: SNARE domain
  misc_feature (1)..(293): Homolog of NCBI NO: 29788865 NR Description: putative cytokinesis-specific syntaxin-related
  misc_feature (1)..(293): Homolog of NCBI NO: 5912543 NR Description: Knolle [Capsicum annuum]
  misc_feature (1)..(293): Homolog of NCBI NO: 28974542 NR Description: knolle [Antirrhinum majus]
  misc_feature (1)..(292): Homolog of NCBI NO: 15231205 NR Description: syntaxin of plants SYP122 [Arabidopsis thaliana]
  misc_feature (1)..(292): Homolog of NCBI NO: 11358871 NR Description: syntaxin synt4 [imported] - Arabidopsis thaliana
  misc_feature (1)..(296): Homolog of NCBI NO: 4206787 NR Description: syntaxin-related protein Nt-syr1 [Nicotiana
  misc_feature (1)..(295): Homolog of NCBI NO: 15229865 NR Description: syntaxin of plants SYP121 [Arabidopsis thaliana]
  misc_feature (1)..(300): Homolog of NCBI NO: 15236285 NR Description: syntaxin of plants SYP123 [Arabidopsis thaliana]
  misc_feature (1)..(303): Homolog of NCBI NO: 15220328 NR Description: syntaxin of plants SYP125 [Arabidopsis thaliana]
  misc_feature (1)..(303): Homolog of NCBI NO: 15219900 NR Description: syntaxin of plants SYP124 [Arabidopsis thaliana]
MNDLFSSSFKKYTDLKQQAQMDDIESGKETMNLDKFFEDVENVKDDMKGVETLYKSLHYSNEECKTVHNAKKVKELRAKMDGDVAQVLKRVKMIKQKLEALEKANANSRNVSGCGPGSSTDRTRTSVVSGLGKKLKDLMDSFQGLRARMNAEYKETVERRYFTITGEQADEQTIENLISSGESENFLQKAIQEQGRGQILDTISEIQERHDAVKEIEKNLIELHQVFLDMAALVESQGQQLNDIESHVSKASSFVRRGTDQLQDAREYQKSSRKWTCYAILLFIVVFALLLIPALPHIMLMLK

SEQ ID NO: 50308 - protein, 283 aa, Arabidopsis thaliana
  peptide (1)..(283): Ceres Seq. ID no. 13588936
  misc_feature (188)..(250): Pfam Name: SNARE domain Pfam Description: SNARE domain
  misc_feature (1)..(273): Homolog of NCBI NO: 29788865 NR Description: putative cytokinesis-specific syntaxin-related
  misc_feature (1)..(273): Homolog of NCBI NO: 5912543 NR Description: Knolle [Capsicum annuum]
  misc_feature (1)..(273): Homolog of NCBI NO: 28974542 NR Description: knolle [Antirrhinum majus]
  misc_feature (1)..(272): Homolog of NCBI NO: 15231205 NR Description: syntaxin of plants SYP122 [Arabidopsis thaliana]
  misc_feature (1)..(272): Homolog of NCBI NO: 11358871 NR Description: syntaxin synt4 [imported] - Arabidopsis thaliana
  misc_feature (1)..(276): Homolog of NCBI NO: 4206787 NR Description: syntaxin-related protein Nt-syr1 [Nicotiana
  misc_feature (1)..(275): Homolog of NCBI NO: 15229865 NR Description: syntaxin of plants SYP121 [Arabidopsis thaliana]
  misc_feature (1)..(280): Homolog of NCBI NO: 15236285 NR Description: syntaxin of plants SYP123 [Arabidopsis thaliana]
  misc_feature (1)..(283): Homolog of NCBI NO: 15220328 NR Description: syntaxin of plants SYP125 [Arabidopsis thaliana]
  misc_feature (1)..(283): Homolog of NCBI NO: 15219900 NR Description: syntaxin of plants SYP124 [Arabidopsis thaliana]
MDDIESGKETMNLDKFFEDVENVKDDMKGVETLYKSLHYSNEECKTVHNAKKVKELRAKMDGDVAQVLKRVKMIKQKLEALEKANANSRNVSGCGPGSSTDRTRTSVVSGLGKKLKDLMDSFQGLRARMNAEYKETVERRYFTITGEQADEQTIENLISSGESENFLQKAIQEQGRGQILDTISEIQERHDAVKEIEKNLIELHQVFLDMAALVESQGQQLNDIESHVSKASSFVRRGTDQLQDAREYQKSSRKWTCYAILLFIVVFALLLIPALPHIMLMLK

SEQ ID NO: 50309 - protein, 273 aa, Arabidopsis thaliana
  peptide (1)..(273): Ceres Seq. ID no. 13588937
  misc_feature (178)..(240): Pfam Name: SNARE domain Pfam Description: SNARE domain
  misc_feature (1)..(263): Homolog of NCBI NO: 29788865 NR Description: putative cytokinesis-specific syntaxin-related
  misc_feature (1)..(263): Homolog of NCBI NO: 5912543 NR Description: Knolle [Capsicum annuum]
  misc_feature (1)..(263): Homolog of NCBI NO: 28974542 NR Description: knolle [Antirrhinum majus]
  misc_feature (1)..(262): Homolog of NCBI NO: 15231205 NR Description: syntaxin of plants SYP122 [Arabidopsis thaliana]
  misc_feature (1)..(262): Homolog of NCBI NO: 11358871 NR Description: syntaxin synt4 [imported] - Arabidopsis thaliana
  misc_feature (1)..(266): Homolog of NCBI NO: 4206787 NR Description: syntaxin-related protein Nt-syr1 [Nicotiana
  misc_feature (1)..(265): Homolog of NCBI NO: 15229865 NR Description: syntaxin of plants SYP121 [Arabidopsis thaliana]
  misc_feature (1)..(270): Homolog of NCBI NO: 15236285 NR Description: syntaxin of plants SYP123 [Arabidopsis thaliana]
  misc_feature (1)..(273): Homolog of NCBI NO: 15220328 NR Description: syntaxin of plants SYP125 [Arabidopsis thaliana]
  misc_feature (1)..(273): Homolog of NCBI NO: 15219900 NR Description: syntaxin of plants SYP124 [Arabidopsis thaliana]
MNLDKFFEDVENVKDDMKGVETLYKSLHYSNEECKTVHNAKKVKELRAKMDGDVAQVLKRVKMIKQKLEALEKANANSRNVSGCGPGSSTDRTRTSVVSGLGKKLKDLMDSFQGLRARMNAEYKETVERRYFTITGEQADEQTIENLISSGESENFLQKAIQEQGRGQILDTISEIQERHDAVKEIEKNLIELHQVFLDMAALVESQGQQLNDIESHVSKASSFVRRGTDQLQDAREYQKSSRKWTCYAILLFIVVFALLLIPALPHIMLMLK

SEQ ID NO: 50310 - DNA, 1075 bp, Arabidopsis thaliana
  misc_feature (1)..(1075): Ceres Seq. ID no. 13648098
  misc_feature: MA Experiment ID: 20000234 Result: Down-regulated in Transcription
  misc_feature: MA Experiment 20000234 PARAMETER Experiment Name: At_Siliques_P Parameter: Age (day) Value: 21
  misc_feature: MA Experiment 20000234 PARAMETER Experiment Name: At_Siliques_P Parameter: Organism Value: A. thaliana
  misc_feature: MA Experiment 20000234 PARAMETER Experiment Name: At_Siliques_P Parameter: Plant Line Value: WS
  misc_feature: MA Experiment 20000234 PARAMETER Experiment Name: At_Siliques_P Parameter: Tissue Value: Less Than 5mm Siliques vs. Whole Plant
  misc_feature: MA Experiment ID: 20001450 Result: Up-regulated in Transcription
  misc_feature: MA Experiment 20001450 PARAMETER Experiment Name: At_Far-red-induction_P Parameter: Age (day) Value: 7
  misc_feature: MA Experiment 20001450 PARAMETER Experiment Name: At_Far-red-induction_P Parameter: Light Value: Far-red vs. White
  misc_feature: MA Experiment 20001450 PARAMETER Experiment Name: At_Far-red-induction_P Parameter: Organism Value: A. thaliana
  misc_feature: MA Experiment 20001450 PARAMETER Experiment Name: At_Far-red-induction_P Parameter: Plant Line Value: Columbia
  misc_feature: MA Experiment 20001450 PARAMETER Experiment Name: At_Far-red-induction_P Parameter: Timepoint (hr) Value: 8
  misc_feature: MA Experiment 20001450 PARAMETER Experiment Name: At_Far-red-induction_P Parameter: Tissue Value: Whole Plant
  misc_feature: MA Experiment ID: 20001911 Result: Up-regulated in Transcription
  misc_feature: MA Experiment 20001911 PARAMETER Experiment Name: At_Drought_Reproduction_P Parameter: Age (day) Value: 40
  misc_feature: MA Experiment 20001911 PARAMETER Experiment Name: At_Drought_Reproduction_P Parameter: Organism Value: A. thaliana
  misc_feature: MA Experiment 20001911 PARAMETER Experiment Name: At_Drought_Reproduction_P Parameter: Plant Line Value: WS
  misc_feature: MA Experiment 20001911 PARAMETER Experiment Name: At_Drought_Reproduction_P Parameter: Timepoint (day) Value: 10
  misc_feature: MA Experiment 20001911 PARAMETER Experiment Name: At_Drought_Reproduction_P Parameter: Tissue Value: Flowers
  misc_feature: MA Experiment 20001911 PARAMETER Experiment Name: At_Drought_Reproduction_P Parameter: Treatment Value: Drought vs. No Drought
tgaagggtcagagttcctaaacatgttggatccattttgttgcgaacatctttaagatccgataaaagacttgtttgagagatctcaaggaagaagaagaaggggggaagcagataacatgtctgcgattgtttgcgggaagagatctctgttcgaggacttagccgccgcttctcctcccgtctccaagaaactccgttgcttttcttcatcttcttcgtctcgtttttctcctccgattcctccttcttcctcacttcttctcgatcacctcgccgcgattttccccgatatggataagcagattcttgagagggcaatcgaggaatgtggagatgaccttgattcagccattagatgtttgaatcagcttcgtttagaatctgccaataagaattctgattctgctacaaaccaatctcctgttgtaatccaggaaccaaatgttgaacctcaacagcaaggatcagccaaggaggaaccaaatgtcttgaacttggatggtacagagtgggttgagctttttgttagggaaatgatgaatgcttctgacatgaaagacgccaaagcccgtgctgcaagagcattggaagctttggagaagtcaattaatgcacgtactggtactgacgcaatgcaaaatctccaacaggaaaacatgatgctgaagcagcaattagaagctattgtacaggaaaacagtttactgaaacgagcggtagtgacacagcagaagcggcaaagagaatcggaagaccaaagtcaggaattgcagcatctgaggcagctagtcactcaataccaggaacagttgagaactttagaggtgaataactatgctctgacgcttcatctgaaacaagctcagcaaaacagttccatcccggggcggtaccatccagacgtcttctaatactttgtgaggccctcgtatcattttgtttccagtgtatttttctctgttggtttgtgactatttatatatattcggggaatcaaaactgtgttcttttgttgttgttgttgttgttgttattgttgtatatattctctttcgagttcaatgatggattcc

SEQ ID NO: 50311 - protein, 264 aa, Arabidopsis thaliana
  peptide (1)..(264): Ceres Seq. ID no. 13648099
  misc_feature (128)..(223): Homolog of NCBI NO: 35215036 NR Description: hypothetical protein [Oryza sativa (japonica
  misc_feature (1)..(97): Homolog of NCBI NO: 35215037 NR Description: hypothetical protein [Oryza sativa (japonica
  misc_feature (205)..(264): Homolog of NCBI NO: 35215036 NR Description: hypothetical protein [Oryza sativa (japonica
  misc_feature (127)..(264): Homolog of NCBI NO: 15241851 NR Description: hypothetical protein [Arabidopsis thaliana]
  misc_feature (62)..(264): Homolog of NCBI NO: 34015166 NR Description: hypothetical protein OSJNBa0017M13.20
  misc_feature (1)..(264): Homolog of NCBI NO: 18412607 NR Description: expressed protein [Arabidopsis thaliana]
  misc_feature (1)..(264): Homolog of NCBI NO: 13877755 NR Description: unknown protein [Arabidopsis thaliana]
  misc_feature (1)..(264): Homolog of NCBI NO: 18421340 NR Description: expressed protein [Arabidopsis thaliana]
MSAIVCGKRSLFEDLAAASPPVSKKLRCFSSSSSSRFSPPIPPSSSLLLDHLAAIFPDMDKQILERAIEECGDDLDSAIRCLNQLRLESANKNSDSATNQSPVVIQEPNVEPQQQGSAKEEPNVLNLDGTEWVELFVREMMNASDMKDAKARAARALEALEKSINARTGTDAMQNLQQENMMLKQQLEAIVQENSLLKRAVVTQQKRQRESEDQSQELQHLRQLVTQYQEQLRTLEVNNYALTLHLKQAQQNSSIPGRYHPDVF

SEQ ID NO: 50312 - protein, 206 aa, Arabidopsis thaliana
  peptide (1)..(206): Ceres Seq. ID no. 13648100
  misc_feature (70)..(165): Homolog of NCBI NO: 35215036 NR Description: hypothetical protein [Oryza sativa (japonica
  misc_feature (1)..(39): Homolog of NCBI NO: 35215037 NR Description: hypothetical protein [Oryza sativa (japonica
  misc_feature (147)..(206): Homolog of NCBI NO: 35215036 NR Description: hypothetical protein [Oryza sativa (japonica
  misc_feature (69)..(206): Homolog of NCBI NO: 15241851 NR Description: hypothetical protein [Arabidopsis thaliana]
  misc_feature (4)..(206): Homolog of NCBI NO: 34015166 NR Description: hypothetical protein OSJNBa0017M13.20
  misc_feature (1)..(206): Homolog of NCBI NO: 18412607 NR Description: expressed protein [Arabidopsis thaliana]
  misc_feature (1)..(206): Homolog of NCBI NO: 13877755 NR Description: unknown protein [Arabidopsis thaliana]
  misc_feature (1)..(206): Homolog of NCBI NO: 18421340 NR Description: expressed protein [Arabidopsis thaliana]
MDKQILERAIEECGDDLDSAIRCLNQLRLESANKNSDSATNQSPVVIQEPNVEPQQQGSAKEEPNVLNLDGTEWVELFVREMMNASDMKDAKARAARALEALEKSINARTGTDAMQNLQQENMMLKQQLEAIVQENSLLKRAVVTQQKRQRESEDQSQELQHLRQLVTQYQEQLRTLEVNNYALTLHLKQAQQNSSIPGRYHPDVF

SEQ ID NO: 50313 - DNA, 930 bp, Arabidopsis thaliana; identical to SEQ ID NO: 44764
  misc_feature (1)..(930): Ceres Seq. ID no. 13503816
  misc_feature: MA Experiment ID: 20000185 Result: Down-regulated in Transcription
  misc_feature: MA Experiment 20000185 PARAMETER Experiment Name: At_Roots__P Parameter: Age (day) Value: 7 vs. 21
  misc_feature: MA Experiment 20000185 PARAMETER Experiment Name: At_Roots__P Parameter: Organism Value: A. thaliana
  misc_feature: MA Experiment 20000185 PARAMETER Experiment Name: At_Roots__P Parameter: Tissue Value: Roots vs. Whole Plant
  misc_feature: MA Experiment ID: 20000265 Result: Down-regulated in Transcription
  misc_feature: MA Experiment 20000265 PARAMETER Experiment Name: At_Open_Flower_P Parameter: Age (day) Value: 21
  misc_feature: MA Experiment 20000265 PARAMETER Experiment Name: At_Open_Flower_P Parameter: Plant Line Value: WS
  misc_feature: MA Experiment 20000265 PARAMETER Experiment Name: At_Open_Flower_P Parameter: Tissue Value: Closed Flower vs. Whole Plant
  misc_feature: MA Experiment ID: 20000286 Result: Down-regulated in Transcription
  misc_feature: MA Experiment 20000286 PARAMETER Experiment Name: At_Open_Flower_P Parameter: Age (day) Value: 21
  misc_feature: MA Experiment 20000286 PARAMETER Experiment Name: At_Open_Flower_P Parameter: Plant Line Value: WS
  misc_feature: MA Experiment 20000286 PARAMETER Experiment Name: At_Open_Flower_P Parameter: Tissue Value: Half Open vs. Whole Plant
  misc_feature: MA Experiment ID: 20000439 Result: Down-regulated in Transcription
  misc_feature: MA Experiment 20000439 PARAMETER Experiment Name: At_Roots__P Parameter: Age (day) Value: 14 vs. 21
  misc_feature: MA Experiment 20000439 PARAMETER Experiment Name: At_Roots__P Parameter: Organism Value: A. thaliana
  misc_feature: MA Experiment 20000439 PARAMETER Experiment Name: At_Roots__P Parameter: Tissue Value: Roots vs. Whole Plant
  misc_feature: MA Experiment ID: 20000794 Result: Down-regulated in Transcription
  misc_feature: MA Experiment 20000794 PARAMETER Experiment Name: At_Petals_P Parameter: Age (day) Value: 23-25 days
  misc_feature: MA Experiment 20000794 PARAMETER Experiment Name: At_Petals_P Parameter: Plant Line Value: WS
  misc_feature: MA Experiment 20000794 PARAMETER Experiment Name: At_Petals_P Parameter: Tissue Value: Petals vs. Whole plant
  misc_feature: MA Experiment ID: 20001558 Result: Down-regulated in Transcription
  misc_feature: MA Experiment 20001558 PARAMETER Experiment Name: At_Drought_Soil_Dry_P Parameter: Age (day) Value: 27
  misc_feature: MA Experiment 20001558 PARAMETER Experiment Name: At_Drought_Soil_Dry_P Parameter: Organism Value: A. thaliana
  misc_feature: MA Experiment 20001558 PARAMETER Experiment Name: At_Drought_Soil_Dry_P Parameter: Plant Line Value: WS
  misc_feature: MA Experiment 20001558 PARAMETER Experiment Name: At_Drought_Soil_Dry_P Parameter: Post Timepoint (hr) Value: 6
  misc_feature: MA Experiment 20001558 PARAMETER Experiment Name: At_Drought_Soil_Dry_P Parameter: Post-Treatment Value: Re-Water vs. No Drought
  misc_feature: MA Experiment 20001558 PARAMETER Experiment Name: At_Drought_Soil_Dry_P Parameter: Timepoint (day) Value: 13
  misc_feature: MA Experiment 20001558 PARAMETER Experiment Name: At_Drought_Soil_Dry_P Parameter: Treatment Value: Drought vs. No Drought
  misc_feature: MA Experiment ID: 20001560 Result: Down-regulated in Transcription
  misc_feature: MA Experiment 20001560 PARAMETER Experiment Name: At_Drought_Soil_Dry_P Parameter: Age (day) Value: 28
  misc_feature: MA Experiment 20001560 PARAMETER Experiment Name: At_Drought_Soil_Dry_P Parameter: Organism Value: A. thaliana
  misc_feature: MA Experiment 20001560 PARAMETER Experiment Name: At_Drought_Soil_Dry_P Parameter: Plant Line Value: WS
  misc_feature: MA Experiment 20001560 PARAMETER Experiment Name: At_Drought_Soil_Dry_P Parameter: Post Timepoint (hr) Value: None
  misc_feature: MA Experiment 20001560 PARAMETER Experiment Name: At_Drought_Soil_Dry_P Parameter: Post-Treatment Value: None
  misc_feature: MA Experiment 20001560 PARAMETER Experiment Name: At_Drought_Soil_Dry_P Parameter: Timepoint (day) Value: 14
  misc_feature: MA Experiment 20001560 PARAMETER Experiment Name: At_Drought_Soil_Dry_P Parameter: Treatment Value: Drought vs. No Drought
  misc_feature: MA Experiment ID: 20001905 Result: Down-regulated in Transcription
  misc_feature: MA Experiment 20001905 PARAMETER Experiment Name: At_Drought_Reproduction_P Parameter: Age (day) Value: 40
  misc_feature: MA Experiment 20001905 PARAMETER Experiment Name: At_Drought_Reproduction_P Parameter: Organism Value: A. thaliana
  misc_feature: MA Experiment 20001905 PARAMETER Experiment Name: At_Drought_Reproduction_P Parameter: Plant Line Value: WS
  misc_feature: MA Experiment 20001905 PARAMETER Experiment Name: At_Drought_Reproduction_P Parameter: Timepoint (day) Value: 10
  misc_feature: MA Experiment 20001905 PARAMETER Experiment Name: At_Drought_Reproduction_P Parameter: Tissue Value: Rosettes
  misc_feature: MA Experiment 20001905 PARAMETER Experiment Name: At_Drought_Reproduction_P Parameter: Treatment Value: Drought vs. No Drought

SEQ ID NO: 50314 - protein, 217 aa, Arabidopsis thaliana; identical to SEQ ID NO: 44765
  peptide (1)..(217): Ceres Seq. ID no. 13503817
  misc_feature (25)..(206): Pfam Name: Protein of unknown function (DUF567) Pfam Description: Protein of unknown function (DUF567)
  misc_feature (25)..(206): Pfam Name: Protein of unknown function (DUF567) Pfam Description: Protein of unknown function (DUF567)
  misc_feature (27)..(211): Homolog of NCBI NO: 15228906 NR Description: hypothetical protein [Arabidopsis thaliana]
  misc_feature (18)..(213): Homolog of NCBI NO: 27818079 NR Description: OSJNBa0086N05.7 [Oryza sativa (japonica
  misc_feature (1)..(173): Homolog of NCBI NO: 25352417 NR Description: hypothetical protein T3M13.14 - Arabidopsis
  misc_feature (26)..(212): Homolog of NCBI NO: 15225960 NR Description: expressed protein [Arabidopsis thaliana]
  misc_feature (26)..(212): Homolog of NCBI NO: 17979321 NR Description: unknown protein [Arabidopsis thaliana]
  misc_feature (27)..(211): Homolog of NCBI NO: 15228906 NR Description: hypothetical protein [Arabidopsis thaliana]
  misc_feature (1)..(173): Homolog of NCBI NO: 25352417 NR Description: hypothetical protein T3M13.14 - Arabidopsis
  misc_feature (26)..(212): Homolog of NCBI NO: 17979321 NR Description: unknown protein [Arabidopsis thaliana]
  misc_feature (1)..(217): Homolog of NCBI NO: 30679390 NR Description: expressed protein [Arabidopsis thaliana]
  misc_feature (1)..(172): Homolog of NCBI NO: 18413737 NR Description: expressed protein [Arabidopsis thaliana]
  misc_feature (1)..(172): Homolog of NCBI NO: 21553506 NR Description: unknown [Arabidopsis thaliana]
  misc_feature (1)..(207): Homolog of NCBI NO: 9665105 NR Description: Hypothetical protein [Arabidopsis thaliana]
  misc_feature (26)..(207): Homolog of NCBI NO: 15217694 NR Description: hypothetical protein [Arabidopsis thaliana]
  misc_feature (26)..(212): Homolog of NCBI NO: 15225960 NR Description: expressed protein [Arabidopsis thaliana]
  misc_feature (18)..(213): Homolog of NCBI NO: 27818079 NR Description: OSJNBa0086N05.7 [Oryza sativa (japonica
  misc_feature (26)..(207): Homolog of NCBI NO: 15217694 NR Description: hypothetical protein [Arabidopsis thaliana]
  misc_feature (1)..(207): Homolog of NCBI NO: 9665105 NR Description: Hypothetical protein [Arabidopsis thaliana]
  misc_feature (1)..(172): Homolog of NCBI NO: 21553506 NR Description: unknown [Arabidopsis thaliana]
  misc_feature (1)..(172): Homolog of NCBI NO: 18413737 NR Description: expressed protein [Arabidopsis thaliana]
  misc_feature (1)..(217): Homolog of NCBI NO: 30679390 NR Description: expressed protein [Arabidopsis thaliana]

SEQ ID NO: 50315 - protein, 178 aa, Arabidopsis thaliana; identical to SEQ ID NO: 44766
  peptide (1)..(178): Ceres Seq. ID no. 13503818
  misc_feature (1)..(167): Pfam Name: Protein of unknown function (DUF567) Pfam Description: Protein of unknown function (DUF567)
  misc_feature (1)..(167): Pfam Name: Protein of unknown function (DUF567) Pfam Description: Protein of unknown function (DUF567)
  misc_feature (1)..(172): Homolog of NCBI NO: 15228906 NR Description: hypothetical protein [Arabidopsis thaliana]
  misc_feature (1)..(174): Homolog of NCBI NO: 27818079 NR Description: OSJNBa0086N05.7 [Oryza sativa (japonica
  misc_feature (1)..(134): Homolog of NCBI NO: 25352417 NR Description: hypothetical protein T3M13.14 - Arabidopsis
  misc_feature (1)..(173): Homolog of NCBI NO: 15225960 NR Description: expressed protein [Arabidopsis thaliana]
  misc_feature (1)..(173): Homolog of NCBI NO: 17979321 NR Description: unknown protein [Arabidopsis thaliana]
  misc_feature (1)..(172): Homolog of NCBI NO: 15228906 NR Description: hypothetical protein [Arabidopsis thaliana]
  misc_feature (1)..(134): Homolog of NCBI NO: 25352417 NR Description: hypothetical protein T3M13.14 - Arabidopsis
  misc_feature (1)..(173): Homolog of NCBI NO: 17979321 NR Description: unknown protein [Arabidopsis thaliana]
  misc_feature (1)..(178): Homolog of NCBI NO: 30679390 NR Description: expressed protein [Arabidopsis thaliana]
  misc_feature (1)..(133): Homolog of NCBI NO: 18413737 NR Description: expressed protein [Arabidopsis thaliana]
  misc_feature (1)..(133): Homolog of NCBI NO: 21553506 NR Description: unknown [Arabidopsis thaliana]
  misc_feature (1)..(168): Homolog of NCBI NO: 9665105 NR Description: Hypothetical protein [Arabidopsis thaliana]
  misc_feature (1)..(168): Homolog of NCBI NO: 15217694 NR Description: hypothetical protein [Arabidopsis thaliana]
  misc_feature (1)..(173): Homolog of NCBI NO: 15225960 NR Description: expressed protein [Arabidopsis thaliana]
  misc_feature (1)..(174): Homolog of NCBI NO: 27818079 NR Description: OSJNBa0086N05.7 [Oryza sativa (japonica
  misc_feature (1)..(168): Homolog of NCBI NO: 15217694 NR Description: hypothetical protein [Arabidopsis thaliana]
  misc_feature (1)..(168): Homolog of NCBI NO: 9665105 NR Description: Hypothetical protein [Arabidopsis thaliana]
  misc_feature (1)..(133): Homolog of NCBI NO: 21553506 NR Description: unknown [Arabidopsis thaliana]
  misc_feature (1)..(133): Homolog of NCBI NO: 18413737 NR Description: expressed protein [Arabidopsis thaliana]
  misc_feature (1)..(178): Homolog of NCBI NO: 30679390 NR Description: expressed protein [Arabidopsis thaliana]

SEQ ID NO: 50316 - protein, 172 aa, Arabidopsis thaliana; identical to SEQ ID NO: 44767
  peptide (1)..(172): Ceres Seq. ID no. 13503819
  misc_feature (1)..(161): Pfam Name: Protein of unknown function (DUF567) Pfam Description: Protein of unknown function (DUF567)
  misc_feature (1)..(161): Pfam Name: Protein of unknown function (DUF567) Pfam Description: Protein of unknown function (DUF567)
  misc_feature (1)..(166): Homolog of NCBI NO: 15228906 NR Description: hypothetical protein [Arabidopsis thaliana]
  misc_feature (1)..(168): Homolog of NCBI NO: 27818079 NR Description: OSJNBa0086N05.7 [Oryza sativa (japonica
  misc_feature (1)..(128): Homolog of NCBI NO: 25352417 NR Description: hypothetical protein T3M13.14 - Arabidopsis
  misc_feature (1)..(167): Homolog of NCBI NO: 15225960 NR Description: expressed protein [Arabidopsis thaliana]
  misc_feature (1)..(167): Homolog of NCBI NO: 17979321 NR Description: unknown protein [Arabidopsis thaliana]
  misc_feature (1)..(166): Homolog of NCBI NO: 15228906 NR Description: hypothetical protein [Arabidopsis thaliana]
  misc_feature (1)..(128): Homolog of NCBI NO: 25352417 NR Description: hypothetical protein T3M13.14 - Arabidopsis
  misc_feature (1)..(167): Homolog of NCBI NO: 17979321 NR Description: unknown protein [Arabidopsis thaliana]
  misc_feature (1)..(172): Homolog of NCBI NO: 30679390 NR Description: expressed protein [Arabidopsis thaliana]
  misc_feature (1)..(127): Homolog of NCBI NO: 18413737 NR Description: expressed protein [Arabidopsis thaliana]
  misc_feature (1)..(127): Homolog of NCBI NO: 21553506 NR Description: unknown [Arabidopsis thaliana]
  misc_feature (1)..(162): Homolog of NCBI NO: 9665105 NR Description: Hypothetical protein [Arabidopsis thaliana]
  misc_feature (1)..(162): Homolog of NCBI NO: 15217694 NR Description: hypothetical protein [Arabidopsis thaliana]
  misc_feature (1)..(167): Homolog of NCBI NO: 15225960 NR Description: expressed protein [Arabidopsis thaliana]
  misc_feature (1)..(168): Homolog of NCBI NO: 27818079 NR Description: OSJNBa0086N05.7 [Oryza sativa (japonica
  misc_feature (1)..(162): Homolog of NCBI NO: 15217694 NR Description: hypothetical protein [Arabidopsis thaliana]
  misc_feature (1)..(162): Homolog of NCBI NO: 9665105 NR Description: Hypothetical protein [Arabidopsis thaliana]
  misc_feature (1)..(127): Homolog of NCBI NO: 21553506 NR Description: unknown [Arabidopsis thaliana]
  misc_feature (1)..(127): Homolog of NCBI NO: 18413737 NR Description: expressed protein [Arabidopsis thaliana]
  misc_feature (1)..(172): Homolog of NCBI NO: 30679390 NR Description: expressed protein [Arabidopsis thaliana]

SEQ ID NO: 50317 - DNA, 909 bp, Arabidopsis thaliana
  misc_feature (1)..(909): Ceres Seq. ID no. 13647730
  misc_feature: MA Experiment ID: 20001451 Result: Down-regulated in Transcription
  misc_feature: MA Experiment 20001451 PARAMETER Experiment Name: At_Far-red-induction_P Parameter: Age (day) Value: 7
  misc_feature: MA Experiment 20001451 PARAMETER Experiment Name: At_Far-red-induction_P Parameter: Light Value: Far-red vs. White
  misc_feature: MA Experiment 20001451 PARAMETER Experiment Name: At_Far-red-induction_P Parameter: Organism Value: A. thaliana
  misc_feature: MA Experiment 20001451 PARAMETER Experiment Name: At_Far-red-induction_P Parameter: Plant Line Value: Columbia
  misc_feature: MA Experiment 20001451 PARAMETER Experiment Name: At_Far-red-induction_P Parameter: Timepoint (hr) Value: 24
  misc_feature: MA Experiment 20001451 PARAMETER Experiment Name: At_Far-red-induction_P Parameter: Tissue Value: Whole Plant
gtcaattattcgaattgggaaaacatctaaagctgaggagaagataaatccgatctaggtctcttcttccccaatctctctgtgtctctctcgatcgaagaaagaagacaatggacaaaggcaaagcagtgatgggtactggtcggagatgggccgtcgaattctccgatcaatctactgttccatcttcccgtgacatcctcgatccacctggcttctctcgtgcctctcaggaacaggatgattcagcaaacagccgccaaaagaaagacgctgaagctacttggaaacttcagaaagcgtgggaagtagcgcaatctccatttaagaatttgatgatgatgggtttcatgatgtggatggctggaaacacagttcatctttttagtattggtattactttctctgctctttggcagcctatcagtgctcttcagagtgttggaaagatttttgagccattcaaggataacaaagtggaactacttatgccgaaattagtgttccttgccctaaaccttggagggctagctttgggtgtctggaagcttaacactttggggcttcttccaacacatgcatcagattgggtttcatctctaccccctcctcaggaagttgaacactcgggcggaggatttgttttccactgatgaatcagcgtctcttgtattttaaaataatccgctaaaaccgcgcgacgacgacaacacttttgtgagataactgcaacagttacttaagtgatatgaacctccctcatcttatgatattcttgtagcattttcaaaactcagaaaccatagtttttacactttttagtatgatgctcattgttcatcataactatgaatgtattattggcactgaaaaaaaaaaaaaaaaaaaactcgagggggggcccggtac

SEQ ID NO: 50318 - protein, 180 aa, Arabidopsis thaliana
  peptide (1)..(180): Ceres Seq. ID no. 13647731
  misc_feature (14)..(173): Homolog of NCBI NO: 17544614 NR Description: Putative protein of eukaryotic origin
  misc_feature (1)..(176): Homolog of NCBI NO: 31211131 NR Description: ENSANGP00000016305 [Anopheles gambiae]
  misc_feature (13)..(173): Homolog of NCBI NO: 39588364 NR Description: Hypothetical protein CBG19952 [Caenorhabditis
  misc_feature (1)..(175): Homolog of NCBI NO: 28829924 NR Description: similar to ZK616.6.p
  misc_feature (7)..(178): Homolog of NCBI NO: 37590930 NR Description: Unknown (protein for MGC:75691) [Silurana
  misc_feature (3)..(178): Homolog of NCBI NO: 13386014 NR Description: RIKEN cDNA 2610318K02 [Mus musculus]
  misc_feature (3)..(178): Homolog of NCBI NO: 12834476 NR Description: unnamed protein product [Mus musculus]
  misc_feature (3)..(178): Homolog of NCBI NO: 7705997 NR Description: hypothetical protein LOC51234 [Homo sapiens]
  misc_feature (1)..(168): Homolog of NCBI NO: 11358300 NR Description: hypothetical protein T30N20_50 - Arabidopsis
  misc_feature (1)..(180): Homolog of NCBI NO: 18416375 NR Description: expressed protein [Arabidopsis thaliana]
MDKGKAVMGTGRRWAVEFSDQSTVPSSRDILDPPGFSRASQEQDDSANSRQKKDAEATWKLQKAWEVAQSPFKNLMMMGFMMWMAGNTVHLFSIGITFSALWQPISALQSVGKIFEPFKDNKVELLMPKLVFLALNLGGLALGVWKLNTLGLLPTHASDWVSSLPPPQEVEHSGGGFVFH

SEQ ID NO: 50319 - protein, 173 aa, Arabidopsis thaliana
  peptide (1)..(173): Ceres Seq. ID no. 13647732
  misc_feature (7)..(166): Homolog of NCBI NO: 17544614 NR Description: Putative protein of eukaryotic origin
  misc_feature (1)..(169): Homolog of NCBI NO: 31211131 NR Description: ENSANGP00000016305 [Anopheles gambiae]
  misc_feature (6)..(166): Homolog of NCBI NO: 39588364 NR Description: Hypothetical protein CBG19952 [Caenorhabditis
  misc_feature (1)..(168): Homolog of NCBI NO: 28829924 NR Description: similar to ZK616.6.p
  misc_feature (1)..(171): Homolog of NCBI NO: 37590930 NR Description: Unknown (protein for MGC:75691) [Silurana
  misc_feature (1)..(171): Homolog of NCBI NO: 13386014 NR Description: RIKEN cDNA 2610318K02 [Mus musculus]
  misc_feature (1)..(171): Homolog of NCBI NO: 12834476 NR Description: unnamed protein product [Mus musculus]
  misc_feature (1)..(171): Homolog of NCBI NO: 7705997 NR Description: hypothetical protein LOC51234 [Homo sapiens]
  misc_feature (1)..(161): Homolog of NCBI NO: 11358300 NR Description: hypothetical protein T30N20_50 - Arabidopsis
  misc_feature (1)..(173): Homolog of NCBI NO: 18416375 NR Description: expressed protein [Arabidopsis thaliana]
MGTGRRWAVEFSDQSTVPSSRDILDPPGFSRASQEQDDSANSRQKKDAEATWKLQKAWEVAQSPFKNLMMMGFMMWMAGNTVHLFSIGITFSALWQPISALQSVGKIFEPFKDNKVELLMPKLVFLALNLGGLALGVWKLNTLGLLPTHASDWVSSLPPPQEVEHSGGGFVFH

SEQ ID NO: 50320 - protein, 105 aa, Arabidopsis thaliana
  peptide (1)..(105): Ceres Seq. ID no. 13647733
  misc_feature (1)..(98): Homolog of NCBI NO: 17544614 NR Description: Putative protein of eukaryotic origin
  misc_feature (1)..(101): Homolog of NCBI NO: 31211131 NR Description: ENSANGP00000016305 [Anopheles gambiae]
  misc_feature (1)..(98): Homolog of NCBI NO: 39588364 NR Description: Hypothetical protein CBG19952 [Caenorhabditis
  misc_feature (1)..(100): Homolog of NCBI NO: 28829924 NR Description: similar to ZK616.6.p
  misc_feature (1)..(103): Homolog of NCBI NO: 37590930 NR Description: Unknown (protein for MGC:75691) [Silurana
  misc_feature (1)..(103): Homolog of NCBI NO: 12834476 NR Description: unnamed protein product [Mus musculus]
  misc_feature (1)..(103): Homolog of NCBI NO: 13386014 NR Description: RIKEN cDNA 2610318K02 [Mus musculus]
  misc_feature (1)..(103): Homolog of NCBI NO: 7705997 NR Description: hypothetical protein LOC51234 [Homo sapiens]
  misc_feature (1)..(93): Homolog of NCBI NO: 11358300 NR Description: hypothetical protein T30N20_50 - Arabidopsis
  misc_feature (1)..(105): Homolog of NCBI NO: 18416375 NR Description: expressed protein [Arabidopsis thaliana]
MMMGFMMWMAGNTVHLFSIGITFSALWQPISALQSVGKIFEPFKDNKVELLMPKLVFLALNLGGLALGVWKLNTLGLLPTHASDWVSSLPPPQEVEHSGGGFVFH

SEQ ID NO: 50321 - DNA, 1611 bp, Arabidopsis thaliana
  misc_feature (1)..(1611): Ceres Seq. ID no. 12591451
  misc_feature: MA Experiment ID: 20000173 Result: Down-regulated in Transcription
  misc_feature: MA Experiment 20000173 PARAMETER Experiment Name: At_42deg_Heat_P Parameter: Age (day) Value: 14
  misc_feature: MA Experiment 20000173 PARAMETER Experiment Name: At_42deg_Heat_P Parameter: Organism Value: A. thaliana
  misc_feature: MA Experiment 20000173 PARAMETER Experiment Name: At_42deg_Heat_P Parameter: Plant Line Value: WS
  misc_feature: MA Experiment 20000173 PARAMETER Experiment Name: At_42deg_Heat_P Parameter: Temperature (deg C) Value: 42 vs. 22
  misc_feature: MA Experiment 20000173 PARAMETER Experiment Name: At_42deg_Heat_P Parameter: Timepoint (hr) Value: 6
  misc_feature: MA Experiment 20000173 PARAMETER Experiment Name: At_42deg_Heat_P Parameter: Tissue Value: Aerial
  misc_feature: MA Experiment ID: 20000185 Result: Up-regulated in Transcription
  misc_feature: MA Experiment 20000185 PARAMETER Experiment Name: At_Roots__P Parameter: Age (day) Value: 7 vs. 21
  misc_feature: MA Experiment 20000185 PARAMETER Experiment Name: At_Roots__P Parameter: Organism Value: A. thaliana
  misc_feature: MA Experiment 20000185 PARAMETER Experiment Name: At_Roots__P Parameter: Tissue Value: Roots vs. Whole Plant
atgaatttcacagaatcaatgaacgttgtgcacgccagaatccaacaacttgaaccagagaatgcagcaaagatctttggttatctcttgttgatgcaagaaaatggcaaccgcgacatgatccgtctcgcgttctgtcctgattctgttatgtgttctgtcatcaattgcgttaaatacgagttagctaggaattctcatcattaccacagccctccttctgatcacattcctactcccaaatttggatcattcaccggttcatcgcctctttcggtttcggtttctcctcccatgaaaaccggtttttgggagaattcaaccgagatggataccttgcagaacaatcttcagttcttgaattttgaggatcctttgaccagccctgaattctctaacgggttcttctctcaagaacgtcaatgtttgcctttgcgaactagccgaagatccccgagtttacccgagttcccggtaaaaatctgccattacttcaacaaagggttctgcaaacacggcaacaactgtaggtacttccacgggcagattataccggagagggagagttttgctcagatgtttaatccaaacaacaacctaagtgacgaagagcatgttgtttcccctgtatctcttgagaagctagaaggtgagatcattgagttactcaagttaagaagaggagctccaatctccatagcttcattgccaatgatgtactacgaaaaatacggtaggactcttcaagctgaaggatatctcactgagtcacaaagacatggcaaagctggctatagtctcaccaagcttcttgctcgcttgaagaacacgattcgcctcgtcgacaggcctcatgggcaacattcagttatattagcagaggatgcatcaaagtttgtggaatacactggagagagaaatgaacatggagcaatccttgctggttctagacagatttacttaacgtttccggcagagagtagtttcactgaacatgatgtctcaatctacttcacctcatatggacatgtggaagatgtgaggattccttgccagcagaaaagaatgtatggatttgtaacatttgcttcctcagaaacagttaaacacattcttgctaaaggcaatcctcatttcatttgcaatgcacgtgttctagtcaagccttaccgggaaaaatcacgctctagtcgatacctcgacaattacaagcctctacacggcatgcgatatggctctaaatttattgagagagacatagagatgaacacattgccaccgcgggttagtgagagctcaagaatgaggaagccatttcttagtgagcctgaacaatcagtttctaagtccttacctactaattactcctacctcggcttctcctcggatgacttcaagttaacatcaaatgcggagcaagaggaacaagcagaacggttgagctacctactggactatttgaacacggaagataatgtcatgaacataaccactaactacagagacaatgatcggagaactcattgtgaatcgttggacagtcaagtcctgaatctacccgagagtccgttttcttccctttcggggaaggagatttcaacggttacatag

SEQ ID NO: 50322 - protein, 536 aa, Arabidopsis thaliana
  peptide (1)..(536): Ceres Seq. ID no. 12591452
  misc_feature (330)..(387): Pfam Name: RNA recognition motif. (a.k.a. RRM, RBD, or RNP domain) Pfam Description: RNA recognition motif. (a.k.a. RRM, RBD, or RNP
  misc_feature (289)..(402): Homolog of NCBI NO: 15231090 NR Description: putative protein
  misc_feature (1)..(180): Homolog of NCBI NO: 21594547 NR Description: unknown [Arabidopsis thaliana]
  misc_feature (1)..(180): Homolog of NCBI NO: 19423979 NR Description: unknown protein [Arabidopsis thaliana]
  misc_feature (1)..(180): Homolog of NCBI NO: 15231090 NR Description: putative protein
  misc_feature (162)..(199): Homolog of NCBI NO: 38230504 NR Description: predicted protein [Populus alba x Populus tremula]
  misc_feature (9)..(94): Homolog of NCBI NO: 38230504 NR Description: predicted protein [Populus alba x Populus tremula]
  misc_feature (289)..(395): Homolog of NCBI NO: 38230504 NR Description: predicted protein [Populus alba x Populus tremula]
  misc_feature (160)..(394): Homolog of NCBI NO: 27817837 NR Description: OJ1127_E01.5 [Oryza sativa (japonica
  misc_feature (1)..(374): Homolog of NCBI NO: 15231722 NR Description: RRM-containing protein; protein id: At3g52980.1
  misc_feature (1)..(536): Homolog of NCBI NO: 15224480 NR Description: RRM-containing protein; protein id: At2g05160.1
MNFTESMNVVHARIQQLEPENAAKIFGYLLLMQENGNRDMIRLAFCPDSVMCSVINCVKYELARNSHHYHSPPSDHIPTPKFGSFTGSSPLSVSVSPPMKTGFWENSTEMDTLQNNLQFLNFEDPLTSPEFSNGFFSQERQCLPLRTSRRSPSLPEFPVKICHYFNKGFCKHGNNCRYFHGQIIPERESFAQMFNPNNNLSDEEHVVSPVSLEKLEGEIIELLKLRRGAPISIASLPMMYYEKYGRTLQAEGYLTESQRHGKAGYSLTKLLARLKNTIRLVDRPHGQHSVILAEDASKFVEYTGERNEHGAILAGSRQIYLTFPAESSFTEHDVSIYFTSYGHVEDVRIPCQQKRMYGFVTFASSETVKHILAKGNPHFICNARVLVKPYREKSRSSRYLDNYKPLHGMRYGSKFIERDIEMNTLPPRVSESSRMRKPFLSEPEQSVSKSLPTNYSYLGFSSDDFKLTSNAEQEEQAERLSYLLDYLNTEDNVMNITTNYRDNDRRTHCESLDSQVLNLPESPFSSLSGKEISTVT

SEQ ID NO: 50323 - protein, 530 aa, Arabidopsis thaliana
  peptide (1)..(530): Ceres Seq. ID no. 12591453
  misc_feature (324)..(381): Pfam Name: RNA recognition motif. (a.k.a. RRM, RBD, or RNP domain) Pfam Description: RNA recognition motif. (a.k.a. RRM, RBD, or RNP
  misc_feature (283)..(396): Homolog of NCBI NO: 15231090 NR Description: putative protein
  misc_feature (1)..(174): Homolog of NCBI NO: 19423979 NR Description: unknown protein [Arabidopsis thaliana]
  misc_feature (1)..(174): Homolog of NCBI NO: 21594547 NR Description: unknown [Arabidopsis thaliana]
  misc_feature (1)..(174): Homolog of NCBI NO: 15231090 NR Description: putative protein
  misc_feature (156)..(193): Homolog of NCBI NO: 38230504 NR Description: predicted protein [Populus alba x Populus tremula]
  misc_feature (3)..(88): Homolog of NCBI NO: 38230504 NR Description: predicted protein [Populus alba x Populus tremula]
  misc_feature (283)..(389): Homolog of NCBI NO: 38230504 NR Description: predicted protein [Populus alba x Populus tremula]
  misc_feature (154)..(388): Homolog of NCBI NO: 27817837 NR Description: OJ1127_E01.5 [Oryza sativa (japonica
  misc_feature (1)..(368): Homolog of NCBI NO: 15231722 NR Description: RRM-containing protein; protein id: At3g52980.1
  misc_feature (1)..(530): Homolog of NCBI NO: 15224480 NR Description: RRM-containing protein; protein id: At2g05160.1
MNVVHARIQQLEPENAAKIFGYLLLMQENGNRDMIRLAFCPDSVMCSVINCVKYELARNSHHYHSPPSDHIPTPKFGSFTGSSPLSVSVSPPMKTGFWENSTEMDTLQNNLQFLNFEDPLTSPEFSNGFFSQERQCLPLRTSRRSPSLPEFPVKICHYFNKGFCKHGNNCRYFHGQIIPERESFAQMFNPNNNLSDEEHVVSPVSLEKLEGEIIELLKLRRGAPISIASLPMMYYEKYGRTLQAEGYLTESQRHGKAGYSLTKLLARLKNTIRLVDRPHGQHSVILAEDASKFVEYTGERNEHGAILAGSRQIYLTFPAESSFTEHDVSIYFTSYGHVEDVRIPCQQKRMYGFVTFASSETVKHILAKGNPHFICNARVLVKPYREKSRSSRYLDNYKPLHGMRYGSKFIERDIEMNTLPPRVSESSRMRKPFLSEPEQSVSKSLPTNYSYLGFSSDDFKLTSNAEQEEQAERLSYLLDYLNTEDNVMNITTNYRDNDRRTHCESLDSQVLNLPESPFSSLSGKEISTVT

SEQ ID NO: 50324 - protein, 505 aa, Arabidopsis thaliana
  peptide (1)..(505): Ceres Seq. ID no. 12591454
  misc_feature (299)..(356): Pfam Name: RNA recognition motif. (a.k.a. RRM, RBD, or RNP domain) Pfam Description: RNA recognition motif. (a.k.a. RRM, RBD, or RNP
  misc_feature (258)..(371): Homolog of NCBI NO: 15231090 NR Description: putative protein
  misc_feature (1)..(149): Homolog of NCBI NO: 19423979 NR Description: unknown protein [Arabidopsis thaliana]
  misc_feature (1)..(149): Homolog of NCBI NO: 21594547 NR Description: unknown [Arabidopsis thaliana]
  misc_feature (1)..(149): Homolog of NCBI NO: 15231090 NR Description: putative protein
  misc_feature (131)..(168): Homolog of NCBI NO: 38230504 NR Description: predicted protein [Populus alba x Populus tremula]
  misc_feature (1)..(63): Homolog of NCBI NO: 38230504 NR Description: predicted protein [Populus alba x Populus tremula]
  misc_feature (258)..(364): Homolog of NCBI NO: 38230504 NR Description: predicted protein [Populus alba x Populus tremula]
  misc_feature (129)..(363): Homolog of NCBI NO: 27817837 NR Description: OJ1127_E01.5 [Oryza sativa (japonica
  misc_feature (1)..(343): Homolog of NCBI NO: 15231722 NR Description: RRM-containing protein; protein id: At3g52980.1
  misc_feature (1)..(505): Homolog of NCBI NO: 15224480 NR Description: RRM-containing protein; protein id: At2g05160.1
MQENGNRDMIRLAFCPDSVMCSVINCVKYELARNSHHYHSPPSDHIPTPKFGSFTGSSPLSVSVSPPMKTGFWENSTEMDTLQNNLQFLNFEDPLTSPEFSNGFFSQERQCLPLRTSRRSPSLPEFPVKICHYFNKGFCKHGNNCRYFHGQIIPERESFAQMFNPNNNLSDEEHVVSPVSLEKLEGEIIELLKLRRGAPISIASLPMMYYEKYGRTLQAEGYLTESQRHGKAGYSLTKLLARLKNTIRLVDRPHGQHSVILAEDASKFVEYTGERNEHGAILAGSRQIYLTFPAESSFTEHDVSIYFTSYGHVEDVRIPCQQKRMYGFVTFASSETVKHILAKGNPHFICNARVLVKPYREKSRSSRYLDNYKPLHGMRYGSKFIERDIEMNTLPPRVSESSRMRKPFLSEPEQSVSKSLPTNYSYLGFSSDDFKLTSNAEQEEQAERLSYLLDYLNTEDNVMNITTNYRDNDRRTHCESLDSQVLNLPESPFSSLSGKEISTVT

SEQ ID NO: 50325 - DNA, 1169 bp, Arabidopsis thaliana
  misc_feature (1)..(1169): Ceres Seq. ID no. 12592588
  misc_feature: MA Experiment ID: 20000173 Result: Down-regulated in Transcription
  misc_feature: MA Experiment 20000173 PARAMETER Experiment Name: At_42deg_Heat_P Parameter: Age (day) Value: 14
  misc_feature: MA Experiment 20000173 PARAMETER Experiment Name: At_42deg_Heat_P Parameter: Organism Value: A. thaliana
  misc_feature: MA Experiment 20000173 PARAMETER Experiment Name: At_42deg_Heat_P Parameter: Plant Line Value: WS
  misc_feature: MA Experiment 20000173 PARAMETER Experiment Name: At_42deg_Heat_P Parameter: Temperature (deg C) Value: 42 vs. 22
  misc_feature: MA Experiment 20000173 PARAMETER Experiment Name: At_42deg_Heat_P Parameter: Timepoint (hr) Value: 6
  misc_feature: MA Experiment 20000173 PARAMETER Experiment Name: At_42deg_Heat_P Parameter: Tissue Value: Aerial
  misc_feature: MA Experiment ID: 20000264 Result: Up-regulated in Transcription
  misc_feature: MA Experiment 20000264 PARAMETER Experiment Name: At_Open_Flower_P Parameter: Age (day) Value: 21
  misc_feature: MA Experiment 20000264 PARAMETER Experiment Name: At_Open_Flower_P Parameter: Plant Line Value: WS
  misc_feature: MA Experiment 20000264 PARAMETER Experiment Name: At_Open_Flower_P Parameter: Tissue Value: Open Flower vs. Whole Plant
  misc_feature: MA Experiment ID: 20000265 Result: Up-regulated in Transcription
  misc_feature: MA Experiment 20000265 PARAMETER Experiment Name: At_Open_Flower_P Parameter: Age (day) Value: 21
  misc_feature: MA Experiment 20000265 PARAMETER Experiment Name: At_Open_Flower_P Parameter: Plant Line Value: WS
  misc_feature: MA Experiment 20000265 PARAMETER Experiment Name: At_Open_Flower_P Parameter: Tissue Value: Closed Flower vs. Whole Plant
  misc_feature: MA Experiment ID: 20000437 Result: Up-regulated in Transcription
  misc_feature: MA Experiment 20000437 PARAMETER Experiment Name: At_Drought_P Parameter: Age (day) Value: 8
  misc_feature: MA Experiment 20000437 PARAMETER Experiment Name: At_Drought_P Parameter: Organism Value: A. thaliana
  misc_feature: MA Experiment 20000437 PARAMETER Experiment Name: At_Drought_P Parameter: Plant Line Value: WS
  misc_feature: MA Experiment 20000437 PARAMETER Experiment Name: At_Drought_P Parameter: Timepoint (hr) Value: 24
  misc_feature: MA Experiment 20000437 PARAMETER Experiment Name: At_Drought_P Parameter: Tissue Value: Whole Plant
  misc_feature: MA Experiment 20000437 PARAMETER Experiment Name: At_Drought_P Parameter: Treatment Value: Drought vs. No Drought
  misc_feature: MA Experiment ID: 20000451 Result: Up-regulated in Transcription
  misc_feature: MA Experiment 20000451 PARAMETER Experiment Name: At_CS6879_Shoots-Roots_P Parameter: Age (day) Value: 14
  misc_feature: MA Experiment 20000451 PARAMETER Experiment Name: At_CS6879_Shoots-Roots_P Parameter: Organism Value: A. thaliana
  misc_feature: MA Experiment 20000451 PARAMETER Experiment Name: At_CS6879_Shoots-Roots_P Parameter: Plant Line Value: CS6879 vs. WS
  misc_feature: MA Experiment 20000451 PARAMETER Experiment Name: At_CS6879_Shoots-Roots_P Parameter: Tissue Value: Roots
  misc_feature: MA Experiment ID: 20000794 Result: Up-regulated in Transcription
  misc_feature: MA Experiment 20000794 PARAMETER Experiment Name: At_Petals_P Parameter: Age (day) Value: 23-25 days
  misc_feature: MA Experiment 20000794 PARAMETER Experiment Name: At_Petals_P Parameter: Plant Line Value: WS
  misc_feature: MA Experiment 20000794 PARAMETER Experiment Name: At_Petals_P Parameter: Tissue Value: Petals vs. Whole plant
  misc_feature: MA Experiment ID: 20001247 Result: Down-regulated in Transcription
  misc_feature: MA Experiment 20001247 PARAMETER Experiment Name: At_Far-red-induction_P Parameter: Age (day) Value: 7
  misc_feature: MA Experiment 20001247 PARAMETER Experiment Name: At_Far-red-induction_P Parameter: Light Value: Far-red vs. White
  misc_feature: MA Experiment 20001247 PARAMETER Experiment Name: At_Far-red-induction_P Parameter: Organism Value: A. thaliana
  misc_feature: MA Experiment 20001247 PARAMETER Experiment Name: At_Far-red-induction_P Parameter: Plant Line Value: Columbia
  misc_feature: MA Experiment 20001247 PARAMETER Experiment Name: At_Far-red-induction_P Parameter: Timepoint (hr) Value: 1
  misc_feature: MA Experiment 20001247 PARAMETER Experiment Name: At_Far-red-induction_P Parameter: Tissue Value: Whole Plant
  misc_feature: MA Experiment ID: 20001248 Result: Down-regulated in Transcription
  misc_feature: MA Experiment 20001248 PARAMETER Experiment Name: At_Far-red-induction_P Parameter: Age (day) Value: 7
  misc_feature: MA Experiment 20001248 PARAMETER Experiment Name: At_Far-red-induction_P Parameter: Light Value: Far-red vs. White
  misc_feature: MA Experiment 20001248 PARAMETER Experiment Name: At_Far-red-induction_P Parameter: Organism Value: A. thaliana
  misc_feature: MA Experiment 20001248 PARAMETER Experiment Name: At_Far-red-induction_P Parameter: Plant Line Value: Columbia
  misc_feature: MA Experiment 20001248 PARAMETER Experiment Name: At_Far-red-induction_P Parameter: Timepoint (hr) Value: 4
  misc_feature: MA Experiment 20001248 PARAMETER Experiment Name: At_Far-red-induction_P Parameter: Tissue Value: Whole Plant
  misc_feature: MA Experiment ID: 20001905 Result: Up-regulated in Transcription
  misc_feature: MA Experiment 20001905 PARAMETER Experiment Name: At_Drought_Reproduction_P Parameter: Age (day) Value: 40
  misc_feature: MA Experiment 20001905 PARAMETER Experiment Name: At_Drought_Reproduction_P Parameter: Organism Value: A. thaliana
  misc_feature: MA Experiment 20001905 PARAMETER Experiment Name: At_Drought_Reproduction_P Parameter: Plant Line Value: WS
  misc_feature: MA Experiment 20001905 PARAMETER Experiment Name: At_Drought_Reproduction_P Parameter: Timepoint (day) Value: 10
  misc_feature: MA Experiment 20001905 PARAMETER Experiment Name: At_Drought_Reproduction_P Parameter: Tissue Value: Rosettes
  misc_feature: MA Experiment 20001905 PARAMETER Experiment Name: At_Drought_Reproduction_P Parameter: Treatment Value: Drought vs. No Drought
  misc_feature: MA Experiment ID: 20001911 Result: Up-regulated in Transcription
  misc_feature: MA Experiment 20001911 PARAMETER Experiment Name: At_Drought_Reproduction_P Parameter: Age (day) Value: 40
  misc_feature: MA Experiment 20001911 PARAMETER Experiment Name: At_Drought_Reproduction_P Parameter: Organism Value: A. thaliana
  misc_feature: MA Experiment 20001911 PARAMETER Experiment Name: At_Drought_Reproduction_P Parameter: Plant Line Value: WS
  misc_feature: MA Experiment 20001911 PARAMETER Experiment Name: At_Drought_Reproduction_P Parameter: Timepoint (day) Value: 10
  misc_feature: MA Experiment 20001911 PARAMETER Experiment Name: At_Drought_Reproduction_P Parameter: Tissue Value: Flowers
  misc_feature: MA Experiment 20001911 PARAMETER Experiment Name: At_Drought_Reproduction_P Parameter: Treatment Value: Drought vs. No Drought
accactcaatatgttatatccgataacaaaaaacaatcacagagagaaaaaccaatggcttgtattcacatcgaatcatcacatccacctgcatggaagacacactctgtccaagagaacaaaccaacaaatgctgatgatatatcgaacacaaccttaccagaacaccacgacggtggcgacgggggaatccaagaaacgtgggccgcgattggagattctggcggcagaggaggaggctatttcgccggagagagtaggaagaagctggagaagaagaagagccaagtgttgcttgagggatacgcgttggatgatcaagatgatttgacgagagccaagagtttgacggatgatgatcttgaggagcttaaaggttgtttagatctagggtttggttttagttacgatgagatccctgagctttgcaacactttgcctgcgttagagctttgttactccatgagccagaagttcttagatgataagcaacaaaaccaccacaagtcccaggaggaagatgattcgtcgccaccaccgaccacgaccgctccaattgcaaattggaagatctctagccctggtgatgatccagatgatgtaaaagctagactcaaatattgggcacaaactgttgcttgcaccgtacggttgtgcagctgaactagaatcgattttcatctttgaaccagagaaagaccgtctttgcaagaatgaagtctctgccattgttcgctgagaatagacctgcaaatgtgtctgtggataaactgttctcctgactgttgtgattgagtgcaatgtggttgcttaacatatgacatctgaattagggttcttgtcctctcatatgcagtgatgagatttagacacagaaatcaatctccaactgtttttttgaagacctctgtttttggctgaggcttatatgatgaggttttgcttcaatcacaagatgtcaacaaagaaagcacatgacccttcttttatgttcttttacatgtgattcttatctttttgtcccgtggctaggaaagaatcagaaactttttgtggtcataagttgtgaacacacttaaacgtgtcgtgtacgatagggcaaaaatcctttcacatgttctttttacgtatacaaatgtctaataatgacccaatagaatttattactc

SEQ ID NO: 50326 - protein, 220 aa, Arabidopsis thaliana
  peptide (1)..(220): Ceres Seq. ID no. 12592589
  misc_feature (89)..(216): Homolog of NCBI NO: 15241882 NR Description: putative protein; protein id: At5g28690.1
  misc_feature (155)..(220): Homolog of NCBI NO: 26451183 NR Description: unknown protein [Arabidopsis thaliana]
  misc_feature (116)..(216): Homolog of NCBI NO: 15228829 NR Description: hypothetical protein; protein id: At3g22690.1
  misc_feature (87)..(195): Homolog of NCBI NO: 34907664 NR Description: P0506A10.18 [Oryza sativa (japonica
  misc_feature (88)..(217): Homolog of NCBI NO: 25408860 NR Description: hypothetical protein At2g43340 [imported] -
  misc_feature (88)..(220): Homolog of NCBI NO: 30689349 NR Description: expressed protein [Arabidopsis thaliana]
  misc_feature (61)..(213): Homolog of NCBI NO: 15221309 NR Description: unknown protein; protein id: At1g05870.1
  misc_feature (61)..(220): Homolog of NCBI NO: 25406874 NR Description: hypothetical protein [imported] - Arabidopsis
  misc_feature (19)..(196): Homolog of NCBI NO: 25408168 NR Description: hypothetical protein At2g31560 [imported] -
  misc_feature (19)..(220): Homolog of NCBI NO: 30684991 NR Description: expressed protein [Arabidopsis thaliana]
TTQYVISDNKKQSQREKPMACIHIESSHPPAWKTHSVQENKPTNADDISNTTLPEHHDGGDGGIQETWAAIGDSGGRGGGYFAGESRKKLEKKKSQVLLEGYALDDQDDLTRAKSLTDDDLEELKGCLDLGFGFSYDEIPELCNTLPALELCYSMSQKFLDDKQQNHHKSQEEDDSSPPPTTTAPIANWKISSPGDDPDDVKARLKYWAQTVACTVRLCS

SEQ ID NO: 50327 - protein, 202 aa, Arabidopsis thaliana
  peptide (1)..(202): Ceres Seq. ID no. 12592590
  misc_feature (71)..(198): Homolog of NCBI NO: 15241882 NR Description: putative protein; protein id: At5g28690.1
  misc_feature (137)..(202): Homolog of NCBI NO: 26451183 NR Description: unknown protein [Arabidopsis thaliana]
  misc_feature (98)..(198): Homolog of NCBI NO: 15228829 NR Description: hypothetical protein; protein id: At3g22690.1
  misc_feature (69)..(177): Homolog of NCBI NO: 34907664 NR Description: P0506A10.18 [Oryza sativa (japonica
  misc_feature (70)..(199): Homolog of NCBI NO: 25408860 NR Description: hypothetical protein At2g43340 [imported] -
  misc_feature (70)..(202): Homolog of NCBI NO: 30689349 NR Description: expressed protein [Arabidopsis thaliana]
  misc_feature (43)..(195): Homolog of NCBI NO: 15221309 NR Description: unknown protein; protein id: At1g05870.1
  misc_feature (43)..(202): Homolog of NCBI NO: 25406874 NR Description: hypothetical protein [imported] - Arabidopsis
  misc_feature (1)..(178): Homolog of NCBI NO: 25408168 NR Description: hypothetical protein At2g31560 [imported] -
  misc_feature (1)..(202): Homolog of NCBI NO: 30684991 NR Description: expressed protein [Arabidopsis thaliana]
MACIHIESSHPPAWKTHSVQENKPTNADDISNTTLPEHHDGGDGGIQETWAAIGDSGGRGGGYFAGESRKKLEKKKSQVLLEGYALDDQDDLTRAKSLTDDDLEELKGCLDLGFGFSYDEIPELCNTLPALELCYSMSQKFLDDKQQNHHKSQEEDDSSPPPTTTAPIANWKISSPGDDPDDVKARLKYWAQTVACTVRLCS

SEQ ID NO: 50328 - DNA, 1793 bp, Arabidopsis thaliana
  misc_feature (1)..(1793): Ceres Seq. ID no. 13588172
  misc_feature: MA Experiment ID: 20000265 Result: Up-regulated in Transcription
  misc_feature: MA Experiment 20000265 PARAMETER Experiment Name: At_Open_Flower_P Parameter: Age (day) Value: 21
  misc_feature: MA Experiment 20000265 PARAMETER Experiment Name: At_Open_Flower_P Parameter: Plant Line Value: WS
  misc_feature: MA Experiment 20000265 PARAMETER Experiment Name: At_Open_Flower_P Parameter: Tissue Value: Closed Flower vs. Whole Plant
  misc_feature: MA Experiment ID: 20000794 Result: Up-regulated in Transcription
  misc_feature: MA Experiment 20000794 PARAMETER Experiment Name: At_Petals_P Parameter: Age (day) Value: 23-25 days
  misc_feature: MA Experiment 20000794 PARAMETER Experiment Name: At_Petals_P Parameter: Plant Line Value: WS
  misc_feature: MA Experiment 20000794 PARAMETER Experiment Name: At_Petals_P Parameter: Tissue Value: Petals vs. Whole plant
tcatcttccacatctcaaggagacacccaaaaagaaaaaccaaacctttgaagaacgaaaagggttattaaaaaagcaacaaactttgagagtaacaaagaaaaagtagttatcatggcggcattggaggagctaaagaagaagctgtctccattgtttgatgctgagaagggtttttcttcatcttcatctttggatccaaacgattcatatttattatctgatggtgggactgtgaatttacttagtagatcatatggagtttataattttaacgagctcgggttacaaaaatgtacatcttctcatgtggatgagtctgaaagttccgagacgacgtatcaatgtgcttctcacgaaatgcgggtttttggagctataggaagcggagctagcagcgttgttcaacgagctattcatatccctaatcatagaattttagcgttgaagaagattaatatctttgaaagggagaaaaggcagcaattgcttacagagatacggacattgtgtgaagctccttgtcatgaaggacttgtggattttcacggagcgttttatagtccagactcgggacaaatcagcatagctcttgaatatatgaatggaggatctcttgctgatattttaaaagtaacaaagaagatacctgagccggttctttcatcattgttccacaaacttttgcaaggattgagctacttgcatggagtgagacatcttgttcatagagacattaaacctgctaatttgcttataaatctcaaaggggaaccgaagataaccgattttggcataagtgctggccttgagaattcaatggctatgtgtgctacttttgttggaactgtcacctacatgtcaccagagaggataaggaatgacagttattcttatccagctgatatatggagccttggtctcgctctttttgaatgcggcactggagagtttccgtatatagctaatgaagggcctgttaatcttatgttgcagatattggatgatccttcaccaacaccaccaaaacaagaattctcaccagagttctgttccttcattgatgcttgcctccagaaggatccagatgctcgaccaacagctgaccagctcttgtcacacccttttattacaaaacacgagaaggaaagagtagatttggcgacttttgttcaaagcatctttgatccaactcagagattgaaagatttagctgatatgctcaccatacattattactccctctttgatggatttgatgatctttggcaccacgcaaaatcgctctacactgaaacttcagttttcagtttctctgggaaacataacacaggatcaactgaaatcttctcagcattatcagacattcgtaacacattaacaggagatttaccgagtgagaaacttgttcatgtcgttgagaagcttcattgcaaaccttgcggcagtggtggagtcataattcgtgctgttggatcgtttattgttggaaatcagtttctgatctgtggtgatggagtccaagcagaagggcttccgagtttcaaagatcttggcttcgatgtcgcaagtagacgtgttggccgatttcaagaacagtttgttgttgaatctggtgatcttattggaaagtattttcttgctaagcaagagctttatattacaaacttagattagataaacacacatgagaaaacgtttgttctctactgtactataatgtaactatgaacttgtttaattactaacatatgtaattgtatttgtttaaggttcataaaaagtgccggaat

SEQ ID NO: 50329 - protein, 520 aa, Arabidopsis thaliana
  peptide (1)..(520): Ceres Seq. ID no. 13588173
  misc_feature (83)..(339): Pfam Name: Protein kinase domain Pfam Description: Protein kinase domain
  misc_feature (26)..(366): Homolog of NCBI NO: 7682432 NR Description: MAP kinase kinase [Nicotiana tabacum]
  misc_feature (77)..(372): Homolog of NCBI NO: 15233715 NR Description: mitogen-activated protein kinase kinase
  misc_feature (54)..(359): Homolog of NCBI NO: 12331300 NR Description: MAP kinase [Nicotiana tabacum]
  misc_feature (54)..(359): Homolog of NCBI NO: 12718822 NR Description: NQK1 MAPKK [Nicotiana tabacum]
  misc_feature (49)..(359): Homolog of NCBI NO: 7434320 NR Description: protein kinase MEK1 (EC 2.7.1.-) - maize
  misc_feature (49)..(359): Homolog of NCBI NO: 11869988 NR Description: MAP kinase kinase 1 [Oryza sativa]
  misc_feature (49)..(364): Homolog of NCBI NO: 15241264 NR Description: mitogen-activated protein kinase kinase (MAPKK),
  misc_feature (1)..(517): Homolog of NCBI NO: 1362112 NR Description: protein kinase NPK2 (EC 2.7.1.-) - common tobacco
  misc_feature (1)..(516): Homolog of NCBI NO: 21655213 NR Description: mitogen-activated protein kinase kinase
  misc_feature (1)..(520): Homolog of NCBI NO: 15242705 NR Description: mitogen-activated protein kinase kinase (MAPKK),
MAALEELKKKLSPLFDAEKGFSSSSSLDPNDSYLLSDGGTVNLLSRSYGVYNFNELGLQKCTSSHVDESESSETTYQCASHEMRVFGAIGSGASSVVQRAIHIPNHRILALKKINIFEREKRQQLLTEIRTLCEAPCHEGLVDFHGAFYSPDSGQISIALEYMNGGSLADILKVTKKIPEPVLSSLFHKLLQGLSYLHGVRHLVHRDIKPANLLINLKGEPKITDFGISAGLENSMAMCATFVGTVTYMSPERIRNDSYSYPADIWSLGLALFECGTGEFPYIANEGPVNLMLQILDDPSPTPPKQEFSPEFCSFIDACLQKDPDARPTADQLLSHPFITKHEKERVDLATFVQSIFDPTQRLKDLADMLTIHYYSLFDGFDDLWHHAKSLYTETSVFSFSGKHNTGSTEIFSALSDIRNTLTGDLPSEKLVHVVEKLHCKPCGSGGVIIRAVGSFIVGNQFLICGDGVQAEGLPSFKDLGFDVASRRVGRFQEQFVVESGDLIGKYFLAKQELYITNLD

SEQ ID NO: 50330 - protein, 438 aa, Arabidopsis thaliana
  peptide (1)..(438): Ceres Seq. ID no. 13588174
  misc_feature (1)..(257): Pfam Name: Protein kinase domain Pfam Description: Protein kinase domain
  misc_feature (1)..(284): Homolog of NCBI NO: 7682432 NR Description: MAP kinase kinase [Nicotiana tabacum]
  misc_feature (1)..(290): Homolog of NCBI NO: 15233715 NR Description: mitogen-activated protein kinase kinase
  misc_feature (1)..(277): Homolog of NCBI NO: 12331300 NR Description: MAP kinase [Nicotiana tabacum]
  misc_feature (1)..(277): Homolog of NCBI NO: 12718822 NR Description: NQK1 MAPKK [Nicotiana tabacum]
  misc_feature (1)..(277): Homolog of NCBI NO: 7434320 NR Description: protein kinase MEK1 (EC 2.7.1.-) - maize
  misc_feature (1)..(277): Homolog of NCBI NO: 11869988 NR Description: MAP kinase kinase 1 [Oryza sativa]
  misc_feature (1)..(282): Homolog of NCBI NO: 15241264 NR Description: mitogen-activated protein kinase kinase (MAPKK),
  misc_feature (1)..(435): Homolog of NCBI NO: 1362112 NR Description: protein kinase NPK2 (EC 2.7.1.-) - common tobacco
  misc_feature (1)..(434): Homolog of NCBI NO: 21655213 NR Description: mitogen-activated protein kinase kinase
  misc_feature (1)..(438): Homolog of NCBI NO: 15242705 NR Description: mitogen-activated protein kinase kinase (MAPKK),
MRVFGAIGSGASSVVQRAIHIPNHRILALKKINIFEREKRQQLLTEIRTLCEAPCHEGLVDFHGAFYSPDSGQISIALEYMNGGSLADILKVTKKIPEPVLSSLFHKLLQGLSYLHGVRHLVHRDIKPANLLINLKGEPKITDFGISAGLENSMAMCATFVGTVTYMSPERIRNDSYSYPADIWSLGLALFECGTGEFPYIANEGPVNLMLQILDDPSPTPPKQEFSPEFCSFIDACLQKDPDARPTADQLLSHPFITKHEKERVDLATFVQSIFDPTQRLKDLADMLTIHYYSLFDGFDDLWHHAKSLYTETSVFSFSGKHNTGSTEIFSALSDIRNTLTGDLPSEKLVHVVEKLHCKPCGSGGVIIRAVGSFIVGNQFLICGDGVQAEGLPSFKDLGFDVASRRVGRFQEQFVVESGDLIGKYFLAKQELYITNLD

SEQ ID NO: 50331 - protein, 358 aa, Arabidopsis thaliana
  peptide (1)..(358): Ceres Seq. ID no. 13588175
  misc_feature (1)..(177): Pfam Name: Protein kinase domain Pfam Description: Protein kinase domain
  misc_feature (1)..(204): Homolog of NCBI NO: 7682432 NR Description: MAP kinase kinase [Nicotiana tabacum]
  misc_feature (1)..(210): Homolog of NCBI NO: 15233715 NR Description: mitogen-activated protein kinase kinase
  misc_feature (1)..(197): Homolog of NCBI NO: 12331300 NR Description: MAP kinase [Nicotiana tabacum]
  misc_feature (1)..(197): Homolog of NCBI NO: 12718822 NR Description: NQK1 MAPKK [Nicotiana tabacum]
  misc_feature (1)..(197): Homolog of NCBI NO: 7434320 NR Description: protein kinase MEK1 (EC 2.7.1.-) - maize
  misc_feature (1)..(197): Homolog of NCBI NO: 11869988 NR Description: MAP kinase kinase 1 [Oryza sativa]
  misc_feature (1)..(202): Homolog of NCBI NO: 15241264 NR Description: mitogen-activated protein kinase kinase (MAPKK),
  misc_feature (1)..(355): Homolog of NCBI NO: 1362112 NR Description: protein kinase NPK2 (EC 2.7.1.-) - common tobacco
  misc_feature (1)..(354): Homolog of NCBI NO: 21655213 NR Description: mitogen-activated protein kinase kinase
  misc_feature (1)..(358): Homolog of NCBI NO: 15242705 NR Description: mitogen-activated protein kinase kinase (MAPKK),
MNGGSLADILKVTKKIPEPVLSSLFHKLLQGLSYLHGVRHLVHRDIKPANLLINLKGEPKITDFGISAGLENSMAMCATFVGTVTYMSPERIRNDSYSYPADIWSLGLALFECGTGEFPYIANEGPVNLMLQILDDPSPTPPKQEFSPEFCSFIDACLQKDPDARPTADQLLSHPFITKHEKERVDLATFVQSIFDPTQRLKDLADMLTIHYYSLFDGFDDLWHHAKSLYTETSVFSFSGKHNTGSTEIFSALSDIRNTLTGDLPSEKLVHVVEKLHCKPCGSGGVIIRAVGSFIVGNQFLICGDGVQAEGLPSFKDLGFDVASRRVGRFQEQFVVESGDLIGKYFLAKQELYITNLD

SEQ ID NO: 50332 - DNA, 1773 bp, Arabidopsis thaliana
  misc_feature (1)..(1773): Ceres Seq. ID no. 13588176
  misc_feature: MA Experiment ID: 20000180 Result: Down-regulated in Transcription
  misc_feature: MA Experiment 20000180 PARAMETER Experiment Name: At_Germinating_Seeds_P Parameter: Age (hr) Value: 24 vs. 0
  misc_feature: MA Experiment 20000180 PARAMETER Experiment Name: At_Germinating_Seeds_P Parameter: Tissue Value: Germinating Seeds
  misc_feature: MA Experiment ID: 20000495 Result: Down-regulated in Transcription
  misc_feature: MA Experiment 20000495 PARAMETER Experiment Name: At_Guard_Cells_P Parameter: Harvest Date Value: 8/2/2002
  misc_feature: MA Experiment 20000495 PARAMETER Experiment Name: At_Guard_Cells_P Parameter: Organism Value: A. thaliana
  misc_feature: MA Experiment 20000495 PARAMETER Experiment Name: At_Guard_Cells_P Parameter: Tissue Value: Guard Cells vs. Leaves
  misc_feature: MA Experiment ID: 20001458 Result: Up-regulated in Transcription
  misc_feature: MA Experiment 20001458 PARAMETER Experiment Name: At_50mM_NH4NO3_L-to-H_P Parameter: Age (day) Value: Undefined
  misc_feature: MA Experiment 20001458 PARAMETER Experiment Name: At_50mM_NH4NO3_L-to-H_P Parameter: Organism Value: Undefined
  misc_feature: MA Experiment 20001458 PARAMETER Experiment Name: At_50mM_NH4NO3_L-to-H_P Parameter: Plant Line Value: Undefined
  misc_feature: MA Experiment 20001458 PARAMETER Experiment Name: At_50mM_NH4NO3_L-to-H_P Parameter: Timepoint (hr) Value: 2
  misc_feature: MA Experiment 20001458 PARAMETER Experiment Name: At_50mM_NH4NO3_L-to-H_P Parameter: Tissue Value: Siliques
  misc_feature: MA Experiment 20001458 PARAMETER Experiment Name: At_50mM_NH4NO3_L-to-H_P Parameter: Treatment Value: 50mM NH4NO3 vs. 100mM Manitol
  misc_feature: MA Experiment ID: 20001557 Result: Up-regulated in Transcription
  misc_feature: MA Experiment 20001557 PARAMETER Experiment Name: At_Drought_Soil_Dry_P Parameter: Age (day) Value: 27
  misc_feature: MA Experiment 20001557 PARAMETER Experiment Name: At_Drought_Soil_Dry_P Parameter: Organism Value: A. thaliana
  misc_feature: MA Experiment 20001557 PARAMETER Experiment Name: At_Drought_Soil_Dry_P Parameter: Plant Line Value: WS
  misc_feature: MA Experiment 20001557 PARAMETER Experiment Name: At_Drought_Soil_Dry_P Parameter: Post Timepoint (hr) Value: 3
  misc_feature: MA Experiment 20001557 PARAMETER Experiment Name: At_Drought_Soil_Dry_P Parameter: Post-Treatment Value: Re-Water vs. No Drought
  misc_feature: MA Experiment 20001557 PARAMETER Experiment Name: At_Drought_Soil_Dry_P Parameter: Timepoint (day) Value: 13
  misc_feature: MA Experiment 20001557 PARAMETER Experiment Name: At_Drought_Soil_Dry_P Parameter: Treatment Value: Drought vs. No Drought
  misc_feature: MA Experiment ID: 20001558 Result: Up-regulated in Transcription
  misc_feature: MA Experiment 20001558 PARAMETER Experiment Name: At_Drought_Soil_Dry_P Parameter: Age (day) Value: 27
  misc_feature: MA Experiment 20001558 PARAMETER Experiment Name: At_Drought_Soil_Dry_P Parameter: Organism Value: A. thaliana
  misc_feature: MA Experiment 20001558 PARAMETER Experiment Name: At_Drought_Soil_Dry_P Parameter: Plant Line Value: WS
  misc_feature: MA Experiment 20001558 PARAMETER Experiment Name: At_Drought_Soil_Dry_P Parameter: Post Timepoint (hr) Value: 6
  misc_feature: MA Experiment 20001558 PARAMETER Experiment Name: At_Drought_Soil_Dry_P Parameter: Post-Treatment Value: Re-Water vs. No Drought
  misc_feature: MA Experiment 20001558 PARAMETER Experiment Name: At_Drought_Soil_Dry_P Parameter: Timepoint (day) Value: 13
  misc_feature: MA Experiment 20001558 PARAMETER Experiment Name: At_Drought_Soil_Dry_P Parameter: Treatment Value: Drought vs. No Drought
  misc_feature: MA Experiment ID: 20001757 Result: Up-regulated in Transcription
  misc_feature: MA Experiment 20001757 PARAMETER Experiment Name: At_50mM_NH4NO3_L-to-H_P Parameter: Timepoint (hr) Value: 6
  misc_feature: MA Experiment 20001757 PARAMETER Experiment Name: At_50mM_NH4NO3_L-to-H_P Parameter: Tissue Value: Leaf
  misc_feature: MA Experiment 20001757 PARAMETER Experiment Name: At_50mM_NH4NO3_L-to-H_P Parameter: Treatment Value: 50mM NH4NO3 vs 100mM Mannitol
atggtgaagcacgagattctcaactacagcgaggatgaagaagaaaattactcagacgaaggagattggggagactggaaagctgatgataatggtatagaaggaggagaggaggaggaggaggatgatggtgacgactcggaatctgattttctgtgtttgttttgtgattctcacttcgtttcctgtgatttactcttcgaacactgtcgtctaagccacggattcgactttcatggagttagaaaggaattgaagctcgatttctactcttcttttaagctcatcaactatattcgctcacaggtggctgagaacatgtgtttcagttggaagattgaagctgatgattacaaagatgttaagtttccttgggatgaagagaagtatctgaagcctttttggcaggaggattcacttttgtactcgtttgcagatgatgaggaagatgaagaagtcacgtttgacagagaggaagtgatggaggaattgcagaagcttggggatttaagcattgatgtcgaggctttaggggaaagctcaatgtcgaacagtgataaatgcaatataaatggaagtaaggatgtaacttcgctctcaaactgcaatggcctaaagcaaagttctgcggatgatttgatagtcaatgggaaagatgcagaaccaaaggtttgtgatggaaggctagttaataggaacatcagaaaggtgaatgagaactattttggatcttatagttcgtttggcattcacagggagatgctaagtgataaggttagaacagaagcataccgagatgcacttttgaagaatcctactctcttgaatggctctgttgtaatggatgttggttgtggaactgggatattgagtctttttgctgctaaagctggggcttcaagggtagttgcagttgaagctagtgagaagatggccaaagataacaaagtattcaatgataacgagcataatggggtacttgaagttgcacactcaatggtagaagagctagataaatcgatacagattcagcctcatagtgttgatgtgttagtcagcgaatggatgggatactgccttttatatgagtcaatgctcagttctgtgctctatgcaagagatcggtggttgaaacctggaggtgcaatcctccctgacacggccactatgtttgttgcgggatttggaaaaggtgcaacaagtcttcctttctgggaagatgtctatggctttgacatgtcttcaattgggaaggagatacatgacgacactactcgacttcccattgttgacgttatagcggagcgtgatttagtgacacagcctacccttcttcagacatttgacctggctaccatgaaaccggatgaagtagatttcacagcaacggcaacgctggagcccactgagtcagaagcaaaaactaggttgtgccatggtgttgtgttgtggtttgacacaggtttcaccagtaggttctgtaaggaaaacccaaccgtactatccacatcaccctacactcccccaacacactgggctcagacaatcttaacttttcaagaaccaatctcagtggcaccggcctcggttctgtctggtaatgacagaagagaagccatcggaaccgaagagtgtcccgcctcaagcattcatctgcgtgtgagtgttgcacgagcacatgagcatcgcagcatagacatctcgttagaggctactgggctgagctcaaagggtcagaagcgtcactggccggttcagatatttaatctatga

SEQ ID NO: 50333 - protein, 590 aa, Arabidopsis thaliana
  peptide (1)..(590): Ceres Seq. ID no. 13588177
  misc_feature (219)..(565): Homolog of NCBI NO: 21357573 NR Description: CG6563-PA [Drosophila melanogaster]
  misc_feature (28)..(150): Homolog of NCBI NO: 38174441 NR Description: Unknown (protein for MGC:76034) [Silurana
  misc_feature (135)..(533): Homolog of NCBI NO: 38174441 NR Description: Unknown (protein for MGC:76034) [Silurana
  misc_feature (30)..(150): Homolog of NCBI NO: 29747742 NR Description: Similar to protein arginine N-methyltransferase
  misc_feature (124)..(533): Homolog of NCBI NO: 29747742 NR Description: Similar to protein arginine N-methyltransferase
  misc_feature (30)..(150): Homolog of NCBI NO: 29789323 NR Description: heterogeneous nuclear ribonucleoprotein
  misc_feature (124)..(533): Homolog of NCBI NO: 29789323 NR Description: heterogeneous nuclear ribonucleoprotein
  misc_feature (30)..(150): Homolog of NCBI NO: 25742837 NR Description: protein arginine N-methyltransferase 3(hnRNP
  misc_feature (124)..(533): Homolog of NCBI NO: 25742837 NR Description: protein arginine N-methyltransferase 3(hnRNP
  misc_feature (9)..(590): Homolog of NCBI NO: 27261101 NR Description: putative arginine N-methyltransferase 3
MVKHEILNYSEDEEENYSDEGDWGDWKADDNGIEGGEEEEEDDGDDSESDFLCLFCDSHFVSCDLLFEHCRLSHGFDFHGVRKELKLDFYSSFKLINYIRSQVAENMCFSWKIEADDYKDVKFPWDEEKYLKPFWQEDSLLYSFADDEEDEEVTFDREEVMEELQKLGDLSIDVEALGESSMSNSDKCNINGSKDVTSLSNCNGLKQSSADDLIVNGKDAEPKVCDGRLVNRNIRKVNENYFGSYSSFGIHREMLSDKVRTEAYRDALLKNPTLLNGSVVMDVGCGTGILSLFAAKAGASRVVAVEASEKMAKDNKVFNDNEHNGVLEVAHSMVEELDKSIQIQPHSVDVLVSEWMGYCLLYESMLSSVLYARDRWLKPGGAILPDTATMFVAGFGKGATSLPFWEDVYGFDMSSIGKEIHDDTTRLPIVDVIAERDLVTQPTLLQTFDLATMKPDEVDFTATATLEPTESEAKTRLCHGVVLWFDTGFTSRFCKENPTVLSTSPYTPPTHWAQTILTFQEPISVAPASVLSGNDRREAIGTEECPASSIHLRVSVARAHEHRSIDISLEATGLSSKGQKRHWPVQIFNL

SEQ ID NO: 50334 - protein, 484 aa, Arabidopsis thaliana
  peptide (1)..(484): Ceres Seq. ID no. 13588178
  misc_feature (113)..(459): Homolog of NCBI NO: 21357573 NR Description: CG6563-PA [Drosophila melanogaster]
  misc_feature (1)..(44): Homolog of NCBI NO: 38174441 NR Description: Unknown (protein for MGC:76034) [Silurana
  misc_feature (29)..(427): Homolog of NCBI NO: 38174441 NR Description: Unknown (protein for MGC:76034) [Silurana
  misc_feature (1)..(44): Homolog of NCBI NO: 29747742 NR Description: Similar to protein arginine N-methyltransferase
  misc_feature (18)..(427): Homolog of NCBI NO: 29747742 NR Description: Similar to protein arginine N-methyltransferase
  misc_feature (1)..(44): Homolog of NCBI NO: 29789323 NR Description: heterogeneous nuclear ribonucleoprotein
  misc_feature (18)..(427): Homolog of NCBI NO: 29789323 NR Description: heterogeneous nuclear ribonucleoprotein
  misc_feature (1)..(44): Homolog of NCBI NO: 25742837 NR Description: protein arginine N-methyltransferase 3(hnRNP
  misc_feature (18)..(427): Homolog of NCBI NO: 25742837 NR Description: protein arginine N-methyltransferase 3(hnRNP
  misc_feature (1)..(484): Homolog of NCBI NO: 27261101 NR Description: putative arginine N-methyltransferase 3
MCFSWKIEADDYKDVKFPWDEEKYLKPFWQEDSLLYSFADDEEDEEVTFDREEVMEELQKLGDLSIDVEALGESSMSNSDKCNINGSKDVTSLSNCNGLKQSSADDLIVNGKDAEPKVCDGRLVNRNIRKVNENYFGSYSSFGIHREMLSDKVRTEAYRDALLKNPTLLNGSVVMDVGCGTGILSLFAAKAGASRVVAVEASEKMAKDNKVFNDNEHNGVLEVAHSMVEELDKSIQIQPHSVDVLVSEWMGYCLLYESMLSSVLYARDRWLKPGGAILPDTATMFVAGFGKGATSLPFWEDVYGFDMSSIGKEIHDDTTRLPIVDVIAERDLVTQPTLLQTFDLATMKPDEVDFTATATLEPTESEAKTRLCHGVVLWFDTGFTSRFCKENPTVLSTSPYTPPTHWAQTILTFQEPISVAPASVLSGNDRREAIGTEECPASSIHLRVSVARAHEHRSIDISLEATGLSSKGQKRHWPVQIFNL

SEQ ID NO: 50335 - protein, 430 aa, Arabidopsis thaliana
  peptide (1)..(430): Ceres Seq. ID no. 13588179
  misc_feature (1)..(287): Homolog of NCBI NO: 26369626 NR Description: unnamed protein product [Mus musculus]
  misc_feature (1)..(11): Homolog of NCBI NO: 24647025 NR Description: CG6563-PB [Drosophila melanogaster]
  misc_feature (59)..(405): Homolog of NCBI NO: 24647025 NR Description: CG6563-PB [Drosophila melanogaster]
  misc_feature (1)..(11): Homolog of NCBI NO: 21357573 NR Description: CG6563-PA [Drosophila melanogaster]
  misc_feature (59)..(405): Homolog of NCBI NO: 21357573 NR Description: CG6563-PA [Drosophila melanogaster]
  misc_feature (1)..(373): Homolog of NCBI NO: 38174441 NR Description: Unknown (protein for MGC:76034) [Silurana
  misc_feature (1)..(373): Homolog of NCBI NO: 29747742 NR Description: Similar to protein arginine N-methyltransferase
  misc_feature (1)..(373): Homolog of NCBI NO: 29789323 NR Description: heterogeneous nuclear ribonucleoprotein
  misc_feature (1)..(373): Homolog of NCBI NO: 25742837 NR Description: protein arginine N-methyltransferase 3(hnRNP
  misc_feature (1)..(430): Homolog of NCBI NO: 27261101 NR Description: putative arginine N-methyltransferase 3
MEELQKLGDLSIDVEALGESSMSNSDKCNINGSKDVTSLSNCNGLKQSSADDLIVNGKDAEPKVCDGRLVNRNIRKVNENYFGSYSSFGIHREMLSDKVRTEAYRDALLKNPTLLNGSVVMDVGCGTGILSLFAAKAGASRVVAVEASEKMAKDNKVFNDNEHNGVLEVAHSMVEELDKSIQIQPHSVDVLVSEWMGYCLLYESMLSSVLYARDRWLKPGGAILPDTATMFVAGFGKGATSLPFWEDVYGFDMSSIGKEIHDDTTRLPIVDVIAERDLVTQPTLLQTFDLATMKPDEVDFTATATLEPTESEAKTRLCHGVVLWFDTGFTSRFCKENPTVLSTSPYTPPTHWAQTILTFQEPISVAPASVLSGNDRREAIGTEECPASSIHLRVSVARAHEHRSIDISLEATGLSSKGQKRHWPVQIFNL

SEQ ID NO: 50336 - DNA, 814 bp, Arabidopsis thaliana
  misc_feature (1)..(814): Ceres Seq. ID no. 13647738
  misc_feature: MA Experiment ID: 20000171 Result: Up-regulated in Transcription
  misc_feature: MA Experiment 20000171 PARAMETER Experiment Name: At_42deg_Heat_P Parameter: Age (day) Value: 14
  misc_feature: MA Experiment 20000171 PARAMETER Experiment Name: At_42deg_Heat_P Parameter: Organism Value: A. thaliana
  misc_feature: MA Experiment 20000171 PARAMETER Experiment Name: At_42deg_Heat_P Parameter: Plant Line Value: WS
  misc_feature: MA Experiment 20000171 PARAMETER Experiment Name: At_42deg_Heat_P Parameter: Temperature (deg C) Value: 42 vs. 22
  misc_feature: MA Experiment 20000171 PARAMETER Experiment Name: At_42deg_Heat_P Parameter: Timepoint (hr) Value: 1
  misc_feature: MA Experiment 20000171 PARAMETER Experiment Name: At_42deg_Heat_P Parameter: Tissue Value: Aerial
  misc_feature: MA Experiment ID: 20000180 Result: Down-regulated in Transcription
  misc_feature: MA Experiment 20000180 PARAMETER Experiment Name: At_Germinating_Seeds_P Parameter: Age (hr) Value: 24 vs. 0
  misc_feature: MA Experiment 20000180 PARAMETER Experiment Name: At_Germinating_Seeds_P Parameter: Tissue Value: Germinating Seeds
  misc_feature: MA Experiment ID: 20001906 Result: Up-regulated in Transcription
  misc_feature: MA Experiment 20001906 PARAMETER Experiment Name: At_Drought_Reproduction_P Parameter: Age (day) Value: 35
  misc_feature: MA Experiment 20001906 PARAMETER Experiment Name: At_Drought_Reproduction_P Parameter: Organism Value: A. thaliana
  misc_feature: MA Experiment 20001906 PARAMETER Experiment Name: At_Drought_Reproduction_P Parameter: Plant Line Value: WS
  misc_feature: MA Experiment 20001906 PARAMETER Experiment Name: At_Drought_Reproduction_P Parameter: Timepoint (day) Value: 5
  misc_feature: MA Experiment 20001906 PARAMETER Experiment Name: At_Drought_Reproduction_P Parameter: Tissue Value: Siliques
  misc_feature: MA Experiment 20001906 PARAMETER Experiment Name: At_Drought_Reproduction_P Parameter: Treatment Value: Drought vs. No Drought
ggaagtaagctttgtctcgtcggaatctgatggagaagaagaagaagaaaggcgatgatgaattgaactcgaaaccgccgttaatggcgttgaaccatgtgtcaaggctttgtaaagacgtcaaaaagtctctcgagttctacacaaaggtattagggttcgtggagatagagcgtccagcttctttcgacttcgacggtgcgtggcttttcaactacggcgttgggatccacttggtgcaggccaaggaccaagataagttaccttctgacacggaccatttggacccaatggataaccacatctctttccagtgtgaagatatggaagctttggagaagaggctgaaggaggtgaaggtaaagtacatcaagaggacggtgggtgatgagaaagatgcagctatcgaccagctcttcttcaatgaccctgacggctttatggttgaaatctgtaactgcgagaatctcgaacttgtcccgcgccattcagccgacgccatacgcctcccagaagaccgacatgcacctcctgttgccctccctgactcctccaaccgtaggatgccccagcccaattcttaatactatttagactcgtttcgtctctagttagtactgtgttgtgctcagctcctactctattagttaatgtttgtttgggacaccaagtccttccaaccatgagtgctagtaggctggccattttggtttttgtttagattcggtttggttcagttttaataaatctctggctgaactctaaaaaaaaaaaagaaaaaaaaaaaaaaaaaaaactcgagggggggcccggt

SEQ ID NO: 50337 - protein, 184 aa, Arabidopsis thaliana
  peptide (1)..(184): Ceres Seq. ID no. 13647739
  misc_feature (18)..(143): Homolog of NCBI NO: 18402873 NR Description: glyoxalase family protein (lactoylglutathione
  misc_feature (9)..(162): Homolog of NCBI NO: 21740426 NR Description: OSJNBa0091D06.24 [Oryza sativa (japonica
  misc_feature (18)..(151): Homolog of NCBI NO: 18394235 NR Description: glyoxalase family protein (lactoylglutathione
  misc_feature (10)..(151): Homolog of NCBI NO: 18412683 NR Description: glyoxalase family protein (lactoylglutathione
  misc_feature (4)..(151): Homolog of NCBI NO: 25406639 NR Description: hypothetical protein F18B13.24 [imported] -
  misc_feature (17)..(168): Homolog of NCBI NO: 34910246 NR Description: OSJNBa0089K24.9 [Oryza sativa (japonica
  misc_feature (17)..(176): Homolog of NCBI NO: 34899038 NR Description: hypothetical protein~similar to Arabidopsis
  misc_feature (17)..(176): Homolog of NCBI NO: 34395261 NR Description: glyoxalase family-like protein
  misc_feature (1)..(184): Homolog of NCBI NO: 15529260 NR Description: At2g28420/T1B3.6 [Arabidopsis thaliana]
  misc_feature (1)..(184): Homolog of NCBI NO: 18401734 NR Description: glyoxalase family protein (lactoylglutathione
MEKKKKKGDDELNSKPPLMALNHVSRLCKDVKKSLEFYTKVLGFVEIERPASFDFDGAWLFNYGVGIHLVQAKDQDKLPSDTDHLDPMDNHISFQCEDMEALEKRLKEVKVKYIKRTVGDEKDAAIDQLFFNDPDGFMVEICNCENLELVPRHSADAIRLPEDRHAPPVALPDSSNRRMPQPNS

SEQ ID NO: 50338 - protein, 166 aa, Arabidopsis thaliana
  peptide (1)..(166): Ceres Seq. ID no. 13647740
  misc_feature (1)..(125): Homolog of NCBI NO: 18402873 NR Description: glyoxalase family protein (lactoylglutathione
  misc_feature (1)..(144): Homolog of NCBI NO: 21740426 NR Description: OSJNBa0091D06.24 [Oryza sativa (japonica
  misc_feature (1)..(133): Homolog of NCBI NO: 18394235 NR Description: glyoxalase family protein (lactoylglutathione
  misc_feature (1)..(133): Homolog of NCBI NO: 18412683 NR Description: glyoxalase family protein (lactoylglutathione
  misc_feature (1)..(133): Homolog of NCBI NO: 25406639 NR Description: hypothetical protein F18B13.24 [imported] -
  misc_feature (1)..(150): Homolog of NCBI NO: 34910246 NR Description: OSJNBa0089K24.9 [Oryza sativa (japonica
  misc_feature (1)..(158): Homolog of NCBI NO: 34899038 NR Description: hypothetical protein~similar to Arabidopsis
  misc_feature (1)..(158): Homolog of NCBI NO: 34395261 NR Description: glyoxalase family-like protein
  misc_feature (1)..(166): Homolog of NCBI NO: 15529260 NR Description: At2g28420/T1B3.6 [Arabidopsis thaliana]
  misc_feature (1)..(166): Homolog of NCBI NO: 18401734 NR Description: glyoxalase family protein (lactoylglutathione
MALNHVSRLCKDVKKSLEFYTKVLGFVEIERPASFDFDGAWLFNYGVGIHLVQAKDQDKLPSDTDHLDPMDNHISFQCEDMEALEKRLKEVKVKYIKRTVGDEKDAAIDQLFFNDPDGFMVEICNCENLELVPRHSADAIRLPEDRHAPPVALPDSSNRRMPQPNS

SEQ ID NO: 50339 - protein, 97 aa, Arabidopsis thaliana
  peptide (1)..(97): Ceres Seq. ID no. 13647741
  misc_feature (1)..(56): Homolog of NCBI NO: 18402873 NR Description: glyoxalase family protein (lactoylglutathione
  misc_feature (1)..(75): Homolog of NCBI NO: 21740426 NR Description: OSJNBa0091D06.24 [Oryza sativa (japonica
  misc_feature (1)..(64): Homolog of NCBI NO: 18394235 NR Description: glyoxalase family protein (lactoylglutathione
  misc_feature (1)..(64): Homolog of NCBI NO: 18412683 NR Description: glyoxalase family protein (lactoylglutathione
  misc_feature (1)..(64): Homolog of NCBI NO: 25406639 NR Description: hypothetical protein F18B13.24 [imported] -
  misc_feature (1)..(81): Homolog of NCBI NO: 34910246 NR Description: OSJNBa0089K24.9 [Oryza sativa (japonica
  misc_feature (1)..(89): Homolog of NCBI NO: 34899038 NR Description: hypothetical protein~similar to Arabidopsis
  misc_feature (1)..(89): Homolog of NCBI NO: 34395261 NR Description: glyoxalase family-like protein
  misc_feature (1)..(97): Homolog of NCBI NO: 15529260 NR Description: At2g28420/T1B3.6 [Arabidopsis thaliana]
  misc_feature (1)..(97): Homolog of NCBI NO: 18401734 NR Description: glyoxalase family protein (lactoylglutathione
MDNHISFQCEDMEALEKRLKEVKVKYIKRTVGDEKDAAIDQLFFNDPDGFMVEICNCENLELVPRHSADAIRLPEDRHAPPVALPDSSNRRMPQPNS

SEQ ID NO: 50340 - DNA, 3250 bp, Arabidopsis thaliana; identical to SEQ ID NO: 44314
  misc_feature (1)..(3250): Ceres Seq. ID no. 13509447
  misc_feature: MA Experiment ID: 20000355 Result: Up-regulated in Transcription
  misc_feature: MA Experiment 20000355 PARAMETER Experiment Name: At_Siliques_Sub_P Parameter: Age (day) Value: 21
  misc_feature: MA Experiment 20000355 PARAMETER Experiment Name: At_Siliques_Sub_P Parameter: Organism Value: A. thaliana
  misc_feature: MA Experiment 20000355 PARAMETER Experiment Name: At_Siliques_Sub_P Parameter: Plant Line Value: WS
  misc_feature: MA Experiment 20000355 PARAMETER Experiment Name: At_Siliques_Sub_P Parameter: Tissue Value: Less Than 5mm Siliques vs. Whole Plant
  misc_feature: MA Experiment ID: 20000440 Result: Up-regulated in Transcription
  misc_feature: MA Experiment 20000440 PARAMETER Experiment Name: At_Closed-Flower__Sub_P Parameter: Tissue Value: Closed Flower vs. Whole Plant

SEQ ID NO: 50341 - protein, 934 aa, Arabidopsis thaliana; identical to SEQ ID NO: 44315
  peptide (1)..(934): Ceres Seq. ID no. 13509448
  misc_feature (538)..(879): Pfam Name: Protein kinase domain Pfam Description: Protein kinase domain
  misc_feature (538)..(879): Pfam Name: Protein kinase domain Pfam Description: Protein kinase domain
  misc_feature (748)..(896): Homolog of NCBI NO: 15242814 NR Description: putative blue light receptor [Chlamydomonas
  misc_feature (452)..(685): Homolog of NCBI NO: 15242814 NR Description: putative blue light receptor [Chlamydomonas
  misc_feature (748)..(896): Homolog of NCBI NO: 15227639 NR Description: putative blue light receptor [Chlamydomonas
  misc_feature (452)..(685): Homolog of NCBI NO: 15227639 NR Description: putative blue light receptor [Chlamydomonas
  misc_feature (769)..(888): Homolog of NCBI NO: 7716430 NR Description: PHY3 protein - maidenhair fern
  misc_feature (748)..(896): Homolog of NCBI NO: 15242814 NR Description: putative blue light receptor [Chlamydomonas
  misc_feature (748)..(896): Homolog of NCBI NO: 15227639 NR Description: putative blue light receptor [Chlamydomonas
  misc_feature (769)..(888): Homolog of NCBI NO: 7716430 NR Description: PHY3 protein - maidenhair fern
  misc_feature (301)..(751): Homolog of NCBI NO: 38347607 NR Description: OSJNBa0042I15.20 [Oryza sativa (japonica
  misc_feature (60)..(200): Homolog of NCBI NO: 38347607 NR Description: OSJNBa0042I15.20 [Oryza sativa (japonica
  misc_feature (512)..(695): Homolog of NCBI NO: 30693719 NR Description: PHY3 [Adiantum capillus-veneris]
  misc_feature (769)..(888): Homolog of NCBI NO: 30693719 NR Description: PHY3 [Adiantum capillus-veneris]
  misc_feature (512)..(695): Homolog of NCBI NO: 7716430 NR Description: PHY3 protein - maidenhair fern
  misc_feature (452)..(685): Homolog of NCBI NO: 15227639 NR Description: putative blue light receptor [Chlamydomonas
  misc_feature (452)..(685): Homolog of NCBI NO: 15242814 NR Description: putative blue light receptor [Chlamydomonas
  misc_feature (512)..(695): Homolog of NCBI NO: 7716430 NR Description: PHY3 protein - maidenhair fern
  misc_feature (769)..(888): Homolog of NCBI NO: 30693719 NR Description: PHY3 [Adiantum capillus-veneris]
  misc_feature (512)..(695): Homolog of NCBI NO: 30693719 NR Description: PHY3 [Adiantum capillus-veneris]
  misc_feature (60)..(200): Homolog of NCBI NO: 38347607 NR Description: OSJNBa0042I15.20 [Oryza sativa (japonica
  misc_feature (301)..(751): Homolog of NCBI NO: 38347607 NR Description: OSJNBa0042I15.20 [Oryza sativa (japonica

SEQ ID NO: 50342 - protein, 903 aa, Arabidopsis thaliana; identical to SEQ ID NO: 44316
  peptide (1)..(903): Ceres Seq. ID no. 13509449
  misc_feature (507)..(848): Pfam Name: Protein kinase domain Pfam Description: Protein kinase domain
  misc_feature (507)..(848): Pfam Name: Protein kinase domain Pfam Description: Protein kinase domain
  misc_feature (717)..(865): Homolog of NCBI NO: 15242814 NR Description: putative blue light receptor [Chlamydomonas
  misc_feature (421)..(654): Homolog of NCBI NO: 15242814 NR Description: putative blue light receptor [Chlamydomonas
  misc_feature (717)..(865): Homolog of NCBI NO: 15227639 NR Description: putative blue light receptor [Chlamydomonas
  misc_feature (421)..(654): Homolog of NCBI NO: 15227639 NR Description: putative blue light receptor [Chlamydomonas
  misc_feature (738)..(857): Homolog of NCBI NO: 7716430 NR Description: PHY3 protein - maidenhair fern
  misc_feature (717)..(865): Homolog of NCBI NO: 15242814 NR Description: putative blue light receptor [Chlamydomonas
  misc_feature (717)..(865): Homolog of NCBI NO: 15227639 NR Description: putative blue light receptor [Chlamydomonas
  misc_feature (738)..(857): Homolog of NCBI NO: 7716430 NR Description: PHY3 protein - maidenhair fern
  misc_feature (270)..(720): Homolog of NCBI NO: 38347607 NR Description: OSJNBa0042I15.20 [Oryza sativa (japonica
  misc_feature (29)..(169): Homolog of NCBI NO: 38347607 NR Description: OSJNBa0042I15.20 [Oryza sativa (japonica
  misc_feature (481)..(664): Homolog of NCBI NO: 30693719 NR Description: PHY3 [Adiantum capillus-veneris]
  misc_feature (738)..(857): Homolog of NCBI NO: 30693719 NR Description: PHY3 [Adiantum capillus-veneris]
  misc_feature (481)..(664): Homolog of NCBI NO: 7716430 NR Description: PHY3 protein - maidenhair fern
  misc_feature (421)..(654): Homolog of NCBI NO: 15227639 NR Description: putative blue light receptor [Chlamydomonas
  misc_feature (421)..(654): Homolog of NCBI NO: 15242814 NR Description: putative blue light receptor [Chlamydomonas
  misc_feature (481)..(664): Homolog of NCBI NO: 7716430 NR Description: PHY3 protein - maidenhair fern
  misc_feature (738)..(857): Homolog of NCBI NO: 30693719 NR Description: PHY3 [Adiantum capillus-veneris]
  misc_feature (481)..(664): Homolog of NCBI NO: 30693719 NR Description: PHY3 [Adiantum capillus-veneris]
  misc_feature (29)..(169): Homolog of NCBI NO: 38347607 NR Description: OSJNBa0042I15.20 [Oryza sativa (japonica
  misc_feature (270)..(720): Homolog of NCBI NO: 38347607 NR Description: OSJNBa0042I15.20 [Oryza sativa (japonica

SEQ ID NO: 50343 - protein, 878 aa, Arabidopsis thaliana; identical to SEQ ID NO: 44317
  peptide (1)..(878): Ceres Seq. ID no. 13509450
  misc_feature (482)..(823): Pfam Name: Protein kinase domain Pfam Description: Protein kinase domain
  misc_feature (482)..(823): Pfam Name: Protein kinase domain Pfam Description: Protein kinase domain
  misc_feature (692)..(840): Homolog of NCBI NO: 15242814 NR Description: putative blue light receptor [Chlamydomonas
  misc_feature (396)..(629): Homolog of NCBI NO: 15242814 NR Description: putative blue light receptor [Chlamydomonas
  misc_feature (692)..(840): Homolog of NCBI NO: 15227639 NR Description: putative blue light receptor [Chlamydomonas
  misc_feature (396)..(629): Homolog of NCBI NO: 15227639 NR Description: putative blue light receptor [Chlamydomonas
  misc_feature (713)..(832): Homolog of NCBI NO: 7716430 NR Description: PHY3 protein - maidenhair fern
  misc_feature (692)..(840): Homolog of NCBI NO: 15242814 NR Description: putative blue light receptor [Chlamydomonas
  misc_feature (692)..(840): Homolog of NCBI NO: 15227639 NR Description: putative blue light receptor [Chlamydomonas
  misc_feature (713)..(832): Homolog of NCBI NO: 7716430 NR Description: PHY3 protein - maidenhair fern
  misc_feature (245)..(695): Homolog of NCBI NO: 38347607 NR Description: OSJNBa0042I15.20 [Oryza sativa (japonica
  misc_feature (4)..(144): Homolog of NCBI NO: 38347607 NR Description: OSJNBa0042I15.20 [Oryza sativa (japonica
  misc_feature (456)..(639): Homolog of NCBI NO: 30693719 NR Description: PHY3 [Adiantum capillus-veneris]
  misc_feature (713)..(832): Homolog of NCBI NO: 30693719 NR Description: PHY3 [Adiantum capillus-veneris]
  misc_feature (456)..(639): Homolog of NCBI NO: 7716430 NR Description: PHY3 protein - maidenhair fern
  misc_feature (396)..(629): Homolog of NCBI NO: 15227639 NR Description: putative blue light receptor [Chlamydomonas
  misc_feature (396)..(629): Homolog of NCBI NO: 15242814 NR Description: putative blue light receptor [Chlamydomonas
  misc_feature (456)..(639): Homolog of NCBI NO: 7716430 NR Description: PHY3 protein - maidenhair fern
  misc_feature (713)..(832): Homolog of NCBI NO: 30693719 NR Description: PHY3 [Adiantum capillus-veneris]
  misc_feature (456)..(639): Homolog of NCBI NO: 30693719 NR Description: PHY3 [Adiantum capillus-veneris]
  misc_feature (4)..(144): Homolog of NCBI NO: 38347607 NR Description: OSJNBa0042I15.20 [Oryza sativa (japonica
  misc_feature (245)..(695): Homolog of NCBI NO: 38347607 NR Description: OSJNBa0042I15.20 [Oryza sativa (japonica

SEQ ID NO: 50344 - DNA, 1297 bp, Arabidopsis thaliana
  misc_feature (1)..(1297): Ceres Seq. ID no. 13588192
  misc_feature: MA Experiment ID: 20000314 Result: Up-regulated in Transcription
  misc_feature: MA Experiment 20000314 PARAMETER Experiment Name: At_14day_Shoots-Roots_Sub_P Parameter: Age (day) Value: 14
  misc_feature: MA Experiment 20000314 PARAMETER Experiment Name: At_14day_Shoots-Roots_Sub_P Parameter: Organism Value: A. thaliana
  misc_feature: MA Experiment 20000314 PARAMETER Experiment Name: At_14day_Shoots-Roots_Sub_P Parameter: Plant Line Value: WS
  misc_feature: MA Experiment 20000314 PARAMETER Experiment Name: At_14day_Shoots-Roots_Sub_P Parameter: Tissue Value: Roots vs. Whole Plant
  misc_feature: MA Experiment ID: 20000355 Result: Down-regulated in Transcription
  misc_feature: MA Experiment 20000355 PARAMETER Experiment Name: At_Siliques_Sub_P Parameter: Age (day) Value: 21
  misc_feature: MA Experiment 20000355 PARAMETER Experiment Name: At_Siliques_Sub_P Parameter: Organism Value: A. thaliana
  misc_feature: MA Experiment 20000355 PARAMETER Experiment Name: At_Siliques_Sub_P Parameter: Plant Line Value: WS
  misc_feature: MA Experiment 20000355 PARAMETER Experiment Name: At_Siliques_Sub_P Parameter: Tissue Value: Less Than 5mm Siliques vs. Whole Plant
gacagcaacaagtacaagagagagagagaaagaatcaaaaacatctgtcgcggagagagagagaaagagagaaagagaaaaatgtcgatggctttgcttttgacatcgccggctatgaagcagaagccggcggtgataacttctcctcgccgtggttcttctccttctcgtcgtcttcgagtttcttgtgttaccacaaaccctgctaggaagaaaaacgaaacatgcaatcattttcgacctatcaaagaagtaaataaccaattaacacacacaataccacaggagaagcttgagatcttcaaatcaatggaaaattgggcagaacaaaaactactaccttatctcaaaccggtagaagattcatggcaaccacaagacttcttacctgcgccagagaacgacgacgaattctacgaccgagtaaaagagatcagagaaagaacaaaagagatacctgacgattactttgtagttcttgtgggagatatgatcacagaagaagcacttccaacgtatcaaacgacgttaaacacactagacggtgttaaggatgaaaccggtgggagtttatcgccgtgggctgtgtggattagagcctggacggcggaggaaaaccgtcacggtgacttactcaacaagtatctttatctaactggtcgtgttgatatgcgacatgttgagaagactatacaatatcttattggttctggtatggattcgaaatttgagaacaatccatacaatggattcatctacacatcattccaagagcgagcaacattcatctctcacggcaacacggctaggctagccacaacatacggcgatgttaccctcgcgaagatctgcggcacaatcgctgccgacgagaagcgacacgagacggcgtacacgaagatagtggagaagctattcgagatcgaccctgacggatctgttcaggcgttagcgagtatgatgaagaaacggatcacaatgccggctcatcttatgcacgacggaagagataacgatttgtttgatcattacgccgccgtggcgcagcggattggagtttacacggcggcggattacgctgggatacttgagtttctgttgcggcggtggaaggtggagagtttgggattggggttatcaggagaaggaaggagagcacaggagtacttgtgcaccttgccgcagaggatcaagaggttagaggaaagagctaatgatagggtcaaacttgtgtcaaaaccttctgtttcgtttagctgggtttttggtagagatgtgaaactatagatagatattt

SEQ ID NO: 50345 - protein, 428 aa, Arabidopsis thaliana
  peptide (1)..(428): Ceres Seq. ID no. 13588193
  misc_feature (30)..(428): Homolog of NCBI NO: 134945 NR Description: Acyl-
  misc_feature (48)..(428): Homolog of NCBI NO: 134946 NR Description: Acyl-
  misc_feature (17)..(428): Homolog of NCBI NO: 1785862 NR Description: stearoyl-Acyl-carrier protein desaturase [Elaeis
  misc_feature (54)..(428): Homolog of NCBI NO: 3355634 NR Description: stearoyl-acyl carrier protein desaturase [Linum
  misc_feature (54)..(428): Homolog of NCBI NO: 3355632 NR Description: stearoyl-acyl carrier protein desaturase [Linum
  misc_feature (19)..(428): Homolog of NCBI NO: 951427 NR Description: stearoyl-acyl-carrier protein desaturase
  misc_feature (30)..(428): Homolog of NCBI NO: 15232942 NR Description: putative stearoyl-acyl carrier protein desaturase
  misc_feature (30)..(428): Homolog of NCBI NO: 34222062 NR Description: At3g02610 [Arabidopsis thaliana]
  misc_feature (30)..(428): Homolog of NCBI NO: 15232941 NR Description: putative stearoyl-acyl carrier protein desaturase
  misc_feature (28)..(428): Homolog of NCBI NO: 15237307 NR Description: acyl-
DSNKYKRERERIKNICRGEREKERKRKMSMALLLTSPAMKQKPAVITSPRRGSSPSRRLRVSCVTTNPARKKNETCNHFRPIKEVNNQLTHTIPQEKLEIFKSMENWAEQKLLPYLKPVEDSWQPQDFLPAPENDDEFYDRVKEIRERTKEIPDDYFVVLVGDMITEEALPTYQTTLNTLDGVKDETGGSLSPWAVWIRAWTAEENRHGDLLNKYLYLTGRVDMRHVEKTIQYLIGSGMDSKFENNPYNGFIYTSFQERATFISHGNTARLATTYGDVTLAKICGTIAADEKRHETAYTKIVEKLFEIDPDGSVQALASMMKKRITMPAHLMHDGRDNDLFDHYAAVAQRIGVYTAADYAGILEFLLRRWKVESLGLGLSGEGRRAQEYLCTLPQRIKRLEERANDRVKLVSKPSVSFSWVFGRDVKL

SEQ ID NO: 50346 - protein, 401 aa, Arabidopsis thaliana
  peptide (1)..(401): Ceres Seq. ID no. 13588194
  misc_feature (3)..(401): Homolog of NCBI NO: 134945 NR Description: Acyl-
  misc_feature (21)..(401): Homolog of NCBI NO: 134946 NR Description: Acyl-
  misc_feature (1)..(401): Homolog of NCBI NO: 1785862 NR Description: stearoyl-Acyl-carrier protein desaturase [Elaeis
  misc_feature (27)..(401): Homolog of NCBI NO: 3355634 NR Description: stearoyl-acyl carrier protein desaturase [Linum
  misc_feature (27)..(401): Homolog of NCBI NO: 3355632 NR Description: stearoyl-acyl carrier protein desaturase [Linum
  misc_feature (1)..(401): Homolog of NCBI NO: 951427 NR Description: stearoyl-acyl-carrier protein desaturase
  misc_feature (3)..(401): Homolog of NCBI NO: 15232942 NR Description: putative stearoyl-acyl carrier protein desaturase
  misc_feature (3)..(401): Homolog of NCBI NO: 34222062 NR Description: At3g02610 [Arabidopsis thaliana]
  misc_feature (3)..(401): Homolog of NCBI NO: 15232941 NR Description: putative stearoyl-acyl carrier protein desaturase
  misc_feature (1)..(401): Homolog of NCBI NO: 15237307 NR Description: acyl-
MSMALLLTSPAMKQKPAVITSPRRGSSPSRRLRVSCVTTNPARKKNETCNHFRPIKEVNNQLTHTIPQEKLEIFKSMENWAEQKLLPYLKPVEDSWQPQDFLPAPENDDEFYDRVKEIRERTKEIPDDYFVVLVGDMITEEALPTYQTTLNTLDGVKDETGGSLSPWAVWIRAWTAEENRHGDLLNKYLYLTGRVDMRHVEKTIQYLIGSGMDSKFENNPYNGFIYTSFQERATFISHGNTARLATTYGDVTLAKICGTIAADEKRHETAYTKIVEKLFEIDPDGSVQALASMMKKRITMPAHLMHDGRDNDLFDHYAAVAQRIGVYTAADYAGILEFLLRRWKVESLGLGLSGEGRRAQEYLCTLPQRIKRLEERANDRVKLVSKPSVSFSWVFGRDVKL

SEQ ID NO: 50347 - protein, 399 aa, Arabidopsis thaliana
  peptide (1)..(399): Ceres Seq. ID no. 13588195
  misc_feature (1)..(399): Homolog of NCBI NO: 134945 NR Description: Acyl-
  misc_feature (19)..(399): Homolog of NCBI NO: 134946 NR Description: Acyl-
  misc_feature (1)..(399): Homolog of NCBI NO: 1785862 NR Description: stearoyl-Acyl-carrier protein desaturase [Elaeis
  misc_feature (25)..(399): Homolog of NCBI NO: 3355634 NR Description: stearoyl-acyl carrier protein desaturase [Linum
  misc_feature (25)..(399): Homolog of NCBI NO: 3355632 NR Description: stearoyl-acyl carrier protein desaturase [Linum
  misc_feature (1)..(399): Homolog of NCBI NO: 951427 NR Description: stearoyl-acyl-carrier protein desaturase
  misc_feature (1)..(399): Homolog of NCBI NO: 15232942 NR Description: putative stearoyl-acyl carrier protein desaturase
  misc_feature (1)..(399): Homolog of NCBI NO: 34222062 NR Description: At3g02610 [Arabidopsis thaliana]
  misc_feature (1)..(399): Homolog of NCBI NO: 15232941 NR Description: putative stearoyl-acyl carrier protein desaturase
  misc_feature (1)..(399): Homolog of NCBI NO: 15237307 NR Description: acyl-
MALLLTSPAMKQKPAVITSPRRGSSPSRRLRVSCVTTNPARKKNETCNHFRPIKEVNNQLTHTIPQEKLEIFKSMENWAEQKLLPYLKPVEDSWQPQDFLPAPENDDEFYDRVKEIRERTKEIPDDYFVVLVGDMITEEALPTYQTTLNTLDGVKDETGGSLSPWAVWIRAWTAEENRHGDLLNKYLYLTGRVDMRHVEKTIQYLIGSGMDSKFENNPYNGFIYTSFQERATFISHGNTARLATTYGDVTLAKICGTIAADEKRHETAYTKIVEKLFEIDPDGSVQALASMMKKRITMPAHLMHDGRDNDLFDHYAAVAQRIGVYTAADYAGILEFLLRRWKVESLGLGLSGEGRRAQEYLCTLPQRIKRLEERANDRVKLVSKPSVSFSWVFGRDVKL

SEQ ID NO: 50348 - DNA, 1756 bp, Arabidopsis thaliana
  misc_feature (1)..(1756): Ceres Seq. ID no. 14311195
  misc_feature: MA Experiment ID: 20000173 Result: Down-regulated in Transcription
  misc_feature: MA Experiment 20000173 PARAMETER Experiment Name: At_42deg_Heat_P Parameter: Age (day) Value: 14
  misc_feature: MA Experiment 20000173 PARAMETER Experiment Name: At_42deg_Heat_P Parameter: Organism Value: A. thaliana
  misc_feature: MA Experiment 20000173 PARAMETER Experiment Name: At_42deg_Heat_P Parameter: Plant Line Value: WS
  misc_feature: MA Experiment 20000173 PARAMETER Experiment Name: At_42deg_Heat_P Parameter: Temperature (deg C) Value: 42 vs. 22
  misc_feature: MA Experiment 20000173 PARAMETER Experiment Name: At_42deg_Heat_P Parameter: Timepoint (hr) Value: 6
  misc_feature: MA Experiment 20000173 PARAMETER Experiment Name: At_42deg_Heat_P Parameter: Tissue Value: Aerial
  misc_feature: MA Experiment ID: 20000180 Result: Up-regulated in Transcription
  misc_feature: MA Experiment 20000180 PARAMETER Experiment Name: At_Germinating_Seeds_P Parameter: Age (hr) Value: 24 vs. 0
  misc_feature: MA Experiment 20000180 PARAMETER Experiment Name: At_Germinating_Seeds_P Parameter: Tissue Value: Germinating Seeds
  misc_feature: MA Experiment ID: 20000185 Result: Up-regulated in Transcription
  misc_feature: MA Experiment 20000185 PARAMETER Experiment Name: At_Roots__P Parameter: Age (day) Value: 7 vs. 21
  misc_feature: MA Experiment 20000185 PARAMETER Experiment Name: At_Roots__P Parameter: Organism Value: A. thaliana
  misc_feature: MA Experiment 20000185 PARAMETER Experiment Name: At_Roots__P Parameter: Tissue Value: Roots vs. Whole Plant
  misc_feature: MA Experiment ID: 20000234 Result: Up-regulated in Transcription
  misc_feature: MA Experiment 20000234 PARAMETER Experiment Name: At_Siliques_P Parameter: Age (day) Value: 21
  misc_feature: MA Experiment 20000234 PARAMETER Experiment Name: At_Siliques_P Parameter: Organism Value: A. thaliana
  misc_feature: MA Experiment 20000234 PARAMETER Experiment Name: At_Siliques_P Parameter: Plant Line Value: WS
  misc_feature: MA Experiment 20000234 PARAMETER Experiment Name: At_Siliques_P Parameter: Tissue Value: Less Than 5mm Siliques vs. Whole Plant
  misc_feature: MA Experiment ID: 20000235 Result: Up-regulated in Transcription
  misc_feature: MA Experiment 20000235 PARAMETER Experiment Name: At_Siliques_P Parameter: Age (day) Value: 21
  misc_feature: MA Experiment 20000235 PARAMETER Experiment Name: At_Siliques_P Parameter: Organism Value: A. thaliana
  misc_feature: MA Experiment 20000235 PARAMETER Experiment Name: At_Siliques_P Parameter: Plant Line Value: WS
  misc_feature: MA Experiment 20000235 PARAMETER Experiment Name: At_Siliques_P Parameter: Tissue Value: 5-10mm Siliques vs. Whole Plant
  misc_feature: MA Experiment ID: 20000437 Result: Down-regulated in Transcription
  misc_feature: MA Experiment 20000437 PARAMETER Experiment Name: At_Drought_P Parameter: Age (day) Value: 8
  misc_feature: MA Experiment 20000437 PARAMETER Experiment Name: At_Drought_P Parameter: Organism Value: A. thaliana
  misc_feature: MA Experiment 20000437 PARAMETER Experiment Name: At_Drought_P Parameter: Plant Line Value: WS
  misc_feature: MA Experiment 20000437 PARAMETER Experiment Name: At_Drought_P Parameter: Timepoint (hr) Value: 24
  misc_feature: MA Experiment 20000437 PARAMETER Experiment Name: At_Drought_P Parameter: Tissue Value: Whole Plant
  misc_feature: MA Experiment 20000437 PARAMETER Experiment Name: At_Drought_P Parameter: Treatment Value: Drought vs. No Drought
  misc_feature: MA Experiment ID: 20000794 Result: Up-regulated in Transcription
  misc_feature: MA Experiment 20000794 PARAMETER Experiment Name: At_Petals_P Parameter: Age (day) Value: 23-25 days
  misc_feature: MA Experiment 20000794 PARAMETER Experiment Name: At_Petals_P Parameter: Plant Line Value: WS
  misc_feature: MA Experiment 20000794 PARAMETER Experiment Name: At_Petals_P Parameter: Tissue Value: Petals vs. Whole plant
  misc_feature: MA Experiment ID: 20001555 Result: Down-regulated in Transcription
  misc_feature: MA Experiment 20001555 PARAMETER Experiment Name: At_Drought_Soil_Dry_P Parameter: Age (day) Value: 24
  misc_feature: MA Experiment 20001555 PARAMETER Experiment Name: At_Drought_Soil_Dry_P Parameter: Organism Value: A. thaliana
  misc_feature: MA Experiment 20001555 PARAMETER Experiment Name: At_Drought_Soil_Dry_P Parameter: Plant Line Value: WS
  misc_feature: MA Experiment 20001555 PARAMETER Experiment Name: At_Drought_Soil_Dry_P Parameter: Post Timepoint (hr) Value: None
  misc_feature: MA Experiment 20001555 PARAMETER Experiment Name: At_Drought_Soil_Dry_P Parameter: Post-Treatment Value: None
  misc_feature: MA Experiment 20001555 PARAMETER Experiment Name: At_Drought_Soil_Dry_P Parameter: Timepoint (day) Value: 10
  misc_feature: MA Experiment 20001555 PARAMETER Experiment Name: At_Drought_Soil_Dry_P Parameter: Treatment Value: Drought vs. No Drought
  misc_feature: MA Experiment ID: 20001911 Result: Down-regulated in Transcription
  misc_feature: MA Experiment 20001911 PARAMETER Experiment Name: At_Drought_Reproduction_P Parameter: Age (day) Value: 40
  misc_feature: MA Experiment 20001911 PARAMETER Experiment Name: At_Drought_Reproduction_P Parameter: Organism Value: A. thaliana
  misc_feature: MA Experiment 20001911 PARAMETER Experiment Name: At_Drought_Reproduction_P Parameter: Plant Line Value: WS
  misc_feature: MA Experiment 20001911 PARAMETER Experiment Name: At_Drought_Reproduction_P Parameter: Timepoint (day) Value: 10
  misc_feature: MA Experiment 20001911 PARAMETER Experiment Name: At_Drought_Reproduction_P Parameter: Tissue Value: Flowers
  misc_feature: MA Experiment 20001911 PARAMETER Experiment Name: At_Drought_Reproduction_P Parameter: Treatment Value: Drought vs. No Drought
gaaaagaaagatcattagtttctgaggggataaccatttttttttcttcttaaaaagttttttttttgtcaattggtcttcttcttcctcatccgctcgcttatatttaatttaataataataaaaatcggtgttcatttttatataaaagtataaattttgtgtttggttgatccatccgtagtcgtagtagatctacaagctctgaaattccacgcccacatctcctccgtcctcttgagatccttctcttcattcattttcttgctcaacttgagttgcttccaacatcttgcaagattgtctttgagttcattcaggtcttgaagaagagcactcttttaagctgtgtgaaacttgcgccgttcctgtgaagaactacttttggcattgcagatttcagagagctgtgatttgtgctatcttaaaaacggacaagttctatgttgtggcggatgagatgagggatgctatctgggttgatgaattttctgaatgcctgtctctggccacggtcagatcagcaggctcgttctgcctcagattctggtggccgccaagagggtttgctctggttcagagactccggccagcacgtctttggtgacttctccatggccgtcgttcaagccaacagcttgctagaggaccagagccagctcgagtctggctctcttagctcccacgactctggtccctttggcacctttgttggcgtctacgacggccacggtgggcctgagacatctcgcttcatcaatgatcatatgttccaccacctcaagaggtttactgcagagcaacagtgtatgtcatcagaagtgataaaaaaagcgttccaagccactgaagaaggcttcttatccatagttacaaatcaatttcaaactagacctcagatagccacagtgggatcatgctgtcttgtaagtgtcatctgcgatgggaagctatacgtggccaacgcaggggactcacgggccgttctgggacgagtcatgagggtaacaggtgaagctcatgccactcagctctcagcagagcacaacgcatctatagagtcagtgagacgggaacttcaggccctgcatccggatcatccagatattgtggttctgaaacataacgtctggcgagtaaaaggcatcattcaggtttcaagatccattggtgatgtgtatttgaaaaggtcagagttcaacagggaaccactgtatgcaaaattccggctgaggtcaccgttcagcaagccattactgagtgcagagccggcgatcacggtgcatacactggagccgcacgatcagttcattatatgtgcatcagatggactgtgggaacatatgagcaaccaagaagcagtagacatagtccagaatcatccgcgaaacgggatagcaaagaggtggtgaaagtagcgctacaagaagcggcaaagaagagagagatgagatactcagacctgaaaaagatagacagaggagtgaggagacatttccacgatgacataacagtgattgttgtcttctttgatacaaacctagtgagcagaggaagtatgttgagaggaccagccgtgtcagtgagaggagcgggtgtgaatctacctcacaacaccctggcgccttgcaccacgcccactcaagctgctgctgctggcgcctcctgactattgaatttttacggtgtccttaaaattctttccaagatccttcctgtaactatatataaatatatatatttgattattattatc

SEQ ID NO: 50349 - protein, 314 aa, Arabidopsis thaliana
  peptide (1)..(314): Ceres Seq. ID no. 14311196
  misc_feature (45)..(313): Pfam Name: Protein phosphatase 2C Pfam Description: Protein phosphatase 2C
  misc_feature (1)..(313): Homolog of NCBI NO: 37536574 NR Description: putative protein phosphatase 2C
  misc_feature (1)..(313): Homolog of NCBI NO: 20340237 NR Description: protein phosphatase 2c-like protein
  misc_feature (1)..(313): Homolog of NCBI NO: 11282001 NR Description: protein phosphatase 2C-like protein - Arabidopsis
  misc_feature (1)..(313): Homolog of NCBI NO: 15239244 NR Description: protein phosphatase 2C-related protein
  misc_feature (1)..(313): Homolog of NCBI NO: 18855039 NR Description: putative protein phosphatase [Oryza sativa]
  misc_feature (1)..(313): Homolog of NCBI NO: 7768153 NR Description: protein phosphatase 2C (PP2C) [Fagus sylvatica]
  misc_feature (1)..(313): Homolog of NCBI NO: 11282004 NR Description: protein phosphatase 2C homolog [imported] -
  misc_feature (6)..(313): Homolog of NCBI NO: 7485891 NR Description: hypothetical protein F20M13.80 - Arabidopsis
  misc_feature (1)..(313): Homolog of NCBI NO: 17064756 NR Description: putative protein phosphatase-2c [Arabidopsis
  misc_feature (1)..(313): Homolog of NCBI NO: 22329238 NR Description: protein phosphatase-2c -related [Arabidopsis
MLSGLMNFLNACLWPRSDQQARSASDSGGRQEGLLWFRDSGQHVFGDFSMAVVQANSLLEDQSQLESGSLSSHDSGPFGTFVGVYDGHGGPETSRFINDHMFHHLKRFTAEQQCMSSEVIKKAFQATEEGFLSIVTNQFQTRPQIATVGSCCLVSVICDGKLYVANAGDSRAVLGRVMRVTGEAHATQLSAEHNASIESVRRELQALHPDHPDIVVLKHNVWRVKGIIQVSRSIGDVYLKRSEFNREPLYAKFRLRSPFSKPLLSAEPAITVHTLEPHDQFIICASDGLWEHMSNQEAVDIVQNHPRNGIAKRW

SEQ ID NO: 50350 - protein, 309 aa, Arabidopsis thaliana
  peptide (1)..(309): Ceres Seq. ID no. 14311197
  misc_feature (40)..(308): Pfam Name: Protein phosphatase 2C Pfam Description: Protein phosphatase 2C
  misc_feature (1)..(308): Homolog of NCBI NO: 37536574 NR Description: putative protein phosphatase 2C
  misc_feature (1)..(308): Homolog of NCBI NO: 20340237 NR Description: protein phosphatase 2c-like protein
  misc_feature (1)..(308): Homolog of NCBI NO: 11282001 NR Description: protein phosphatase 2C-like protein - Arabidopsis
  misc_feature (1)..(308): Homolog of NCBI NO: 15239244 NR Description: protein phosphatase 2C-related protein
  misc_feature (1)..(308): Homolog of NCBI NO: 18855039 NR Description: putative protein phosphatase [Oryza sativa]
  misc_feature (1)..(308): Homolog of NCBI NO: 7768153 NR Description: protein phosphatase 2C (PP2C) [Fagus sylvatica]
  misc_feature (1)..(308): Homolog of NCBI NO: 11282004 NR Description: protein phosphatase 2C homolog [imported] -
  misc_feature (1)..(308): Homolog of NCBI NO: 7485891 NR Description: hypothetical protein F20M13.80 - Arabidopsis
  misc_feature (1)..(308): Homolog of NCBI NO: 17064756 NR Description: putative protein phosphatase-2c [Arabidopsis
  misc_feature (1)..(308): Homolog of NCBI NO: 22329238 NR Description: protein phosphatase-2c -related [Arabidopsis
MNFLNACLWPRSDQQARSASDSGGRQEGLLWFRDSGQHVFGDFSMAVVQANSLLEDQSQLESGSLSSHDSGPFGTFVGVYDGHGGPETSRFINDHMFHHLKRFTAEQQCMSSEVIKKAFQATEEGFLSIVTNQFQTRPQIATVGSCCLVSVICDGKLYVANAGDSRAVLGRVMRVTGEAHATQLSAEHNASIESVRRELQALHPDHPDIVVLKHNVWRVKGIIQVSRSIGDVYLKRSEFNREPLYAKFRLRSPFSKPLLSAEPAITVHTLEPHDQFIICASDGLWEHMSNQEAVDIVQNHPRNGIAKRW

SEQ ID NO: 50351 - protein, 265 aa, Arabidopsis thaliana
  peptide (1)..(265): Ceres Seq. ID no. 14311198
  misc_feature (1)..(264): Pfam Name: Protein phosphatase 2C Pfam Description: Protein phosphatase 2C
  misc_feature (1)..(264): Homolog of NCBI NO: 37536574 NR Description: putative protein phosphatase 2C
  misc_feature (1)..(264): Homolog of NCBI NO: 20340237 NR Description: protein phosphatase 2c-like protein
  misc_feature (1)..(264): Homolog of NCBI NO: 11282001 NR Description: protein phosphatase 2C-like protein - Arabidopsis
  misc_feature (1)..(264): Homolog of NCBI NO: 15239244 NR Description: protein phosphatase 2C-related protein
  misc_feature (1)..(264): Homolog of NCBI NO: 18855039 NR Description: putative protein phosphatase [Oryza sativa]
  misc_feature (1)..(264): Homolog of NCBI NO: 7768153 NR Description: protein phosphatase 2C (PP2C) [Fagus sylvatica]
  misc_feature (1)..(264): Homolog of NCBI NO: 11282004 NR Description: protein phosphatase 2C homolog [imported] -
  misc_feature (1)..(264): Homolog of NCBI NO: 7485891 NR Description: hypothetical protein F20M13.80 - Arabidopsis
  misc_feature (1)..(264): Homolog of NCBI NO: 17064756 NR Description: putative protein phosphatase-2c [Arabidopsis
  misc_feature (1)..(264): Homolog of NCBI NO: 22329238 NR Description: protein phosphatase-2c -related [Arabidopsis
MAVVQANSLLEDQSQLESGSLSSHDSGPFGTFVGVYDGHGGPETSRFINDHMFHHLKRFTAEQQCMSSEVIKKAFQATEEGFLSIVTNQFQTRPQIATVGSCCLVSVICDGKLYVANAGDSRAVLGRVMRVTGEAHATQLSAEHNASIESVRRELQALHPDHPDIVVLKHNVWRVKGIIQVSRSIGDVYLKRSEFNREPLYAKFRLRSPFSKPLLSAEPAITVHTLEPHDQFIICASDGLWEHMSNQEAVDIVQNHPRNGIAKRW

SEQ ID NO: 50352 - DNA, 1304 bp, Arabidopsis thaliana
  misc_feature (1)..(1304): Ceres Seq. ID no. 13592677
  misc_feature: MA Experiment ID: 108434 Result: Up-regulated in Transcription
  misc_feature: MA Experiment 108434 PARAMETER Experiment Name: At_Root_Tips_cDNA_P Parameter: Tissue Value: Root Tips
  misc_feature: MA Experiment ID: 108595 Result: Down-regulated in Transcription
  misc_feature: MA Experiment 108595 PARAMETER Experiment Name: At_Ler-pi_Ovule_cDNA_P Parameter: Plant Line Value: null
  misc_feature: MA Experiment ID: 20000069 Result: Down-regulated in Transcription
  misc_feature: MA Experiment 20000069 PARAMETER Experiment Name: At_100uM_ABA_Mutants_cDNA_P Parameter: Plant Line Value: CS23
  misc_feature: MA Experiment 20000069 PARAMETER Experiment Name: At_100uM_ABA_Mutants_cDNA_P Parameter: Timepoint (hr) Value: 6
  misc_feature: MA Experiment 20000069 PARAMETER Experiment Name: At_100uM_ABA_Mutants_cDNA_P Parameter: Tissue Value: Aerial
  misc_feature: MA Experiment 20000069 PARAMETER Experiment Name: At_100uM_ABA_Mutants_cDNA_P Parameter: Treatment Value: 100uM ABA vs. No Treatment
  misc_feature: MA Experiment ID: 20000090 Result: Down-regulated in Transcription
  misc_feature: MA Experiment ID: 20000117 Result: Down-regulated in Transcription
  misc_feature: MA Experiment 20000117 PARAMETER Experiment Name: At_100uM_ABA_Mutants_cDNA_P Parameter: Plant Line Value: Columbia
  misc_feature: MA Experiment 20000117 PARAMETER Experiment Name: At_100uM_ABA_Mutants_cDNA_P Parameter: Timepoint (hr) Value: 6
  misc_feature: MA Experiment 20000117 PARAMETER Experiment Name: At_100uM_ABA_Mutants_cDNA_P Parameter: Tissue Value: Aerial
  misc_feature: MA Experiment 20000117 PARAMETER Experiment Name: At_100uM_ABA_Mutants_cDNA_P Parameter: Treatment Value: 100uM ABA vs. No Treatment
  misc_feature: MA Experiment ID: 20000438 Result: Up-regulated in Transcription
  misc_feature: MA Experiment 20000438 PARAMETER Experiment Name: At_Shoots__P Parameter: Age (day) Value: 14
  misc_feature: MA Experiment 20000438 PARAMETER Experiment Name: At_Shoots__P Parameter: Tissue Value: Shoots vs. Whole Plant
  misc_feature: MA Experiment ID: 20000573 Result: Down-regulated in Transcription
  misc_feature: MA Experiment 20000573 PARAMETER Experiment Name: At_100uM_ABA_Mutants__P Parameter: Organism Value: A. thaliana
  misc_feature: MA Experiment 20000573 PARAMETER Experiment Name: At_100uM_ABA_Mutants__P Parameter: Plant Line Value: CS22 vs. Ler wt
  misc_feature: MA Experiment 20000573 PARAMETER Experiment Name: At_100uM_ABA_Mutants__P Parameter: Timepoint (hr) Value: N/A
  misc_feature: MA Experiment 20000573 PARAMETER Experiment Name: At_100uM_ABA_Mutants__P Parameter: Tissue Value: Whole Plant
  misc_feature: MA Experiment 20000573 PARAMETER Experiment Name: At_100uM_ABA_Mutants__P Parameter: Treatment Value: None
  misc_feature: MA Experiment ID: 20001911 Result: Down-regulated in Transcription
  misc_feature: MA Experiment 20001911 PARAMETER Experiment Name: At_Drought_Reproduction_P Parameter: Age (day) Value: 40
  misc_feature: MA Experiment 20001911 PARAMETER Experiment Name: At_Drought_Reproduction_P Parameter: Organism Value: A. thaliana
  misc_feature: MA Experiment 20001911 PARAMETER Experiment Name: At_Drought_Reproduction_P Parameter: Plant Line Value: WS
  misc_feature: MA Experiment 20001911 PARAMETER Experiment Name: At_Drought_Reproduction_P Parameter: Timepoint (day) Value: 10
  misc_feature: MA Experiment 20001911 PARAMETER Experiment Name: At_Drought_Reproduction_P Parameter: Tissue Value: Flowers
  misc_feature: MA Experiment 20001911 PARAMETER Experiment Name: At_Drought_Reproduction_P Parameter: Treatment Value: Drought vs. No Drought
aaaactcttgttcctcttcctcttcaacgtgaacacttctatttctcagagaacattcacctatatgtctttcttcaaggagaagtcttcctctttccagatttagatgaacactcttcagatgccttgtgccttattgatccagattcgaagtacccaactttactctctagacctttttcatggcagccactcccacacacttctctgtctcccatgatcctttttcttccacgtctctccttaatctccaaactcaagcgatctttggtcccaatcacagtttaaagacaacccagttgagaattccagcttctttcagaagaaaagctacaaacttgcaagtgatggcttcaggaaagacacctggactgactcaggaagctaatggggttgcaattgatagacaaaacaacactgatgtatttgacgacatgaaacagcggttcctggccttcaagaagcttaagtacatggatgactttgaacactacaaaaatctggcagatgctcaagctccaaagtttctggtgattgcttgtgcagactctagagtttgtccttctgctgtcctgggattccaaccgggtgacgcattcactgttcgtaacattgcaaatttagtacctccatatgagtctggacctactgaaaccaaagctgctctagagttctctgtgaatactcttaatgtggaaaacatcttagtcattggtcatagccggtgtggaggaattcaagctttaatgaaaatggaagacgaaggagattccagaagtttcatacacaactgggtagttgtgggaaagaaggcaaaggaaagcacaaaagctgttgcttcaaacctccattttgatcatcagtgccaacattgtgaaaaggcatcgataaatcattcattagaaaggctgcttgggtacccgtggatagaagagaaagtgcggcaaggttcactgtctctccatggtggatactataattttgttgattgtacgttcgagaaatggacagtggattatgcagcaagcagaggtaagaagaaggaaggcagtggaatcgctgttaaagaccggtcagtttggtcttgacttacgactatctcaatcttcatagagttttttttcataatttatagagaaacatcaaaccccttttggttgggattatcatgtgtttgttccacttgtgtgttgaagtcattttccttcttctgtcttattgaggcagggactaatgtttgttttatctttcagttgtttcgtttaaattccacatttgtgcaatgaactggttggtgtttcttt

SEQ ID NO: 50353 - protein, 301 aa, Arabidopsis thaliana; identical to SEQ ID NO: 27493
  peptide (1)..(301): Ceres Seq. ID no. 13592678
  misc_feature (108)..(276): Pfam Name: Carbonic anhydrase Pfam Description: Carbonic anhydrase
  misc_feature (53)..(282): Homolog of NCBI NO: 1168746 NR Description: CARBONIC ANHYDRASE (CARBONATE DEHYDRATASE)
  misc_feature (53)..(282): Homolog of NCBI NO: 1168738 NR Description: CARBONIC ANHYDRASE 1 (CARBONATE DEHYDRATASE 1)
  misc_feature (56)..(279): Homolog of NCBI NO: 30698715 NR Description: carbonic anhydrase -related [Arabidopsis
  misc_feature (56)..(279): Homolog of NCBI NO: 15223141 NR Description: carbonic anhydrase -related [Arabidopsis
  misc_feature (63)..(255): Homolog of NCBI NO: 30696219 NR Description: carbonic anhydrase -related [Arabidopsis thaliana]
  misc_feature (63)..(255): Homolog of NCBI NO: 21539555 NR Description: putative carbonic anhydrase [Arabidopsis
  misc_feature (63)..(301): Homolog of NCBI NO: 25404198 NR Description: probable carbonic anhydrase T18I24.9
  misc_feature (63)..(301): Homolog of NCBI NO: 30696223 NR Description: carbonic anhydrase -related [Arabidopsis
  misc_feature (128)..(301): Homolog of NCBI NO: 7484832 NR Description: carbonate dehydratase homolog T16L1.70 -
  misc_feature (1)..(301): Homolog of NCBI NO: 18418245 NR Description: carbonate dehydratase - like protein [Arabidopsis

SEQ ID NO: 50354 - protein, 246 aa, Arabidopsis thaliana; identical to SEQ ID NO: 27494
  peptide (1)..(246): Ceres Seq. ID no. 13592679
  misc_feature (53)..(221): Pfam Name: Carbonic anhydrase Pfam Description: Carbonic anhydrase
  misc_feature (1)..(227): Homolog of NCBI NO: 1168746 NR Description: CARBONIC ANHYDRASE (CARBONATE DEHYDRATASE)
  misc_feature (1)..(227): Homolog of NCBI NO: 1168738 NR Description: CARBONIC ANHYDRASE 1 (CARBONATE DEHYDRATASE 1)
  misc_feature (1)..(224): Homolog of NCBI NO: 30698715 NR Description: carbonic anhydrase -related [Arabidopsis
  misc_feature (1)..(224): Homolog of NCBI NO: 15223141 NR Description: carbonic anhydrase -related [Arabidopsis
  misc_feature (8)..(200): Homolog of NCBI NO: 30696219 NR Description: carbonic anhydrase -related [Arabidopsis thaliana]
  misc_feature (8)..(200): Homolog of NCBI NO: 21539555 NR Description: putative carbonic anhydrase [Arabidopsis
  misc_feature (8)..(246): Homolog of NCBI NO: 25404198 NR Description: probable carbonic anhydrase T18I24.9
  misc_feature (8)..(246): Homolog of NCBI NO: 30696223 NR Description: carbonic anhydrase -related [Arabidopsis
  misc_feature (73)..(246): Homolog of NCBI NO: 7484832 NR Description: carbonate dehydratase homolog T16L1.70 -
  misc_feature (1)..(246): Homolog of NCBI NO: 18418245 NR Description: carbonate dehydratase - like protein [Arabidopsis

SEQ ID NO: 50355 - protein, 217 aa, Arabidopsis thaliana; identical to SEQ ID NO: 27495
  peptide (1)..(217): Ceres Seq. ID no. 13592680
  misc_feature (24)..(192): Pfam Name: Carbonic anhydrase Pfam Description: Carbonic anhydrase
  misc_feature (1)..(198): Homolog of NCBI NO: 1168746 NR Description: CARBONIC ANHYDRASE (CARBONATE DEHYDRATASE)
  misc_feature (1)..(198): Homolog of NCBI NO: 1168738 NR Description: CARBONIC ANHYDRASE 1 (CARBONATE DEHYDRATASE 1)
  misc_feature (1)..(195): Homolog of NCBI NO: 30698715 NR Description: carbonic anhydrase -related [Arabidopsis
  misc_feature (1)..(195): Homolog of NCBI NO: 15223141 NR Description: carbonic anhydrase -related [Arabidopsis
  misc_feature (1)..(171): Homolog of NCBI NO: 30696219 NR Description: carbonic anhydrase -related [Arabidopsis thaliana]
  misc_feature (1)..(171): Homolog of NCBI NO: 21539555 NR Description: putative carbonic anhydrase [Arabidopsis
  misc_feature (1)..(217): Homolog of NCBI NO: 25404198 NR Description: probable carbonic anhydrase T18I24.9
  misc_feature (1)..(217): Homolog of NCBI NO: 30696223 NR Description: carbonic anhydrase -related [Arabidopsis
  misc_feature (44)..(217): Homolog of NCBI NO: 7484832 NR Description: carbonate dehydratase homolog T16L1.70 -
  misc_feature (1)..(217): Homolog of NCBI NO: 18418245 NR Description: carbonate dehydratase - like protein [Arabidopsis

SEQ ID NO: 50356 - DNA, 1367 bp, Arabidopsis thaliana
  misc_feature (1)..(1367): Ceres Seq. ID no. 13588196
  misc_feature: MA Experiment ID: 20000185 Result: Down-regulated in Transcription
  misc_feature: MA Experiment 20000185 PARAMETER Experiment Name: At_Roots__P Parameter: Age (day) Value: 7 vs. 21
  misc_feature: MA Experiment 20000185 PARAMETER Experiment Name: At_Roots__P Parameter: Organism Value: A. thaliana
  misc_feature: MA Experiment 20000185 PARAMETER Experiment Name: At_Roots__P Parameter: Tissue Value: Roots vs. Whole Plant
  misc_feature: MA Experiment ID: 20000438 Result: Up-regulated in Transcription
  misc_feature: MA Experiment 20000438 PARAMETER Experiment Name: At_Shoots__P Parameter: Age (day) Value: 14
  misc_feature: MA Experiment 20000438 PARAMETER Experiment Name: At_Shoots__P Parameter: Tissue Value: Shoots vs. Whole Plant
  misc_feature: MA Experiment ID: 20000439 Result: Down-regulated in Transcription
  misc_feature: MA Experiment 20000439 PARAMETER Experiment Name: At_Roots__P Parameter: Age (day) Value: 14 vs. 21
  misc_feature: MA Experiment 20000439 PARAMETER Experiment Name: At_Roots__P Parameter: Organism Value: A. thaliana
  misc_feature: MA Experiment 20000439 PARAMETER Experiment Name: At_Roots__P Parameter: Tissue Value: Roots vs. Whole Plant
  misc_feature: MA Experiment ID: 20001248 Result: Down-regulated in Transcription
  misc_feature: MA Experiment 20001248 PARAMETER Experiment Name: At_Far-red-induction_P Parameter: Age (day) Value: 7
  misc_feature: MA Experiment 20001248 PARAMETER Experiment Name: At_Far-red-induction_P Parameter: Light Value: Far-red vs. White
  misc_feature: MA Experiment 20001248 PARAMETER Experiment Name: At_Far-red-induction_P Parameter: Organism Value: A. thaliana
  misc_feature: MA Experiment 20001248 PARAMETER Experiment Name: At_Far-red-induction_P Parameter: Plant Line Value: Columbia
  misc_feature: MA Experiment 20001248 PARAMETER Experiment Name: At_Far-red-induction_P Parameter: Timepoint (hr) Value: 4
  misc_feature: MA Experiment 20001248 PARAMETER Experiment Name: At_Far-red-induction_P Parameter: Tissue Value: Whole Plant
  misc_feature: MA Experiment ID: 20001557 Result: Down-regulated in Transcription
  misc_feature: MA Experiment 20001557 PARAMETER Experiment Name: At_Drought_Soil_Dry_P Parameter: Age (day) Value: 27
  misc_feature: MA Experiment 20001557 PARAMETER Experiment Name: At_Drought_Soil_Dry_P Parameter: Organism Value: A. thaliana
  misc_feature: MA Experiment 20001557 PARAMETER Experiment Name: At_Drought_Soil_Dry_P Parameter: Plant Line Value: WS
  misc_feature: MA Experiment 20001557 PARAMETER Experiment Name: At_Drought_Soil_Dry_P Parameter: Post Timepoint (hr) Value: 3
  misc_feature: MA Experiment 20001557 PARAMETER Experiment Name: At_Drought_Soil_Dry_P Parameter: Post-Treatment Value: Re-Water vs. No Drought
  misc_feature: MA Experiment 20001557 PARAMETER Experiment Name: At_Drought_Soil_Dry_P Parameter: Timepoint (day) Value: 13
  misc_feature: MA Experiment 20001557 PARAMETER Experiment Name: At_Drought_Soil_Dry_P Parameter: Treatment Value: Drought vs. No Drought
  misc_feature: MA Experiment ID: 20001558 Result: Down-regulated in Transcription
  misc_feature: MA Experiment 20001558 PARAMETER Experiment Name: At_Drought_Soil_Dry_P Parameter: Age (day) Value: 27
  misc_feature: MA Experiment 20001558 PARAMETER Experiment Name: At_Drought_Soil_Dry_P Parameter: Organism Value: A. thaliana
  misc_feature: MA Experiment 20001558 PARAMETER Experiment Name: At_Drought_Soil_Dry_P Parameter: Plant Line Value: WS
  misc_feature: MA Experiment 20001558 PARAMETER Experiment Name: At_Drought_Soil_Dry_P Parameter: Post Timepoint (hr) Value: 6
  misc_feature: MA Experiment 20001558 PARAMETER Experiment Name: At_Drought_Soil_Dry_P Parameter: Post-Treatment Value: Re-Water vs. No Drought
  misc_feature: MA Experiment 20001558 PARAMETER Experiment Name: At_Drought_Soil_Dry_P Parameter: Timepoint (day) Value: 13
  misc_feature: MA Experiment 20001558 PARAMETER Experiment Name: At_Drought_Soil_Dry_P Parameter: Treatment Value: Drought vs. No Drought
  misc_feature: MA Experiment ID: 20001560 Result: Down-regulated in Transcription
  misc_feature: MA Experiment 20001560 PARAMETER Experiment Name: At_Drought_Soil_Dry_P Parameter: Age (day) Value: 28
  misc_feature: MA Experiment 20001560 PARAMETER Experiment Name: At_Drought_Soil_Dry_P Parameter: Organism Value: A. thaliana
  misc_feature: MA Experiment 20001560 PARAMETER Experiment Name: At_Drought_Soil_Dry_P Parameter: Plant Line Value: WS
  misc_feature: MA Experiment 20001560 PARAMETER Experiment Name: At_Drought_Soil_Dry_P Parameter: Post Timepoint (hr) Value: None
  misc_feature: MA Experiment 20001560 PARAMETER Experiment Name: At_Drought_Soil_Dry_P Parameter: Post-Treatment Value: None
  misc_feature: MA Experiment 20001560 PARAMETER Experiment Name: At_Drought_Soil_Dry_P Parameter: Timepoint (day) Value: 14
  misc_feature: MA Experiment 20001560 PARAMETER Experiment Name: At_Drought_Soil_Dry_P Parameter: Treatment Value: Drought vs. No Drought
atatgtatgaagcagctttttgtgaatgaatcttcgaaataggttaaagaaacaaaaatggagaccaaagaattcgactcttacagtgagcgcaaagctttcgacgagacgaaaacaggtgtgaaaggtctcattgatgctcacatcactgagattcctcgaattttctgtctccctcaaggttccttatccgacaagaaaccttttgtttctaccactgattttgcgatccctatcatcgacttcgaaggcctccacgtctcccgtgaagatatcgttgggaagatcaaagacgctgcatcgaattggggattcttccaggtgatcaatcatggtgttcctttaaacgttcttcaagagattcaagatggagttcgtaggtttcatgaggaagctcctgaggttaagaaaacctacttcactcgtgacgccactaaaagatttgtctacaatagtaatttcgatctctatagttcttcttcatgtgttaactggagagactctttcgcttgttacatggctcctgatcctccaaaccctgaggatctccctgtggcttgcagggttgctatgttcgaatactcaaagcatatgatgagattaggtgatttgctctttgagcttctctcagaagctcttggtttgagatctgataagcttaaaagcatggattgcatgaagggtttgcttttgctctgccattattatcctccatgtccacaacctgatctaaccatcggcacaaataatcattcagacaactccttcctcaccattcttctccaggaccaaatcggtggtcttcaaatctttcatcaagactgttgggtcgatgtctctcctattccaggggctctagtcatcaacatgggagatttcttgcagctaataacgaatgacaaagtcataagtgtggagcacagggtgctagcgaacagggcagctacaccgaggatatcagtagctagctttttcagcacaagtatgcgtccgaattcaactgtttatggaccaatcaaagagcttctctctgaagaaaacccttcaaaatacagagtcatcgacttgaaagaatacacagagggatacttcaagaaaggcctcgatggaacatcgtatctgtcgcattacaagatatgaaagaaaaaaacaattgaaagagtaaatcatctcaagtttattgtaagatattggttcgtttcatgcatctattgggttcaggtactagtccaattgtcagatcttgacaaataagtaaaccatttcctttgtaccaaaaacaaaaacaacaaagaaaggtgtgtgtgtgtgtgtgtgtataattttagtgaatgctttaaattgggaataaaggttcaaacttgatc

SEQ ID NO: 50357 - protein, 360 aa, Arabidopsis thaliana
  peptide (1)..(360): Ceres Seq. ID no. 13588197
  misc_feature (208)..(308): Pfam Name: 2OG-Fe(II) oxygenase superfamily Pfam Description: 2OG-Fe(II) oxygenase superfamily
  misc_feature (6)..(360): Homolog of NCBI NO: 13878119 NR Description: putative oxidoreductase [Arabidopsis thaliana]
  misc_feature (6)..(360): Homolog of NCBI NO: 15221545 NR Description: 2-oxoglutarate-dependent dioxygenase, putative
  misc_feature (13)..(360): Homolog of NCBI NO: 30679748 NR Description: 2-oxoglutarate-dependent dioxygenase, putative
  misc_feature (2)..(360): Homolog of NCBI NO: 15239868 NR Description: 2-oxoglutarate-dependent dioxygenase, putative
  misc_feature (3)..(360): Homolog of NCBI NO: 14596165 NR Description: 1-aminocyclopropane-1-carboxylate oxidase
  misc_feature (3)..(360): Homolog of NCBI NO: 15239870 NR Description: 2-oxoglutarate-dependent dioxygenase, putative
  misc_feature (31)..(360): Homolog of NCBI NO: 15219718 NR Description: 2-oxoglutarate-dependent dioxygenase, putative
  misc_feature (5)..(360): Homolog of NCBI NO: 15238458 NR Description: 2-oxoglutarate-dependent dioxygenase, putative
  misc_feature (5)..(360): Homolog of NCBI NO: 15238459 NR Description: oxidoreductase, 2OG-Fe(II) oxygenase family
  misc_feature (1)..(360): Homolog of NCBI NO: 15219715 NR Description: 2-oxoglutarate-dependent dioxygenase, putative
METKEFDSYSERKAFDETKTGVKGLIDAHITEIPRIFCLPQGSLSDKKPFVSTTDFAIPIIDFEGLHVSREDIVGKIKDAASNWGFFQVINHGVPLNVLQEIQDGVRRFHEEAPEVKKTYFTRDATKRFVYNSNFDLYSSSSCVNWRDSFACYMAPDPPNPEDLPVACRVAMFEYSKHMMRLGDLLFELLSEALGLRSDKLKSMDCMKGLLLLCHYYPPCPQPDLTIGTNNHSDNSFLTILLQDQIGGLQIFHQDCWVDVSPIPGALVINMGDFLQLITNDKVISVEHRVLANRAATPRISVASFFSTSMRPNSTVYGPIKELLSEENPSKYRVIDLKEYTEGYFKKGLDGTSYLSHYKI

SEQ ID NO: 50358 - protein, 207 aa, Arabidopsis thaliana
  peptide (1)..(207): Ceres Seq. ID no. 13588198
  misc_feature (55)..(155): Pfam Name: 2OG-Fe(II) oxygenase superfamily Pfam Description: 2OG-Fe(II) oxygenase superfamily
  misc_feature (1)..(207): Homolog of NCBI NO: 13878119 NR Description: putative oxidoreductase [Arabidopsis thaliana]
  misc_feature (1)..(207): Homolog of NCBI NO: 15221545 NR Description: 2-oxoglutarate-dependent dioxygenase, putative
  misc_feature (1)..(207): Homolog of NCBI NO: 30679748 NR Description: 2-oxoglutarate-dependent dioxygenase, putative
  misc_feature (1)..(207): Homolog of NCBI NO: 15239868 NR Description: 2-oxoglutarate-dependent dioxygenase, putative
  misc_feature (1)..(207): Homolog of NCBI NO: 14596165 NR Description: 1-aminocyclopropane-1-carboxylate oxidase
  misc_feature (1)..(207): Homolog of NCBI NO: 15239870 NR Description: 2-oxoglutarate-dependent dioxygenase, putative
  misc_feature (1)..(207): Homolog of NCBI NO: 15219718 NR Description: 2-oxoglutarate-dependent dioxygenase, putative
  misc_feature (1)..(207): Homolog of NCBI NO: 15238458 NR Description: 2-oxoglutarate-dependent dioxygenase, putative
  misc_feature (1)..(207): Homolog of NCBI NO: 15238459 NR Description: oxidoreductase, 2OG-Fe(II) oxygenase family
  misc_feature (1)..(207): Homolog of NCBI NO: 15219715 NR Description: 2-oxoglutarate-dependent dioxygenase, putative
MAPDPPNPEDLPVACRVAMFEYSKHMMRLGDLLFELLSEALGLRSDKLKSMDCMKGLLLLCHYYPPCPQPDLTIGTNNHSDNSFLTILLQDQIGGLQIFHQDCWVDVSPIPGALVINMGDFLQLITNDKVISVEHRVLANRAATPRISVASFFSTSMRPNSTVYGPIKELLSEENPSKYRVIDLKEYTEGYFKKGLDGTSYLSHYKI

SEQ ID NO: 50359 - protein, 189 aa, Arabidopsis thaliana
  peptide (1)..(189): Ceres Seq. ID no. 13588199
  misc_feature (37)..(137): Pfam Name: 2OG-Fe(II) oxygenase superfamily Pfam Description: 2OG-Fe(II) oxygenase superfamily
  misc_feature (1)..(189): Homolog of NCBI NO: 13878119 NR Description: putative oxidoreductase [Arabidopsis thaliana]
  misc_feature (1)..(189): Homolog of NCBI NO: 15221545 NR Description: 2-oxoglutarate-dependent dioxygenase, putative
  misc_feature (1)..(189): Homolog of NCBI NO: 30679748 NR Description: 2-oxoglutarate-dependent dioxygenase, putative
  misc_feature (1)..(189): Homolog of NCBI NO: 15239868 NR Description: 2-oxoglutarate-dependent dioxygenase, putative
  misc_feature (1)..(189): Homolog of NCBI NO: 14596165 NR Description: 1-aminocyclopropane-1-carboxylate oxidase
  misc_feature (1)..(189): Homolog of NCBI NO: 15239870 NR Description: 2-oxoglutarate-dependent dioxygenase, putative
  misc_feature (1)..(189): Homolog of NCBI NO: 15219718 NR Description: 2-oxoglutarate-dependent dioxygenase, putative
  misc_feature (1)..(189): Homolog of NCBI NO: 15238458 NR Description: 2-oxoglutarate-dependent dioxygenase, putative
  misc_feature (1)..(189): Homolog of NCBI NO: 15238459 NR Description: oxidoreductase, 2OG-Fe(II) oxygenase family
  misc_feature (1)..(189): Homolog of NCBI NO: 15219715 NR Description: 2-oxoglutarate-dependent dioxygenase, putative
MFEYSKHMMRLGDLLFELLSEALGLRSDKLKSMDCMKGLLLLCHYYPPCPQPDLTIGTNNHSDNSFLTILLQDQIGGLQIFHQDCWVDVSPIPGALVINMGDFLQLITNDKVISVEHRVLANRAATPRISVASFFSTSMRPNSTVYGPIKELLSEENPSKYRVIDLKEYTEGYFKKGLDGTSYLSHYKI

SEQ ID NO: 50360 - DNA, 1807 bp, Arabidopsis thaliana; identical to SEQ ID NO: 47004
  misc_feature (1)..(1807): Ceres Seq. ID no. 13591791
  misc_feature: MA Experiment ID: 20000173 Result: Down-regulated in Transcription
  misc_feature: MA Experiment 20000173 PARAMETER Experiment Name: At_42deg_Heat_P Parameter: Age (day) Value: 14
  misc_feature: MA Experiment 20000173 PARAMETER Experiment Name: At_42deg_Heat_P Parameter: Organism Value: A. thaliana
  misc_feature: MA Experiment 20000173 PARAMETER Experiment Name: At_42deg_Heat_P Parameter: Plant Line Value: WS
  misc_feature: MA Experiment 20000173 PARAMETER Experiment Name: At_42deg_Heat_P Parameter: Temperature (deg C) Value: 42 vs. 22
  misc_feature: MA Experiment 20000173 PARAMETER Experiment Name: At_42deg_Heat_P Parameter: Timepoint (hr) Value: 6
  misc_feature: MA Experiment 20000173 PARAMETER Experiment Name: At_42deg_Heat_P Parameter: Tissue Value: Aerial
  misc_feature: MA Experiment ID: 20000182 Result: Down-regulated in Transcription
  misc_feature: MA Experiment 20000182 PARAMETER Experiment Name: At_2mM_SA_P Parameter: Age (day) Value: 14
  misc_feature: MA Experiment 20000182 PARAMETER Experiment Name: At_2mM_SA_P Parameter: Organism Value: A. thaliana
  misc_feature: MA Experiment 20000182 PARAMETER Experiment Name: At_2mM_SA_P Parameter: Plant Line Value: WS
  misc_feature: MA Experiment 20000182 PARAMETER Experiment Name: At_2mM_SA_P Parameter: Timepoint (hr) Value: 6
  misc_feature: MA Experiment 20000182 PARAMETER Experiment Name: At_2mM_SA_P Parameter: Tissue Value: Aerial
  misc_feature: MA Experiment 20000182 PARAMETER Experiment Name: At_2mM_SA_P Parameter: Treatment Value: 2mM SA vs. No Treatment
  misc_feature: MA Experiment ID: 20000185 Result: Down-regulated in Transcription
  misc_feature: MA Experiment 20000185 PARAMETER Experiment Name: At_Roots__P Parameter: Age (day) Value: 7 vs. 21
  misc_feature: MA Experiment 20000185 PARAMETER Experiment Name: At_Roots__P Parameter: Organism Value: A. thaliana
  misc_feature: MA Experiment 20000185 PARAMETER Experiment Name: At_Roots__P Parameter: Tissue Value: Roots vs. Whole Plant
  misc_feature: MA Experiment ID: 20000444 Result: Up-regulated in Transcription
  misc_feature: MA Experiment 20000444 PARAMETER Experiment Name: At_100uM_NAA__P Parameter: Age (day) Value: 14
  misc_feature: MA Experiment 20000444 PARAMETER Experiment Name: At_100uM_NAA__P Parameter: Organism Value: A. thaliana
  misc_feature: MA Experiment 20000444 PARAMETER Experiment Name: At_100uM_NAA__P Parameter: Plant Line Value: WS
  misc_feature: MA Experiment 20000444 PARAMETER Experiment Name: At_100uM_NAA__P Parameter: Timepoint (hr) Value: 1
  misc_feature: MA Experiment 20000444 PARAMETER Experiment Name: At_100uM_NAA__P Parameter: Tissue Value: Aerial
  misc_feature: MA Experiment 20000444 PARAMETER Experiment Name: At_100uM_NAA__P Parameter: Treatment Value: 100uM NAA vs. No Treatment
  misc_feature: MA Experiment ID: 20001247 Result: Up-regulated in Transcription
  misc_feature: MA Experiment 20001247 PARAMETER Experiment Name: At_Far-red-induction_P Parameter: Age (day) Value: 7
  misc_feature: MA Experiment 20001247 PARAMETER Experiment Name: At_Far-red-induction_P Parameter: Light Value: Far-red vs. White
  misc_feature: MA Experiment 20001247 PARAMETER Experiment Name: At_Far-red-induction_P Parameter: Organism Value: A. thaliana
  misc_feature: MA Experiment 20001247 PARAMETER Experiment Name: At_Far-red-induction_P Parameter: Plant Line Value: Columbia
  misc_feature: MA Experiment 20001247 PARAMETER Experiment Name: At_Far-red-induction_P Parameter: Timepoint (hr) Value: 1
  misc_feature: MA Experiment 20001247 PARAMETER Experiment Name: At_Far-red-induction_P Parameter: Tissue Value: Whole Plant
  misc_feature: MA Experiment ID: 20001248 Result: Up-regulated in Transcription
  misc_feature: MA Experiment 20001248 PARAMETER Experiment Name: At_Far-red-induction_P Parameter: Age (day) Value: 7
  misc_feature: MA Experiment 20001248 PARAMETER Experiment Name: At_Far-red-induction_P Parameter: Light Value: Far-red vs. White
  misc_feature: MA Experiment 20001248 PARAMETER Experiment Name: At_Far-red-induction_P Parameter: Organism Value: A. thaliana
  misc_feature: MA Experiment 20001248 PARAMETER Experiment Name: At_Far-red-induction_P Parameter: Plant Line Value: Columbia
  misc_feature: MA Experiment 20001248 PARAMETER Experiment Name: At_Far-red-induction_P Parameter: Timepoint (hr) Value: 4
  misc_feature: MA Experiment 20001248 PARAMETER Experiment Name: At_Far-red-induction_P Parameter: Tissue Value: Whole Plant
  misc_feature: MA Experiment ID: 20001450 Result: Up-regulated in Transcription
  misc_feature: MA Experiment 20001450 PARAMETER Experiment Name: At_Far-red-induction_P Parameter: Age (day) Value: 7
  misc_feature: MA Experiment 20001450 PARAMETER Experiment Name: At_Far-red-induction_P Parameter: Light Value: Far-red vs. White
  misc_feature: MA Experiment 20001450 PARAMETER Experiment Name: At_Far-red-induction_P Parameter: Organism Value: A. thaliana
  misc_feature: MA Experiment 20001450 PARAMETER Experiment Name: At_Far-red-induction_P Parameter: Plant Line Value: Columbia
  misc_feature: MA Experiment 20001450 PARAMETER Experiment Name: At_Far-red-induction_P Parameter: Timepoint (hr) Value: 8
  misc_feature: MA Experiment 20001450 PARAMETER Experiment Name: At_Far-red-induction_P Parameter: Tissue Value: Whole Plant
  misc_feature: MA Experiment ID: 20001911 Result: Down-regulated in Transcription
  misc_feature: MA Experiment 20001911 PARAMETER Experiment Name: At_Drought_Reproduction_P Parameter: Age (day) Value: 40
  misc_feature: MA Experiment 20001911 PARAMETER Experiment Name: At_Drought_Reproduction_P Parameter: Organism Value: A. thaliana
  misc_feature: MA Experiment 20001911 PARAMETER Experiment Name: At_Drought_Reproduction_P Parameter: Plant Line Value: WS
  misc_feature: MA Experiment 20001911 PARAMETER Experiment Name: At_Drought_Reproduction_P Parameter: Timepoint (day) Value: 10
  misc_feature: MA Experiment 20001911 PARAMETER Experiment Name: At_Drought_Reproduction_P Parameter: Tissue Value: Flowers
  misc_feature: MA Experiment 20001911 PARAMETER Experiment Name: At_Drought_Reproduction_P Parameter: Treatment Value: Drought vs. No Drought

SEQ ID NO: 50361 - protein, 489 aa, Arabidopsis thaliana; identical to SEQ ID NO: 47005
  peptide (1)..(489): Ceres Seq. ID no. 13591792
  misc_feature (30)..(484): Homolog of NCBI NO: 7486022 NR Description: hypothetical protein F23E12.210 - Arabidopsis
  misc_feature (101)..(485): Homolog of NCBI NO: 15222446 NR Description: protein kinase - related [Arabidopsis thaliana]
  misc_feature (30)..(484): Homolog of NCBI NO: 18418600 NR Description: protein kinase family [Arabidopsis thaliana]
  misc_feature (1)..(485): Homolog of NCBI NO: 34897368 NR Description: putative protein kinase [Oryza sativa]
  misc_feature (1)..(483): Homolog of NCBI NO: 7486564 NR Description: hypothetical protein F6N23.9 - Arabidopsis
  misc_feature (1)..(485): Homolog of NCBI NO: 15237604 NR Description: protein kinase family [Arabidopsis thaliana]
  misc_feature (1)..(483): Homolog of NCBI NO: 22328189 NR Description: protein kinase family [Arabidopsis thaliana]
  misc_feature (1)..(488): Homolog of NCBI NO: 21553556 NR Description: protein kinase-like protein [Arabidopsis thaliana]
  misc_feature (1)..(488): Homolog of NCBI NO: 15232406 NR Description: protein kinase family [Arabidopsis thaliana]
  misc_feature (1)..(489): Homolog of NCBI NO: 22327962 NR Description: protein kinase - related [Arabidopsis thaliana]
  misc_feature (30)..(484): Homolog of NCBI NO: 7486022 NR Description: hypothetical protein F23E12.210 - Arabidopsis
  misc_feature (101)..(485): Homolog of NCBI NO: 15222446 NR Description: protein kinase - related [Arabidopsis thaliana]
  misc_feature (30)..(484): Homolog of NCBI NO: 18418600 NR Description: protein kinase family [Arabidopsis thaliana]
  misc_feature (1)..(485): Homolog of NCBI NO: 34897368 NR Description: putative protein kinase [Oryza sativa]
  misc_feature (1)..(483): Homolog of NCBI NO: 7486564 NR Description: hypothetical protein F6N23.9 - Arabidopsis
  misc_feature (1)..(485): Homolog of NCBI NO: 15237604 NR Description: protein kinase family [Arabidopsis thaliana]
  misc_feature (1)..(483): Homolog of NCBI NO: 22328189 NR Description: protein kinase family [Arabidopsis thaliana]
  misc_feature (1)..(488): Homolog of NCBI NO: 21553556 NR Description: protein kinase-like protein [Arabidopsis thaliana]
  misc_feature (1)..(488): Homolog of NCBI NO: 15232406 NR Description: protein kinase family [Arabidopsis thaliana]
  misc_feature (1)..(489): Homolog of NCBI NO: 22327962 NR Description: protein kinase - related [Arabidopsis thaliana]

SEQ ID NO: 50362 - protein, 359 aa, Arabidopsis thaliana; identical to SEQ ID NO: 47006
  peptide (1)..(359): Ceres Seq. ID no. 13591793
  misc_feature (1)..(354): Homolog of NCBI NO: 7486022 NR Description: hypothetical protein F23E12.210 - Arabidopsis
  misc_feature (1)..(355): Homolog of NCBI NO: 15222446 NR Description: protein kinase - related [Arabidopsis thaliana]
  misc_feature (1)..(354): Homolog of NCBI NO: 18418600 NR Description: protein kinase family [Arabidopsis thaliana]
  misc_feature (1)..(355): Homolog of NCBI NO: 34897368 NR Description: putative protein kinase [Oryza sativa]
  misc_feature (1)..(353): Homolog of NCBI NO: 7486564 NR Description: hypothetical protein F6N23.9 - Arabidopsis
  misc_feature (1)..(355): Homolog of NCBI NO: 15237604 NR Description: protein kinase family [Arabidopsis thaliana]
  misc_feature (1)..(353): Homolog of NCBI NO: 22328189 NR Description: protein kinase family [Arabidopsis thaliana]
  misc_feature (1)..(358): Homolog of NCBI NO: 21553556 NR Description: protein kinase-like protein [Arabidopsis thaliana]
  misc_feature (1)..(358): Homolog of NCBI NO: 15232406 NR Description: protein kinase family [Arabidopsis thaliana]
  misc_feature (1)..(359): Homolog of NCBI NO: 22327962 NR Description: protein kinase - related [Arabidopsis thaliana]
  misc_feature (1)..(354): Homolog of NCBI NO: 7486022 NR Description: hypothetical protein F23E12.210 - Arabidopsis
  misc_feature (1)..(355): Homolog of NCBI NO: 15222446 NR Description: protein kinase - related [Arabidopsis thaliana]
  misc_feature (1)..(354): Homolog of NCBI NO: 18418600 NR Description: protein kinase family [Arabidopsis thaliana]
  misc_feature (1)..(355): Homolog of NCBI NO: 34897368 NR Description: putative protein kinase [Oryza sativa]
  misc_feature (1)..(353): Homolog of NCBI NO: 7486564 NR Description: hypothetical protein F6N23.9 - Arabidopsis
  misc_feature (1)..(355): Homolog of NCBI NO: 15237604 NR Description: protein kinase family [Arabidopsis thaliana]
  misc_feature (1)..(353): Homolog of NCBI NO: 22328189 NR Description: protein kinase family [Arabidopsis thaliana]
  misc_feature (1)..(358): Homolog of NCBI NO: 21553556 NR Description: protein kinase-like protein [Arabidopsis thaliana]
  misc_feature (1)..(358): Homolog of NCBI NO: 15232406 NR Description: protein kinase family [Arabidopsis thaliana]
  misc_feature (1)..(359): Homolog of NCBI NO: 22327962 NR Description: protein kinase - related [Arabidopsis thaliana]

SEQ ID NO: 50363 - protein, 342 aa, Arabidopsis thaliana; identical to SEQ ID NO: 47007
  peptide (1)..(342): Ceres Seq. ID no. 13591794
  misc_feature (1)..(337): Homolog of NCBI NO: 7486022 NR Description: hypothetical protein F23E12.210 - Arabidopsis
  misc_feature (1)..(338): Homolog of NCBI NO: 15222446 NR Description: protein kinase - related [Arabidopsis thaliana]
  misc_feature (1)..(337): Homolog of NCBI NO: 18418600 NR Description: protein kinase family [Arabidopsis thaliana]
  misc_feature (1)..(338): Homolog of NCBI NO: 34897368 NR Description: putative protein kinase [Oryza sativa]
  misc_feature (1)..(336): Homolog of NCBI NO: 7486564 NR Description: hypothetical protein F6N23.9 - Arabidopsis
  misc_feature (1)..(338): Homolog of NCBI NO: 15237604 NR Description: protein kinase family [Arabidopsis thaliana]
  misc_feature (1)..(336): Homolog of NCBI NO: 22328189 NR Description: protein kinase family [Arabidopsis thaliana]
  misc_feature (1)..(341): Homolog of NCBI NO: 21553556 NR Description: protein kinase-like protein [Arabidopsis thaliana]
  misc_feature (1)..(341): Homolog of NCBI NO: 15232406 NR Description: protein kinase family [Arabidopsis thaliana]
  misc_feature (1)..(342): Homolog of NCBI NO: 22327962 NR Description: protein kinase - related [Arabidopsis thaliana]
  misc_feature (1)..(337): Homolog of NCBI NO: 7486022 NR Description: hypothetical protein F23E12.210 - Arabidopsis
  misc_feature (1)..(338): Homolog of NCBI NO: 15222446 NR Description: protein kinase - related [Arabidopsis thaliana]
  misc_feature (1)..(337): Homolog of NCBI NO: 18418600 NR Description: protein kinase family [Arabidopsis thaliana]
  misc_feature (1)..(338): Homolog of NCBI NO: 34897368 NR Description: putative protein kinase [Oryza sativa]
  misc_feature (1)..(336): Homolog of NCBI NO: 7486564 NR Description: hypothetical protein F6N23.9 - Arabidopsis
  misc_feature (1)..(338): Homolog of NCBI NO: 15237604 NR Description: protein kinase family [Arabidopsis thaliana]
  misc_feature (1)..(336): Homolog of NCBI NO: 22328189 NR Description: protein kinase family [Arabidopsis thaliana]
  misc_feature (1)..(341): Homolog of NCBI NO: 21553556 NR Description: protein kinase-like protein [Arabidopsis thaliana]
  misc_feature (1)..(341): Homolog of NCBI NO: 15232406 NR Description: protein kinase family [Arabidopsis thaliana]
  misc_feature (1)..(342): Homolog of NCBI NO: 22327962 NR Description: protein kinase - related [Arabidopsis thaliana]

SEQ ID NO: 50364 - DNA, 2063 bp, Arabidopsis thaliana
  misc_feature (1)..(2063): Ceres Seq. ID no. 13647742
  misc_feature: MA Experiment ID: 20000306 Result: Down-regulated in Transcription
  misc_feature: MA Experiment 20000306 PARAMETER Experiment Name: At_Germinating_Seeds_Sub_P Parameter: Age (hr) Value: 6 vs. 0
  misc_feature: MA Experiment 20000306 PARAMETER Experiment Name: At_Germinating_Seeds_Sub_P Parameter: Organism Value: A. thaliana
  misc_feature: MA Experiment 20000306 PARAMETER Experiment Name: At_Germinating_Seeds_Sub_P Parameter: Plant Line Value: WS
  misc_feature: MA Experiment 20000306 PARAMETER Experiment Name: At_Germinating_Seeds_Sub_P Parameter: Tissue Value: Germinating Seeds
  misc_feature: MA Experiment ID: 20000307 Result: Down-regulated in Transcription
  misc_feature: MA Experiment 20000307 PARAMETER Experiment Name: At_Germinating_Seeds_Sub_P Parameter: Age (hr) Value: 24 vs. 0
  misc_feature: MA Experiment 20000307 PARAMETER Experiment Name: At_Germinating_Seeds_Sub_P Parameter: Organism Value: A. thaliana
  misc_feature: MA Experiment 20000307 PARAMETER Experiment Name: At_Germinating_Seeds_Sub_P Parameter: Plant Line Value: WS
  misc_feature: MA Experiment 20000307 PARAMETER Experiment Name: At_Germinating_Seeds_Sub_P Parameter: Tissue Value: Germinating Seeds
  misc_feature: MA Experiment ID: 20000315 Result: Down-regulated in Transcription
  misc_feature: MA Experiment 20000315 PARAMETER Experiment Name: At_14day_Shoots-Roots_Sub_P Parameter: Age (day) Value: 14
  misc_feature: MA Experiment 20000315 PARAMETER Experiment Name: At_14day_Shoots-Roots_Sub_P Parameter: Organism Value: A. thaliana
  misc_feature: MA Experiment 20000315 PARAMETER Experiment Name: At_14day_Shoots-Roots_Sub_P Parameter: Plant Line Value: WS
  misc_feature: MA Experiment 20000315 PARAMETER Experiment Name: At_14day_Shoots-Roots_Sub_P Parameter: Tissue Value: Shoots vs. Whole Plant
  misc_feature: MA Experiment ID: 20000327 Result: Down-regulated in Transcription
  misc_feature: MA Experiment 20000327 PARAMETER Experiment Name: At_42deg_Heat_Sub_P Parameter: Age (day) Value: 14
  misc_feature: MA Experiment 20000327 PARAMETER Experiment Name: At_42deg_Heat_Sub_P Parameter: Organism Value: A. thaliana
  misc_feature: MA Experiment 20000327 PARAMETER Experiment Name: At_42deg_Heat_Sub_P Parameter: Plant Line Value: WS
  misc_feature: MA Experiment 20000327 PARAMETER Experiment Name: At_42deg_Heat_Sub_P Parameter: Temperature (deg C) Value: 42 vs. 22
  misc_feature: MA Experiment 20000327 PARAMETER Experiment Name: At_42deg_Heat_Sub_P Parameter: Timepoint (hr) Value: 1
  misc_feature: MA Experiment 20000327 PARAMETER Experiment Name: At_42deg_Heat_Sub_P Parameter: Tissue Value: Aerial
  misc_feature: MA Experiment ID: 20000328 Result: Down-regulated in Transcription
  misc_feature: MA Experiment 20000328 PARAMETER Experiment Name: At_42deg_Heat_Sub_P Parameter: Age (day) Value: 14
  misc_feature: MA Experiment 20000328 PARAMETER Experiment Name: At_42deg_Heat_Sub_P Parameter: Organism Value: A. thaliana
  misc_feature: MA Experiment 20000328 PARAMETER Experiment Name: At_42deg_Heat_Sub_P Parameter: Plant Line Value: WS
  misc_feature: MA Experiment 20000328 PARAMETER Experiment Name: At_42deg_Heat_Sub_P Parameter: Temperature (deg C) Value: 42 vs. 22
  misc_feature: MA Experiment 20000328 PARAMETER Experiment Name: At_42deg_Heat_Sub_P Parameter: Timepoint (hr) Value: 6
  misc_feature: MA Experiment 20000328 PARAMETER Experiment Name: At_42deg_Heat_Sub_P Parameter: Tissue Value: Aerial
aaaaaaaatataaattaaataaagaatcccataaatatctctctatcgaactctctctgcttttacaaatctcagaatctccttcagcgaattcacatctcagctgcttttgaatccgccgtaactaaaaacaatcctccttttctcgattcgttaaactatggccccgccggcaggacaaacggcggcggtggctgaagcggctggcgccgatggtgctccaccgcagcagcagcgtggatttggttccacgatttccggcatcgttagaatcgccgtcttttggtattttgcttctaagttcttttctcctaagcagaaacctatggatcccactgctccgtctcagctcatgactaatctcttccacaagggcgaatcattggatatgtggttttatctatcagagcaggagaagttcaatgactttggcaatgatcgtgcgctatattggcatgagacgaatataccttatgctgtatggacaccagagagtattaggaccaagtcacttacgtattatccatctgagacactacagaataatggaagtctgtatgctcatatcttttttgctcgatctggatttcccattgaccccactgatcctgaatatcaacctcttaatagttttagtaggacgcatgctgtggcgacttactttccaaagcagaaaaaaaataagaagaagagtctcttgggcagtcccaaagactctgatgaatccgaacctgaagttgagaaagttggagataagaaatcagatcccaaggaagaggtccctgtggaatggatatccctctggaaacctaatgtcacgattaacctggttgatgattttactcactattcacagaatggtgtaccaccaaacattgctcctcacttactggtagaaccgaccacaggaaattactatcctacaatttacttcaatgagttttggctgctaagggacaagttcattccagtcaatgagacagtctcagaactaccactaaatctggaaataagtcccataagcatgatgaagtggcaactgtttcagcaagttgatcaatctttccagatgcagcgtagctatggaagcatgcttgacggtgaatctgacgaactaaagaaggtgtttttggaaggaaatccctatcttttggggatcacgatgtttgtttcgatgcttcattcagtgttcgacttcctggcattcaaaaatgatatccaattctggaacaaaaataaatctatggaagggctgtctgcaaagtctgttgtactgaactttatctgtcagtttgtcatcttcctctacttgcttgacaacgacacttcatggatgatactggctagttccggagtcggtgtctgcattgagttctggaaaatagggaaagccatgcgcatagaggttgatcgaagtggaatgattccaaggttgaggttccatgatcgtgaatcgtatgcaagcaataaaaccaaggagtatgatgacattgccatcaaattcttatcctatgtgctcctcctccttgtcattggcttgtccatatattctctcgcttatgaacgccacaagagctggtattcttggatactatcttcactaacaagctgtgtctacatgttcggtttcatcatgatgtgtcctcagctattcatcaactacaagcttaaatcagtggcacatttaccatggagacagatgacttacaagttcctcaacaccattatcgacgatctctttgcctttgtcatcaaaatgccgattttacatcgactttctgtattcagagatgatgtgatattcttgatatacttataccaaaggtgggtttacccagtggataagacacgtgtgaacgagttcggttttggaggtgaggatgaaactgcagagaagaagttgatcactgagaaagaagaagaagacaagaaaacaaactaatctcttctcttcttcaaattttattacagttcagttatagtgtcttaatttatttttgttctcacttttggaaattgttttgttcaagtttaatgtcaaccctcaagacacattattaagc

SEQ ID NO: 50365 - protein, 593 aa, Arabidopsis thaliana
  peptide (1)..(593): Ceres Seq. ID no. 13647743
  misc_feature (29)..(576): Pfam Name: Cleft lip and palate transmembrane protein 1 (CLPTM1) Pfam Description: Cleft lip and palate transmembrane protein 1
  misc_feature (1)..(575): Homolog of NCBI NO: 17550864 NR Description: Putative endoplasmic reticulum membrane protein member, with at least 5 transmembrane domains, of eukaryotic
  misc_feature (21)..(577): Homolog of NCBI NO: 18381157 NR Description: Similar to cleft lip and palate associated
  misc_feature (21)..(577): Homolog of NCBI NO: 27676422 NR Description: similar to cleft lip and palate associated
  misc_feature (21)..(577): Homolog of NCBI NO: 32880151 NR Description: cleft lip and palate associated transmembrane
  misc_feature (21)..(577): Homolog of NCBI NO: 13436080 NR Description: cleft lip and palate associated transmembrane
  misc_feature (21)..(577): Homolog of NCBI NO: 4502897 NR Description: cleft lip and palate associated transmembrane
  misc_feature (1)..(575): Homolog of NCBI NO: 32479676 NR Description: P0076O17.9 [Oryza sativa (japonica
  misc_feature (1)..(575): Homolog of NCBI NO: 38346578 NR Description: OSJNBa0064D20.9 [Oryza sativa (japonica
  misc_feature (1)..(593): Homolog of NCBI NO: 15241650 NR Description: cleft lip and palate associated transmembrane
  misc_feature (1)..(593): Homolog of NCBI NO: 8809702 NR Description: gb|AAC97420.1~gene_id:MQM1.16~strong similarity
MAPPAGQTAAVAEAAGADGAPPQQQRGFGSTISGIVRIAVFWYFASKFFSPKQKPMDPTAPSQLMTNLFHKGESLDMWFYLSEQEKFNDFGNDRALYWHETNIPYAVWTPESIRTKSLTYYPSETLQNNGSLYAHIFFARSGFPIDPTDPEYQPLNSFSRTHAVATYFPKQKKNKKKSLLGSPKDSDESEPEVEKVGDKKSDPKEEVPVEWISLWKPNVTINLVDDFTHYSQNGVPPNIAPHLLVEPTTGNYYPTIYFNEFWLLRDKFIPVNETVSELPLNLEISPISMMKWQLFQQVDQSFQMQRSYGSMLDGESDELKKVFLEGNPYLLGITMFVSMLHSVFDFLAFKNDIQFWNKNKSMEGLSAKSVVLNFICQFVIFLYLLDNDTSWMILASSGVGVCIEFWKIGKAMRIEVDRSGMIPRLRFHDRESYASNKTKEYDDIAIKFLSYVLLLLVIGLSIYSLAYERHKSWYSWILSSLTSCVYMFGFIMMCPQLFINYKLKSVAHLPWRQMTYKFLNTIIDDLFAFVIKMPILHRLSVFRDDVIFLIYLYQRWVYPVDKTRVNEFGFGGEDETAEKKLITEKEEEDKKTN

SEQ ID NO: 50366 - protein, 538 aa, Arabidopsis thaliana
  peptide (1)..(538): Ceres Seq. ID no. 13647744
  misc_feature (1)..(521): Pfam Name: Cleft lip and palate transmembrane protein 1 (CLPTM1) Pfam Description: Cleft lip and palate transmembrane protein 1
  misc_feature (1)..(520): Homolog of NCBI NO: 17550864 NR Description: Putative endoplasmic reticulum membrane protein member, with at least 5 transmembrane domains, of eukaryotic
  misc_feature (1)..(522): Homolog of NCBI NO: 18381157 NR Description: Similar to cleft lip and palate associated
  misc_feature (1)..(522): Homolog of NCBI NO: 27676422 NR Description: similar to cleft lip and palate associated
  misc_feature (1)..(522): Homolog of NCBI NO: 32880151 NR Description: cleft lip and palate associated transmembrane
  misc_feature (1)..(522): Homolog of NCBI NO: 13436080 NR Description: cleft lip and palate associated transmembrane
  misc_feature (1)..(522): Homolog of NCBI NO: 4502897 NR Description: cleft lip and palate associated transmembrane
  misc_feature (1)..(520): Homolog of NCBI NO: 32479676 NR Description: P0076O17.9 [Oryza sativa (japonica
  misc_feature (1)..(520): Homolog of NCBI NO: 38346578 NR Description: OSJNBa0064D20.9 [Oryza sativa (japonica
  misc_feature (1)..(538): Homolog of NCBI NO: 15241650 NR Description: cleft lip and palate associated transmembrane
  misc_feature (1)..(538): Homolog of NCBI NO: 8809702 NR Description: gb|AAC97420.1~gene_id:MQM1.16~strong similarity
MDPTAPSQLMTNLFHKGESLDMWFYLSEQEKFNDFGNDRALYWHETNIPYAVWTPESIRTKSLTYYPSETLQNNGSLYAHIFFARSGFPIDPTDPEYQPLNSFSRTHAVATYFPKQKKNKKKSLLGSPKDSDESEPEVEKVGDKKSDPKEEVPVEWISLWKPNVTINLVDDFTHYSQNGVPPNIAPHLLVEPTTGNYYPTIYFNEFWLLRDKFIPVNETVSELPLNLEISPISMMKWQLFQQVDQSFQMQRSYGSMLDGESDELKKVFLEGNPYLLGITMFVSMLHSVFDFLAFKNDIQFWNKNKSMEGLSAKSVVLNFICQFVIFLYLLDNDTSWMILASSGVGVCIEFWKIGKAMRIEVDRSGMIPRLRFHDRESYASNKTKEYDDIAIKFLSYVLLLLVIGLSIYSLAYERHKSWYSWILSSLTSCVYMFGFIMMCPQLFINYKLKSVAHLPWRQMTYKFLNTIIDDLFAFVIKMPILHRLSVFRDDVIFLIYLYQRWVYPVDKTRVNEFGFGGEDETAEKKLITEKEEEDKKTN

SEQ ID NO: 50367 - protein, 529 aa, Arabidopsis thaliana
  peptide (1)..(529): Ceres Seq. ID no. 13647745
  misc_feature (1)..(512): Pfam Name: Cleft lip and palate transmembrane protein 1 (CLPTM1) Pfam Description: Cleft lip and palate transmembrane protein 1
  misc_feature (1)..(511): Homolog of NCBI NO: 17550864 NR Description: Putative endoplasmic reticulum membrane protein member, with at least 5 transmembrane domains, of eukaryotic
  misc_feature (1)..(513): Homolog of NCBI NO: 18381157 NR Description: Similar to cleft lip and palate associated
  misc_feature (1)..(513): Homolog of NCBI NO: 27676422 NR Description: similar to cleft lip and palate associated
  misc_feature (1)..(513): Homolog of NCBI NO: 32880151 NR Description: cleft lip and palate associated transmembrane
  misc_feature (1)..(513): Homolog of NCBI NO: 13436080 NR Description: cleft lip and palate associated transmembrane
  misc_feature (1)..(513): Homolog of NCBI NO: 4502897 NR Description: cleft lip and palate associated transmembrane
  misc_feature (1)..(511): Homolog of NCBI NO: 32479676 NR Description: P0076O17.9 [Oryza sativa (japonica
  misc_feature (1)..(511): Homolog of NCBI NO: 38346578 NR Description: OSJNBa0064D20.9 [Oryza sativa (japonica
  misc_feature (1)..(529): Homolog of NCBI NO: 15241650 NR Description: cleft lip and palate associated transmembrane
  misc_feature (1)..(529): Homolog of NCBI NO: 8809702 NR Description: gb|AAC97420.1~gene_id:MQM1.16~strong similarity
MTNLFHKGESLDMWFYLSEQEKFNDFGNDRALYWHETNIPYAVWTPESIRTKSLTYYPSETLQNNGSLYAHIFFARSGFPIDPTDPEYQPLNSFSRTHAVATYFPKQKKNKKKSLLGSPKDSDESEPEVEKVGDKKSDPKEEVPVEWISLWKPNVTINLVDDFTHYSQNGVPPNIAPHLLVEPTTGNYYPTIYFNEFWLLRDKFIPVNETVSELPLNLEISPISMMKWQLFQQVDQSFQMQRSYGSMLDGESDELKKVFLEGNPYLLGITMFVSMLHSVFDFLAFKNDIQFWNKNKSMEGLSAKSVVLNFICQFVIFLYLLDNDTSWMILASSGVGVCIEFWKIGKAMRIEVDRSGMIPRLRFHDRESYASNKTKEYDDIAIKFLSYVLLLLVIGLSIYSLAYERHKSWYSWILSSLTSCVYMFGFIMMCPQLFINYKLKSVAHLPWRQMTYKFLNTIIDDLFAFVIKMPILHRLSVFRDDVIFLIYLYQRWVYPVDKTRVNEFGFGGEDETAEKKLITEKEEEDKKTN

SEQ ID NO: 50368 - DNA, 1478 bp, Arabidopsis thaliana
  misc_feature (1)..(1478): Ceres Seq. ID no. 12592132
  misc_feature: MA Experiment ID: 20000184 Result: Down-regulated in Transcription
  misc_feature: MA Experiment 20000184 PARAMETER Experiment Name: At_Shoots__P Parameter: Age (day) Value: 7
  misc_feature: MA Experiment 20000184 PARAMETER Experiment Name: At_Shoots__P Parameter: Tissue Value: Shoots vs. Whole Plant
  misc_feature: MA Experiment ID: 20000234 Result: Down-regulated in Transcription
  misc_feature: MA Experiment 20000234 PARAMETER Experiment Name: At_Siliques_P Parameter: Age (day) Value: 21
  misc_feature: MA Experiment 20000234 PARAMETER Experiment Name: At_Siliques_P Parameter: Organism Value: A. thaliana
  misc_feature: MA Experiment 20000234 PARAMETER Experiment Name: At_Siliques_P Parameter: Plant Line Value: WS
  misc_feature: MA Experiment 20000234 PARAMETER Experiment Name: At_Siliques_P Parameter: Tissue Value: Less Than 5mm Siliques vs. Whole Plant
  misc_feature: MA Experiment ID: 20000235 Result: Down-regulated in Transcription
  misc_feature: MA Experiment 20000235 PARAMETER Experiment Name: At_Siliques_P Parameter: Age (day) Value: 21
  misc_feature: MA Experiment 20000235 PARAMETER Experiment Name: At_Siliques_P Parameter: Organism Value: A. thaliana
  misc_feature: MA Experiment 20000235 PARAMETER Experiment Name: At_Siliques_P Parameter: Plant Line Value: WS
  misc_feature: MA Experiment 20000235 PARAMETER Experiment Name: At_Siliques_P Parameter: Tissue Value: 5-10mm Siliques vs. Whole Plant
  misc_feature: MA Experiment ID: 20000437 Result: Up-regulated in Transcription
  misc_feature: MA Experiment 20000437 PARAMETER Experiment Name: At_Drought_P Parameter: Age (day) Value: 8
  misc_feature: MA Experiment 20000437 PARAMETER Experiment Name: At_Drought_P Parameter: Organism Value: A. thaliana
  misc_feature: MA Experiment 20000437 PARAMETER Experiment Name: At_Drought_P Parameter: Plant Line Value: WS
  misc_feature: MA Experiment 20000437 PARAMETER Experiment Name: At_Drought_P Parameter: Timepoint (hr) Value: 24
  misc_feature: MA Experiment 20000437 PARAMETER Experiment Name: At_Drought_P Parameter: Tissue Value: Whole Plant
  misc_feature: MA Experiment 20000437 PARAMETER Experiment Name: At_Drought_P Parameter: Treatment Value: Drought vs. No Drought
  misc_feature: MA Experiment ID: 20000438 Result: Down-regulated in Transcription
  misc_feature: MA Experiment 20000438 PARAMETER Experiment Name: At_Shoots__P Parameter: Age (day) Value: 14
  misc_feature: MA Experiment 20000438 PARAMETER Experiment Name: At_Shoots__P Parameter: Tissue Value: Shoots vs. Whole Plant
  misc_feature: MA Experiment ID: 20001248 Result: Up-regulated in Transcription
  misc_feature: MA Experiment 20001248 PARAMETER Experiment Name: At_Far-red-induction_P Parameter: Age (day) Value: 7
  misc_feature: MA Experiment 20001248 PARAMETER Experiment Name: At_Far-red-induction_P Parameter: Light Value: Far-red vs. White
  misc_feature: MA Experiment 20001248 PARAMETER Experiment Name: At_Far-red-induction_P Parameter: Organism Value: A. thaliana
  misc_feature: MA Experiment 20001248 PARAMETER Experiment Name: At_Far-red-induction_P Parameter: Plant Line Value: Columbia
  misc_feature: MA Experiment 20001248 PARAMETER Experiment Name: At_Far-red-induction_P Parameter: Timepoint (hr) Value: 4
  misc_feature: MA Experiment 20001248 PARAMETER Experiment Name: At_Far-red-induction_P Parameter: Tissue Value: Whole Plant
  misc_feature: MA Experiment ID: 20001450 Result: Up-regulated in Transcription
  misc_feature: MA Experiment 20001450 PARAMETER Experiment Name: At_Far-red-induction_P Parameter: Age (day) Value: 7
  misc_feature: MA Experiment 20001450 PARAMETER Experiment Name: At_Far-red-induction_P Parameter: Light Value: Far-red vs. White
  misc_feature: MA Experiment 20001450 PARAMETER Experiment Name: At_Far-red-induction_P Parameter: Organism Value: A. thaliana
  misc_feature: MA Experiment 20001450 PARAMETER Experiment Name: At_Far-red-induction_P Parameter: Plant Line Value: Columbia
  misc_feature: MA Experiment 20001450 PARAMETER Experiment Name: At_Far-red-induction_P Parameter: Timepoint (hr) Value: 8
  misc_feature: MA Experiment 20001450 PARAMETER Experiment Name: At_Far-red-induction_P Parameter: Tissue Value: Whole Plant
  misc_feature: MA Experiment ID: 20001451 Result: Up-regulated in Transcription
  misc_feature: MA Experiment 20001451 PARAMETER Experiment Name: At_Far-red-induction_P Parameter: Age (day) Value: 7
  misc_feature: MA Experiment 20001451 PARAMETER Experiment Name: At_Far-red-induction_P Parameter: Light Value: Far-red vs. White
  misc_feature: MA Experiment 20001451 PARAMETER Experiment Name: At_Far-red-induction_P Parameter: Organism Value: A. thaliana
  misc_feature: MA Experiment 20001451 PARAMETER Experiment Name: At_Far-red-induction_P Parameter: Plant Line Value: Columbia
  misc_feature: MA Experiment 20001451 PARAMETER Experiment Name: At_Far-red-induction_P Parameter: Timepoint (hr) Value: 24
  misc_feature: MA Experiment 20001451 PARAMETER Experiment Name: At_Far-red-induction_P Parameter: Tissue Value: Whole Plant
aaagtagccgcctcatcctcctcgtctcttctcgttagctctctcaatgaggagcccgatttagggtttcctccattggttatatcaattcgatcatctccacaaagctctcgaagactctttcggtgatctcatcttcttcttcttgtttagcctcctggaggttactttgtttgttactagttccaaaacatgccgaaagagaggaaagaacggtccgtatctcttgataagtataaacgatcgccactgtgttgtgaggcaagccttgctttgaagccgagtgagaaacaagttaaagaatgggaagaggctcgttgtcctgtttgtatggaacatcctcacaatgggattcttctcatttgttcttcttatgaaaatggttgtcgaccttacatgtgcgacactagccatcggcattctaactgtttcgatcagttccgcaaagcttctaaagagaaaccttctttgtctttacttcgtgaggaagaggaaagtaatgaaccaactgagatggaagatgtggattcagactcaactgctgtaaatctattaggagaagctgcatctgagataacagttgtggatttaagtgatggtgagagaggagaagaagaagtagaagaagaagaagaagaagtagtagtagaagaagaagaagaaggaattgtaacaacagaagaagatcaagaaaaaaacaaaccacaaaagcttacttgtccgttatgtcgtggacatataaaagaatgggtagttgttaaagcagctcgatgtttcatgaactcaaaacatagaagctgttcttgtgagacttgtgatttcagtggaagctattccgatctgagaaagcacgcaaggcttctacatccaggagttaggccatcagaagcagatccagagagacagagaagctggaggaggctagaaaggcagagcgatttaggggatttacttagcacactccaatcttcttttggaggagatgaaataagtaacgatgatgggtttctatttgctgatactcgcttgcttacagtgtactttctcatccgcgtgtttagaccagaatcgagtggctcaaggagtagtagctggtctggtacatctagagctaggacacatacaagtgggagaagaagatcttcaagacctgcaagtctttggggagagagctatgaaggtaatacaggaacatcacctagagatgaggagaataatcaatcttctgatgaacaagtgtctggaactcggagacgtcgttctagaagaagaactgtcattgatgatgatgatgaagaagaagaaccgtgatgctctgcagtttggaaatttggtctttggagtttatgataaaatgggggaaaccttgtagtaataaccccacttatgaaaccctattatgtaaaatttctttggagattgaaaaaagtttctactattgggaaacaaaatgttcaatatttcattaccgtttaaat

SEQ ID NO: 50369 - protein, 372 aa, Arabidopsis thaliana
  peptide (1)..(372): Ceres Seq. ID no. 12592133
  misc_feature (165)..(269): Homolog of NCBI NO: 30699285 NR Description: expressed protein [Arabidopsis thaliana]
  misc_feature (165)..(269): Homolog of NCBI NO: 25365932 NR Description: unknown protein T32E8.10 [imported] - Arabidopsis
  misc_feature (36)..(92): Homolog of NCBI NO: 15221290 NR Description: unknown protein
  misc_feature (162)..(269): Homolog of NCBI NO: 15221290 NR Description: unknown protein
  misc_feature (36)..(147): Homolog of NCBI NO: 15230170 NR Description: unknown protein
  misc_feature (163)..(347): Homolog of NCBI NO: 15230170 NR Description: unknown protein
  misc_feature (36)..(368): Homolog of NCBI NO: 38346521 NR Description: OSJNBa0027H09.16 [Oryza sativa (japonica
  misc_feature (1)..(89): Homolog of NCBI NO: 34912600 NR Description: P0046B10.17 [Oryza sativa (japonica
  misc_feature (164)..(366): Homolog of NCBI NO: 34912600 NR Description: P0046B10.17 [Oryza sativa (japonica
  misc_feature (1)..(372): Homolog of NCBI NO: 18404727 NR Description: expressed protein
MPKERKERSVSLDKYKRSPLCCEASLALKPSEKQVKEWEEARCPVCMEHPHNGILLICSSYENGCRPYMCDTSHRHSNCFDQFRKASKEKPSLSLLREEEESNEPTEMEDVDSDSTAVNLLGEAASEITVVDLSDGERGEEEVEEEEEEVVVEEEEEGIVTTEEDQEKNKPQKLTCPLCRGHIKEWVVVKAARCFMNSKHRSCSCETCDFSGSYSDLRKHARLLHPGVRPSEADPERQRSWRRLERQSDLGDLLSTLQSSFGGDEISNDDGFLFADTRLLTVYFLIRVFRPESSGSRSSSWSGTSRARTHTSGRRRSSRPASLWGESYEGNTGTSPRDEENNQSSDEQVSGTRRRRSRRRTVIDDDDEEEEP

SEQ ID NO: 50370 - protein, 326 aa, Arabidopsis thaliana
  peptide (1)..(326): Ceres Seq. ID no. 12592134
  misc_feature (119)..(223): Homolog of NCBI NO: 30699285 NR Description: expressed protein [Arabidopsis thaliana]
  misc_feature (119)..(223): Homolog of NCBI NO: 25365932 NR Description: unknown protein T32E8.10 [imported] - Arabidopsis
  misc_feature (1)..(46): Homolog of NCBI NO: 15221290 NR Description: unknown protein
  misc_feature (116)..(223): Homolog of NCBI NO: 15221290 NR Description: unknown protein
  misc_feature (1)..(101): Homolog of NCBI NO: 15230170 NR Description: unknown protein
  misc_feature (117)..(301): Homolog of NCBI NO: 15230170 NR Description: unknown protein
  misc_feature (1)..(322): Homolog of NCBI NO: 38346521 NR Description: OSJNBa0027H09.16 [Oryza sativa (japonica
  misc_feature (1)..(43): Homolog of NCBI NO: 34912600 NR Description: P0046B10.17 [Oryza sativa (japonica
  misc_feature (118)..(320): Homolog of NCBI NO: 34912600 NR Description: P0046B10.17 [Oryza sativa (japonica
  misc_feature (1)..(326): Homolog of NCBI NO: 18404727 NR Description: expressed protein
MEHPHNGILLICSSYENGCRPYMCDTSHRHSNCFDQFRKASKEKPSLSLLREEEESNEPTEMEDVDSDSTAVNLLGEAASEITVVDLSDGERGEEEVEEEEEEVVVEEEEEGIVTTEEDQEKNKPQKLTCPLCRGHIKEWVVVKAARCFMNSKHRSCSCETCDFSGSYSDLRKHARLLHPGVRPSEADPERQRSWRRLERQSDLGDLLSTLQSSFGGDEISNDDGFLFADTRLLTVYFLIRVFRPESSGSRSSSWSGTSRARTHTSGRRRSSRPASLWGESYEGNTGTSPRDEENNQSSDEQVSGTRRRRSRRRTVIDDDDEEEEP

SEQ ID NO: 50371 - protein, 304 aa, Arabidopsis thaliana
  peptide (1)..(304): Ceres Seq. ID no. 12592135
  misc_feature (97)..(201): Homolog of NCBI NO: 30699285 NR Description: expressed protein [Arabidopsis thaliana]
  misc_feature (97)..(201): Homolog of NCBI NO: 25365932 NR Description: unknown protein T32E8.10 [imported] - Arabidopsis
  misc_feature (1)..(24): Homolog of NCBI NO: 15221290 NR Description: unknown protein
  misc_feature (94)..(201): Homolog of NCBI NO: 15221290 NR Description: unknown protein
  misc_feature (1)..(79): Homolog of NCBI NO: 15230170 NR Description: unknown protein
  misc_feature (95)..(279): Homolog of NCBI NO: 15230170 NR Description: unknown protein
  misc_feature (1)..(300): Homolog of NCBI NO: 38346521 NR Description: OSJNBa0027H09.16 [Oryza sativa (japonica
  misc_feature (1)..(21): Homolog of NCBI NO: 34912600 NR Description: P0046B10.17 [Oryza sativa (japonica
  misc_feature (96)..(298): Homolog of NCBI NO: 34912600 NR Description: P0046B10.17 [Oryza sativa (japonica
  misc_feature (1)..(304): Homolog of NCBI NO: 18404727 NR Description: expressed protein
MCDTSHRHSNCFDQFRKASKEKPSLSLLREEEESNEPTEMEDVDSDSTAVNLLGEAASEITVVDLSDGERGEEEVEEEEEEVVVEEEEEGIVTTEEDQEKNKPQKLTCPLCRGHIKEWVVVKAARCFMNSKHRSCSCETCDFSGSYSDLRKHARLLHPGVRPSEADPERQRSWRRLERQSDLGDLLSTLQSSFGGDEISNDDGFLFADTRLLTVYFLIRVFRPESSGSRSSSWSGTSRARTHTSGRRRSSRPASLWGESYEGNTGTSPRDEENNQSSDEQVSGTRRRRSRRRTVIDDDDEEEEP

SEQ ID NO: 50372 - DNA, 1665 bp, Arabidopsis thaliana
  misc_feature (1)..(1665): Ceres Seq. ID no. 12575446
  misc_feature: MA Experiment ID: 20000171 Result: Down-regulated in Transcription
  misc_feature: MA Experiment 20000171 PARAMETER Experiment Name: At_42deg_Heat_P Parameter: Age (day) Value: 14
  misc_feature: MA Experiment 20000171 PARAMETER Experiment Name: At_42deg_Heat_P Parameter: Organism Value: A. thaliana
  misc_feature: MA Experiment 20000171 PARAMETER Experiment Name: At_42deg_Heat_P Parameter: Plant Line Value: WS
  misc_feature: MA Experiment 20000171 PARAMETER Experiment Name: At_42deg_Heat_P Parameter: Temperature (deg C) Value: 42 vs. 22
  misc_feature: MA Experiment 20000171 PARAMETER Experiment Name: At_42deg_Heat_P Parameter: Timepoint (hr) Value: 1
  misc_feature: MA Experiment 20000171 PARAMETER Experiment Name: At_42deg_Heat_P Parameter: Tissue Value: Aerial
  misc_feature: MA Experiment ID: 20000173 Result: Down-regulated in Transcription
  misc_feature: MA Experiment 20000173 PARAMETER Experiment Name: At_42deg_Heat_P Parameter: Age (day) Value: 14
  misc_feature: MA Experiment 20000173 PARAMETER Experiment Name: At_42deg_Heat_P Parameter: Organism Value: A. thaliana
  misc_feature: MA Experiment 20000173 PARAMETER Experiment Name: At_42deg_Heat_P Parameter: Plant Line Value: WS
  misc_feature: MA Experiment 20000173 PARAMETER Experiment Name: At_42deg_Heat_P Parameter: Temperature (deg C) Value: 42 vs. 22
  misc_feature: MA Experiment 20000173 PARAMETER Experiment Name: At_42deg_Heat_P Parameter: Timepoint (hr) Value: 6
  misc_feature: MA Experiment 20000173 PARAMETER Experiment Name: At_42deg_Heat_P Parameter: Tissue Value: Aerial
  misc_feature: MA Experiment ID: 20000234 Result: Down-regulated in Transcription
  misc_feature: MA Experiment 20000234 PARAMETER Experiment Name: At_Siliques_P Parameter: Age (day) Value: 21
  misc_feature: MA Experiment 20000234 PARAMETER Experiment Name: At_Siliques_P Parameter: Organism Value: A. thaliana
  misc_feature: MA Experiment 20000234 PARAMETER Experiment Name: At_Siliques_P Parameter: Plant Line Value: WS
  misc_feature: MA Experiment 20000234 PARAMETER Experiment Name: At_Siliques_P Parameter: Tissue Value: Less Than 5mm Siliques vs. Whole Plant
  misc_feature: MA Experiment ID: 20000235 Result: Down-regulated in Transcription
  misc_feature: MA Experiment 20000235 PARAMETER Experiment Name: At_Siliques_P Parameter: Age (day) Value: 21
  misc_feature: MA Experiment 20000235 PARAMETER Experiment Name: At_Siliques_P Parameter: Organism Value: A. thaliana
  misc_feature: MA Experiment 20000235 PARAMETER Experiment Name: At_Siliques_P Parameter: Plant Line Value: WS
  misc_feature: MA Experiment 20000235 PARAMETER Experiment Name: At_Siliques_P Parameter: Tissue Value: 5-10mm Siliques vs. Whole Plant
  misc_feature: MA Experiment ID: 20000264 Result: Down-regulated in Transcription
  misc_feature: MA Experiment 20000264 PARAMETER Experiment Name: At_Open_Flower_P Parameter: Age (day) Value: 21
  misc_feature: MA Experiment 20000264 PARAMETER Experiment Name: At_Open_Flower_P Parameter: Plant Line Value: WS
  misc_feature: MA Experiment 20000264 PARAMETER Experiment Name: At_Open_Flower_P Parameter: Tissue Value: Open Flower vs. Whole Plant
  misc_feature: MA Experiment ID: 20000286 Result: Down-regulated in Transcription
  misc_feature: MA Experiment 20000286 PARAMETER Experiment Name: At_Open_Flower_P Parameter: Age (day) Value: 21
  misc_feature: MA Experiment 20000286 PARAMETER Experiment Name: At_Open_Flower_P Parameter: Plant Line Value: WS
  misc_feature: MA Experiment 20000286 PARAMETER Experiment Name: At_Open_Flower_P Parameter: Tissue Value: Half Open vs. Whole Plant
  misc_feature: MA Experiment ID: 20000437 Result: Down-regulated in Transcription
  misc_feature: MA Experiment 20000437 PARAMETER Experiment Name: At_Drought_P Parameter: Age (day) Value: 8
  misc_feature: MA Experiment 20000437 PARAMETER Experiment Name: At_Drought_P Parameter: Organism Value: A. thaliana
  misc_feature: MA Experiment 20000437 PARAMETER Experiment Name: At_Drought_P Parameter: Plant Line Value: WS
  misc_feature: MA Experiment 20000437 PARAMETER Experiment Name: At_Drought_P Parameter: Timepoint (hr) Value: 24
  misc_feature: MA Experiment 20000437 PARAMETER Experiment Name: At_Drought_P Parameter: Tissue Value: Whole Plant
  misc_feature: MA Experiment 20000437 PARAMETER Experiment Name: At_Drought_P Parameter: Treatment Value: Drought vs. No Drought
  misc_feature: MA Experiment ID: 20000495 Result: Up-regulated in Transcription
  misc_feature: MA Experiment 20000495 PARAMETER Experiment Name: At_Guard_Cells_P Parameter: Harvest Date Value: 8/2/2002
  misc_feature: MA Experiment 20000495 PARAMETER Experiment Name: At_Guard_Cells_P Parameter: Organism Value: A. thaliana
  misc_feature: MA Experiment 20000495 PARAMETER Experiment Name: At_Guard_Cells_P Parameter: Tissue Value: Guard Cells vs. Leaves
  misc_feature: MA Experiment ID: 20000794 Result: Down-regulated in Transcription
  misc_feature: MA Experiment 20000794 PARAMETER Experiment Name: At_Petals_P Parameter: Age (day) Value: 23-25 days
  misc_feature: MA Experiment 20000794 PARAMETER Experiment Name: At_Petals_P Parameter: Plant Line Value: WS
  misc_feature: MA Experiment 20000794 PARAMETER Experiment Name: At_Petals_P Parameter: Tissue Value: Petals vs. Whole plant
  misc_feature: MA Experiment ID: 20001248 Result: Down-regulated in Transcription
  misc_feature: MA Experiment 20001248 PARAMETER Experiment Name: At_Far-red-induction_P Parameter: Age (day) Value: 7
  misc_feature: MA Experiment 20001248 PARAMETER Experiment Name: At_Far-red-induction_P Parameter: Light Value: Far-red vs. White
  misc_feature: MA Experiment 20001248 PARAMETER Experiment Name: At_Far-red-induction_P Parameter: Organism Value: A. thaliana
  misc_feature: MA Experiment 20001248 PARAMETER Experiment Name: At_Far-red-induction_P Parameter: Plant Line Value: Columbia
  misc_feature: MA Experiment 20001248 PARAMETER Experiment Name: At_Far-red-induction_P Parameter: Timepoint (hr) Value: 4
  misc_feature: MA Experiment 20001248 PARAMETER Experiment Name: At_Far-red-induction_P Parameter: Tissue Value: Whole Plant
  misc_feature: MA Experiment ID: 20001450 Result: Down-regulated in Transcription
  misc_feature: MA Experiment 20001450 PARAMETER Experiment Name: At_Far-red-induction_P Parameter: Age (day) Value: 7
  misc_feature: MA Experiment 20001450 PARAMETER Experiment Name: At_Far-red-induction_P Parameter: Light Value: Far-red vs. White
  misc_feature: MA Experiment 20001450 PARAMETER Experiment Name: At_Far-red-induction_P Parameter: Organism Value: A. thaliana
  misc_feature: MA Experiment 20001450 PARAMETER Experiment Name: At_Far-red-induction_P Parameter: Plant Line Value: Columbia
  misc_feature: MA Experiment 20001450 PARAMETER Experiment Name: At_Far-red-induction_P Parameter: Timepoint (hr) Value: 8
  misc_feature: MA Experiment 20001450 PARAMETER Experiment Name: At_Far-red-induction_P Parameter: Tissue Value: Whole Plant
  misc_feature: MA Experiment ID: 20001757 Result: Up-regulated in Transcription
  misc_feature: MA Experiment 20001757 PARAMETER Experiment Name: At_50mM_NH4NO3_L-to-H_P Parameter: Timepoint (hr) Value: 6
  misc_feature: MA Experiment 20001757 PARAMETER Experiment Name: At_50mM_NH4NO3_L-to-H_P Parameter: Tissue Value: Leaf
  misc_feature: MA Experiment 20001757 PARAMETER Experiment Name: At_50mM_NH4NO3_L-to-H_P Parameter: Treatment Value: 50mM NH4NO3 vs 100mM Mannitol
  misc_feature: MA Experiment ID: 20001905 Result: Down-regulated in Transcription
  misc_feature: MA Experiment 20001905 PARAMETER Experiment Name: At_Drought_Reproduction_P Parameter: Age (day) Value: 40
  misc_feature: MA Experiment 20001905 PARAMETER Experiment Name: At_Drought_Reproduction_P Parameter: Organism Value: A. thaliana
  misc_feature: MA Experiment 20001905 PARAMETER Experiment Name: At_Drought_Reproduction_P Parameter: Plant Line Value: WS
  misc_feature: MA Experiment 20001905 PARAMETER Experiment Name: At_Drought_Reproduction_P Parameter: Timepoint (day) Value: 10
  misc_feature: MA Experiment 20001905 PARAMETER Experiment Name: At_Drought_Reproduction_P Parameter: Tissue Value: Rosettes
  misc_feature: MA Experiment 20001905 PARAMETER Experiment Name: At_Drought_Reproduction_P Parameter: Treatment Value: Drought vs. No Drought
  misc_feature: MA Experiment ID: 20001911 Result: Down-regulated in Transcription
  misc_feature: MA Experiment 20001911 PARAMETER Experiment Name: At_Drought_Reproduction_P Parameter: Age (day) Value: 40
  misc_feature: MA Experiment 20001911 PARAMETER Experiment Name: At_Drought_Reproduction_P Parameter: Organism Value: A. thaliana
  misc_feature: MA Experiment 20001911 PARAMETER Experiment Name: At_Drought_Reproduction_P Parameter: Plant Line Value: WS
  misc_feature: MA Experiment 20001911 PARAMETER Experiment Name: At_Drought_Reproduction_P Parameter: Timepoint (day) Value: 10
  misc_feature: MA Experiment 20001911 PARAMETER Experiment Name: At_Drought_Reproduction_P Parameter: Tissue Value: Flowers
  misc_feature: MA Experiment 20001911 PARAMETER Experiment Name: At_Drought_Reproduction_P Parameter: Treatment Value: Drought vs. No Drought
tttgtaaagtttttttttttcccaaatagtactttttttttgtttggccttcttatagaaagaagaactcaaagcacagagagaagatgagcgaagaacaaccacacgccaatctagcggttcccgcgtttaaaactgagaaagagcccataacgcaaacacgaaatggtcaaagtagcgtttggcgtttcggtggaagtgataaggcagcgaaagcatccaccgtaacgcttagaggtgtcatctacatgctcttcgacaactgcggcaaagacgtcaataagaccattttacccctcggccacggtgacccttccgtctacccttgcttccgtacctgtatcgaagctgaagacgccgtcgtcgacgtccttcgctccggcaaaggcaattcttacggtcccggagctgggattctccccgcaagacgagccgttgctgattatatgaaccgagatcttccgcacaagttaacgcctgaagatatttttctgaccgctggatgcaaccaagggatagagatcgtgttcgaatcgttggctcgaccaaacgcaaacatcttgctcccacgtcctggcttccctcactacgacgctcgtgctgcttacagtggtctcgaggttcgcaagtttgatcttcttcccgagaaagaatgggagattgatcttgaaggtatcgaagccattgcagacgagaacactgtggctatggttgtaattaaccccaacaatccctgtggaaatgtctactctcacgaccatctcaaaaaggttgcagagacggctaggaagctcgggataatggtgatctcagacgaagtatatgaccgaactatattcggagacaatccatttgtttcaatggggaagtttgcttcgatagtccctgtattgacactagcaggcatatctaagggatgggttgttcctggatggaaaattggctggatcgccttgaatgatcccgagggcgttttcgagaccaccaaggtgttacaatccatcaaacagaatcttgacgtaactcctgaccctgccacaataattcaggctgcacttccagcgatcctggagaaagcggacaaaaacttctttgcaaagaagaacaagatactcaaacataatgttgatttggtgtgtgataggctcaaggacatcccctgtgtcgtctgtcccaagaaacctgagtcttgcacttacttattgacaaagttggagctgtcactgatggataatatcaaggacgatatagatttttgcgtaaaactggccagagaggagaatctcgtgtttctaccaggggatgctctgggtttgaagaactggatgaggataaccatcggagtcgaagctcatatgcttgaggatgcacttgagagactgaagggtttctgtacacgtcatgccaagaagacagagacagaaactgagtcacttcaagctttgaaactgagtgataataatctcgaaatgtaaaacagaagaggatgtgtgtgcccaaaagaatattcttatgatagataattttgattcttgcttttccatttgatttcccaaagtatttgattatctacattaataaaaactatggttatttgtcaaatagcaatattgggaacataaatgaaggatctagcatccatgaaagagaatttctttgtttttg

SEQ ID NO: 50373 - protein, 462 aa, Arabidopsis thaliana
  peptide (1)..(462): Ceres Seq. ID no. 12575447
  misc_feature (119)..(436): Pfam Name: Aminotransferase class I and II Pfam Description: Aminotransferase class I and II
  misc_feature (45)..(440): Homolog of NCBI NO: 27525396 NR Description: tyrosine aminotransferase [Solenostemon
  misc_feature (41)..(441): Homolog of NCBI NO: 23397279 NR Description: putatative tyrosine aminotransferase [Arabidopsis
  misc_feature (41)..(441): Homolog of NCBI NO: 15239521 NR Description: tyrosine aminotransferase; protein id:
  misc_feature (27)..(444): Homolog of NCBI NO: 15224631 NR Description: putative tyrosine aminotransferase
  misc_feature (27)..(444): Homolog of NCBI NO: 21553462 NR Description: putative tyrosine aminotransferase [Arabidopsis
  misc_feature (7)..(381): Homolog of NCBI NO: 15235287 NR Description: tyrosine transaminase-like protein; protein id:
  misc_feature (1)..(462): Homolog of NCBI NO: 11527941 NR Description: ROOTY/SUPERROOT1 [Arabidopsis thaliana]
  misc_feature (1)..(462): Homolog of NCBI NO: 11527943 NR Description: ROOTY/SUPERROOT1 [Arabidopsis thaliana]
  misc_feature (1)..(462): Homolog of NCBI NO: 15809874 NR Description: At2g20610/F23N11.7 [Arabidopsis thaliana]
  misc_feature (1)..(462): Homolog of NCBI NO: 15225387 NR Description: putative tyrosine aminotransferase
MSEEQPHANLAVPAFKTEKEPITQTRNGQSSVWRFGGSDKAAKASTVTLRGVIYMLFDNCGKDVNKTILPLGHGDPSVYPCFRTCIEAEDAVVDVLRSGKGNSYGPGAGILPARRAVADYMNRDLPHKLTPEDIFLTAGCNQGIEIVFESLARPNANILLPRPGFPHYDARAAYSGLEVRKFDLLPEKEWEIDLEGIEAIADENTVAMVVINPNNPCGNVYSHDHLKKVAETARKLGIMVISDEVYDRTIFGDNPFVSMGKFASIVPVLTLAGISKGWVVPGWKIGWIALNDPEGVFETTKVLQSIKQNLDVTPDPATIIQAALPAILEKADKNFFAKKNKILKHNVDLVCDRLKDIPCVVCPKKPESCTYLLTKLELSLMDNIKDDIDFCVKLAREENLVFLPGDALGLKNWMRITIGVEAHMLEDALERLKGFCTRHAKKTETETESLQALKLSDNNLEM

SEQ ID NO: 50374 - protein, 408 aa, Arabidopsis thaliana
  peptide (1)..(408): Ceres Seq. ID no. 12575448
  misc_feature (65)..(382): Pfam Name: Aminotransferase class I and II Pfam Description: Aminotransferase class I and II
  misc_feature (1)..(386): Homolog of NCBI NO: 27525396 NR Description: tyrosine aminotransferase [Solenostemon
  misc_feature (1)..(387): Homolog of NCBI NO: 23397279 NR Description: putatative tyrosine aminotransferase [Arabidopsis
  misc_feature (1)..(387): Homolog of NCBI NO: 15239521 NR Description: tyrosine aminotransferase; protein id:
  misc_feature (1)..(390): Homolog of NCBI NO: 15224631 NR Description: putative tyrosine aminotransferase
  misc_feature (1)..(390): Homolog of NCBI NO: 21553462 NR Description: putative tyrosine aminotransferase [Arabidopsis
  misc_feature (1)..(327): Homolog of NCBI NO: 15235287 NR Description: tyrosine transaminase-like protein; protein id:
  misc_feature (1)..(408): Homolog of NCBI NO: 11527941 NR Description: ROOTY/SUPERROOT1 [Arabidopsis thaliana]
  misc_feature (1)..(408): Homolog of NCBI NO: 11527943 NR Description: ROOTY/SUPERROOT1 [Arabidopsis thaliana]
  misc_feature (1)..(408): Homolog of NCBI NO: 15809874 NR Description: At2g20610/F23N11.7 [Arabidopsis thaliana]
  misc_feature (1)..(408): Homolog of NCBI NO: 15225387 NR Description: putative tyrosine aminotransferase
MLFDNCGKDVNKTILPLGHGDPSVYPCFRTCIEAEDAVVDVLRSGKGNSYGPGAGILPARRAVADYMNRDLPHKLTPEDIFLTAGCNQGIEIVFESLARPNANILLPRPGFPHYDARAAYSGLEVRKFDLLPEKEWEIDLEGIEAIADENTVAMVVINPNNPCGNVYSHDHLKKVAETARKLGIMVISDEVYDRTIFGDNPFVSMGKFASIVPVLTLAGISKGWVVPGWKIGWIALNDPEGVFETTKVLQSIKQNLDVTPDPATIIQAALPAILEKADKNFFAKKNKILKHNVDLVCDRLKDIPCVVCPKKPESCTYLLTKLELSLMDNIKDDIDFCVKLAREENLVFLPGDALGLKNWMRITIGVEAHMLEDALERLKGFCTRHAKKTETETESLQALKLSDNNLEM

SEQ ID NO: 50375 - protein, 342 aa, Arabidopsis thaliana
  peptide (1)..(342): Ceres Seq. ID no. 12575449
  misc_feature (1)..(316): Pfam Name: Aminotransferase class I and II Pfam Description: Aminotransferase class I and II
  misc_feature (1)..(320): Homolog of NCBI NO: 27525396 NR Description: tyrosine aminotransferase [Solenostemon
  misc_feature (1)..(321): Homolog of NCBI NO: 23397279 NR Description: putatative tyrosine aminotransferase [Arabidopsis
  misc_feature (1)..(321): Homolog of NCBI NO: 15239521 NR Description: tyrosine aminotransferase; protein id:
  misc_feature (1)..(324): Homolog of NCBI NO: 15224631 NR Description: putative tyrosine aminotransferase
  misc_feature (1)..(324): Homolog of NCBI NO: 21553462 NR Description: putative tyrosine aminotransferase [Arabidopsis
  misc_feature (1)..(261): Homolog of NCBI NO: 15235287 NR Description: tyrosine transaminase-like protein; protein id:
  misc_feature (1)..(342): Homolog of NCBI NO: 11527941 NR Description: ROOTY/SUPERROOT1 [Arabidopsis thaliana]
  misc_feature (1)..(342): Homolog of NCBI NO: 11527943 NR Description: ROOTY/SUPERROOT1 [Arabidopsis thaliana]
  misc_feature (1)..(342): Homolog of NCBI NO: 15809874 NR Description: At2g20610/F23N11.7 [Arabidopsis thaliana]
  misc_feature (1)..(342): Homolog of NCBI NO: 15225387 NR Description: putative tyrosine aminotransferase
MNRDLPHKLTPEDIFLTAGCNQGIEIVFESLARPNANILLPRPGFPHYDARAAYSGLEVRKFDLLPEKEWEIDLEGIEAIADENTVAMVVINPNNPCGNVYSHDHLKKVAETARKLGIMVISDEVYDRTIFGDNPFVSMGKFASIVPVLTLAGISKGWVVPGWKIGWIALNDPEGVFETTKVLQSIKQNLDVTPDPATIIQAALPAILEKADKNFFAKKNKILKHNVDLVCDRLKDIPCVVCPKKPESCTYLLTKLELSLMDNIKDDIDFCVKLAREENLVFLPGDALGLKNWMRITIGVEAHMLEDALERLKGFCTRHAKKTETETESLQALKLSDNNLEM

SEQ ID NO: 50376 - DNA, 1590 bp, Arabidopsis thaliana
  misc_feature (1)..(1590): Ceres Seq. ID no. 13588942
  misc_feature: MA Experiment ID: 20000173 Result: Down-regulated in Transcription
  misc_feature: MA Experiment 20000173 PARAMETER Experiment Name: At_42deg_Heat_P Parameter: Age (day) Value: 14
  misc_feature: MA Experiment 20000173 PARAMETER Experiment Name: At_42deg_Heat_P Parameter: Organism Value: A. thaliana
  misc_feature: MA Experiment 20000173 PARAMETER Experiment Name: At_42deg_Heat_P Parameter: Plant Line Value: WS
  misc_feature: MA Experiment 20000173 PARAMETER Experiment Name: At_42deg_Heat_P Parameter: Temperature (deg C) Value: 42 vs. 22
  misc_feature: MA Experiment 20000173 PARAMETER Experiment Name: At_42deg_Heat_P Parameter: Timepoint (hr) Value: 6
  misc_feature: MA Experiment 20000173 PARAMETER Experiment Name: At_42deg_Heat_P Parameter: Tissue Value: Aerial
  misc_feature: MA Experiment ID: 20000179 Result: Up-regulated in Transcription
  misc_feature: MA Experiment 20000179 PARAMETER Experiment Name: At_Germinating_Seeds_P Parameter: Age (hr) Value: 6 vs. 0
  misc_feature: MA Experiment 20000179 PARAMETER Experiment Name: At_Germinating_Seeds_P Parameter: Tissue Value: Germinating Seeds
  misc_feature: MA Experiment ID: 20000180 Result: Up-regulated in Transcription
  misc_feature: MA Experiment 20000180 PARAMETER Experiment Name: At_Germinating_Seeds_P Parameter: Age (hr) Value: 24 vs. 0
  misc_feature: MA Experiment 20000180 PARAMETER Experiment Name: At_Germinating_Seeds_P Parameter: Tissue Value: Germinating Seeds
  misc_feature: MA Experiment ID: 20000265 Result: Up-regulated in Transcription
  misc_feature: MA Experiment 20000265 PARAMETER Experiment Name: At_Open_Flower_P Parameter: Age (day) Value: 21
  misc_feature: MA Experiment 20000265 PARAMETER Experiment Name: At_Open_Flower_P Parameter: Plant Line Value: WS
  misc_feature: MA Experiment 20000265 PARAMETER Experiment Name: At_Open_Flower_P Parameter: Tissue Value: Closed Flower vs. Whole Plant
  misc_feature: MA Experiment ID: 20000437 Result: Down-regulated in Transcription
  misc_feature: MA Experiment 20000437 PARAMETER Experiment Name: At_Drought_P Parameter: Age (day) Value: 8
  misc_feature: MA Experiment 20000437 PARAMETER Experiment Name: At_Drought_P Parameter: Organism Value: A. thaliana
  misc_feature: MA Experiment 20000437 PARAMETER Experiment Name: At_Drought_P Parameter: Plant Line Value: WS
  misc_feature: MA Experiment 20000437 PARAMETER Experiment Name: At_Drought_P Parameter: Timepoint (hr) Value: 24
  misc_feature: MA Experiment 20000437 PARAMETER Experiment Name: At_Drought_P Parameter: Tissue Value: Whole Plant
  misc_feature: MA Experiment 20000437 PARAMETER Experiment Name: At_Drought_P Parameter: Treatment Value: Drought vs. No Drought
gaacttcccactcatagcaaaatgttagctcagtcgcacttcttctctaagtccttcgatctgattccgccacagtctccggcgttgcggtctgcaaatccttctcttcgtatctcttcttcttatagtaacagccgcttatcctttctttcttcttctgcaattgctgttcccgtctcccgccgtcggttttgcctgactatggcttcaaactcaaaacggcctaacataagcaacgagtctccttcggaacttagcgacactgagctggatcgattcgccgctgtgggaaatgcattagctgacgcttccggcgaggttatcagaaagtatttccggaagaaattcgacattgttgataaagatgatatgagccctgttacaatcgctgatcaaatggctgaagaggcaatggtttccattatattccagaatctcccttctcatgctatatatggtgaggagaagggttggagatgcaaagaggaatctgcagactatgtttgggttttggacccaatcgacggaacaaagagctttattacagggaaacccgtgtttggtacgctgattgctctgctctacaaaggtaaaccgattctaggactgattgatcagcctattctaaaagagagatggataggaatgaatggaagaagaactaaactaaacggggaggatatctcaacgcgatcttgccccaaattatcacaagcatatttatacaccactagcccacatcttttcagtgaagaggcagaaaaggcatattctcgagttagagacaaggtgaaagtgcccttatacggctgtgattgttatgcttacgctctcctggcttctggatttgtcgatcttgttattgaatccggtctaaagccatatgatttccttgctctggtgcctgtaatagaaggcgctggaggtaccataaccgattggactggtaaacgatttctgtgggaagcttcatccagtgcagttgcgacaagctttaatgtagttgcagcaggagattcagacattcatcagcaggctttggagtcacttgagtggcattgaaaagattcgctggagaggattatcaaggtactattcaggaaaagcgagatcattcatatgtatctcagatgtaaaatgccttgaggatctgaagaaaccaacccaaacttttgatgacgatgatgatgatgaggcttacaagaagaggaagaagaagaacaagcaatcatcttcatcttcattttctgcagctattaacagcaatgtgaatttctcaaactacccttgtcgaagggtctctagtagcacccactgttcctcaccttgtgttgcttaggaaaaaagaagcttacactttctcaatttatttagtagctcctttggtttttattctcaacccaacactgaaaacacaaacttcagttcagtgtgtgggggcgtcattcatatccaatttttgattttctttactgtttttatgtcttttttttgtggttatctttttttcttgcgcaaattatgtagatttggatgtgtttgttccaatttgcttattgggacaaaaatgttggaaatcctttcgaatgt

SEQ ID NO: 50377 - protein, 353 aa, Arabidopsis thaliana
  peptide (1)..(353): Ceres Seq. ID no. 13588943
  misc_feature (100)..(350): Homolog of NCBI NO: 15891078 NR Description: AGR_L_1926p [Agrobacterium tumefaciens]
  misc_feature (85)..(350): Homolog of NCBI NO: 26989876 NR Description: inositol monophosphatase family protein
  misc_feature (86)..(350): Homolog of NCBI NO: 22962885 NR Description: hypothetical protein [Rhodopseudomonas palustris]
  misc_feature (69)..(351): Homolog of NCBI NO: 22959506 NR Description: hypothetical protein [Rhodobacter sphaeroides]
  misc_feature (88)..(350): Homolog of NCBI NO: 27382842 NR Description: inositol monophosphatase family protein
  misc_feature (90)..(347): Homolog of NCBI NO: 22967233 NR Description: hypothetical protein [Rhodospirillum rubrum]
  misc_feature (93)..(350): Homolog of NCBI NO: 23015473 NR Description: hypothetical protein [Magnetospirillum
  misc_feature (22)..(353): Homolog of NCBI NO: 34394555 NR Description: putative N-amidino-scyllo-inosamine-4-phosphate
  misc_feature (68)..(353): Homolog of NCBI NO: 7487342 NR Description: hypothetical protein T22F8.20 - Arabidopsis
  misc_feature (8)..(353): Homolog of NCBI NO: 30692186 NR Description: Inositol monophosphatase - like protein
ELPTHSKMLAQSHFFSKSFDLIPPQSPALRSANPSLRISSSYSNSRLSFLSSSAIAVPVSRRRFCLTMASNSKRPNISNESPSELSDTELDRFAAVGNALADASGEVIRKYFRKKFDIVDKDDMSPVTIADQMAEEAMVSIIFQNLPSHAIYGEEKGWRCKEESADYVWVLDPIDGTKSFITGKPVFGTLIALLYKGKPILGLIDQPILKERWIGMNGRRTKLNGEDISTRSCPKLSQAYLYTTSPHLFSEEAEKAYSRVRDKVKVPLYGCDCYAYALLASGFVDLVIESGLKPYDFLALVPVIEGAGGTITDWTGKRFLWEASSSAVATSFNVVAAGDSDIHQQALESLEWH

SEQ ID NO: 50378 - protein, 346 aa, Arabidopsis thaliana
  peptide (1)..(346): Ceres Seq. ID no. 13588944
  misc_feature (93)..(343): Homolog of NCBI NO: 15891078 NR Description: AGR_L_1926p [Agrobacterium tumefaciens]
  misc_feature (78)..(343): Homolog of NCBI NO: 26989876 NR Description: inositol monophosphatase family protein
  misc_feature (79)..(343): Homolog of NCBI NO: 22962885 NR Description: hypothetical protein [Rhodopseudomonas palustris]
  misc_feature (62)..(344): Homolog of NCBI NO: 22959506 NR Description: hypothetical protein [Rhodobacter sphaeroides]
  misc_feature (81)..(343): Homolog of NCBI NO: 27382842 NR Description: inositol monophosphatase family protein
  misc_feature (83)..(340): Homolog of NCBI NO: 22967233 NR Description: hypothetical protein [Rhodospirillum rubrum]
  misc_feature (86)..(343): Homolog of NCBI NO: 23015473 NR Description: hypothetical protein [Magnetospirillum
  misc_feature (15)..(346): Homolog of NCBI NO: 34394555 NR Description: putative N-amidino-scyllo-inosamine-4-phosphate
  misc_feature (61)..(346): Homolog of NCBI NO: 7487342 NR Description: hypothetical protein T22F8.20 - Arabidopsis
  misc_feature (1)..(346): Homolog of NCBI NO: 30692186 NR Description: Inositol monophosphatase - like protein
MLAQSHFFSKSFDLIPPQSPALRSANPSLRISSSYSNSRLSFLSSSAIAVPVSRRRFCLTMASNSKRPNISNESPSELSDTELDRFAAVGNALADASGEVIRKYFRKKFDIVDKDDMSPVTIADQMAEEAMVSIIFQNLPSHAIYGEEKGWRCKEESADYVWVLDPIDGTKSFITGKPVFGTLIALLYKGKPILGLIDQPILKERWIGMNGRRTKLNGEDISTRSCPKLSQAYLYTTSPHLFSEEAEKAYSRVRDKVKVPLYGCDCYAYALLASGFVDLVIESGLKPYDFLALVPVIEGAGGTITDWTGKRFLWEASSSAVATSFNVVAAGDSDIHQQALESLEWH

SEQ ID NO: 50379 - protein, 286 aa, Arabidopsis thaliana
  peptide (1)..(286): Ceres Seq. ID no. 13588945
  misc_feature (33)..(283): Homolog of NCBI NO: 15891078 NR Description: AGR_L_1926p [Agrobacterium tumefaciens]
  misc_feature (18)..(283): Homolog of NCBI NO: 26989876 NR Description: inositol monophosphatase family protein
  misc_feature (19)..(283): Homolog of NCBI NO: 22962885 NR Description: hypothetical protein [Rhodopseudomonas palustris]
  misc_feature (2)..(284): Homolog of NCBI NO: 22959506 NR Description: hypothetical protein [Rhodobacter sphaeroides]
  misc_feature (21)..(283): Homolog of NCBI NO: 27382842 NR Description: inositol monophosphatase family protein
  misc_feature (23)..(280): Homolog of NCBI NO: 22967233 NR Description: hypothetical protein [Rhodospirillum rubrum]
  misc_feature (26)..(283): Homolog of NCBI NO: 23015473 NR Description: hypothetical protein [Magnetospirillum
  misc_feature (1)..(286): Homolog of NCBI NO: 34394555 NR Description: putative N-amidino-scyllo-inosamine-4-phosphate
  misc_feature (1)..(286): Homolog of NCBI NO: 7487342 NR Description: hypothetical protein T22F8.20 - Arabidopsis
  misc_feature (1)..(286): Homolog of NCBI NO: 30692186 NR Description: Inositol monophosphatase - like protein
MASNSKRPNISNESPSELSDTELDRFAAVGNALADASGEVIRKYFRKKFDIVDKDDMSPVTIADQMAEEAMVSIIFQNLPSHAIYGEEKGWRCKEESADYVWVLDPIDGTKSFITGKPVFGTLIALLYKGKPILGLIDQPILKERWIGMNGRRTKLNGEDISTRSCPKLSQAYLYTTSPHLFSEEAEKAYSRVRDKVKVPLYGCDCYAYALLASGFVDLVIESGLKPYDFLALVPVIEGAGGTITDWTGKRFLWEASSSAVATSFNVVAAGDSDIHQQALESLEWH

SEQ ID NO: 50380 - DNA, 1835 bp, Arabidopsis thaliana
  misc_feature (1)..(1835): Ceres Seq. ID no. 13588200
  misc_feature: MA Experiment ID: 20000184 Result: Down-regulated in Transcription
  misc_feature: MA Experiment 20000184 PARAMETER Experiment Name: At_Shoots__P Parameter: Age (day) Value: 7
  misc_feature: MA Experiment 20000184 PARAMETER Experiment Name: At_Shoots__P Parameter: Tissue Value: Shoots vs. Whole Plant
  misc_feature: MA Experiment ID: 20000227 Result: Down-regulated in Transcription
  misc_feature: MA Experiment 20000227 PARAMETER Experiment Name: At_Root-Tips-vs-Tops_P Parameter: Tissue Value: Root Tips vs. Root Tops
  misc_feature: MA Experiment ID: 20000234 Result: Down-regulated in Transcription
  misc_feature: MA Experiment 20000234 PARAMETER Experiment Name: At_Siliques_P Parameter: Age (day) Value: 21
  misc_feature: MA Experiment 20000234 PARAMETER Experiment Name: At_Siliques_P Parameter: Organism Value: A. thaliana
  misc_feature: MA Experiment 20000234 PARAMETER Experiment Name: At_Siliques_P Parameter: Plant Line Value: WS
  misc_feature: MA Experiment 20000234 PARAMETER Experiment Name: At_Siliques_P Parameter: Tissue Value: Less Than 5mm Siliques vs. Whole Plant
  misc_feature: MA Experiment ID: 20000264 Result: Down-regulated in Transcription
  misc_feature: MA Experiment 20000264 PARAMETER Experiment Name: At_Open_Flower_P Parameter: Age (day) Value: 21
  misc_feature: MA Experiment 20000264 PARAMETER Experiment Name: At_Open_Flower_P Parameter: Plant Line Value: WS
  misc_feature: MA Experiment 20000264 PARAMETER Experiment Name: At_Open_Flower_P Parameter: Tissue Value: Open Flower vs. Whole Plant
  misc_feature: MA Experiment ID: 20000265 Result: Down-regulated in Transcription
  misc_feature: MA Experiment 20000265 PARAMETER Experiment Name: At_Open_Flower_P Parameter: Age (day) Value: 21
  misc_feature: MA Experiment 20000265 PARAMETER Experiment Name: At_Open_Flower_P Parameter: Plant Line Value: WS
  misc_feature: MA Experiment 20000265 PARAMETER Experiment Name: At_Open_Flower_P Parameter: Tissue Value: Closed Flower vs. Whole Plant
  misc_feature: MA Experiment ID: 20000268 Result: Down-regulated in Transcription
  misc_feature: MA Experiment 20000268 PARAMETER Experiment Name: At_100mM_NaCl__P Parameter: Age (day) Value: 14
  misc_feature: MA Experiment 20000268 PARAMETER Experiment Name: At_100mM_NaCl__P Parameter: Organism Value: A. thaliana
  misc_feature: MA Experiment 20000268 PARAMETER Experiment Name: At_100mM_NaCl__P Parameter: Plant Line Value: WS
  misc_feature: MA Experiment 20000268 PARAMETER Experiment Name: At_100mM_NaCl__P Parameter: Timepoint (hr) Value: 6
  misc_feature: MA Experiment 20000268 PARAMETER Experiment Name: At_100mM_NaCl__P Parameter: Tissue Value: Whole Plant
  misc_feature: MA Experiment 20000268 PARAMETER Experiment Name: At_100mM_NaCl__P Parameter: Treatment Value: 100mM NaCl vs. No Treatment
  misc_feature: MA Experiment ID: 20000286 Result: Down-regulated in Transcription
  misc_feature: MA Experiment 20000286 PARAMETER Experiment Name: At_Open_Flower_P Parameter: Age (day) Value: 21
  misc_feature: MA Experiment 20000286 PARAMETER Experiment Name: At_Open_Flower_P Parameter: Plant Line Value: WS
  misc_feature: MA Experiment 20000286 PARAMETER Experiment Name: At_Open_Flower_P Parameter: Tissue Value: Half Open vs. Whole Plant
  misc_feature: MA Experiment ID: 20000436 Result: Down-regulated in Transcription
  misc_feature: MA Experiment 20000436 PARAMETER Experiment Name: At_Drought_P Parameter: Age (day) Value: 7
  misc_feature: MA Experiment 20000436 PARAMETER Experiment Name: At_Drought_P Parameter: Organism Value: A. thaliana
  misc_feature: MA Experiment 20000436 PARAMETER Experiment Name: At_Drought_P Parameter: Plant Line Value: WS
  misc_feature: MA Experiment 20000436 PARAMETER Experiment Name: At_Drought_P Parameter: Timepoint (hr) Value: 12
  misc_feature: MA Experiment 20000436 PARAMETER Experiment Name: At_Drought_P Parameter: Tissue Value: Whole Plant
  misc_feature: MA Experiment 20000436 PARAMETER Experiment Name: At_Drought_P Parameter: Treatment Value: Drought vs. No Drought
  misc_feature: MA Experiment ID: 20000438 Result: Down-regulated in Transcription
  misc_feature: MA Experiment 20000438 PARAMETER Experiment Name: At_Shoots__P Parameter: Age (day) Value: 14
  misc_feature: MA Experiment 20000438 PARAMETER Experiment Name: At_Shoots__P Parameter: Tissue Value: Shoots vs. Whole Plant
  misc_feature: MA Experiment ID: 20000441 Result: Up-regulated in Transcription
  misc_feature: MA Experiment 20000441 PARAMETER Experiment Name: At_1uM_BR-BRZ__P Parameter: Tissue Value: Shoot Apices
  misc_feature: MA Experiment 20000441 PARAMETER Experiment Name: At_1uM_BR-BRZ__P Parameter: Treatment Value: 1uM BR vs. No Treatment
  misc_feature: MA Experiment ID: 20000443 Result: Up-regulated in Transcription
  misc_feature: MA Experiment 20000443 PARAMETER Experiment Name: At_1uM_BR-BRZ__P Parameter: Tissue Value: Shoot Apices
  misc_feature: MA Experiment 20000443 PARAMETER Experiment Name: At_1uM_BR-BRZ__P Parameter: Treatment Value: 1uM BRZ vs. No Treatment
  misc_feature: MA Experiment ID: 20000455 Result: Down-regulated in Transcription
  misc_feature: MA Experiment 20000455 PARAMETER Experiment Name: At_100uM_ABA_P Parameter: Age (day) Value: 16
  misc_feature: MA Experiment 20000455 PARAMETER Experiment Name: At_100uM_ABA_P Parameter: Organism Value: A. thaliana
  misc_feature: MA Experiment 20000455 PARAMETER Experiment Name: At_100uM_ABA_P Parameter: Plant Line Value: WS
  misc_feature: MA Experiment 20000455 PARAMETER Experiment Name: At_100uM_ABA_P Parameter: Timepoint (hr) Value: 48
  misc_feature: MA Experiment 20000455 PARAMETER Experiment Name: At_100uM_ABA_P Parameter: Tissue Value: Aerial
  misc_feature: MA Experiment 20000455 PARAMETER Experiment Name: At_100uM_ABA_P Parameter: Treatment Value: 100uM ABA vs. No Treatment
  misc_feature: MA Experiment ID: 20000794 Result: Down-regulated in Transcription
  misc_feature: MA Experiment 20000794 PARAMETER Experiment Name: At_Petals_P Parameter: Age (day) Value: 23-25 days
  misc_feature: MA Experiment 20000794 PARAMETER Experiment Name: At_Petals_P Parameter: Plant Line Value: WS
  misc_feature: MA Experiment 20000794 PARAMETER Experiment Name: At_Petals_P Parameter: Tissue Value: Petals vs. Whole plant
  misc_feature: MA Experiment ID: 20001248 Result: Up-regulated in Transcription
  misc_feature: MA Experiment 20001248 PARAMETER Experiment Name: At_Far-red-induction_P Parameter: Age (day) Value: 7
  misc_feature: MA Experiment 20001248 PARAMETER Experiment Name: At_Far-red-induction_P Parameter: Light Value: Far-red vs. White
  misc_feature: MA Experiment 20001248 PARAMETER Experiment Name: At_Far-red-induction_P Parameter: Organism Value: A. thaliana
  misc_feature: MA Experiment 20001248 PARAMETER Experiment Name: At_Far-red-induction_P Parameter: Plant Line Value: Columbia
  misc_feature: MA Experiment 20001248 PARAMETER Experiment Name: At_Far-red-induction_P Parameter: Timepoint (hr) Value: 4
  misc_feature: MA Experiment 20001248 PARAMETER Experiment Name: At_Far-red-induction_P Parameter: Tissue Value: Whole Plant
  misc_feature: MA Experiment ID: 20001451 Result: Up-regulated in Transcription
  misc_feature: MA Experiment 20001451 PARAMETER Experiment Name: At_Far-red-induction_P Parameter: Age (day) Value: 7
  misc_feature: MA Experiment 20001451 PARAMETER Experiment Name: At_Far-red-induction_P Parameter: Light Value: Far-red vs. White
  misc_feature: MA Experiment 20001451 PARAMETER Experiment Name: At_Far-red-induction_P Parameter: Organism Value: A. thaliana
  misc_feature: MA Experiment 20001451 PARAMETER Experiment Name: At_Far-red-induction_P Parameter: Plant Line Value: Columbia
  misc_feature: MA Experiment 20001451 PARAMETER Experiment Name: At_Far-red-induction_P Parameter: Timepoint (hr) Value: 24
  misc_feature: MA Experiment 20001451 PARAMETER Experiment Name: At_Far-red-induction_P Parameter: Tissue Value: Whole Plant
  misc_feature: MA Experiment ID: 20001458 Result: Up-regulated in Transcription
  misc_feature: MA Experiment 20001458 PARAMETER Experiment Name: At_50mM_NH4NO3_L-to-H_P Parameter: Age (day) Value: Undefined
  misc_feature: MA Experiment 20001458 PARAMETER Experiment Name: At_50mM_NH4NO3_L-to-H_P Parameter: Organism Value: Undefined
  misc_feature: MA Experiment 20001458 PARAMETER Experiment Name: At_50mM_NH4NO3_L-to-H_P Parameter: Plant Line Value: Undefined
  misc_feature: MA Experiment 20001458 PARAMETER Experiment Name: At_50mM_NH4NO3_L-to-H_P Parameter: Timepoint (hr) Value: 2
  misc_feature: MA Experiment 20001458 PARAMETER Experiment Name: At_50mM_NH4NO3_L-to-H_P Parameter: Tissue Value: Siliques
  misc_feature: MA Experiment 20001458 PARAMETER Experiment Name: At_50mM_NH4NO3_L-to-H_P Parameter: Treatment Value: 50mM NH4NO3 vs. 100mM Manitol
  misc_feature: MA Experiment ID: 20001555 Result: Down-regulated in Transcription
  misc_feature: MA Experiment 20001555 PARAMETER Experiment Name: At_Drought_Soil_Dry_P Parameter: Age (day) Value: 24
  misc_feature: MA Experiment 20001555 PARAMETER Experiment Name: At_Drought_Soil_Dry_P Parameter: Organism Value: A. thaliana
  misc_feature: MA Experiment 20001555 PARAMETER Experiment Name: At_Drought_Soil_Dry_P Parameter: Plant Line Value: WS
  misc_feature: MA Experiment 20001555 PARAMETER Experiment Name: At_Drought_Soil_Dry_P Parameter: Post Timepoint (hr) Value: None
  misc_feature: MA Experiment 20001555 PARAMETER Experiment Name: At_Drought_Soil_Dry_P Parameter: Post-Treatment Value: None
  misc_feature: MA Experiment 20001555 PARAMETER Experiment Name: At_Drought_Soil_Dry_P Parameter: Timepoint (day) Value: 10
  misc_feature: MA Experiment 20001555 PARAMETER Experiment Name: At_Drought_Soil_Dry_P Parameter: Treatment Value: Drought vs. No Drought
  misc_feature: MA Experiment ID: 20001556 Result: Down-regulated in Transcription
  misc_feature: MA Experiment 20001556 PARAMETER Experiment Name: At_Drought_Soil_Dry_P Parameter: Age (day) Value: 26
  misc_feature: MA Experiment 20001556 PARAMETER Experiment Name: At_Drought_Soil_Dry_P Parameter: Organism Value: A. thaliana
  misc_feature: MA Experiment 20001556 PARAMETER Experiment Name: At_Drought_Soil_Dry_P Parameter: Plant Line Value: WS
  misc_feature: MA Experiment 20001556 PARAMETER Experiment Name: At_Drought_Soil_Dry_P Parameter: Post Timepoint (hr) Value: None
  misc_feature: MA Experiment 20001556 PARAMETER Experiment Name: At_Drought_Soil_Dry_P Parameter: Post-Treatment Value: None
  misc_feature: MA Experiment 20001556 PARAMETER Experiment Name: At_Drought_Soil_Dry_P Parameter: Timepoint (day) Value: 12
  misc_feature: MA Experiment 20001556 PARAMETER Experiment Name: At_Drought_Soil_Dry_P Parameter: Treatment Value: Drought vs. No Drought
  misc_feature: MA Experiment ID: 20001557 Result: Up-regulated in Transcription
  misc_feature: MA Experiment 20001557 PARAMETER Experiment Name: At_Drought_Soil_Dry_P Parameter: Age (day) Value: 27
  misc_feature: MA Experiment 20001557 PARAMETER Experiment Name: At_Drought_Soil_Dry_P Parameter: Organism Value: A. thaliana
  misc_feature: MA Experiment 20001557 PARAMETER Experiment Name: At_Drought_Soil_Dry_P Parameter: Plant Line Value: WS
  misc_feature: MA Experiment 20001557 PARAMETER Experiment Name: At_Drought_Soil_Dry_P Parameter: Post Timepoint (hr) Value: 3
  misc_feature: MA Experiment 20001557 PARAMETER Experiment Name: At_Drought_Soil_Dry_P Parameter: Post-Treatment Value: Re-Water vs. No Drought
  misc_feature: MA Experiment 20001557 PARAMETER Experiment Name: At_Drought_Soil_Dry_P Parameter: Timepoint (day) Value: 13
  misc_feature: MA Experiment 20001557 PARAMETER Experiment Name: At_Drought_Soil_Dry_P Parameter: Treatment Value: Drought vs. No Drought
  misc_feature: MA Experiment ID: 20001906 Result: Down-regulated in Transcription
  misc_feature: MA Experiment 20001906 PARAMETER Experiment Name: At_Drought_Reproduction_P Parameter: Age (day) Value: 35
  misc_feature: MA Experiment 20001906 PARAMETER Experiment Name: At_Drought_Reproduction_P Parameter: Organism Value: A. thaliana
  misc_feature: MA Experiment 20001906 PARAMETER Experiment Name: At_Drought_Reproduction_P Parameter: Plant Line Value: WS
  misc_feature: MA Experiment 20001906 PARAMETER Experiment Name: At_Drought_Reproduction_P Parameter: Timepoint (day) Value: 5
  misc_feature: MA Experiment 20001906 PARAMETER Experiment Name: At_Drought_Reproduction_P Parameter: Tissue Value: Siliques
  misc_feature: MA Experiment 20001906 PARAMETER Experiment Name: At_Drought_Reproduction_P Parameter: Treatment Value: Drought vs. No Drought
  misc_feature: MA Experiment ID: 20001907 Result: Down-regulated in Transcription
  misc_feature: MA Experiment 20001907 PARAMETER Experiment Name: At_Drought_Reproduction_P Parameter: Age (day) Value: 37
  misc_feature: MA Experiment 20001907 PARAMETER Experiment Name: At_Drought_Reproduction_P Parameter: Organism Value: A. thaliana
  misc_feature: MA Experiment 20001907 PARAMETER Experiment Name: At_Drought_Reproduction_P Parameter: Plant Line Value: WS
  misc_feature: MA Experiment 20001907 PARAMETER Experiment Name: At_Drought_Reproduction_P Parameter: Timepoint (day) Value: 7
  misc_feature: MA Experiment 20001907 PARAMETER Experiment Name: At_Drought_Reproduction_P Parameter: Tissue Value: Siliques
  misc_feature: MA Experiment 20001907 PARAMETER Experiment Name: At_Drought_Reproduction_P Parameter: Treatment Value: Drought vs. No Drought
tcacaactcttctttacccacttttcttatatctgctttccaaaacagagaaaccccaagaaaagaaaaagaaaaaagaaaagagaagaaagaagcaggaggagactttttggaatggagagacaaaagagcatggaaaaagggttactcaggaagagcttaagcatacgtgagagaaagttccctaacgaagacgctttcttagaatccggtttatcgaggaagtctccgcgagaggtcaagaaacctcaaaacgacgatggtgaatgtcgtgttaccgcctctgttttcctcagcacctttgttgccgtatcaggctccttctgtaccggttgtggcgttggtttttcatcgggtgcacaagcagggattaccaaagatttatctctctccgttgcagaatactcaatgttcgggtcgatcttgacattaggaggcttgatcggtgcagtattcagcggtaaagtcgctgatgtcttgggaagaaaacggacgatgttgttttgcgaattcttctgtatcacaggctggctttgtgtagcattggctcagaatgcaatgtggctggactgtggaagattgttacttggaatcggcgttggtatatttagctacgtgattccggtgtatatagccgaaattgcacctaaacatgtccgaggatcgtttgtgttcgccaatcagttgatgcaaaattgcggaatttcactcttcttcatcattggcaattttattccatggagactactaacagtagtcggattggtgccatgtgtgttccacgtcttttgtttatttttcatccccgaatctccaagatggctggcgaagttaggtcgtgataaagaatgccgatcttcgttgcaacgccttaggggatctgacgtcgatatttctcgtgaagcaaacacaattagagataccattgacatgacagaaaacggtggtgaaactaagatgtctgaattgtttcagagacgatacgcatatccgttaattatcggagttggtttaatgtttttgcaacaattgtgtgggagctccggtgttacctattatgctagtagcctcttcaacaaaggaggatttccaagtgctattggcacatccgtaatagccacaattatggttccaaaagcaatgctggcaacagtcctagtcgataaaatggggaggagaacgctcctaatggcttcttgttctgcaatgggtttgagtgctttgctcttaagtgtttcttacggtttccagtcgtttggcattcttccagaactcactcccatcttcacttgcatcggcgtcttgggtcacattgtgtcatttgccatgggaatgggaggactaccatggattataatggctgagatatttccgatgaatgtgaaagtgtcagctgggaccttagttactgtaaccaattggttatttggttggattatcacatacactttcaattttatgctagaatggaatgcatcaggaatgttcctcatcttctcaatggtctccgccagttcgatcgtatttatatactttttggtacctgagacaaaaggccgatcacttgaagaaatacaagcactgctcaacaactctgtgcaataatatcatttttctttttctttttgggtaaatgatcatatatataagtcgattgttgttatttggtgtgagtttgaatgtgatccgtgtgcgtatcaaattttggatgggaaatttgaaacagtaaaaatttgtatattcctcgtttgggaaaaatgtatgttttggttagttatatgcaaaaatgttgttgaagaagtttatacataaaaagttaaatacaaaaagatggt

SEQ ID NO: 50381 - protein, 534 aa, Arabidopsis thaliana
  peptide (1)..(534): Ceres Seq. ID no. 13588201
  misc_feature (98)..(529): Pfam Name: Sugar (and other) transporter Pfam Description: Sugar (and other) transporter
  misc_feature (45)..(502): Homolog of NCBI NO: 25407067 NR Description: hypothetical protein [imported] - Arabidopsis
  misc_feature (68)..(529): Homolog of NCBI NO: 18421106 NR Description: sugar-porter family protein 1 [Arabidopsis
  misc_feature (68)..(529): Homolog of NCBI NO: 14585699 NR Description: sugar-porter family protein 1 [Arabidopsis
  misc_feature (82)..(529): Homolog of NCBI NO: 18421108 NR Description: sugar-porter family protein 2 [Arabidopsis
  misc_feature (84)..(532): Homolog of NCBI NO: 18397141 NR Description: sugar transporter, putative [Arabidopsis thaliana]
  misc_feature (80)..(495): Homolog of NCBI NO: 25407065 NR Description: hypothetical protein [imported] - Arabidopsis
  misc_feature (80)..(534): Homolog of NCBI NO: 6686827 NR Description: putative sugar transporter [Arabidopsis thaliana]
  misc_feature (80)..(534): Homolog of NCBI NO: 30680865 NR Description: sugar transporter, putative [Arabidopsis thaliana]
  misc_feature (80)..(534): Homolog of NCBI NO: 18390957 NR Description: sugar transporter, putative [Arabidopsis
  misc_feature (39)..(534): Homolog of NCBI NO: 18390959 NR Description: ERD6 protein [Arabidopsis thaliana]
SQLFFTHFSYICFPKQRNPKKRKRKKKREERSRRRLFGMERQKSMEKGLLRKSLSIRERKFPNEDAFLESGLSRKSPREVKKPQNDDGECRVTASVFLSTFVAVSGSFCTGCGVGFSSGAQAGITKDLSLSVAEYSMFGSILTLGGLIGAVFSGKVADVLGRKRTMLFCEFFCITGWLCVALAQNAMWLDCGRLLLGIGVGIFSYVIPVYIAEIAPKHVRGSFVFANQLMQNCGISLFFIIGNFIPWRLLTVVGLVPCVFHVFCLFFIPESPRWLAKLGRDKECRSSLQRLRGSDVDISREANTIRDTIDMTENGGETKMSELFQRRYAYPLIIGVGLMFLQQLCGSSGVTYYASSLFNKGGFPSAIGTSVIATIMVPKAMLATVLVDKMGRRTLLMASCSAMGLSALLLSVSYGFQSFGILPELTPIFTCIGVLGHIVSFAMGMGGLPWIIMAEIFPMNVKVSAGTLVTVTNWLFGWIITYTFNFMLEWNASGMFLIFSMVSASSIVFIYFLVPETKGRSLEEIQALLNNSVQ

SEQ ID NO: 50382 - protein, 496 aa, Arabidopsis thaliana
  peptide (1)..(496): Ceres Seq. ID no. 13588202
  misc_feature (60)..(491): Pfam Name: Sugar (and other) transporter Pfam Description: Sugar (and other) transporter
  misc_feature (7)..(464): Homolog of NCBI NO: 25407067 NR Description: hypothetical protein [imported] - Arabidopsis
  misc_feature (30)..(491): Homolog of NCBI NO: 18421106 NR Description: sugar-porter family protein 1 [Arabidopsis
  misc_feature (30)..(491): Homolog of NCBI NO: 14585699 NR Description: sugar-porter family protein 1 [Arabidopsis
  misc_feature (44)..(491): Homolog of NCBI NO: 18421108 NR Description: sugar-porter family protein 2 [Arabidopsis
  misc_feature (46)..(494): Homolog of NCBI NO: 18397141 NR Description: sugar transporter, putative [Arabidopsis thaliana]
  misc_feature (42)..(457): Homolog of NCBI NO: 25407065 NR Description: hypothetical protein [imported] - Arabidopsis
  misc_feature (42)..(496): Homolog of NCBI NO: 6686827 NR Description: putative sugar transporter [Arabidopsis thaliana]
  misc_feature (42)..(496): Homolog of NCBI NO: 30680865 NR Description: sugar transporter, putative [Arabidopsis thaliana]
  misc_feature (42)..(496): Homolog of NCBI NO: 18390957 NR Description: sugar transporter, putative [Arabidopsis
  misc_feature (1)..(496): Homolog of NCBI NO: 18390959 NR Description: ERD6 protein [Arabidopsis thaliana]
MERQKSMEKGLLRKSLSIRERKFPNEDAFLESGLSRKSPREVKKPQNDDGECRVTASVFLSTFVAVSGSFCTGCGVGFSSGAQAGITKDLSLSVAEYSMFGSILTLGGLIGAVFSGKVADVLGRKRTMLFCEFFCITGWLCVALAQNAMWLDCGRLLLGIGVGIFSYVIPVYIAEIAPKHVRGSFVFANQLMQNCGISLFFIIGNFIPWRLLTVVGLVPCVFHVFCLFFIPESPRWLAKLGRDKECRSSLQRLRGSDVDISREANTIRDTIDMTENGGETKMSELFQRRYAYPLIIGVGLMFLQQLCGSSGVTYYASSLFNKGGFPSAIGTSVIATIMVPKAMLATVLVDKMGRRTLLMASCSAMGLSALLLSVSYGFQSFGILPELTPIFTCIGVLGHIVSFAMGMGGLPWIIMAEIFPMNVKVSAGTLVTVTNWLFGWIITYTFNFMLEWNASGMFLIFSMVSASSIVFIYFLVPETKGRSLEEIQALLNNSVQ

SEQ ID NO: 50383 - protein, 490 aa, Arabidopsis thaliana
  peptide (1)..(490): Ceres Seq. ID no. 13588203
  misc_feature (54)..(485): Pfam Name: Sugar (and other) transporter Pfam Description: Sugar (and other) transporter
  misc_feature (1)..(458): Homolog of NCBI NO: 25407067 NR Description: hypothetical protein [imported] - Arabidopsis
  misc_feature (24)..(485): Homolog of NCBI NO: 18421106 NR Description: sugar-porter family protein 1 [Arabidopsis
  misc_feature (24)..(485): Homolog of NCBI NO: 14585699 NR Description: sugar-porter family protein 1 [Arabidopsis
  misc_feature (38)..(485): Homolog of NCBI NO: 18421108 NR Description: sugar-porter family protein 2 [Arabidopsis
  misc_feature (40)..(488): Homolog of NCBI NO: 18397141 NR Description: sugar transporter, putative [Arabidopsis thaliana]
  misc_feature (36)..(451): Homolog of NCBI NO: 25407065 NR Description: hypothetical protein [imported] - Arabidopsis
  misc_feature (36)..(490): Homolog of NCBI NO: 6686827 NR Description: putative sugar transporter [Arabidopsis thaliana]
  misc_feature (36)..(490): Homolog of NCBI NO: 30680865 NR Description: sugar transporter, putative [Arabidopsis thaliana]
  misc_feature (36)..(490): Homolog of NCBI NO: 18390957 NR Description: sugar transporter, putative [Arabidopsis
  misc_feature (1)..(490): Homolog of NCBI NO: 18390959 NR Description: ERD6 protein [Arabidopsis thaliana]
MEKGLLRKSLSIRERKFPNEDAFLESGLSRKSPREVKKPQNDDGECRVTASVFLSTFVAVSGSFCTGCGVGFSSGAQAGITKDLSLSVAEYSMFGSILTLGGLIGAVFSGKVADVLGRKRTMLFCEFFCITGWLCVALAQNAMWLDCGRLLLGIGVGIFSYVIPVYIAEIAPKHVRGSFVFANQLMQNCGISLFFIIGNFIPWRLLTVVGLVPCVFHVFCLFFIPESPRWLAKLGRDKECRSSLQRLRGSDVDISREANTIRDTIDMTENGGETKMSELFQRRYAYPLIIGVGLMFLQQLCGSSGVTYYASSLFNKGGFPSAIGTSVIATIMVPKAMLATVLVDKMGRRTLLMASCSAMGLSALLLSVSYGFQSFGILPELTPIFTCIGVLGHIVSFAMGMGGLPWIIMAEIFPMNVKVSAGTLVTVTNWLFGWIITYTFNFMLEWNASGMFLIFSMVSASSIVFIYFLVPETKGRSLEEIQALLNNSVQ

SEQ ID NO: 50384 - DNA, 1544 bp, Arabidopsis thaliana
  misc_feature (1)..(1544): Ceres Seq. ID no. 12591491
gaaccgcttctccccggcttgacccttgtcgtactcgtcgatggctccggtgaagcagaagaagaagaataagaagaagcctctggataaggcgaagaagttggcgaagaataaagagaagaagagagtcaacgcagtgccattggatccggaggctatcgactgcgactggtgggatactttctggctccgaaactcttctccctcagtcccctcagacgaagactatgcgttcaagcacttctttagggcttctaagacaacttttagctacatttgctcgctcgtcagggaggaccttatctctagacctccctctggtctcatcaacatcgagggaaggcttcttagtgttgagaaacaagtcgccattgctcttcgaaggttagcttccggtgattctcaggtctccgttggtgctgcctttggtgttggccagtccactgtttctcaggttacatggagattcatcgaggcactcgaagaacgtgccaagcatcatcttagatggccagattctgaccgaattgaagagatcaagtcaaagttcgaggagatgtacggtctccccaattgctgcggagccattgacactacgcacatcatcatgactctcccggctgtgcaagcatcagatgactggtgtgaccaggagaagaactacagcatgttcttacaaggagtctttgatcacgagatgagatttctcaacatggttaccggctggcctggcggcatgaccgtctccaagcttctcaagttctctggcttcttcaaactctgtgaaaacgctcagattttagacggcaatcctaaaactctatcccaaggagcccagattagagaatacgttgttggagggatcagttacccgcttcttccctggcttataactcctcacgacagcgatcatccctctgattccatggtggcgttcaacgaaaggcatgagaaggtgaggtcagtcgcagctactgcctttcaacagcttaaaggaagctggaggattctgagcaaagttatgtggagaccagacaggaggaagctacctagtataatactggtgtgttgtttgttgcataacatcattatcgactgtggggattatcttcaagaagatgttcctttgtctggtcatcacgactccggttatgcagaccggtactgcaagcagaccgagccgcttggtagtgagctcagaggatgtctgactgagcatttgcttaggtgaggatcttaaccttgggaattggacatcttcatctcttctctaaggccgtactaagcccgttagaccattcagcatcagtttagtggtagcccgagacatatcggacaaaagcaatgttatgaaacttttcttcaggtatcaacaccagattaacatcatgccagttggacctacaaaaatagattcatccttaagtgtgattaccatactttgtgaactactaatcttttgagaggagtggactatatccccaacggaactgtttgttttggcaatgtaaatgttatttttttaataataattggtgttttct

SEQ ID NO: 50385 - protein, 396 aa, Arabidopsis thaliana
  peptide (1)..(396): Ceres Seq. ID no. 12591492
  misc_feature (48)..(349): Homolog of NCBI NO: 21592524 NR Description: unknown [Arabidopsis thaliana]
  misc_feature (48)..(396): Homolog of NCBI NO: 34906342 NR Description: unnamed protein product [Oryza sativa (japonica
  misc_feature (48)..(361): Homolog of NCBI NO: 21902022 NR Description: B1097D05.23 [Oryza sativa (japonica
  misc_feature (48)..(349): Homolog of NCBI NO: 15239835 NR Description: putative protein
  misc_feature (1)..(396): Homolog of NCBI NO: 34908114 NR Description: P0031D11.14 [Oryza sativa (japonica
  misc_feature (1)..(394): Homolog of NCBI NO: 15233248 NR Description: putative protein
  misc_feature (1)..(394): Homolog of NCBI NO: 25553597 NR Description: OJ1656_E11.28 [Oryza sativa (japonica
  misc_feature (1)..(139): Homolog of NCBI NO: 11357482 NR Description: hypothetical protein F16M2.120 - Arabidopsis
  misc_feature (138)..(395): Homolog of NCBI NO: 11357482 NR Description: hypothetical protein F16M2.120 - Arabidopsis
  misc_feature (1)..(396): Homolog of NCBI NO: 18412695 NR Description: putative protein
MAPVKQKKKNKKKPLDKAKKLAKNKEKKRVNAVPLDPEAIDCDWWDTFWLRNSSPSVPSDEDYAFKHFFRASKTTFSYICSLVREDLISRPPSGLINIEGRLLSVEKQVAIALRRLASGDSQVSVGAAFGVGQSTVSQVTWRFIEALEERAKHHLRWPDSDRIEEIKSKFEEMYGLPNCCGAIDTTHIIMTLPAVQASDDWCDQEKNYSMFLQGVFDHEMRFLNMVTGWPGGMTVSKLLKFSGFFKLCENAQILDGNPKTLSQGAQIREYVVGGISYPLLPWLITPHDSDHPSDSMVAFNERHEKVRSVAATAFQQLKGSWRILSKVMWRPDRRKLPSIILVCCLLHNIIIDCGDYLQEDVPLSGHHDSGYADRYCKQTEPLGSELRGCLTEHLLR

SEQ ID NO: 50386 - protein, 224 aa, Arabidopsis thaliana; identical to SEQ ID NO: 47604
  peptide (1)..(224): Ceres Seq. ID no. 12591493
  misc_feature (1)..(177): Homolog of NCBI NO: 7452044 NR Description: hypothetical protein F27B13.20 - Arabidopsis
  misc_feature (1)..(177): Homolog of NCBI NO: 21592524 NR Description: unknown [Arabidopsis thaliana]
  misc_feature (1)..(224): Homolog of NCBI NO: 34906342 NR Description: unnamed protein product [Oryza sativa (japonica
  misc_feature (1)..(189): Homolog of NCBI NO: 21902022 NR Description: B1097D05.23 [Oryza sativa (japonica
  misc_feature (1)..(177): Homolog of NCBI NO: 15239835 NR Description: putative protein
  misc_feature (1)..(224): Homolog of NCBI NO: 34908114 NR Description: P0031D11.14 [Oryza sativa (japonica
  misc_feature (1)..(222): Homolog of NCBI NO: 15233248 NR Description: putative protein
  misc_feature (1)..(222): Homolog of NCBI NO: 25553597 NR Description: OJ1656_E11.28 [Oryza sativa (japonica
  misc_feature (1)..(223): Homolog of NCBI NO: 11357482 NR Description: hypothetical protein F16M2.120 - Arabidopsis
  misc_feature (1)..(224): Homolog of NCBI NO: 18412695 NR Description: putative protein

SEQ ID NO: 50387 - protein, 207 aa, Arabidopsis thaliana; identical to SEQ ID NO: 47605
  peptide (1)..(207): Ceres Seq. ID no. 12591494
  misc_feature (1)..(160): Homolog of NCBI NO: 7452044 NR Description: hypothetical protein F27B13.20 - Arabidopsis
  misc_feature (1)..(160): Homolog of NCBI NO: 21592524 NR Description: unknown [Arabidopsis thaliana]
  misc_feature (1)..(207): Homolog of NCBI NO: 34906342 NR Description: unnamed protein product [Oryza sativa (japonica
  misc_feature (1)..(172): Homolog of NCBI NO: 21902022 NR Description: B1097D05.23 [Oryza sativa (japonica
  misc_feature (1)..(160): Homolog of NCBI NO: 15239835 NR Description: putative protein
  misc_feature (1)..(207): Homolog of NCBI NO: 34908114 NR Description: P0031D11.14 [Oryza sativa (japonica
  misc_feature (1)..(205): Homolog of NCBI NO: 15233248 NR Description: putative protein
  misc_feature (1)..(205): Homolog of NCBI NO: 25553597 NR Description: OJ1656_E11.28 [Oryza sativa (japonica
  misc_feature (1)..(206): Homolog of NCBI NO: 11357482 NR Description: hypothetical protein F16M2.120 - Arabidopsis
  misc_feature (1)..(207): Homolog of NCBI NO: 18412695 NR Description: putative protein

SEQ ID NO: 50388 - DNA, 1292 bp, Arabidopsis thaliana
  misc_feature (1)..(1292): Ceres Seq. ID no. 13648143
  misc_feature: MA Experiment ID: 20000179 Result: Up-regulated in Transcription
  misc_feature: MA Experiment 20000179 PARAMETER Experiment Name: At_Germinating_Seeds_P Parameter: Age (hr) Value: 6 vs. 0
  misc_feature: MA Experiment 20000179 PARAMETER Experiment Name: At_Germinating_Seeds_P Parameter: Tissue Value: Germinating Seeds
  misc_feature: MA Experiment ID: 20000180 Result: Up-regulated in Transcription
  misc_feature: MA Experiment 20000180 PARAMETER Experiment Name: At_Germinating_Seeds_P Parameter: Age (hr) Value: 24 vs. 0
  misc_feature: MA Experiment 20000180 PARAMETER Experiment Name: At_Germinating_Seeds_P Parameter: Tissue Value: Germinating Seeds
  misc_feature: MA Experiment ID: 20000184 Result: Down-regulated in Transcription
  misc_feature: MA Experiment 20000184 PARAMETER Experiment Name: At_Shoots__P Parameter: Age (day) Value: 7
  misc_feature: MA Experiment 20000184 PARAMETER Experiment Name: At_Shoots__P Parameter: Tissue Value: Shoots vs. Whole Plant
  misc_feature: MA Experiment ID: 20000185 Result: Up-regulated in Transcription
  misc_feature: MA Experiment 20000185 PARAMETER Experiment Name: At_Roots__P Parameter: Age (day) Value: 7 vs. 21
  misc_feature: MA Experiment 20000185 PARAMETER Experiment Name: At_Roots__P Parameter: Organism Value: A. thaliana
  misc_feature: MA Experiment 20000185 PARAMETER Experiment Name: At_Roots__P Parameter: Tissue Value: Roots vs. Whole Plant
  misc_feature: MA Experiment ID: 20000265 Result: Up-regulated in Transcription
  misc_feature: MA Experiment 20000265 PARAMETER Experiment Name: At_Open_Flower_P Parameter: Age (day) Value: 21
  misc_feature: MA Experiment 20000265 PARAMETER Experiment Name: At_Open_Flower_P Parameter: Plant Line Value: WS
  misc_feature: MA Experiment 20000265 PARAMETER Experiment Name: At_Open_Flower_P Parameter: Tissue Value: Closed Flower vs. Whole Plant
  misc_feature: MA Experiment ID: 20000286 Result: Up-regulated in Transcription
  misc_feature: MA Experiment 20000286 PARAMETER Experiment Name: At_Open_Flower_P Parameter: Age (day) Value: 21
  misc_feature: MA Experiment 20000286 PARAMETER Experiment Name: At_Open_Flower_P Parameter: Plant Line Value: WS
  misc_feature: MA Experiment 20000286 PARAMETER Experiment Name: At_Open_Flower_P Parameter: Tissue Value: Half Open vs. Whole Plant
  misc_feature: MA Experiment ID: 20000439 Result: Up-regulated in Transcription
  misc_feature: MA Experiment 20000439 PARAMETER Experiment Name: At_Roots__P Parameter: Age (day) Value: 14 vs. 21
  misc_feature: MA Experiment 20000439 PARAMETER Experiment Name: At_Roots__P Parameter: Organism Value: A. thaliana
  misc_feature: MA Experiment 20000439 PARAMETER Experiment Name: At_Roots__P Parameter: Tissue Value: Roots vs. Whole Plant
  misc_feature: MA Experiment ID: 20000495 Result: Up-regulated in Transcription
  misc_feature: MA Experiment 20000495 PARAMETER Experiment Name: At_Guard_Cells_P Parameter: Harvest Date Value: 8/2/2002
  misc_feature: MA Experiment 20000495 PARAMETER Experiment Name: At_Guard_Cells_P Parameter: Organism Value: A. thaliana
  misc_feature: MA Experiment 20000495 PARAMETER Experiment Name: At_Guard_Cells_P Parameter: Tissue Value: Guard Cells vs. Leaves
  misc_feature: MA Experiment ID: 20000794 Result: Up-regulated in Transcription
  misc_feature: MA Experiment 20000794 PARAMETER Experiment Name: At_Petals_P Parameter: Age (day) Value: 23-25 days
  misc_feature: MA Experiment 20000794 PARAMETER Experiment Name: At_Petals_P Parameter: Plant Line Value: WS
  misc_feature: MA Experiment 20000794 PARAMETER Experiment Name: At_Petals_P Parameter: Tissue Value: Petals vs. Whole plant
gagaaaggagtgctgattaaagatgaaggaaactgcaagtctggcagcgagaacatggggacagtgaaacaaagctgccatgagaagggctgcagcgatgaaaaacaaaccggggaaataaatcttgcttcggaggaagagacagatgatcaagattgctcctcgggatgttgtgtgaacgagggaacagtgaaacaaagcttcgatgagaagaagcattctgtgttggtggagaaggaaggtttggacatggaagctggtttctgttgtgatgccaagctggtttgttgtggaaacacagaaggtgaagtgaaggagcaatgtcgtctggagataaagaaagaagaacattgcaagtctggttgctgcggcgaggaaaaacaaaccggagaaatcactctggtttcagaggaagagacagagagcacgaattgttccacgggttgttgtgtggacaaagaagaagtgacacaaacctgtcatgagaagcctgctagcttggtggtatcaggcttggaagtgaagaaggatgagcattgtgagagctcacacagagccgtcaaggtagagacctgttgcaaagtgaagattccagaggcttgcgcatcaaaatgtagggacagagcgaagcgtcacagtggtaaaagctgttgcaggagttatgcaaaagagttatgcagccaccgccatcatcatcaccaccaccaccaccatcaccatgtgagtgcttgatggagattgattgaataacttaaactcttgatgcatccatctattcacattacgtttagtctcattccgtgaatgccgaaataaaaaacaaaatgttccagcaaaggcagtttattagattaagcaactgtgttattcatannanaaaaaaaaaaaaaaaaaaaaaaaaaaaaaaaaaaaaaaaaaaaaaaaaaaaaaaaaaaaaaaaaaaaaaaaaaaaaaaaaaaaaaaaaaaaaaaaaaaaaaaaaaaacccgggggggggcccggaaacaaaatcccccaaaaagggggggaaaaaaaaatcccggggccgcgtttaaaaaagggggaaagggaaaaaaccgggggtaaacaaaataaaaccccttgaaaaaaaacccccttttcccaagggggaaaaaaaaaaaaaagccccaaacaaacccccttcccaaaaattgccaaacctgaaggggaaaaggcaaatttaaacggtaaaaaatttgaaaaaaatccggaaaaaattttggaaaaacaacccatttttaaaaaaaaaaggcaaaaacggaaaaatccctt

SEQ ID NO: 50389 - protein, 243 aa, Arabidopsis thaliana
  peptide (1)..(243): Ceres Seq. ID no. 13648144
  misc_feature (4)..(236): Homolog of NCBI NO: 20384833 NR Description: putative heavy-metal transporter [Arabidopsis
  misc_feature (4)..(236): Homolog of NCBI NO: 15234620 NR Description: cadmium-transporting ATPase family [Arabidopsis
  misc_feature (7)..(226): Homolog of NCBI NO: 40994784 NR Description: putative heavy metal transporting P-type ATPase
  misc_feature (1)..(238): Homolog of NCBI NO: 40994784 NR Description: putative heavy metal transporting P-type ATPase
  misc_feature (1)..(222): Homolog of NCBI NO: 7488065 NR Description: probable cadmium-transporting ATPase (EC 3.6.1.-)
  misc_feature (1)..(243): Homolog of NCBI NO: 15224717 NR Description: cadmium-transporting ATPase family [Arabidopsis
  misc_feature (1)..(243): Homolog of NCBI NO: 19071218 NR Description: putative heavy metal transporter [Arabidopsis
EKGVLIKDEGNCKSGSENMGTVKQSCHEKGCSDEKQTGEINLASEEETDDQDCSSGCCVNEGTVKQSFDEKKHSVLVEKEGLDMEAGFCCDAKLVCCGNTEGEVKEQCRLEIKKEEHCKSGCCGEEKQTGEITLVSEEETESTNCSTGCCVDKEEVTQTCHEKPASLVVSGLEVKKDEHCESSHRAVKVETCCKVKIPEACASKCRDRAKRHSGKSCCRSYAKELCSHRHHHHHHHHHHHVSA

SEQ ID NO: 50390 - protein, 225 aa, Arabidopsis thaliana
  peptide (1)..(225): Ceres Seq. ID no. 13648145
  misc_feature (1)..(218): Homolog of NCBI NO: 20384833 NR Description: putative heavy-metal transporter [Arabidopsis
  misc_feature (1)..(218): Homolog of NCBI NO: 15234620 NR Description: cadmium-transporting ATPase family [Arabidopsis
  misc_feature (1)..(208): Homolog of NCBI NO: 40994784 NR Description: putative heavy metal transporting P-type ATPase
  misc_feature (1)..(220): Homolog of NCBI NO: 40994784 NR Description: putative heavy metal transporting P-type ATPase
  misc_feature (1)..(204): Homolog of NCBI NO: 7488065 NR Description: probable cadmium-transporting ATPase (EC 3.6.1.-)
  misc_feature (1)..(225): Homolog of NCBI NO: 15224717 NR Description: cadmium-transporting ATPase family [Arabidopsis
  misc_feature (1)..(225): Homolog of NCBI NO: 19071218 NR Description: putative heavy metal transporter [Arabidopsis
MGTVKQSCHEKGCSDEKQTGEINLASEEETDDQDCSSGCCVNEGTVKQSFDEKKHSVLVEKEGLDMEAGFCCDAKLVCCGNTEGEVKEQCRLEIKKEEHCKSGCCGEEKQTGEITLVSEEETESTNCSTGCCVDKEEVTQTCHEKPASLVVSGLEVKKDEHCESSHRAVKVETCCKVKIPEACASKCRDRAKRHSGKSCCRSYAKELCSHRHHHHHHHHHHHVSA

SEQ ID NO: 50391 - protein, 160 aa, Arabidopsis thaliana
  peptide (1)..(160): Ceres Seq. ID no. 13648146
  misc_feature (1)..(153): Homolog of NCBI NO: 20384833 NR Description: putative heavy-metal transporter [Arabidopsis
  misc_feature (1)..(153): Homolog of NCBI NO: 15234620 NR Description: cadmium-transporting ATPase family [Arabidopsis
  misc_feature (1)..(143): Homolog of NCBI NO: 40994784 NR Description: putative heavy metal transporting P-type ATPase
  misc_feature (1)..(155): Homolog of NCBI NO: 40994784 NR Description: putative heavy metal transporting P-type ATPase
  misc_feature (1)..(139): Homolog of NCBI NO: 7488065 NR Description: probable cadmium-transporting ATPase (EC 3.6.1.-)
  misc_feature (1)..(160): Homolog of NCBI NO: 15224717 NR Description: cadmium-transporting ATPase family [Arabidopsis
  misc_feature (1)..(160): Homolog of NCBI NO: 19071218 NR Description: putative heavy metal transporter [Arabidopsis
MEAGFCCDAKLVCCGNTEGEVKEQCRLEIKKEEHCKSGCCGEEKQTGEITLVSEEETESTNCSTGCCVDKEEVTQTCHEKPASLVVSGLEVKKDEHCESSHRAVKVETCCKVKIPEACASKCRDRAKRHSGKSCCRSYAKELCSHRHHHHHHHHHHHVSA

SEQ ID NO: 50392 - DNA, 1570 bp, Arabidopsis thaliana
  misc_feature (1)..(1570): Ceres Seq. ID no. 13647746
  misc_feature: MA Experiment ID: 20000171 Result: Up-regulated in Transcription
  misc_feature: MA Experiment 20000171 PARAMETER Experiment Name: At_42deg_Heat_P Parameter: Age (day) Value: 14
  misc_feature: MA Experiment 20000171 PARAMETER Experiment Name: At_42deg_Heat_P Parameter: Organism Value: A. thaliana
  misc_feature: MA Experiment 20000171 PARAMETER Experiment Name: At_42deg_Heat_P Parameter: Plant Line Value: WS
  misc_feature: MA Experiment 20000171 PARAMETER Experiment Name: At_42deg_Heat_P Parameter: Temperature (deg C) Value: 42 vs. 22
  misc_feature: MA Experiment 20000171 PARAMETER Experiment Name: At_42deg_Heat_P Parameter: Timepoint (hr) Value: 1
  misc_feature: MA Experiment 20000171 PARAMETER Experiment Name: At_42deg_Heat_P Parameter: Tissue Value: Aerial
  misc_feature: MA Experiment ID: 20000179 Result: Down-regulated in Transcription
  misc_feature: MA Experiment 20000179 PARAMETER Experiment Name: At_Germinating_Seeds_P Parameter: Age (hr) Value: 6 vs. 0
  misc_feature: MA Experiment 20000179 PARAMETER Experiment Name: At_Germinating_Seeds_P Parameter: Tissue Value: Germinating Seeds
  misc_feature: MA Experiment ID: 20000265 Result: Down-regulated in Transcription
  misc_feature: MA Experiment 20000265 PARAMETER Experiment Name: At_Open_Flower_P Parameter: Age (day) Value: 21
  misc_feature: MA Experiment 20000265 PARAMETER Experiment Name: At_Open_Flower_P Parameter: Plant Line Value: WS
  misc_feature: MA Experiment 20000265 PARAMETER Experiment Name: At_Open_Flower_P Parameter: Tissue Value: Closed Flower vs. Whole Plant
  misc_feature: MA Experiment ID: 20000267 Result: Down-regulated in Transcription
  misc_feature: MA Experiment 20000267 PARAMETER Experiment Name: At_Drought_P Parameter: Age (day) Value: 7
  misc_feature: MA Experiment 20000267 PARAMETER Experiment Name: At_Drought_P Parameter: Organism Value: A. thaliana
  misc_feature: MA Experiment 20000267 PARAMETER Experiment Name: At_Drought_P Parameter: Plant Line Value: WS
  misc_feature: MA Experiment 20000267 PARAMETER Experiment Name: At_Drought_P Parameter: Timepoint (hr) Value: 6
  misc_feature: MA Experiment 20000267 PARAMETER Experiment Name: At_Drought_P Parameter: Tissue Value: Whole Plant
  misc_feature: MA Experiment 20000267 PARAMETER Experiment Name: At_Drought_P Parameter: Treatment Value: Drought vs. No Drought
  misc_feature: MA Experiment ID: 20000286 Result: Down-regulated in Transcription
  misc_feature: MA Experiment 20000286 PARAMETER Experiment Name: At_Open_Flower_P Parameter: Age (day) Value: 21
  misc_feature: MA Experiment 20000286 PARAMETER Experiment Name: At_Open_Flower_P Parameter: Plant Line Value: WS
  misc_feature: MA Experiment 20000286 PARAMETER Experiment Name: At_Open_Flower_P Parameter: Tissue Value: Half Open vs. Whole Plant
  misc_feature: MA Experiment ID: 20000436 Result: Down-regulated in Transcription
  misc_feature: MA Experiment 20000436 PARAMETER Experiment Name: At_Drought_P Parameter: Age (day) Value: 7
  misc_feature: MA Experiment 20000436 PARAMETER Experiment Name: At_Drought_P Parameter: Organism Value: A. thaliana
  misc_feature: MA Experiment 20000436 PARAMETER Experiment Name: At_Drought_P Parameter: Plant Line Value: WS
  misc_feature: MA Experiment 20000436 PARAMETER Experiment Name: At_Drought_P Parameter: Timepoint (hr) Value: 12
  misc_feature: MA Experiment 20000436 PARAMETER Experiment Name: At_Drought_P Parameter: Tissue Value: Whole Plant
  misc_feature: MA Experiment 20000436 PARAMETER Experiment Name: At_Drought_P Parameter: Treatment Value: Drought vs. No Drought
  misc_feature: MA Experiment ID: 20000437 Result: Down-regulated in Transcription
  misc_feature: MA Experiment 20000437 PARAMETER Experiment Name: At_Drought_P Parameter: Age (day) Value: 8
  misc_feature: MA Experiment 20000437 PARAMETER Experiment Name: At_Drought_P Parameter: Organism Value: A. thaliana
  misc_feature: MA Experiment 20000437 PARAMETER Experiment Name: At_Drought_P Parameter: Plant Line Value: WS
  misc_feature: MA Experiment 20000437 PARAMETER Experiment Name: At_Drought_P Parameter: Timepoint (hr) Value: 24
  misc_feature: MA Experiment 20000437 PARAMETER Experiment Name: At_Drought_P Parameter: Tissue Value: Whole Plant
  misc_feature: MA Experiment 20000437 PARAMETER Experiment Name: At_Drought_P Parameter: Treatment Value: Drought vs. No Drought
  misc_feature: MA Experiment ID: 20000439 Result: Up-regulated in Transcription
  misc_feature: MA Experiment 20000439 PARAMETER Experiment Name: At_Roots__P Parameter: Age (day) Value: 14 vs. 21
  misc_feature: MA Experiment 20000439 PARAMETER Experiment Name: At_Roots__P Parameter: Organism Value: A. thaliana
  misc_feature: MA Experiment 20000439 PARAMETER Experiment Name: At_Roots__P Parameter: Tissue Value: Roots vs. Whole Plant
  misc_feature: MA Experiment ID: 20001248 Result: Down-regulated in Transcription
  misc_feature: MA Experiment 20001248 PARAMETER Experiment Name: At_Far-red-induction_P Parameter: Age (day) Value: 7
  misc_feature: MA Experiment 20001248 PARAMETER Experiment Name: At_Far-red-induction_P Parameter: Light Value: Far-red vs. White
  misc_feature: MA Experiment 20001248 PARAMETER Experiment Name: At_Far-red-induction_P Parameter: Organism Value: A. thaliana
  misc_feature: MA Experiment 20001248 PARAMETER Experiment Name: At_Far-red-induction_P Parameter: Plant Line Value: Columbia
  misc_feature: MA Experiment 20001248 PARAMETER Experiment Name: At_Far-red-induction_P Parameter: Timepoint (hr) Value: 4
  misc_feature: MA Experiment 20001248 PARAMETER Experiment Name: At_Far-red-induction_P Parameter: Tissue Value: Whole Plant
  misc_feature: MA Experiment ID: 20001450 Result: Down-regulated in Transcription
  misc_feature: MA Experiment 20001450 PARAMETER Experiment Name: At_Far-red-induction_P Parameter: Age (day) Value: 7
  misc_feature: MA Experiment 20001450 PARAMETER Experiment Name: At_Far-red-induction_P Parameter: Light Value: Far-red vs. White
  misc_feature: MA Experiment 20001450 PARAMETER Experiment Name: At_Far-red-induction_P Parameter: Organism Value: A. thaliana
  misc_feature: MA Experiment 20001450 PARAMETER Experiment Name: At_Far-red-induction_P Parameter: Plant Line Value: Columbia
  misc_feature: MA Experiment 20001450 PARAMETER Experiment Name: At_Far-red-induction_P Parameter: Timepoint (hr) Value: 8
  misc_feature: MA Experiment 20001450 PARAMETER Experiment Name: At_Far-red-induction_P Parameter: Tissue Value: Whole Plant
  misc_feature: MA Experiment ID: 20001555 Result: Down-regulated in Transcription
  misc_feature: MA Experiment 20001555 PARAMETER Experiment Name: At_Drought_Soil_Dry_P Parameter: Age (day) Value: 24
  misc_feature: MA Experiment 20001555 PARAMETER Experiment Name: At_Drought_Soil_Dry_P Parameter: Organism Value: A. thaliana
  misc_feature: MA Experiment 20001555 PARAMETER Experiment Name: At_Drought_Soil_Dry_P Parameter: Plant Line Value: WS
  misc_feature: MA Experiment 20001555 PARAMETER Experiment Name: At_Drought_Soil_Dry_P Parameter: Post Timepoint (hr) Value: None
  misc_feature: MA Experiment 20001555 PARAMETER Experiment Name: At_Drought_Soil_Dry_P Parameter: Post-Treatment Value: None
  misc_feature: MA Experiment 20001555 PARAMETER Experiment Name: At_Drought_Soil_Dry_P Parameter: Timepoint (day) Value: 10
  misc_feature: MA Experiment 20001555 PARAMETER Experiment Name: At_Drought_Soil_Dry_P Parameter: Treatment Value: Drought vs. No Drought
  misc_feature: MA Experiment ID: 20001768 Result: Down-regulated in Transcription
  misc_feature: MA Experiment 20001768 PARAMETER Experiment Name: At_Far-red-enriched-adult_P Parameter: Age (day) Value: 28
  misc_feature: MA Experiment 20001768 PARAMETER Experiment Name: At_Far-red-enriched-adult_P Parameter: Light Value: Far-red enriched vs. White
  misc_feature: MA Experiment 20001768 PARAMETER Experiment Name: At_Far-red-enriched-adult_P Parameter: Organism Value: A. thaliana
  misc_feature: MA Experiment 20001768 PARAMETER Experiment Name: At_Far-red-enriched-adult_P Parameter: Plant Line Value: Columbia
  misc_feature: MA Experiment 20001768 PARAMETER Experiment Name: At_Far-red-enriched-adult_P Parameter: Timepoint (hr) Value: 1
  misc_feature: MA Experiment 20001768 PARAMETER Experiment Name: At_Far-red-enriched-adult_P Parameter: Tissue Value: Aerial
aaacccagaccaaaaataatattctctcgattttttccagagcgtatattcaaattcttccaacaaaagtaaaaattaatctgattctctctactactactactactacgatgggtgagaaaaaggaagaaacggcgacgaaacctcaaggagagaagaaacctaccgatggtggaatcaccaccgtcgttatgaagcttgatatgcattgtgaaggttgcggcaaaaaaatcaaacgcatcttcaaacatttcaaaggtgtggaagatgtgaagattgattataagagtaacaaattgacggtgatcggaaacgtagatccagtggaagttcgtgataaagtggccgacaaaattaagagaccagtcgaacttgtctctacagtagcgccgccgaagaaagagacacctccttcatcaggcggtgcagagaagaagccttctccggcagcggaggagaaaccggctgagaagaaaccagccgccgttgagaaacccggtgagaaaaaagaagagaagaagaaagaggaaggagagaagaaagcttctcctccaccaccacctaaagagagtactgtggttttgaagaccaagttacattgtgaaggttgcgaacacaaaatcaaaagaatagtcaacaaaattaaaggggttaattcggttgctattgatagtgccaaggatttggttatagttaaggggatcattgacgtgaaacaactcactccttatcttaacgagaagcttaaacgcacggtggaagttgttccggccaaaaaggatgacggagcaccagtggcagctgcagcggcggctccagctggcggtgagaagaaggacaaagttgctggtgaaaagaaagagattaaagatgttggagaaaagaaagtcgacggtggtggtgagaagaagaaagaagttgctgttggcggcggtggaggaggagggggagggggaggagacggtggtgctatggatgtgaagaaatcggagtataacggttacggttatcctccacagccgatgtattactacccagaaggacaagtatacggtcaacaacattacatgatgcaaggtcaatcatcgcagtcgtatgtacaagaaccgtattcgaaccaaggatacgtgcaagaatcgtatatgaaccaaggttacggtcaagggtatggacaagaagcaccaccaccaccatatatgaaccaacaaggttacgcagatccttatggtcacatgcgtgcgcctgagttgtttagtgatgagaatccaaatgggtgttctgtgatgtgagtaaaacaaatggggaggaaaatgtaaataactaaaacaatatagggtgagaatgttagctatgacaaaaatggtatactacgaaagcacggaaacttccgagtccggtaatctaaaccggctggattggccggttagaaccggtttttgagaggcgtggattggttggttggtttatttcttttatataggtactataattttgtatcgtaatcatcttctgttttataanaaaaaaaaagaaaaaaaaaaaaaaaaaaaaactcgagggggggcccggt

SEQ ID NO: 50393 - protein, 428 aa, Arabidopsis thaliana
  peptide (1)..(428): Ceres Seq. ID no. 13647747
  misc_feature (62)..(124): Pfam Name: Heavy-metal-associated domain Pfam Description: Heavy-metal-associated domain
  misc_feature (39)..(162): Homolog of NCBI NO: 9758294 NR Description: contains similarity to ATFP3~gene_id:MLE2.16
  misc_feature (165)..(349): Homolog of NCBI NO: 9758294 NR Description: contains similarity to ATFP3~gene_id:MLE2.16
  misc_feature (404)..(428): Homolog of NCBI NO: 4097547 NR Description: ATFP3 [Arabidopsis thaliana]
  misc_feature (62)..(152): Homolog of NCBI NO: 4097547 NR Description: ATFP3 [Arabidopsis thaliana]
  misc_feature (159)..(349): Homolog of NCBI NO: 4097547 NR Description: ATFP3 [Arabidopsis thaliana]
  misc_feature (180)..(428): Homolog of NCBI NO: 4097545 NR Description: ATFP2 [Arabidopsis thaliana]
  misc_feature (37)..(343): Homolog of NCBI NO: 37534752 NR Description: putative metal-binding protein
  misc_feature (115)..(428): Homolog of NCBI NO: 25408515 NR Description: probable farnesylated protein [imported] -
  misc_feature (115)..(428): Homolog of NCBI NO: 18404283 NR Description: heavy-metal-associated domain-containing protein
  misc_feature (37)..(428): Homolog of NCBI NO: 15242741 NR Description: heavy-metal-associated domain-containing protein
TQTKNNILSIFSRAYIQILPTKVKINLILSTTTTTTMGEKKEETATKPQGEKKPTDGGITTVVMKLDMHCEGCGKKIKRIFKHFKGVEDVKIDYKSNKLTVIGNVDPVEVRDKVADKIKRPVELVSTVAPPKKETPPSSGGAEKKPSPAAEEKPAEKKPAAVEKPGEKKEEKKKEEGEKKASPPPPPKESTVVLKTKLHCEGCEHKIKRIVNKIKGVNSVAIDSAKDLVIVKGIIDVKQLTPYLNEKLKRTVEVVPAKKDDGAPVAAAAAAPAGGEKKDKVAGEKKEIKDVGEKKVDGGGEKKKEVAVGGGGGGGGGGGDGGAMDVKKSEYNGYGYPPQPMYYYPEGQVYGQQHYMMQGQSSQSYVQEPYSNQGYVQESYMNQGYGQGYGQEAPPPPYMNQQGYADPYGHMRAPELFSDENPNGCSVM

SEQ ID NO: 50394 - protein, 392 aa, Arabidopsis thaliana
  peptide (1)..(392): Ceres Seq. ID no. 13647748
  misc_feature (26)..(88): Pfam Name: Heavy-metal-associated domain Pfam Description: Heavy-metal-associated domain
  misc_feature (3)..(126): Homolog of NCBI NO: 9758294 NR Description: contains similarity to ATFP3~gene_id:MLE2.16
  misc_feature (129)..(313): Homolog of NCBI NO: 9758294 NR Description: contains similarity to ATFP3~gene_id:MLE2.16
  misc_feature (368)..(392): Homolog of NCBI NO: 4097547 NR Description: ATFP3 [Arabidopsis thaliana]
  misc_feature (26)..(116): Homolog of NCBI NO: 4097547 NR Description: ATFP3 [Arabidopsis thaliana]
  misc_feature (123)..(313): Homolog of NCBI NO: 4097547 NR Description: ATFP3 [Arabidopsis thaliana]
  misc_feature (144)..(392): Homolog of NCBI NO: 4097545 NR Description: ATFP2 [Arabidopsis thaliana]
  misc_feature (1)..(307): Homolog of NCBI NO: 37534752 NR Description: putative metal-binding protein
  misc_feature (79)..(392): Homolog of NCBI NO: 25408515 NR Description: probable farnesylated protein [imported] -
  misc_feature (79)..(392): Homolog of NCBI NO: 18404283 NR Description: heavy-metal-associated domain-containing protein
  misc_feature (1)..(392): Homolog of NCBI NO: 15242741 NR Description: heavy-metal-associated domain-containing protein
MGEKKEETATKPQGEKKPTDGGITTVVMKLDMHCEGCGKKIKRIFKHFKGVEDVKIDYKSNKLTVIGNVDPVEVRDKVADKIKRPVELVSTVAPPKKETPPSSGGAEKKPSPAAEEKPAEKKPAAVEKPGEKKEEKKKEEGEKKASPPPPPKESTVVLKTKLHCEGCEHKIKRIVNKIKGVNSVAIDSAKDLVIVKGIIDVKQLTPYLNEKLKRTVEVVPAKKDDGAPVAAAAAAPAGGEKKDKVAGEKKEIKDVGEKKVDGGGEKKKEVAVGGGGGGGGGGGDGGAMDVKKSEYNGYGYPPQPMYYYPEGQVYGQQHYMMQGQSSQSYVQEPYSNQGYVQESYMNQGYGQGYGQEAPPPPYMNQQGYADPYGHMRAPELFSDENPNGCSVM

SEQ ID NO: 50395 - protein, 365 aa, Arabidopsis thaliana
  peptide (1)..(365): Ceres Seq. ID no. 13647749
  misc_feature (1)..(61): Pfam Name: Heavy-metal-associated domain Pfam Description: Heavy-metal-associated domain
  misc_feature (1)..(99): Homolog of NCBI NO: 9758294 NR Description: contains similarity to ATFP3~gene_id:MLE2.16
  misc_feature (102)..(286): Homolog of NCBI NO: 9758294 NR Description: contains similarity to ATFP3~gene_id:MLE2.16
  misc_feature (341)..(365): Homolog of NCBI NO: 4097547 NR Description: ATFP3 [Arabidopsis thaliana]
  misc_feature (1)..(89): Homolog of NCBI NO: 4097547 NR Description: ATFP3 [Arabidopsis thaliana]
  misc_feature (96)..(286): Homolog of NCBI NO: 4097547 NR Description: ATFP3 [Arabidopsis thaliana]
  misc_feature (117)..(365): Homolog of NCBI NO: 4097545 NR Description: ATFP2 [Arabidopsis thaliana]
  misc_feature (1)..(280): Homolog of NCBI NO: 37534752 NR Description: putative metal-binding protein
  misc_feature (52)..(365): Homolog of NCBI NO: 25408515 NR Description: probable farnesylated protein [imported] -
  misc_feature (52)..(365): Homolog of NCBI NO: 18404283 NR Description: heavy-metal-associated domain-containing protein
  misc_feature (1)..(365): Homolog of NCBI NO: 15242741 NR Description: heavy-metal-associated domain-containing protein
MKLDMHCEGCGKKIKRIFKHFKGVEDVKIDYKSNKLTVIGNVDPVEVRDKVADKIKRPVELVSTVAPPKKETPPSSGGAEKKPSPAAEEKPAEKKPAAVEKPGEKKEEKKKEEGEKKASPPPPPKESTVVLKTKLHCEGCEHKIKRIVNKIKGVNSVAIDSAKDLVIVKGIIDVKQLTPYLNEKLKRTVEVVPAKKDDGAPVAAAAAAPAGGEKKDKVAGEKKEIKDVGEKKVDGGGEKKKEVAVGGGGGGGGGGGDGGAMDVKKSEYNGYGYPPQPMYYYPEGQVYGQQHYMMQGQSSQSYVQEPYSNQGYVQESYMNQGYGQGYGQEAPPPPYMNQQGYADPYGHMRAPELFSDENPNGCSVM

SEQ ID NO: 50396 - DNA, 664 bp, Arabidopsis thaliana
  misc_feature (1)..(664): Ceres Seq. ID no. 12602318
  misc_feature: MA Experiment ID: 20000185 Result: Down-regulated in Transcription
  misc_feature: MA Experiment 20000185 PARAMETER Experiment Name: At_Roots__P Parameter: Age (day) Value: 7 vs. 21
  misc_feature: MA Experiment 20000185 PARAMETER Experiment Name: At_Roots__P Parameter: Organism Value: A. thaliana
  misc_feature: MA Experiment 20000185 PARAMETER Experiment Name: At_Roots__P Parameter: Tissue Value: Roots vs. Whole Plant
  misc_feature: MA Experiment ID: 20000227 Result: Down-regulated in Transcription
  misc_feature: MA Experiment 20000227 PARAMETER Experiment Name: At_Root-Tips-vs-Tops_P Parameter: Tissue Value: Root Tips vs. Root Tops
  misc_feature: MA Experiment ID: 20000264 Result: Up-regulated in Transcription
  misc_feature: MA Experiment 20000264 PARAMETER Experiment Name: At_Open_Flower_P Parameter: Age (day) Value: 21
  misc_feature: MA Experiment 20000264 PARAMETER Experiment Name: At_Open_Flower_P Parameter: Plant Line Value: WS
  misc_feature: MA Experiment 20000264 PARAMETER Experiment Name: At_Open_Flower_P Parameter: Tissue Value: Open Flower vs. Whole Plant
  misc_feature: MA Experiment ID: 20000286 Result: Up-regulated in Transcription
  misc_feature: MA Experiment 20000286 PARAMETER Experiment Name: At_Open_Flower_P Parameter: Age (day) Value: 21
  misc_feature: MA Experiment 20000286 PARAMETER Experiment Name: At_Open_Flower_P Parameter: Plant Line Value: WS
  misc_feature: MA Experiment 20000286 PARAMETER Experiment Name: At_Open_Flower_P Parameter: Tissue Value: Half Open vs. Whole Plant
  misc_feature: MA Experiment ID: 20000451 Result: Up-regulated in Transcription
  misc_feature: MA Experiment 20000451 PARAMETER Experiment Name: At_CS6879_Shoots-Roots_P Parameter: Age (day) Value: 14
  misc_feature: MA Experiment 20000451 PARAMETER Experiment Name: At_CS6879_Shoots-Roots_P Parameter: Organism Value: A. thaliana
  misc_feature: MA Experiment 20000451 PARAMETER Experiment Name: At_CS6879_Shoots-Roots_P Parameter: Plant Line Value: CS6879 vs. WS
  misc_feature: MA Experiment 20000451 PARAMETER Experiment Name: At_CS6879_Shoots-Roots_P Parameter: Tissue Value: Roots
  misc_feature: MA Experiment ID: 20000495 Result: Down-regulated in Transcription
  misc_feature: MA Experiment 20000495 PARAMETER Experiment Name: At_Guard_Cells_P Parameter: Harvest Date Value: 8/2/2002
  misc_feature: MA Experiment 20000495 PARAMETER Experiment Name: At_Guard_Cells_P Parameter: Organism Value: A. thaliana
  misc_feature: MA Experiment 20000495 PARAMETER Experiment Name: At_Guard_Cells_P Parameter: Tissue Value: Guard Cells vs. Leaves
  misc_feature: MA Experiment ID: 20000794 Result: Up-regulated in Transcription
  misc_feature: MA Experiment 20000794 PARAMETER Experiment Name: At_Petals_P Parameter: Age (day) Value: 23-25 days
  misc_feature: MA Experiment 20000794 PARAMETER Experiment Name: At_Petals_P Parameter: Plant Line Value: WS
  misc_feature: MA Experiment 20000794 PARAMETER Experiment Name: At_Petals_P Parameter: Tissue Value: Petals vs. Whole plant
  misc_feature: MA Experiment ID: 20001451 Result: Down-regulated in Transcription
  misc_feature: MA Experiment 20001451 PARAMETER Experiment Name: At_Far-red-induction_P Parameter: Age (day) Value: 7
  misc_feature: MA Experiment 20001451 PARAMETER Experiment Name: At_Far-red-induction_P Parameter: Light Value: Far-red vs. White
  misc_feature: MA Experiment 20001451 PARAMETER Experiment Name: At_Far-red-induction_P Parameter: Organism Value: A. thaliana
  misc_feature: MA Experiment 20001451 PARAMETER Experiment Name: At_Far-red-induction_P Parameter: Plant Line Value: Columbia
  misc_feature: MA Experiment 20001451 PARAMETER Experiment Name: At_Far-red-induction_P Parameter: Timepoint (hr) Value: 24
  misc_feature: MA Experiment 20001451 PARAMETER Experiment Name: At_Far-red-induction_P Parameter: Tissue Value: Whole Plant
aacttacaagcaaaatggacaaaagatggagtctcaaaggtatgactgctcttgtgaccggtggagccagtggaatcggttatgccatagtagaagagttggctggttttggagctagaatccatgtatgtgacatctctgaagctaagctcaatcaaagtttaagcgaatgggaaaagaaaggttttcaagtaagtggctcagtttgtgatgtagcctctcgtcccgagagagaagaactgatgcaaaccgtctcctcgcagttcgatggcaaactcaacattcttgtaagcaatgtgggcgtaatccgctcaaagccaacaacagaatataccgaagacgatttcgcttttcatatatcatcaaacgtggaagctgcttaccattttagccagctttcacatcctctcctaaaggcttcaggctatggaagcatcatctttgtttcctctattgcaggggttatatcttttgacgctggatccatttatggtctaacaaaaggagctttgattcagctagctaaaaatttggcatgtgaatgggcaaaagacggcataagagccaacgctgttgcgcctaatgtcatcaatactcctctgtctcatcttatcttgaggacgtcagtttcaagaggcattgttgagtaggactccacttggtc

SEQ ID NO: 50397 - protein, 215 aa, Arabidopsis thaliana
  peptide (1)..(215): Ceres Seq. ID no. 12602319
  misc_feature (3)..(204): Homolog of NCBI NO: 15222399 NR Description: tropinone reductase-I, putative
  misc_feature (5)..(201): Homolog of NCBI NO: 15224550 NR Description: putative tropinone reductase; protein id:
  misc_feature (5)..(201): Homolog of NCBI NO: 15227073 NR Description: putative tropinone reductase; protein id:
  misc_feature (5)..(205): Homolog of NCBI NO: 15227071 NR Description: putative tropinone reductase; protein id:
  misc_feature (5)..(214): Homolog of NCBI NO: 21553753 NR Description: putative tropinone reductase [Arabidopsis
  misc_feature (5)..(214): Homolog of NCBI NO: 15529236 NR Description: At2g29320/F16P2.30 [Arabidopsis thaliana]
  misc_feature (1)..(214): Homolog of NCBI NO: 15227072 NR Description: putative tropinone reductase
  misc_feature (5)..(211): Homolog of NCBI NO: 15227070 NR Description: putative tropinone reductase
  misc_feature (5)..(205): Homolog of NCBI NO: 30684202 NR Description: short-chain dehydrogenase/reductase family
  misc_feature (5)..(205): Homolog of NCBI NO: 18402017 NR Description: putative tropinone reductase
LTSKMDKRWSLKGMTALVTGGASGIGYAIVEELAGFGARIHVCDISEAKLNQSLSEWEKKGFQVSGSVCDVASRPEREELMQTVSSQFDGKLNILVSNVGVIRSKPTTEYTEDDFAFHISSNVEAAYHFSQLSHPLLKASGYGSIIFVSSIAGVISFDAGSIYGLTKGALIQLAKNLACEWAKDGIRANAVAPNVINTPLSHLILRTSVSRGIVE

SEQ ID NO: 50398 - protein, 211 aa, Arabidopsis thaliana
  peptide (1)..(211): Ceres Seq. ID no. 12602320
  misc_feature (1)..(200): Homolog of NCBI NO: 15222399 NR Description: tropinone reductase-I, putative
  misc_feature (1)..(197): Homolog of NCBI NO: 15224550 NR Description: putative tropinone reductase; protein id:
  misc_feature (1)..(197): Homolog of NCBI NO: 15227073 NR Description: putative tropinone reductase; protein id:
  misc_feature (1)..(201): Homolog of NCBI NO: 15227071 NR Description: putative tropinone reductase; protein id:
  misc_feature (1)..(210): Homolog of NCBI NO: 21553753 NR Description: putative tropinone reductase [Arabidopsis
  misc_feature (1)..(210): Homolog of NCBI NO: 15529236 NR Description: At2g29320/F16P2.30 [Arabidopsis thaliana]
  misc_feature (1)..(210): Homolog of NCBI NO: 15227072 NR Description: putative tropinone reductase
  misc_feature (1)..(207): Homolog of NCBI NO: 15227070 NR Description: putative tropinone reductase
  misc_feature (1)..(201): Homolog of NCBI NO: 30684202 NR Description: short-chain dehydrogenase/reductase family
  misc_feature (1)..(201): Homolog of NCBI NO: 18402017 NR Description: putative tropinone reductase
MDKRWSLKGMTALVTGGASGIGYAIVEELAGFGARIHVCDISEAKLNQSLSEWEKKGFQVSGSVCDVASRPEREELMQTVSSQFDGKLNILVSNVGVIRSKPTTEYTEDDFAFHISSNVEAAYHFSQLSHPLLKASGYGSIIFVSSIAGVISFDAGSIYGLTKGALIQLAKNLACEWAKDGIRANAVAPNVINTPLSHLILRTSVSRGIVE

SEQ ID NO: 50399 - protein, 202 aa, Arabidopsis thaliana
  peptide (1)..(202): Ceres Seq. ID no. 12602321
  misc_feature (1)..(191): Homolog of NCBI NO: 15222399 NR Description: tropinone reductase-I, putative
  misc_feature (1)..(188): Homolog of NCBI NO: 15224550 NR Description: putative tropinone reductase; protein id:
  misc_feature (1)..(188): Homolog of NCBI NO: 15227073 NR Description: putative tropinone reductase; protein id:
  misc_feature (1)..(192): Homolog of NCBI NO: 15227071 NR Description: putative tropinone reductase; protein id:
  misc_feature (1)..(201): Homolog of NCBI NO: 21553753 NR Description: putative tropinone reductase [Arabidopsis
  misc_feature (1)..(201): Homolog of NCBI NO: 15529236 NR Description: At2g29320/F16P2.30 [Arabidopsis thaliana]
  misc_feature (1)..(201): Homolog of NCBI NO: 15227072 NR Description: putative tropinone reductase
  misc_feature (1)..(198): Homolog of NCBI NO: 15227070 NR Description: putative tropinone reductase
  misc_feature (1)..(192): Homolog of NCBI NO: 30684202 NR Description: short-chain dehydrogenase/reductase family
  misc_feature (1)..(192): Homolog of NCBI NO: 18402017 NR Description: putative tropinone reductase
MTALVTGGASGIGYAIVEELAGFGARIHVCDISEAKLNQSLSEWEKKGFQVSGSVCDVASRPEREELMQTVSSQFDGKLNILVSNVGVIRSKPTTEYTEDDFAFHISSNVEAAYHFSQLSHPLLKASGYGSIIFVSSIAGVISFDAGSIYGLTKGALIQLAKNLACEWAKDGIRANAVAPNVINTPLSHLILRTSVSRGIVE

SEQ ID NO: 50400 - DNA, 1041 bp, Arabidopsis thaliana
  misc_feature (1)..(1041): Ceres Seq. ID no. 12591497
  misc_feature: MA Experiment ID: 20000307 Result: Up-regulated in Transcription
  misc_feature: MA Experiment 20000307 PARAMETER Experiment Name: At_Germinating_Seeds_Sub_P Parameter: Age (hr) Value: 24 vs. 0
  misc_feature: MA Experiment 20000307 PARAMETER Experiment Name: At_Germinating_Seeds_Sub_P Parameter: Organism Value: A. thaliana
  misc_feature: MA Experiment 20000307 PARAMETER Experiment Name: At_Germinating_Seeds_Sub_P Parameter: Plant Line Value: WS
  misc_feature: MA Experiment 20000307 PARAMETER Experiment Name: At_Germinating_Seeds_Sub_P Parameter: Tissue Value: Germinating Seeds
  misc_feature: MA Experiment ID: 20000314 Result: Up-regulated in Transcription
  misc_feature: MA Experiment 20000314 PARAMETER Experiment Name: At_14day_Shoots-Roots_Sub_P Parameter: Age (day) Value: 14
  misc_feature: MA Experiment 20000314 PARAMETER Experiment Name: At_14day_Shoots-Roots_Sub_P Parameter: Organism Value: A. thaliana
  misc_feature: MA Experiment 20000314 PARAMETER Experiment Name: At_14day_Shoots-Roots_Sub_P Parameter: Plant Line Value: WS
  misc_feature: MA Experiment 20000314 PARAMETER Experiment Name: At_14day_Shoots-Roots_Sub_P Parameter: Tissue Value: Roots vs. Whole Plant
  misc_feature: MA Experiment ID: 20000315 Result: Down-regulated in Transcription
  misc_feature: MA Experiment 20000315 PARAMETER Experiment Name: At_14day_Shoots-Roots_Sub_P Parameter: Age (day) Value: 14
  misc_feature: MA Experiment 20000315 PARAMETER Experiment Name: At_14day_Shoots-Roots_Sub_P Parameter: Organism Value: A. thaliana
  misc_feature: MA Experiment 20000315 PARAMETER Experiment Name: At_14day_Shoots-Roots_Sub_P Parameter: Plant Line Value: WS
  misc_feature: MA Experiment 20000315 PARAMETER Experiment Name: At_14day_Shoots-Roots_Sub_P Parameter: Tissue Value: Shoots vs. Whole Plant
  misc_feature: MA Experiment ID: 20000347 Result: Up-regulated in Transcription
  misc_feature: MA Experiment 20000347 PARAMETER Experiment Name: At_2mM_SA_Sub_P Parameter: Age (day) Value: 14
  misc_feature: MA Experiment 20000347 PARAMETER Experiment Name: At_2mM_SA_Sub_P Parameter: Organism Value: A. thaliana
  misc_feature: MA Experiment 20000347 PARAMETER Experiment Name: At_2mM_SA_Sub_P Parameter: Plant Line Value: WS
  misc_feature: MA Experiment 20000347 PARAMETER Experiment Name: At_2mM_SA_Sub_P Parameter: Timepoint (hr) Value: 6
  misc_feature: MA Experiment 20000347 PARAMETER Experiment Name: At_2mM_SA_Sub_P Parameter: Tissue Value: Aerial
  misc_feature: MA Experiment 20000347 PARAMETER Experiment Name: At_2mM_SA_Sub_P Parameter: Treatment Value: 2mM SA vs. No Treatment
  misc_feature: MA Experiment ID: 20000348 Result: Up-regulated in Transcription
  misc_feature: MA Experiment 20000348 PARAMETER Experiment Name: At_100uM_ABA_Sub_P Parameter: Age (day) Value: 14
  misc_feature: MA Experiment 20000348 PARAMETER Experiment Name: At_100uM_ABA_Sub_P Parameter: Organism Value: A. thaliana
  misc_feature: MA Experiment 20000348 PARAMETER Experiment Name: At_100uM_ABA_Sub_P Parameter: Plant Line Value: WS
  misc_feature: MA Experiment 20000348 PARAMETER Experiment Name: At_100uM_ABA_Sub_P Parameter: Timepoint (hr) Value: 1
  misc_feature: MA Experiment 20000348 PARAMETER Experiment Name: At_100uM_ABA_Sub_P Parameter: Tissue Value: Aerial
  misc_feature: MA Experiment 20000348 PARAMETER Experiment Name: At_100uM_ABA_Sub_P Parameter: Treatment Value: 100uM ABA vs. No Treatment
  misc_feature: MA Experiment ID: 20000355 Result: Down-regulated in Transcription
  misc_feature: MA Experiment 20000355 PARAMETER Experiment Name: At_Siliques_Sub_P Parameter: Age (day) Value: 21
  misc_feature: MA Experiment 20000355 PARAMETER Experiment Name: At_Siliques_Sub_P Parameter: Organism Value: A. thaliana
  misc_feature: MA Experiment 20000355 PARAMETER Experiment Name: At_Siliques_Sub_P Parameter: Plant Line Value: WS
  misc_feature: MA Experiment 20000355 PARAMETER Experiment Name: At_Siliques_Sub_P Parameter: Tissue Value: Less Than 5mm Siliques vs. Whole Plant
atggcgatcaagacaaagactagtctaattccaagttgttcatcacctgaggatctaaaacgcgttttgcaaacgctaggttcgagctggggagatgtagttgaagatctggagcgtcttgaggttgttccgttaaaaggagctatgactaacgaggtttatcagattaattggcctactttaaacggtgaagatgttcatcggaaagttcttgttcggatctacggtgacggcgttgaccttttctttaacagaggtgatgaaatcaaaacgtttgagtgtatgtctcatcatggttatggtcctaagcttcttggtcgtttctctgatggtcgtcttgaagaattcatacacgccagaactctttctgcagatgatcttcgtgtagcagaaacatctgatttcatcgctgcgaagctaagagagtttcataagcttgatatgcctggtccaaagaacgttcttctctgggaaagacttaggacttggcttaaggaggctaagaacttggcttcacctatagagatggataagtatcggttggaaggtttggaaaatgaaatcaatttgttggaagagagacttactcgggatgatcaagagattggtttctgtcacaacgatcttcagtatggaaatgtcatgattgatgaagtaaccaatgccattaccatcatagactatgagtattcgagtttcaacccaattgcttatgacattgcaaaccacttttgtgagatggctgctaattaccattcagacactcctcatgttctggactacactctatatccaggagaaggagaaaggagaaggttcattagcacatatcttggctctacagggaatgcaacaagtgataaagaagtagagaggttattgaaagatgcagagagctacactttagcaaaccatatcttctggggactatggggaatcatctcgggacatgtgaacaagattgagttcgattacatggaatatgcaaggcagagatttgaacagtactggcttagaaagcctttgcttcttgaaggatga

SEQ ID NO: 50401 - protein, 346 aa, Arabidopsis thaliana
  peptide (1)..(346): Ceres Seq. ID no. 12591498
  misc_feature (66)..(338): Pfam Name: Choline/ethanolamine kinase Pfam Description: Choline/ethanolamine kinase
  misc_feature (16)..(344): Homolog of NCBI NO: 25348157 NR Description: protein choline kinase F1O17.1 [imported] -
  misc_feature (16)..(344): Homolog of NCBI NO: 22330627 NR Description: putative choline kinase
  misc_feature (16)..(344): Homolog of NCBI NO: 7488654 NR Description: choline kinase (EC 2.7.1.32) CK3 - soybean
  misc_feature (1)..(345): Homolog of NCBI NO: 7488652 NR Description: choline kinase (EC 2.7.1.32) CK1 - soybean
  misc_feature (1)..(345): Homolog of NCBI NO: 7488653 NR Description: choline kinase (EC 2.7.1.32) CK2 - soybean
  misc_feature (9)..(344): Homolog of NCBI NO: 21594823 NR Description: choline kinase GmCK2p-like protein [Arabidopsis
  misc_feature (9)..(344): Homolog of NCBI NO: 21537276 NR Description: choline kinase GmCK2p-like protein [Arabidopsis
  misc_feature (9)..(344): Homolog of NCBI NO: 15234032 NR Description: choline kinase GmCK2p -like protein
  misc_feature (1)..(346): Homolog of NCBI NO: 12323732 NR Description: putative choline kinase; 4535-2895 [Arabidopsis
  misc_feature (1)..(346): Homolog of NCBI NO: 15217543 NR Description: choline kinase, putative; protein id: At1g71697.1
MAIKTKTSLIPSCSSPEDLKRVLQTLGSSWGDVVEDLERLEVVPLKGAMTNEVYQINWPTLNGEDVHRKVLVRIYGDGVDLFFNRGDEIKTFECMSHHGYGPKLLGRFSDGRLEEFIHARTLSADDLRVAETSDFIAAKLREFHKLDMPGPKNVLLWERLRTWLKEAKNLASPIEMDKYRLEGLENEINLLEERLTRDDQEIGFCHNDLQYGNVMIDEVTNAITIIDYEYSSFNPIAYDIANHFCEMAANYHSDTPHVLDYTLYPGEGERRRFISTYLGSTGNATSDKEVERLLKDAESYTLANHIFWGLWGIISGHVNKIEFDYMEYARQRFEQYWLRKPLLLEG

SEQ ID NO: 50402 - protein, 298 aa, Arabidopsis thaliana
  peptide (1)..(298): Ceres Seq. ID no. 12591499
  misc_feature (18)..(290): Pfam Name: Choline/ethanolamine kinase Pfam Description: Choline/ethanolamine kinase
  misc_feature (1)..(296): Homolog of NCBI NO: 25348157 NR Description: protein choline kinase F1O17.1 [imported] -
  misc_feature (1)..(296): Homolog of NCBI NO: 22330627 NR Description: putative choline kinase
  misc_feature (1)..(296): Homolog of NCBI NO: 7488654 NR Description: choline kinase (EC 2.7.1.32) CK3 - soybean
  misc_feature (1)..(297): Homolog of NCBI NO: 7488652 NR Description: choline kinase (EC 2.7.1.32) CK1 - soybean
  misc_feature (1)..(297): Homolog of NCBI NO: 7488653 NR Description: choline kinase (EC 2.7.1.32) CK2 - soybean
  misc_feature (1)..(296): Homolog of NCBI NO: 21594823 NR Description: choline kinase GmCK2p-like protein [Arabidopsis
  misc_feature (1)..(296): Homolog of NCBI NO: 21537276 NR Description: choline kinase GmCK2p-like protein [Arabidopsis
  misc_feature (1)..(296): Homolog of NCBI NO: 15234032 NR Description: choline kinase GmCK2p -like protein
  misc_feature (1)..(298): Homolog of NCBI NO: 12323732 NR Description: putative choline kinase; 4535-2895 [Arabidopsis
  misc_feature (1)..(298): Homolog of NCBI NO: 15217543 NR Description: choline kinase, putative; protein id: At1g71697.1
MTNEVYQINWPTLNGEDVHRKVLVRIYGDGVDLFFNRGDEIKTFECMSHHGYGPKLLGRFSDGRLEEFIHARTLSADDLRVAETSDFIAAKLREFHKLDMPGPKNVLLWERLRTWLKEAKNLASPIEMDKYRLEGLENEINLLEERLTRDDQEIGFCHNDLQYGNVMIDEVTNAITIIDYEYSSFNPIAYDIANHFCEMAANYHSDTPHVLDYTLYPGEGERRRFISTYLGSTGNATSDKEVERLLKDAESYTLANHIFWGLWGIISGHVNKIEFDYMEYARQRFEQYWLRKPLLLEG

SEQ ID NO: 50403 - protein, 252 aa, Arabidopsis thaliana
  peptide (1)..(252): Ceres Seq. ID no. 12591500
  misc_feature (1)..(244): Pfam Name: Choline/ethanolamine kinase Pfam Description: Choline/ethanolamine kinase
  misc_feature (1)..(250): Homolog of NCBI NO: 25348157 NR Description: protein choline kinase F1O17.1 [imported] -
  misc_feature (1)..(250): Homolog of NCBI NO: 22330627 NR Description: putative choline kinase
  misc_feature (1)..(250): Homolog of NCBI NO: 7488654 NR Description: choline kinase (EC 2.7.1.32) CK3 - soybean
  misc_feature (1)..(251): Homolog of NCBI NO: 7488652 NR Description: choline kinase (EC 2.7.1.32) CK1 - soybean
  misc_feature (1)..(251): Homolog of NCBI NO: 7488653 NR Description: choline kinase (EC 2.7.1.32) CK2 - soybean
  misc_feature (1)..(250): Homolog of NCBI NO: 21594823 NR Description: choline kinase GmCK2p-like protein [Arabidopsis
  misc_feature (1)..(250): Homolog of NCBI NO: 21537276 NR Description: choline kinase GmCK2p-like protein [Arabidopsis
  misc_feature (1)..(250): Homolog of NCBI NO: 15234032 NR Description: choline kinase GmCK2p -like protein
  misc_feature (1)..(252): Homolog of NCBI NO: 12323732 NR Description: putative choline kinase; 4535-2895 [Arabidopsis
  misc_feature (1)..(252): Homolog of NCBI NO: 15217543 NR Description: choline kinase, putative; protein id: At1g71697.1
MSHHGYGPKLLGRFSDGRLEEFIHARTLSADDLRVAETSDFIAAKLREFHKLDMPGPKNVLLWERLRTWLKEAKNLASPIEMDKYRLEGLENEINLLEERLTRDDQEIGFCHNDLQYGNVMIDEVTNAITIIDYEYSSFNPIAYDIANHFCEMAANYHSDTPHVLDYTLYPGEGERRRFISTYLGSTGNATSDKEVERLLKDAESYTLANHIFWGLWGIISGHVNKIEFDYMEYARQRFEQYWLRKPLLLEG

SEQ ID NO: 50404 - DNA, 1970 bp, Arabidopsis thaliana
  misc_feature (1)..(1970): Ceres Seq. ID no. 13588950
  misc_feature: MA Experiment ID: 20000173 Result: Down-regulated in Transcription
  misc_feature: MA Experiment 20000173 PARAMETER Experiment Name: At_42deg_Heat_P Parameter: Age (day) Value: 14
  misc_feature: MA Experiment 20000173 PARAMETER Experiment Name: At_42deg_Heat_P Parameter: Organism Value: A. thaliana
  misc_feature: MA Experiment 20000173 PARAMETER Experiment Name: At_42deg_Heat_P Parameter: Plant Line Value: WS
  misc_feature: MA Experiment 20000173 PARAMETER Experiment Name: At_42deg_Heat_P Parameter: Temperature (deg C) Value: 42 vs. 22
  misc_feature: MA Experiment 20000173 PARAMETER Experiment Name: At_42deg_Heat_P Parameter: Timepoint (hr) Value: 6
  misc_feature: MA Experiment 20000173 PARAMETER Experiment Name: At_42deg_Heat_P Parameter: Tissue Value: Aerial
  misc_feature: MA Experiment ID: 20000184 Result: Down-regulated in Transcription
  misc_feature: MA Experiment 20000184 PARAMETER Experiment Name: At_Shoots__P Parameter: Age (day) Value: 7
  misc_feature: MA Experiment 20000184 PARAMETER Experiment Name: At_Shoots__P Parameter: Tissue Value: Shoots vs. Whole Plant
  misc_feature: MA Experiment ID: 20000573 Result: Up-regulated in Transcription
  misc_feature: MA Experiment 20000573 PARAMETER Experiment Name: At_100uM_ABA_Mutants__P Parameter: Organism Value: A. thaliana
  misc_feature: MA Experiment 20000573 PARAMETER Experiment Name: At_100uM_ABA_Mutants__P Parameter: Plant Line Value: CS22 vs. Ler wt
  misc_feature: MA Experiment 20000573 PARAMETER Experiment Name: At_100uM_ABA_Mutants__P Parameter: Timepoint (hr) Value: N/A
  misc_feature: MA Experiment 20000573 PARAMETER Experiment Name: At_100uM_ABA_Mutants__P Parameter: Tissue Value: Whole Plant
  misc_feature: MA Experiment 20000573 PARAMETER Experiment Name: At_100uM_ABA_Mutants__P Parameter: Treatment Value: None
  misc_feature: MA Experiment ID: 20000574 Result: Up-regulated in Transcription
  misc_feature: MA Experiment 20000574 PARAMETER Experiment Name: At_100uM_ABA_Mutants__P Parameter: Organism Value: A. thaliana
  misc_feature: MA Experiment 20000574 PARAMETER Experiment Name: At_100uM_ABA_Mutants__P Parameter: Plant Line Value: CS23 vs. Ler wt
  misc_feature: MA Experiment 20000574 PARAMETER Experiment Name: At_100uM_ABA_Mutants__P Parameter: Timepoint (hr) Value: N/A
  misc_feature: MA Experiment 20000574 PARAMETER Experiment Name: At_100uM_ABA_Mutants__P Parameter: Tissue Value: Whole Plant
  misc_feature: MA Experiment 20000574 PARAMETER Experiment Name: At_100uM_ABA_Mutants__P Parameter: Treatment Value: None
  misc_feature: MA Experiment ID: 20001451 Result: Down-regulated in Transcription
  misc_feature: MA Experiment 20001451 PARAMETER Experiment Name: At_Far-red-induction_P Parameter: Age (day) Value: 7
  misc_feature: MA Experiment 20001451 PARAMETER Experiment Name: At_Far-red-induction_P Parameter: Light Value: Far-red vs. White
  misc_feature: MA Experiment 20001451 PARAMETER Experiment Name: At_Far-red-induction_P Parameter: Organism Value: A. thaliana
  misc_feature: MA Experiment 20001451 PARAMETER Experiment Name: At_Far-red-induction_P Parameter: Plant Line Value: Columbia
  misc_feature: MA Experiment 20001451 PARAMETER Experiment Name: At_Far-red-induction_P Parameter: Timepoint (hr) Value: 24
  misc_feature: MA Experiment 20001451 PARAMETER Experiment Name: At_Far-red-induction_P Parameter: Tissue Value: Whole Plant
atgggttgtgaggtttcaaagttatctgcactttgttgtgtttcagagtctggaagatcgaatcctgatgttacaggcttagatgaggaagggagaggtgaatcgaatgatttgcctcaatttcgtgagttctctatagagactataaggaacgcaacttcaggatttgcagcagagaatatagtttcagagcatggtgagagagctcctaatgttgtctataaaggcaagcttgagaatcaaagacgtattgctgtcaaaaggtttaaccggaaatcttggcctgattctcgtcaattcttggaagaagccaaagctgttggtcaattacggaatcataggatggcaaatctacttgggtgttgttatgaagatgaagagagactacttattgcagagtttatgcctaatgaaactttggcaaaacatcttttccactgggagtcacagccaatgaagtgggcgatgcgactgagagtagctttgcatattgctcaggcgctagagtattgtaccagcaaaggacgtgcactttaccatgacctaaatgcttatagagttctctttgatgatgatgcaaatccaagactttcatgctttggtttgatgaaaaacagtagagatggaaagagttatagcactaacctggcattcactcctcccgagtatctgaggacaggtcgcgtgacacctgaaagtgtaatatacagctttggaactctattacttgaccttctgagtggaaagcatatacctccaagccatgcgttggacctcatacgggacaggaacattcagatgctgatggattcaggtttggaaggtcaattttcgagtgacgatggaactgaattaataaggttagcttcaagatgcttgcaatatgaaccccgagagcggcctaacccaaaatctttagtctctgcaatgattcctcttcagaaagatcttgagattgcttctcatcaattgttgggcgtacctaacagtgccacaacgacagctctttcacctcttggcgaagcatgcctaagatcagatctaactgccatacatgagatcattgagaagcttggatataaggatgacgagggtgcaaccacagagctttctttccagatgtggaccgaccagatgcaggacacattggtcttcaagaaaaagggggattctgcattccgacataaagactttgcaaaggccatcgaatgctattctcagttcatcgaggtaggtacaatgggttccccaactgttcatgcaagacagagtctgtgttacctaatgaatgatatgcctagagaagcactaaacaatgcaatgcaagcacaagtcatatctcctgcttggcatatcgcatcgtatctccaagctgtagctttgtcagctctaggacaagagaacgaagcacacactgctctaaaagacggtgcaatgcttgaaagcaaaagaaaccctttgtgattataagcaacacaaagaggagaaactggagtacaagagaaatataaccatcctttacgctaacccatacacccgaagaaccactgtcgcaacattgtatttaagatcaaagcataacaagtctacagcgattgttcctttccgaagccttgatcatcacatcacattactggttagtctggtttttatttcagtttagtgctccattttgcaagatccgcggttcaagccactgtgattattcgattacagcgagtggactgtgtttattgttgttgtttaagttcaatggtgcagacgtgtttcgtatcatagagaagaaaagaagtgtctatggagatatgatgacaaaacttaaaaatgtatgattgtgacattgtgtattattcgctttaatgtaattcaatgtttgtattattgtatagaatgaagtatgaacctctctctgctataatgttattcccctccttttttttcttgaattttgcaaatgttgaaacgcttat

SEQ ID NO: 50405 - protein, 487 aa, Arabidopsis thaliana
  peptide (1)..(487): Ceres Seq. ID no. 13588951
  misc_feature (1)..(485): Homolog of NCBI NO: 21553556 NR Description: protein kinase-like protein [Arabidopsis thaliana]
  misc_feature (1)..(485): Homolog of NCBI NO: 15232406 NR Description: protein kinase family [Arabidopsis thaliana]
  misc_feature (1)..(485): Homolog of NCBI NO: 22327962 NR Description: protein kinase - related [Arabidopsis thaliana]
  misc_feature (1)..(485): Homolog of NCBI NO: 22328189 NR Description: protein kinase family [Arabidopsis thaliana]
  misc_feature (105)..(487): Homolog of NCBI NO: 15222446 NR Description: protein kinase - related [Arabidopsis thaliana]
  misc_feature (1)..(30): Homolog of NCBI NO: 6633851 NR Description: F2K11.13 [Arabidopsis thaliana]
  misc_feature (27)..(101): Homolog of NCBI NO: 6633851 NR Description: F2K11.13 [Arabidopsis thaliana]
  misc_feature (328)..(487): Homolog of NCBI NO: 6633851 NR Description: F2K11.13 [Arabidopsis thaliana]
  misc_feature (100)..(325): Homolog of NCBI NO: 6633851 NR Description: F2K11.13 [Arabidopsis thaliana]
  misc_feature (1)..(487): Homolog of NCBI NO: 15237604 NR Description: protein kinase family [Arabidopsis thaliana]
MGCEVSKLSALCCVSESGRSNPDVTGLDEEGRGESNDLPQFREFSIETIRNATSGFAAENIVSEHGERAPNVVYKGKLENQRRIAVKRFNRKSWPDSRQFLEEAKAVGQLRNHRMANLLGCCYEDEERLLIAEFMPNETLAKHLFHWESQPMKWAMRLRVALHIAQALEYCTSKGRALYHDLNAYRVLFDDDANPRLSCFGLMKNSRDGKSYSTNLAFTPPEYLRTGRVTPESVIYSFGTLLLDLLSGKHIPPSHALDLIRDRNIQMLMDSGLEGQFSSDDGTELIRLASRCLQYEPRERPNPKSLVSAMIPLQKDLEIASHQLLGVPNSATTTALSPLGEACLRSDLTAIHEIIEKLGYKDDEGATTELSFQMWTDQMQDTLVFKKKGDSAFRHKDFAKAIECYSQFIEVGTMGSPTVHARQSLCYLMNDMPREALNNAMQAQVISPAWHIASYLQAVALSALGQENEAHTALKDGAMLESKRNPL

SEQ ID NO: 50406 - protein, 373 aa, Arabidopsis thaliana
  peptide (1)..(373): Ceres Seq. ID no. 13588952
  misc_feature (1)..(370): Homolog of NCBI NO: 15223469 NR Description: protein kinase family [Arabidopsis thaliana]
  misc_feature (1)..(371): Homolog of NCBI NO: 7486564 NR Description: hypothetical protein F6N23.9 - Arabidopsis
  misc_feature (1)..(371): Homolog of NCBI NO: 21553556 NR Description: protein kinase-like protein [Arabidopsis thaliana]
  misc_feature (1)..(371): Homolog of NCBI NO: 15232406 NR Description: protein kinase family [Arabidopsis thaliana]
  misc_feature (1)..(371): Homolog of NCBI NO: 22327962 NR Description: protein kinase - related [Arabidopsis thaliana]
  misc_feature (1)..(371): Homolog of NCBI NO: 22328189 NR Description: protein kinase family [Arabidopsis thaliana]
  misc_feature (1)..(373): Homolog of NCBI NO: 15222446 NR Description: protein kinase - related [Arabidopsis thaliana]
  misc_feature (214)..(373): Homolog of NCBI NO: 6633851 NR Description: F2K11.13 [Arabidopsis thaliana]
  misc_feature (1)..(211): Homolog of NCBI NO: 6633851 NR Description: F2K11.13 [Arabidopsis thaliana]
  misc_feature (1)..(373): Homolog of NCBI NO: 15237604 NR Description: protein kinase family [Arabidopsis thaliana]
MANLLGCCYEDEERLLIAEFMPNETLAKHLFHWESQPMKWAMRLRVALHIAQALEYCTSKGRALYHDLNAYRVLFDDDANPRLSCFGLMKNSRDGKSYSTNLAFTPPEYLRTGRVTPESVIYSFGTLLLDLLSGKHIPPSHALDLIRDRNIQMLMDSGLEGQFSSDDGTELIRLASRCLQYEPRERPNPKSLVSAMIPLQKDLEIASHQLLGVPNSATTTALSPLGEACLRSDLTAIHEIIEKLGYKDDEGATTELSFQMWTDQMQDTLVFKKKGDSAFRHKDFAKAIECYSQFIEVGTMGSPTVHARQSLCYLMNDMPREALNNAMQAQVISPAWHIASYLQAVALSALGQENEAHTALKDGAMLESKRNPL

SEQ ID NO: 50407 - protein, 353 aa, Arabidopsis thaliana
  peptide (1)..(353): Ceres Seq. ID no. 13588953
  misc_feature (1)..(350): Homolog of NCBI NO: 15223469 NR Description: protein kinase family [Arabidopsis thaliana]
  misc_feature (1)..(351): Homolog of NCBI NO: 7486564 NR Description: hypothetical protein F6N23.9 - Arabidopsis
  misc_feature (1)..(351): Homolog of NCBI NO: 21553556 NR Description: protein kinase-like protein [Arabidopsis thaliana]
  misc_feature (1)..(351): Homolog of NCBI NO: 15232406 NR Description: protein kinase family [Arabidopsis thaliana]
  misc_feature (1)..(351): Homolog of NCBI NO: 22327962 NR Description: protein kinase - related [Arabidopsis thaliana]
  misc_feature (1)..(351): Homolog of NCBI NO: 22328189 NR Description: protein kinase family [Arabidopsis thaliana]
  misc_feature (1)..(353): Homolog of NCBI NO: 15222446 NR Description: protein kinase - related [Arabidopsis thaliana]
  misc_feature (194)..(353): Homolog of NCBI NO: 6633851 NR Description: F2K11.13 [Arabidopsis thaliana]
  misc_feature (1)..(191): Homolog of NCBI NO: 6633851 NR Description: F2K11.13 [Arabidopsis thaliana]
  misc_feature (1)..(353): Homolog of NCBI NO: 15237604 NR Description: protein kinase family [Arabidopsis thaliana]
MPNETLAKHLFHWESQPMKWAMRLRVALHIAQALEYCTSKGRALYHDLNAYRVLFDDDANPRLSCFGLMKNSRDGKSYSTNLAFTPPEYLRTGRVTPESVIYSFGTLLLDLLSGKHIPPSHALDLIRDRNIQMLMDSGLEGQFSSDDGTELIRLASRCLQYEPRERPNPKSLVSAMIPLQKDLEIASHQLLGVPNSATTTALSPLGEACLRSDLTAIHEIIEKLGYKDDEGATTELSFQMWTDQMQDTLVFKKKGDSAFRHKDFAKAIECYSQFIEVGTMGSPTVHARQSLCYLMNDMPREALNNAMQAQVISPAWHIASYLQAVALSALGQENEAHTALKDGAMLESKRNPL

SEQ ID NO: 50408 - DNA, 1752 bp, Arabidopsis thaliana
  misc_feature (1)..(1752): Ceres Seq. ID no. 13648147
  misc_feature: MA Experiment ID: 20000179 Result: Up-regulated in Transcription
  misc_feature: MA Experiment 20000179 PARAMETER Experiment Name: At_Germinating_Seeds_P Parameter: Age (hr) Value: 6 vs. 0
  misc_feature: MA Experiment 20000179 PARAMETER Experiment Name: At_Germinating_Seeds_P Parameter: Tissue Value: Germinating Seeds
  misc_feature: MA Experiment ID: 20000185 Result: Down-regulated in Transcription
  misc_feature: MA Experiment 20000185 PARAMETER Experiment Name: At_Roots__P Parameter: Age (day) Value: 7 vs. 21
  misc_feature: MA Experiment 20000185 PARAMETER Experiment Name: At_Roots__P Parameter: Organism Value: A. thaliana
  misc_feature: MA Experiment 20000185 PARAMETER Experiment Name: At_Roots__P Parameter: Tissue Value: Roots vs. Whole Plant
  misc_feature: MA Experiment ID: 20000439 Result: Down-regulated in Transcription
  misc_feature: MA Experiment 20000439 PARAMETER Experiment Name: At_Roots__P Parameter: Age (day) Value: 14 vs. 21
  misc_feature: MA Experiment 20000439 PARAMETER Experiment Name: At_Roots__P Parameter: Organism Value: A. thaliana
  misc_feature: MA Experiment 20000439 PARAMETER Experiment Name: At_Roots__P Parameter: Tissue Value: Roots vs. Whole Plant
  misc_feature: MA Experiment ID: 20000495 Result: Down-regulated in Transcription
  misc_feature: MA Experiment 20000495 PARAMETER Experiment Name: At_Guard_Cells_P Parameter: Harvest Date Value: 8/2/2002
  misc_feature: MA Experiment 20000495 PARAMETER Experiment Name: At_Guard_Cells_P Parameter: Organism Value: A. thaliana
  misc_feature: MA Experiment 20000495 PARAMETER Experiment Name: At_Guard_Cells_P Parameter: Tissue Value: Guard Cells vs. Leaves
  misc_feature: MA Experiment ID: 20000496 Result: Down-regulated in Transcription
  misc_feature: MA Experiment 20000496 PARAMETER Experiment Name: At_Guard_Cells_P Parameter: Harvest Date Value: 7/19/2002
  misc_feature: MA Experiment 20000496 PARAMETER Experiment Name: At_Guard_Cells_P Parameter: Organism Value: Canola
  misc_feature: MA Experiment 20000496 PARAMETER Experiment Name: At_Guard_Cells_P Parameter: Tissue Value: Guard Cells vs. Leaves
  misc_feature: MA Experiment ID: 20000527 Result: Up-regulated in Transcription
  misc_feature: MA Experiment 20000527 PARAMETER Experiment Name: At_10percent_PEG_P Parameter: Age (day) Value: 20
  misc_feature: MA Experiment 20000527 PARAMETER Experiment Name: At_10percent_PEG_P Parameter: Organism Value: A. thaliana
  misc_feature: MA Experiment 20000527 PARAMETER Experiment Name: At_10percent_PEG_P Parameter: Plant Line Value: WS
  misc_feature: MA Experiment 20000527 PARAMETER Experiment Name: At_10percent_PEG_P Parameter: Timepoint (day) Value: 20
  misc_feature: MA Experiment 20000527 PARAMETER Experiment Name: At_10percent_PEG_P Parameter: Tissue Value: Whole Plant
  misc_feature: MA Experiment 20000527 PARAMETER Experiment Name: At_10percent_PEG_P Parameter: Treatment Value: 10percent PEG vs. No Treatment
  misc_feature: MA Experiment ID: 20001247 Result: Down-regulated in Transcription
  misc_feature: MA Experiment 20001247 PARAMETER Experiment Name: At_Far-red-induction_P Parameter: Age (day) Value: 7
  misc_feature: MA Experiment 20001247 PARAMETER Experiment Name: At_Far-red-induction_P Parameter: Light Value: Far-red vs. White
  misc_feature: MA Experiment 20001247 PARAMETER Experiment Name: At_Far-red-induction_P Parameter: Organism Value: A. thaliana
  misc_feature: MA Experiment 20001247 PARAMETER Experiment Name: At_Far-red-induction_P Parameter: Plant Line Value: Columbia
  misc_feature: MA Experiment 20001247 PARAMETER Experiment Name: At_Far-red-induction_P Parameter: Timepoint (hr) Value: 1
  misc_feature: MA Experiment 20001247 PARAMETER Experiment Name: At_Far-red-induction_P Parameter: Tissue Value: Whole Plant
  misc_feature: MA Experiment ID: 20001248 Result: Down-regulated in Transcription
  misc_feature: MA Experiment 20001248 PARAMETER Experiment Name: At_Far-red-induction_P Parameter: Age (day) Value: 7
  misc_feature: MA Experiment 20001248 PARAMETER Experiment Name: At_Far-red-induction_P Parameter: Light Value: Far-red vs. White
  misc_feature: MA Experiment 20001248 PARAMETER Experiment Name: At_Far-red-induction_P Parameter: Organism Value: A. thaliana
  misc_feature: MA Experiment 20001248 PARAMETER Experiment Name: At_Far-red-induction_P Parameter: Plant Line Value: Columbia
  misc_feature: MA Experiment 20001248 PARAMETER Experiment Name: At_Far-red-induction_P Parameter: Timepoint (hr) Value: 4
  misc_feature: MA Experiment 20001248 PARAMETER Experiment Name: At_Far-red-induction_P Parameter: Tissue Value: Whole Plant
  misc_feature: MA Experiment ID: 20001450 Result: Down-regulated in Transcription
  misc_feature: MA Experiment 20001450 PARAMETER Experiment Name: At_Far-red-induction_P Parameter: Age (day) Value: 7
  misc_feature: MA Experiment 20001450 PARAMETER Experiment Name: At_Far-red-induction_P Parameter: Light Value: Far-red vs. White
  misc_feature: MA Experiment 20001450 PARAMETER Experiment Name: At_Far-red-induction_P Parameter: Organism Value: A. thaliana
  misc_feature: MA Experiment 20001450 PARAMETER Experiment Name: At_Far-red-induction_P Parameter: Plant Line Value: Columbia
  misc_feature: MA Experiment 20001450 PARAMETER Experiment Name: At_Far-red-induction_P Parameter: Timepoint (hr) Value: 8
  misc_feature: MA Experiment 20001450 PARAMETER Experiment Name: At_Far-red-induction_P Parameter: Tissue Value: Whole Plant
gataaaccatattaagaactagcttatagataaggatatggcctttacgaacgtttgcctatggacgctactcgccttcatgctgacttggacagtgttctacgtcacaaacagggggaagaaggcgacgcagttggcggatgcggtggttgaagagcgagaagacggtgctactgacgttatcatcgttggggctggagtaggcggctcggctctcgcatatgctcttgctaaggacgggcgtcgagtccatgtaatagagagggacctgagagaaccagagagaatcatgggtgagtttatgcaaccaggaggacgactcatgctctctaagcttggtcttgaagattgtttggagggaatagatgcccaaaaagccacgggcatgacagtttataaggacggaaaagaagcagtcgcatcttttcccgtggacaacaacaattttccttttgatccttcggctcgatcttttcacaatggccgattcgtccaacgattgcggcaaaaggcttcttctcttcccaatgtgcgcctggaagaaggaacggtgaagtctttgatagaagaaaaaggagtgatcaaaggagtgacatacaaaaatagcgcaggcgaagaaacaacagccttggcacctctcactgtagtatgcgacggttgctactcaaaccttcgccggtctcttaatgacaacaatgcggaggttctgtcataccaagttggttttatctcaaagaactgtcagcttgaagaacccgaaaagttaaagttgataatgtctaaaccctccttcaccatgttgtatcaaatcagcagcaccgacgttcgttgtgtttttgaagttctccccaacaacattccttctatttcaaatggtgaaatggctactttcgtgaagaacactattgctcctcaggtacctttaaaactccgcaaaatatttttgaaagggattgatgaaggagaacatataaaagccatgccaacaaagaagatgacagctactttgagcgagaagaaaggagtgattttattgggagatgcattcaacatgcgtcatccagcaatcgcatctggaatgatggttttattatctgacattctcattctacgccgtcttctccagccattaagcaaccttggcaatgcgcaaaaaatctcacaagttatcaagtccttttatgatatccgcaagccaatgtcagcgacagttaacacgttaggaaatgcattctctcaagtgctagttgcatcgacggacgaagcaaaagaggcaatgagacaaggttgctatgattacctctctagtggtgggtttcgcacgtcagggatgatggctttgctaggcggcatgaaccctcgtccgatctctctcatctatcatctatgtgctatcactctatcctccattggccatctactctctccatttccctctccccttcgcatttggcatagccttcgactttttggtttggctatgaaaatgttggttccccatctcaaggctgaaggagttagccaaatgttgtttccagtcaacgccgccgcgtatagcaaaagctatatggctgcaacggctctctaaaacactggtgctttaaactgcaaaatataacacatatataaatcacgaatctttgtgattctgcatatattgtgttctacaattattctcatataaatgaaaattgttctacgtaaaagtaaaaagaaggaattgtaatactaataaaacgagtttttaattct

SEQ ID NO: 50409 - protein, 516 aa, Arabidopsis thaliana
  peptide (1)..(516): Ceres Seq. ID no. 13648148
  misc_feature (198)..(397): Pfam Name: Monooxygenase Pfam Description: Monooxygenase
  misc_feature (198)..(397): Pfam Name: Monooxygenase Pfam Description: Monooxygenase
  misc_feature (43)..(509): Homolog of NCBI NO: 27311240 NR Description: Putative Squalene monooxygenase
  misc_feature (43)..(509): Homolog of NCBI NO: 27475612 NR Description: squalene monooxygenase 1 [Medicago truncatula]
  misc_feature (23)..(509): Homolog of NCBI NO: 27475610 NR Description: squalene monooxygenase 2 [Medicago truncatula]
  misc_feature (43)..(509): Homolog of NCBI NO: 27311241 NR Description: Putative Squalene monooxygenase
  misc_feature (4)..(516): Homolog of NCBI NO: 15237900 NR Description: squalene monooxygenase 2 (squalene epoxidase 2)
  misc_feature (43)..(509): Homolog of NCBI NO: 27311240 NR Description: Putative Squalene monooxygenase
  misc_feature (23)..(509): Homolog of NCBI NO: 27475610 NR Description: squalene monooxygenase 2 [Medicago truncatula]
  misc_feature (4)..(516): Homolog of NCBI NO: 15237900 NR Description: squalene monooxygenase 2 (squalene epoxidase 2)
  misc_feature (1)..(516): Homolog of NCBI NO: 15237902 NR Description: squalene monooxygenase 1,1 (squalene epoxidase
  misc_feature (3)..(516): Homolog of NCBI NO: 11358675 NR Description: probable squalene monooxygenase (EC 1.14.99.7)
  misc_feature (1)..(516): Homolog of NCBI NO: 15237903 NR Description: squalene monooxygenase 1,2 (squalene epoxidase
  misc_feature (1)..(516): Homolog of NCBI NO: 6685411 NR Description: Squalene monooxygenase 1,1 (Squalene epoxidase
  misc_feature (1)..(516): Homolog of NCBI NO: 6685410 NR Description: Squalene monooxygenase 1,2 (Squalene epoxidase
  misc_feature (43)..(509): Homolog of NCBI NO: 27311241 NR Description: Putative Squalene monooxygenase
  misc_feature (43)..(509): Homolog of NCBI NO: 27475612 NR Description: squalene monooxygenase 1 [Medicago truncatula]
  misc_feature (1)..(516): Homolog of NCBI NO: 6685410 NR Description: Squalene monooxygenase 1,2 (Squalene epoxidase
  misc_feature (1)..(516): Homolog of NCBI NO: 6685411 NR Description: Squalene monooxygenase 1,1 (Squalene epoxidase
  misc_feature (1)..(516): Homolog of NCBI NO: 15237903 NR Description: squalene monooxygenase 1,2 (squalene epoxidase
  misc_feature (3)..(516): Homolog of NCBI NO: 11358675 NR Description: probable squalene monooxygenase (EC 1.14.99.7)
  misc_feature (1)..(516): Homolog of NCBI NO: 15237902 NR Description: squalene monooxygenase 1,1 (squalene epoxidase
MAFTNVCLWTLLAFMLTWTVFYVTNRGKKATQLADAVVEEREDGATDVIIVGAGVGGSALAYALAKDGRRVHVIERDLREPERIMGEFMQPGGRLMLSKLGLEDCLEGIDAQKATGMTVYKDGKEAVASFPVDNNNFPFDPSARSFHNGRFVQRLRQKASSLPNVRLEEGTVKSLIEEKGVIKGVTYKNSAGEETTALAPLTVVCDGCYSNLRRSLNDNNAEVLSYQVGFISKNCQLEEPEKLKLIMSKPSFTMLYQISSTDVRCVFEVLPNNIPSISNGEMATFVKNTIAPQVPLKLRKIFLKGIDEGEHIKAMPTKKMTATLSEKKGVILLGDAFNMRHPAIASGMMVLLSDILILRRLLQPLSNLGNAQKISQVIKSFYDIRKPMSATVNTLGNAFSQVLVASTDEAKEAMRQGCYDYLSSGGFRTSGMMALLGGMNPRPISLIYHLCAITLSSIGHLLSPFPSPLRIWHSLRLFGLAMKMLVPHLKAEGVSQMLFPVNAAAYSKSYMAATAL

SEQ ID NO: 50410 - protein, 502 aa, Arabidopsis thaliana
  peptide (1)..(502): Ceres Seq. ID no. 13648149
  misc_feature (184)..(383): Pfam Name: Monooxygenase Pfam Description: Monooxygenase
  misc_feature (184)..(383): Pfam Name: Monooxygenase Pfam Description: Monooxygenase
  misc_feature (29)..(495): Homolog of NCBI NO: 27311240 NR Description: Putative Squalene monooxygenase
  misc_feature (29)..(495): Homolog of NCBI NO: 27475612 NR Description: squalene monooxygenase 1 [Medicago truncatula]
  misc_feature (9)..(495): Homolog of NCBI NO: 27475610 NR Description: squalene monooxygenase 2 [Medicago truncatula]
  misc_feature (29)..(495): Homolog of NCBI NO: 27311241 NR Description: Putative Squalene monooxygenase
  misc_feature (1)..(502): Homolog of NCBI NO: 15237900 NR Description: squalene monooxygenase 2 (squalene epoxidase 2)
  misc_feature (29)..(495): Homolog of NCBI NO: 27311240 NR Description: Putative Squalene monooxygenase
  misc_feature (9)..(495): Homolog of NCBI NO: 27475610 NR Description: squalene monooxygenase 2 [Medicago truncatula]
  misc_feature (1)..(502): Homolog of NCBI NO: 15237900 NR Description: squalene monooxygenase 2 (squalene epoxidase 2)
  misc_feature (1)..(502): Homolog of NCBI NO: 15237902 NR Description: squalene monooxygenase 1,1 (squalene epoxidase
  misc_feature (1)..(502): Homolog of NCBI NO: 11358675 NR Description: probable squalene monooxygenase (EC 1.14.99.7)
  misc_feature (1)..(502): Homolog of NCBI NO: 15237903 NR Description: squalene monooxygenase 1,2 (squalene epoxidase
  misc_feature (1)..(502): Homolog of NCBI NO: 6685411 NR Description: Squalene monooxygenase 1,1 (Squalene epoxidase
  misc_feature (1)..(502): Homolog of NCBI NO: 6685410 NR Description: Squalene monooxygenase 1,2 (Squalene epoxidase
  misc_feature (29)..(495): Homolog of NCBI NO: 27311241 NR Description: Putative Squalene monooxygenase
  misc_feature (29)..(495): Homolog of NCBI NO: 27475612 NR Description: squalene monooxygenase 1 [Medicago truncatula]
  misc_feature (1)..(502): Homolog of NCBI NO: 6685410 NR Description: Squalene monooxygenase 1,2 (Squalene epoxidase
  misc_feature (1)..(502): Homolog of NCBI NO: 6685411 NR Description: Squalene monooxygenase 1,1 (Squalene epoxidase
  misc_feature (1)..(502): Homolog of NCBI NO: 15237903 NR Description: squalene monooxygenase 1,2 (squalene epoxidase
  misc_feature (1)..(502): Homolog of NCBI NO: 11358675 NR Description: probable squalene monooxygenase (EC 1.14.99.7)
  misc_feature (1)..(502): Homolog of NCBI NO: 15237902 NR Description: squalene monooxygenase 1,1 (squalene epoxidase
MLTWTVFYVTNRGKKATQLADAVVEEREDGATDVIIVGAGVGGSALAYALAKDGRRVHVIERDLREPERIMGEFMQPGGRLMLSKLGLEDCLEGIDAQKATGMTVYKDGKEAVASFPVDNNNFPFDPSARSFHNGRFVQRLRQKASSLPNVRLEEGTVKSLIEEKGVIKGVTYKNSAGEETTALAPLTVVCDGCYSNLRRSLNDNNAEVLSYQVGFISKNCQLEEPEKLKLIMSKPSFTMLYQISSTDVRCVFEVLPNNIPSISNGEMATFVKNTIAPQVPLKLRKIFLKGIDEGEHIKAMPTKKMTATLSEKKGVILLGDAFNMRHPAIASGMMVLLSDILILRRLLQPLSNLGNAQKISQVIKSFYDIRKPMSATVNTLGNAFSQVLVASTDEAKEAMRQGCYDYLSSGGFRTSGMMALLGGMNPRPISLIYHLCAITLSSIGHLLSPFPSPLRIWHSLRLFGLAMKMLVPHLKAEGVSQMLFPVNAAAYSKSYMAATAL

SEQ ID NO: 50411 - protein, 432 aa, Arabidopsis thaliana
  peptide (1)..(432): Ceres Seq. ID no. 13648150
  misc_feature (114)..(313): Pfam Name: Monooxygenase Pfam Description: Monooxygenase
  misc_feature (114)..(313): Pfam Name: Monooxygenase Pfam Description: Monooxygenase
  misc_feature (1)..(425): Homolog of NCBI NO: 27311240 NR Description: Putative Squalene monooxygenase
  misc_feature (1)..(425): Homolog of NCBI NO: 27475612 NR Description: squalene monooxygenase 1 [Medicago truncatula]
  misc_feature (1)..(425): Homolog of NCBI NO: 27475610 NR Description: squalene monooxygenase 2 [Medicago truncatula]
  misc_feature (1)..(425): Homolog of NCBI NO: 27311241 NR Description: Putative Squalene monooxygenase
  misc_feature (1)..(432): Homolog of NCBI NO: 15237900 NR Description: squalene monooxygenase 2 (squalene epoxidase 2)
  misc_feature (1)..(425): Homolog of NCBI NO: 27311240 NR Description: Putative Squalene monooxygenase
  misc_feature (1)..(425): Homolog of NCBI NO: 27475610 NR Description: squalene monooxygenase 2 [Medicago truncatula]
  misc_feature (1)..(432): Homolog of NCBI NO: 15237900 NR Description: squalene monooxygenase 2 (squalene epoxidase 2)
  misc_feature (1)..(432): Homolog of NCBI NO: 15237902 NR Description: squalene monooxygenase 1,1 (squalene epoxidase
  misc_feature (1)..(432): Homolog of NCBI NO: 11358675 NR Description: probable squalene monooxygenase (EC 1.14.99.7)
  misc_feature (1)..(432): Homolog of NCBI NO: 15237903 NR Description: squalene monooxygenase 1,2 (squalene epoxidase
  misc_feature (1)..(432): Homolog of NCBI NO: 6685411 NR Description: Squalene monooxygenase 1,1 (Squalene epoxidase
  misc_feature (1)..(432): Homolog of NCBI NO: 6685410 NR Description: Squalene monooxygenase 1,2 (Squalene epoxidase
  misc_feature (1)..(425): Homolog of NCBI NO: 27311241 NR Description: Putative Squalene monooxygenase
  misc_feature (1)..(425): Homolog of NCBI NO: 27475612 NR Description: squalene monooxygenase 1 [Medicago truncatula]
  misc_feature (1)..(432): Homolog of NCBI NO: 6685410 NR Description: Squalene monooxygenase 1,2 (Squalene epoxidase
  misc_feature (1)..(432): Homolog of NCBI NO: 6685411 NR Description: Squalene monooxygenase 1,1 (Squalene epoxidase
  misc_feature (1)..(432): Homolog of NCBI NO: 15237903 NR Description: squalene monooxygenase 1,2 (squalene epoxidase
  misc_feature (1)..(432): Homolog of NCBI NO: 11358675 NR Description: probable squalene monooxygenase (EC 1.14.99.7)
  misc_feature (1)..(432): Homolog of NCBI NO: 15237902 NR Description: squalene monooxygenase 1,1 (squalene epoxidase
MGEFMQPGGRLMLSKLGLEDCLEGIDAQKATGMTVYKDGKEAVASFPVDNNNFPFDPSARSFHNGRFVQRLRQKASSLPNVRLEEGTVKSLIEEKGVIKGVTYKNSAGEETTALAPLTVVCDGCYSNLRRSLNDNNAEVLSYQVGFISKNCQLEEPEKLKLIMSKPSFTMLYQISSTDVRCVFEVLPNNIPSISNGEMATFVKNTIAPQVPLKLRKIFLKGIDEGEHIKAMPTKKMTATLSEKKGVILLGDAFNMRHPAIASGMMVLLSDILILRRLLQPLSNLGNAQKISQVIKSFYDIRKPMSATVNTLGNAFSQVLVASTDEAKEAMRQGCYDYLSSGGFRTSGMMALLGGMNPRPISLIYHLCAITLSSIGHLLSPFPSPLRIWHSLRLFGLAMKMLVPHLKAEGVSQMLFPVNAAAYSKSYMAATAL

SEQ ID NO: 50412 - DNA, 1650 bp, Arabidopsis thaliana
  misc_feature (1)..(1650): Ceres Seq. ID no. 13588592
  misc_feature: MA Experiment ID: 20000185 Result: Down-regulated in Transcription
  misc_feature: MA Experiment 20000185 PARAMETER Experiment Name: At_Roots__P Parameter: Age (day) Value: 7 vs. 21
  misc_feature: MA Experiment 20000185 PARAMETER Experiment Name: At_Roots__P Parameter: Organism Value: A. thaliana
  misc_feature: MA Experiment 20000185 PARAMETER Experiment Name: At_Roots__P Parameter: Tissue Value: Roots vs. Whole Plant
  misc_feature: MA Experiment ID: 20000436 Result: Down-regulated in Transcription
  misc_feature: MA Experiment 20000436 PARAMETER Experiment Name: At_Drought_P Parameter: Age (day) Value: 7
  misc_feature: MA Experiment 20000436 PARAMETER Experiment Name: At_Drought_P Parameter: Organism Value: A. thaliana
  misc_feature: MA Experiment 20000436 PARAMETER Experiment Name: At_Drought_P Parameter: Plant Line Value: WS
  misc_feature: MA Experiment 20000436 PARAMETER Experiment Name: At_Drought_P Parameter: Timepoint (hr) Value: 12
  misc_feature: MA Experiment 20000436 PARAMETER Experiment Name: At_Drought_P Parameter: Tissue Value: Whole Plant
  misc_feature: MA Experiment 20000436 PARAMETER Experiment Name: At_Drought_P Parameter: Treatment Value: Drought vs. No Drought
  misc_feature: MA Experiment ID: 20000437 Result: Down-regulated in Transcription
  misc_feature: MA Experiment 20000437 PARAMETER Experiment Name: At_Drought_P Parameter: Age (day) Value: 8
  misc_feature: MA Experiment 20000437 PARAMETER Experiment Name: At_Drought_P Parameter: Organism Value: A. thaliana
  misc_feature: MA Experiment 20000437 PARAMETER Experiment Name: At_Drought_P Parameter: Plant Line Value: WS
  misc_feature: MA Experiment 20000437 PARAMETER Experiment Name: At_Drought_P Parameter: Timepoint (hr) Value: 24
  misc_feature: MA Experiment 20000437 PARAMETER Experiment Name: At_Drought_P Parameter: Tissue Value: Whole Plant
  misc_feature: MA Experiment 20000437 PARAMETER Experiment Name: At_Drought_P Parameter: Treatment Value: Drought vs. No Drought
  misc_feature: MA Experiment ID: 20001247 Result: Down-regulated in Transcription
  misc_feature: MA Experiment 20001247 PARAMETER Experiment Name: At_Far-red-induction_P Parameter: Age (day) Value: 7
  misc_feature: MA Experiment 20001247 PARAMETER Experiment Name: At_Far-red-induction_P Parameter: Light Value: Far-red vs. White
  misc_feature: MA Experiment 20001247 PARAMETER Experiment Name: At_Far-red-induction_P Parameter: Organism Value: A. thaliana
  misc_feature: MA Experiment 20001247 PARAMETER Experiment Name: At_Far-red-induction_P Parameter: Plant Line Value: Columbia
  misc_feature: MA Experiment 20001247 PARAMETER Experiment Name: At_Far-red-induction_P Parameter: Timepoint (hr) Value: 1
  misc_feature: MA Experiment 20001247 PARAMETER Experiment Name: At_Far-red-induction_P Parameter: Tissue Value: Whole Plant
  misc_feature: MA Experiment ID: 20001248 Result: Down-regulated in Transcription
  misc_feature: MA Experiment 20001248 PARAMETER Experiment Name: At_Far-red-induction_P Parameter: Age (day) Value: 7
  misc_feature: MA Experiment 20001248 PARAMETER Experiment Name: At_Far-red-induction_P Parameter: Light Value: Far-red vs. White
  misc_feature: MA Experiment 20001248 PARAMETER Experiment Name: At_Far-red-induction_P Parameter: Organism Value: A. thaliana
  misc_feature: MA Experiment 20001248 PARAMETER Experiment Name: At_Far-red-induction_P Parameter: Plant Line Value: Columbia
  misc_feature: MA Experiment 20001248 PARAMETER Experiment Name: At_Far-red-induction_P Parameter: Timepoint (hr) Value: 4
  misc_feature: MA Experiment 20001248 PARAMETER Experiment Name: At_Far-red-induction_P Parameter: Tissue Value: Whole Plant
  misc_feature: MA Experiment ID: 20001450 Result: Down-regulated in Transcription
  misc_feature: MA Experiment 20001450 PARAMETER Experiment Name: At_Far-red-induction_P Parameter: Age (day) Value: 7
  misc_feature: MA Experiment 20001450 PARAMETER Experiment Name: At_Far-red-induction_P Parameter: Light Value: Far-red vs. White
  misc_feature: MA Experiment 20001450 PARAMETER Experiment Name: At_Far-red-induction_P Parameter: Organism Value: A. thaliana
  misc_feature: MA Experiment 20001450 PARAMETER Experiment Name: At_Far-red-induction_P Parameter: Plant Line Value: Columbia
  misc_feature: MA Experiment 20001450 PARAMETER Experiment Name: At_Far-red-induction_P Parameter: Timepoint (hr) Value: 8
  misc_feature: MA Experiment 20001450 PARAMETER Experiment Name: At_Far-red-induction_P Parameter: Tissue Value: Whole Plant
  misc_feature: MA Experiment ID: 20001451 Result: Down-regulated in Transcription
  misc_feature: MA Experiment 20001451 PARAMETER Experiment Name: At_Far-red-induction_P Parameter: Age (day) Value: 7
  misc_feature: MA Experiment 20001451 PARAMETER Experiment Name: At_Far-red-induction_P Parameter: Light Value: Far-red vs. White
  misc_feature: MA Experiment 20001451 PARAMETER Experiment Name: At_Far-red-induction_P Parameter: Organism Value: A. thaliana
  misc_feature: MA Experiment 20001451 PARAMETER Experiment Name: At_Far-red-induction_P Parameter: Plant Line Value: Columbia
  misc_feature: MA Experiment 20001451 PARAMETER Experiment Name: At_Far-red-induction_P Parameter: Timepoint (hr) Value: 24
  misc_feature: MA Experiment 20001451 PARAMETER Experiment Name: At_Far-red-induction_P Parameter: Tissue Value: Whole Plant
  misc_feature: MA Experiment ID: 20001558 Result: Up-regulated in Transcription
  misc_feature: MA Experiment 20001558 PARAMETER Experiment Name: At_Drought_Soil_Dry_P Parameter: Age (day) Value: 27
  misc_feature: MA Experiment 20001558 PARAMETER Experiment Name: At_Drought_Soil_Dry_P Parameter: Organism Value: A. thaliana
  misc_feature: MA Experiment 20001558 PARAMETER Experiment Name: At_Drought_Soil_Dry_P Parameter: Plant Line Value: WS
  misc_feature: MA Experiment 20001558 PARAMETER Experiment Name: At_Drought_Soil_Dry_P Parameter: Post Timepoint (hr) Value: 6
  misc_feature: MA Experiment 20001558 PARAMETER Experiment Name: At_Drought_Soil_Dry_P Parameter: Post-Treatment Value: Re-Water vs. No Drought
  misc_feature: MA Experiment 20001558 PARAMETER Experiment Name: At_Drought_Soil_Dry_P Parameter: Timepoint (day) Value: 13
  misc_feature: MA Experiment 20001558 PARAMETER Experiment Name: At_Drought_Soil_Dry_P Parameter: Treatment Value: Drought vs. No Drought
  misc_feature: MA Experiment ID: 20001757 Result: Up-regulated in Transcription
  misc_feature: MA Experiment 20001757 PARAMETER Experiment Name: At_50mM_NH4NO3_L-to-H_P Parameter: Timepoint (hr) Value: 6
  misc_feature: MA Experiment 20001757 PARAMETER Experiment Name: At_50mM_NH4NO3_L-to-H_P Parameter: Tissue Value: Leaf
  misc_feature: MA Experiment 20001757 PARAMETER Experiment Name: At_50mM_NH4NO3_L-to-H_P Parameter: Treatment Value: 50mM NH4NO3 vs 100mM Mannitol
aaatttatcggagcctccctccaaaattcaacaatggccacttctttaatgtctctgtcttcttcatttcttcaacctctgaaactcaaaaccctagcacaacccagaaacactgacttatctaccaccagaaaaatcataacaacatgcgattcccaaaacaacactggtaagtcaaaccccagcagcagaaaccctaatttccagaaacggcgaaactcctccaagtatgggacttctagaaggtcgatcctcaagaaatcgtttttacaagagcaagttactttcaccgcacgggtctctgatgacccccacgtggcaattatcggtggaggaatggcgggtttggtctgcgcattgaacctggaagctcgtggcgtccagtccacagttttcgatacggggatacatgggttaggaggaagacttggaacaagaattattgaaccacagggactaattttcgatcacgctgctcaattcttcaccgcggatgattctcggtttatcaaattggtcgatgggtggttagagaaaggacttgttcgagagtggaaaggtgccgtgggagagcttgaaattggaggtagcttctcacagtttccctcatcatcacctccaagatacattgctgctaatggcatgcgatctctcgctgattctttgctattagagagtcaaatggtgaatctggtaaggccttgttggatcagtaagttggaaccacttaatggtatgtggcatttaagtgagaatggaacacctcgtggtcagtttgatgtcatagttattgctcataatggtaaatgcgccaatcgcttgctttcagcatcaggcttgcccctagtggctaaacagatgaagaaactggatttgagttcaatatgggcgctattagcagcttttgatgatcctcttcccacagtgaactttgagggagcgtttgtgaaaggagttgaatcactgtcttggatgggaaataactctgcaaagcttggaaatggcagaactccaccacattgttggacttttttcagtactgcggcatatgggaaacagaacaaagttcctcaggaaaacatcccaacggtcacggcagagaaagttaaagccgggatgcttcaaggtgtggaaatcgcattggggttgcctgaaggctcacttcctaaaccggtttatacacgtctccagctatggggagcagctttgccgaagaacactcctgcagttccatgtatatttgatccacaaggccgtgctggtatatgcggtgattggcttctcggttctaacttagaatctgcagctataagcggtgcagccttaggaaaccatattgcggaattcttacagaacggtgaagctaatccagaagaatttgcaatcggtttacatgataggttaagtcctcttgctggccatgatattggtcagtttcctggtttaacatcagtgggagaaaaggaagaagctaatgcatatcagctgctgtgaatacatcagtctactgttacttgacgaaaaagctaagaagttttgcaaattaagcttacagtgatatcagtttctacttagaggctcaccattttcagcctccttcttcattggtgacaaaaccacagccgatttgaggtgctatatgaaacaaac

SEQ ID NO: 50413 - protein, 497 aa, Arabidopsis thaliana
  peptide (1)..(497): Ceres Seq. ID no. 13588593
  misc_feature (41)..(389): Homolog of NCBI NO: 15222815 NR Description: expressed protein [Arabidopsis thaliana]
  misc_feature (106)..(429): Homolog of NCBI NO: 23061227 NR Description: hypothetical protein [Pseudomonas fluorescens
  misc_feature (106)..(281): Homolog of NCBI NO: 8778316 NR Description: F14J16.31 [Arabidopsis thaliana]
  misc_feature (274)..(448): Homolog of NCBI NO: 8778316 NR Description: F14J16.31 [Arabidopsis thaliana]
  misc_feature (106)..(429): Homolog of NCBI NO: 15599852 NR Description: hypothetical protein [Pseudomonas aeruginosa
  misc_feature (103)..(356): Homolog of NCBI NO: 34897122 NR Description: hypothetical protein [Oryza sativa]
  misc_feature (51)..(389): Homolog of NCBI NO: 25404080 NR Description: hypothetical protein T6H22.21 [imported] -
  misc_feature (93)..(448): Homolog of NCBI NO: 25404082 NR Description: hypothetical protein T6H22.20 [imported] -
  misc_feature (106)..(448): Homolog of NCBI NO: 22330276 NR Description: amine oxidase-related [Arabidopsis thaliana]
  misc_feature (12)..(497): Homolog of NCBI NO: 18396966 NR Description: expressed protein [Arabidopsis thaliana]
KFIGASLQNSTMATSLMSLSSSFLQPLKLKTLAQPRNTDLSTTRKIITTCDSQNNTGKSNPSSRNPNFQKRRNSSKYGTSRRSILKKSFLQEQVTFTARVSDDPHVAIIGGGMAGLVCALNLEARGVQSTVFDTGIHGLGGRLGTRIIEPQGLIFDHAAQFFTADDSRFIKLVDGWLEKGLVREWKGAVGELEIGGSFSQFPSSSPPRYIAANGMRSLADSLLLESQMVNLVRPCWISKLEPLNGMWHLSENGTPRGQFDVIVIAHNGKCANRLLSASGLPLVAKQMKKLDLSSIWALLAAFDDPLPTVNFEGAFVKGVESLSWMGNNSAKLGNGRTPPHCWTFFSTAAYGKQNKVPQENIPTVTAEKVKAGMLQGVEIALGLPEGSLPKPVYTRLQLWGAALPKNTPAVPCIFDPQGRAGICGDWLLGSNLESAAISGAALGNHIAEFLQNGEANPEEFAIGLHDRLSPLAGHDIGQFPGLTSVGEKEEANAYQLL

SEQ ID NO: 50414 - protein, 486 aa, Arabidopsis thaliana
  peptide (1)..(486): Ceres Seq. ID no. 13588594
  misc_feature (30)..(378): Homolog of NCBI NO: 15222815 NR Description: expressed protein [Arabidopsis thaliana]
  misc_feature (95)..(418): Homolog of NCBI NO: 23061227 NR Description: hypothetical protein [Pseudomonas fluorescens
  misc_feature (95)..(270): Homolog of NCBI NO: 8778316 NR Description: F14J16.31 [Arabidopsis thaliana]
  misc_feature (263)..(437): Homolog of NCBI NO: 8778316 NR Description: F14J16.31 [Arabidopsis thaliana]
  misc_feature (95)..(418): Homolog of NCBI NO: 15599852 NR Description: hypothetical protein [Pseudomonas aeruginosa
  misc_feature (92)..(345): Homolog of NCBI NO: 34897122 NR Description: hypothetical protein [Oryza sativa]
  misc_feature (40)..(378): Homolog of NCBI NO: 25404080 NR Description: hypothetical protein T6H22.21 [imported] -
  misc_feature (82)..(437): Homolog of NCBI NO: 25404082 NR Description: hypothetical protein T6H22.20 [imported] -
  misc_feature (95)..(437): Homolog of NCBI NO: 22330276 NR Description: amine oxidase-related [Arabidopsis thaliana]
  misc_feature (1)..(486): Homolog of NCBI NO: 18396966 NR Description: expressed protein [Arabidopsis thaliana]
MATSLMSLSSSFLQPLKLKTLAQPRNTDLSTTRKIITTCDSQNNTGKSNPSSRNPNFQKRRNSSKYGTSRRSILKKSFLQEQVTFTARVSDDPHVAIIGGGMAGLVCALNLEARGVQSTVFDTGIHGLGGRLGTRIIEPQGLIFDHAAQFFTADDSRFIKLVDGWLEKGLVREWKGAVGELEIGGSFSQFPSSSPPRYIAANGMRSLADSLLLESQMVNLVRPCWISKLEPLNGMWHLSENGTPRGQFDVIVIAHNGKCANRLLSASGLPLVAKQMKKLDLSSIWALLAAFDDPLPTVNFEGAFVKGVESLSWMGNNSAKLGNGRTPPHCWTFFSTAAYGKQNKVPQENIPTVTAEKVKAGMLQGVEIALGLPEGSLPKPVYTRLQLWGAALPKNTPAVPCIFDPQGRAGICGDWLLGSNLESAAISGAALGNHIAEFLQNGEANPEEFAIGLHDRLSPLAGHDIGQFPGLTSVGEKEEANAYQLL

SEQ ID NO: 50415 - protein, 481 aa, Arabidopsis thaliana
  peptide (1)..(481): Ceres Seq. ID no. 13588595
  misc_feature (25)..(373): Homolog of NCBI NO: 15222815 NR Description: expressed protein [Arabidopsis thaliana]
  misc_feature (90)..(413): Homolog of NCBI NO: 23061227 NR Description: hypothetical protein [Pseudomonas fluorescens
  misc_feature (90)..(265): Homolog of NCBI NO: 8778316 NR Description: F14J16.31 [Arabidopsis thaliana]
  misc_feature (258)..(432): Homolog of NCBI NO: 8778316 NR Description: F14J16.31 [Arabidopsis thaliana]
  misc_feature (90)..(413): Homolog of NCBI NO: 15599852 NR Description: hypothetical protein [Pseudomonas aeruginosa
  misc_feature (87)..(340): Homolog of NCBI NO: 34897122 NR Description: hypothetical protein [Oryza sativa]
  misc_feature (35)..(373): Homolog of NCBI NO: 25404080 NR Description: hypothetical protein T6H22.21 [imported] -
  misc_feature (77)..(432): Homolog of NCBI NO: 25404082 NR Description: hypothetical protein T6H22.20 [imported] -
  misc_feature (90)..(432): Homolog of NCBI NO: 22330276 NR Description: amine oxidase-related [Arabidopsis thaliana]
  misc_feature (1)..(481): Homolog of NCBI NO: 18396966 NR Description: expressed protein [Arabidopsis thaliana]
MSLSSSFLQPLKLKTLAQPRNTDLSTTRKIITTCDSQNNTGKSNPSSRNPNFQKRRNSSKYGTSRRSILKKSFLQEQVTFTARVSDDPHVAIIGGGMAGLVCALNLEARGVQSTVFDTGIHGLGGRLGTRIIEPQGLIFDHAAQFFTADDSRFIKLVDGWLEKGLVREWKGAVGELEIGGSFSQFPSSSPPRYIAANGMRSLADSLLLESQMVNLVRPCWISKLEPLNGMWHLSENGTPRGQFDVIVIAHNGKCANRLLSASGLPLVAKQMKKLDLSSIWALLAAFDDPLPTVNFEGAFVKGVESLSWMGNNSAKLGNGRTPPHCWTFFSTAAYGKQNKVPQENIPTVTAEKVKAGMLQGVEIALGLPEGSLPKPVYTRLQLWGAALPKNTPAVPCIFDPQGRAGICGDWLLGSNLESAAISGAALGNHIAEFLQNGEANPEEFAIGLHDRLSPLAGHDIGQFPGLTSVGEKEEANAYQLL

SEQ ID NO: 50416 - DNA, 1543 bp, Arabidopsis thaliana
  misc_feature (1)..(1543): Ceres Seq. ID no. 12591501
  misc_feature: MA Experiment ID: 20000440 Result: Up-regulated in Transcription
  misc_feature: MA Experiment 20000440 PARAMETER Experiment Name: At_Closed-Flower__Sub_P Parameter: Tissue Value: Closed Flower vs. Whole Plant
gtgttttccagaaggaacacatgatgatgatatataaatcgccataaaacagcaaagagacaaacgaatagcagtcaccagagctacctctttaacgcttaaaggcctctcctttaaaatctcccggataattcttccaagtataaacccgtcgactcattcattcacgggtttcgtttctttcttctggaaaaggtttttggctgtgaagaagatgtttctccacagcagttttagagatggattgtcattgtctcttggtatcatcagtgttatcagttggggtgttgctgagatacctcagattatgactaattacagtgagaaatccactgaaggtctctctattaccttcttaacaacgtggatgattggggatatcttcaatcttcttggctgcttgatggaaccagctactcttccaacacaattctacatggcactgttgtatacagtgactacatcagttctctatgttcaatctatatattacggccatatctacccgcggttgaaaaacagaagagatcagatggttgaagcagaacgtatatcaaacataatcagcgatgttaaaattccgggcagatggagaaatagctctgatactactacttgtggtggtcaaaccacacctatcactatgattcctgggagtcaacgaactagttttaccggaagagaactattttacacgtcggcaagatctttgtcgagtagtcatacaccaccagctggatctgtcttagctcagagaatggctcgtggttacagtgaaccaactcttgaagagcccttgcttcctgaggatgtcacgcatccttccaccaaatcattgctttgcgtggtctcggtgttcttgtttcttggaacattcaaccttcccaatttgctaagtgaatcaagaactatggctttgggtgagggagatagagtatttgtagttcgagcagcaagaaagcttttgcaggtcactagcagcaacgtagcagaacatagcggtggagaaagcagcagaattggaatgtttttgggttgggcaatggcagccatatacatgggtggaaggcttccccaaatatgtctcaatatgaggagagggcatgttgagggattgaatccattgatgttcttctttgcattagttggcaatatgacttatgttgcaagcatactcgtgaacagtgtcgaatggttaaaacttgcaccgaatctaccatggcttgttgatgcaggaggatgtgttgtgcttgattttcttattctgcttcagtttttccacttccgctgtcgcaaagacaaagatactgacaagaagaagcatgaaaccgcagaagctgtctaaggcttgtgactacttcaacaaggcgtcaaagagatacaattttgatttgatctgaccagcaagattcatctcattctaattagttctttctttaatcggattgagttttcaatttttgtgctgatgaaactactcttggattttgagttttaataatataaagttgtttcaactccttagatatgaatgacttgcccc

SEQ ID NO: 50417 - protein, 376 aa, Arabidopsis thaliana
  peptide (1)..(376): Ceres Seq. ID no. 12591502
  misc_feature (8)..(74): Pfam Name: PQ loop repeat Pfam Description: PQ loop repeat
  misc_feature (6)..(173): Homolog of NCBI NO: 18419921 NR Description: putative protein
  misc_feature (6)..(360): Homolog of NCBI NO: 15028159 NR Description: unknown protein [Arabidopsis thaliana]
  misc_feature (247)..(360): Homolog of NCBI NO: 25407768 NR Description: hypothetical protein AT4g36850 [imported] -
  misc_feature (6)..(173): Homolog of NCBI NO: 25407768 NR Description: hypothetical protein AT4g36850 [imported] -
  misc_feature (8)..(111): Homolog of NCBI NO: 15235292 NR Description: putative protein; protein id: At4g20100.1
  misc_feature (184)..(374): Homolog of NCBI NO: 15235292 NR Description: putative protein; protein id: At4g20100.1
  misc_feature (350)..(376): Homolog of NCBI NO: 7487622 NR Description: hypothetical protein At2g41050 [imported] -
  misc_feature (1)..(67): Homolog of NCBI NO: 7487622 NR Description: hypothetical protein At2g41050 [imported] -
  misc_feature (162)..(307): Homolog of NCBI NO: 7487622 NR Description: hypothetical protein At2g41050 [imported] -
  misc_feature (1)..(376): Homolog of NCBI NO: 30688510 NR Description: expressed protein [Arabidopsis thaliana]
MFLHSSFRDGLSLSLGIISVISWGVAEIPQIMTNYSEKSTEGLSITFLTTWMIGDIFNLLGCLMEPATLPTQFYMALLYTVTTSVLYVQSIYYGHIYPRLKNRRDQMVEAERISNIISDVKIPGRWRNSSDTTTCGGQTTPITMIPGSQRTSFTGRELFYTSARSLSSSHTPPAGSVLAQRMARGYSEPTLEEPLLPEDVTHPSTKSLLCVVSVFLFLGTFNLPNLLSESRTMALGEGDRVFVVRAARKLLQVTSSNVAEHSGGESSRIGMFLGWAMAAIYMGGRLPQICLNMRRGHVEGLNPLMFFFALVGNMTYVASILVNSVEWLKLAPNLPWLVDAGGCVVLDFLILLQFFHFRCRKDKDTDKKKHETAEAV

SEQ ID NO: 50418 - protein, 345 aa, Arabidopsis thaliana
  peptide (1)..(345): Ceres Seq. ID no. 12591503
  misc_feature (1)..(142): Homolog of NCBI NO: 18419921 NR Description: putative protein
  misc_feature (1)..(329): Homolog of NCBI NO: 15028159 NR Description: unknown protein [Arabidopsis thaliana]
  misc_feature (216)..(329): Homolog of NCBI NO: 25407768 NR Description: hypothetical protein AT4g36850 [imported] -
  misc_feature (1)..(142): Homolog of NCBI NO: 25407768 NR Description: hypothetical protein AT4g36850 [imported] -
  misc_feature (1)..(80): Homolog of NCBI NO: 15235292 NR Description: putative protein; protein id: At4g20100.1
  misc_feature (153)..(343): Homolog of NCBI NO: 15235292 NR Description: putative protein; protein id: At4g20100.1
  misc_feature (319)..(345): Homolog of NCBI NO: 7487622 NR Description: hypothetical protein At2g41050 [imported] -
  misc_feature (1)..(36): Homolog of NCBI NO: 7487622 NR Description: hypothetical protein At2g41050 [imported] -
  misc_feature (131)..(276): Homolog of NCBI NO: 7487622 NR Description: hypothetical protein At2g41050 [imported] -
  misc_feature (1)..(345): Homolog of NCBI NO: 30688510 NR Description: expressed protein [Arabidopsis thaliana]
MTNYSEKSTEGLSITFLTTWMIGDIFNLLGCLMEPATLPTQFYMALLYTVTTSVLYVQSIYYGHIYPRLKNRRDQMVEAERISNIISDVKIPGRWRNSSDTTTCGGQTTPITMIPGSQRTSFTGRELFYTSARSLSSSHTPPAGSVLAQRMARGYSEPTLEEPLLPEDVTHPSTKSLLCVVSVFLFLGTFNLPNLLSESRTMALGEGDRVFVVRAARKLLQVTSSNVAEHSGGESSRIGMFLGWAMAAIYMGGRLPQICLNMRRGHVEGLNPLMFFFALVGNMTYVASILVNSVEWLKLAPNLPWLVDAGGCVVLDFLILLQFFHFRCRKDKDTDKKKHETAEAV

SEQ ID NO: 50419 - protein, 325 aa, Arabidopsis thaliana
  peptide (1)..(325): Ceres Seq. ID no. 12591504
  misc_feature (1)..(122): Homolog of NCBI NO: 18419921 NR Description: putative protein
  misc_feature (1)..(309): Homolog of NCBI NO: 15028159 NR Description: unknown protein [Arabidopsis thaliana]
  misc_feature (196)..(309): Homolog of NCBI NO: 25407768 NR Description: hypothetical protein AT4g36850 [imported] -
  misc_feature (1)..(122): Homolog of NCBI NO: 25407768 NR Description: hypothetical protein AT4g36850 [imported] -
  misc_feature (1)..(60): Homolog of NCBI NO: 15235292 NR Description: putative protein; protein id: At4g20100.1
  misc_feature (133)..(323): Homolog of NCBI NO: 15235292 NR Description: putative protein; protein id: At4g20100.1
  misc_feature (299)..(325): Homolog of NCBI NO: 7487622 NR Description: hypothetical protein At2g41050 [imported] -
  misc_feature (1)..(16): Homolog of NCBI NO: 7487622 NR Description: hypothetical protein At2g41050 [imported] -
  misc_feature (111)..(256): Homolog of NCBI NO: 7487622 NR Description: hypothetical protein At2g41050 [imported] -
  misc_feature (1)..(325): Homolog of NCBI NO: 30688510 NR Description: expressed protein [Arabidopsis thaliana]
MIGDIFNLLGCLMEPATLPTQFYMALLYTVTTSVLYVQSIYYGHIYPRLKNRRDQMVEAERISNIISDVKIPGRWRNSSDTTTCGGQTTPITMIPGSQRTSFTGRELFYTSARSLSSSHTPPAGSVLAQRMARGYSEPTLEEPLLPEDVTHPSTKSLLCVVSVFLFLGTFNLPNLLSESRTMALGEGDRVFVVRAARKLLQVTSSNVAEHSGGESSRIGMFLGWAMAAIYMGGRLPQICLNMRRGHVEGLNPLMFFFALVGNMTYVASILVNSVEWLKLAPNLPWLVDAGGCVVLDFLILLQFFHFRCRKDKDTDKKKHETAEAV

SEQ ID NO: 50420 - DNA, 1710 bp, Arabidopsis thaliana; identical to SEQ ID NO: 44104
  misc_feature (1)..(1710): Ceres Seq. ID no. 12488449
  misc_feature: MA Experiment ID: 20000179 Result: Up-regulated in Transcription
  misc_feature: MA Experiment 20000179 PARAMETER Experiment Name: At_Germinating_Seeds_P Parameter: Age (hr) Value: 6 vs. 0
  misc_feature: MA Experiment 20000179 PARAMETER Experiment Name: At_Germinating_Seeds_P Parameter: Tissue Value: Germinating Seeds
  misc_feature: MA Experiment ID: 20000180 Result: Up-regulated in Transcription
  misc_feature: MA Experiment 20000180 PARAMETER Experiment Name: At_Germinating_Seeds_P Parameter: Age (hr) Value: 24 vs. 0
  misc_feature: MA Experiment 20000180 PARAMETER Experiment Name: At_Germinating_Seeds_P Parameter: Tissue Value: Germinating Seeds
  misc_feature: MA Experiment ID: 20000184 Result: Up-regulated in Transcription
  misc_feature: MA Experiment 20000184 PARAMETER Experiment Name: At_Shoots__P Parameter: Age (day) Value: 7
  misc_feature: MA Experiment 20000184 PARAMETER Experiment Name: At_Shoots__P Parameter: Tissue Value: Shoots vs. Whole Plant
  misc_feature: MA Experiment ID: 20000185 Result: Up-regulated in Transcription
  misc_feature: MA Experiment 20000185 PARAMETER Experiment Name: At_Roots__P Parameter: Age (day) Value: 7 vs. 21
  misc_feature: MA Experiment 20000185 PARAMETER Experiment Name: At_Roots__P Parameter: Organism Value: A. thaliana
  misc_feature: MA Experiment 20000185 PARAMETER Experiment Name: At_Roots__P Parameter: Tissue Value: Roots vs. Whole Plant
  misc_feature: MA Experiment ID: 20000214 Result: Down-regulated in Transcription
  misc_feature: MA Experiment 20000214 PARAMETER Experiment Name: At_4deg_Cold_P Parameter: Timepoint (hr) Value: 6
  misc_feature: MA Experiment ID: 20000234 Result: Up-regulated in Transcription
  misc_feature: MA Experiment 20000234 PARAMETER Experiment Name: At_Siliques_P Parameter: Age (day) Value: 21
  misc_feature: MA Experiment 20000234 PARAMETER Experiment Name: At_Siliques_P Parameter: Organism Value: A. thaliana
  misc_feature: MA Experiment 20000234 PARAMETER Experiment Name: At_Siliques_P Parameter: Plant Line Value: WS
  misc_feature: MA Experiment 20000234 PARAMETER Experiment Name: At_Siliques_P Parameter: Tissue Value: Less Than 5mm Siliques vs. Whole Plant
  misc_feature: MA Experiment ID: 20000265 Result: Up-regulated in Transcription
  misc_feature: MA Experiment 20000265 PARAMETER Experiment Name: At_Open_Flower_P Parameter: Age (day) Value: 21
  misc_feature: MA Experiment 20000265 PARAMETER Experiment Name: At_Open_Flower_P Parameter: Plant Line Value: WS
  misc_feature: MA Experiment 20000265 PARAMETER Experiment Name: At_Open_Flower_P Parameter: Tissue Value: Closed Flower vs. Whole Plant
  misc_feature: MA Experiment ID: 20000794 Result: Down-regulated in Transcription
  misc_feature: MA Experiment 20000794 PARAMETER Experiment Name: At_Petals_P Parameter: Age (day) Value: 23-25 days
  misc_feature: MA Experiment 20000794 PARAMETER Experiment Name: At_Petals_P Parameter: Plant Line Value: WS
  misc_feature: MA Experiment 20000794 PARAMETER Experiment Name: At_Petals_P Parameter: Tissue Value: Petals vs. Whole plant
  misc_feature: MA Experiment ID: 20001560 Result: Up-regulated in Transcription
  misc_feature: MA Experiment 20001560 PARAMETER Experiment Name: At_Drought_Soil_Dry_P Parameter: Age (day) Value: 28
  misc_feature: MA Experiment 20001560 PARAMETER Experiment Name: At_Drought_Soil_Dry_P Parameter: Organism Value: A. thaliana
  misc_feature: MA Experiment 20001560 PARAMETER Experiment Name: At_Drought_Soil_Dry_P Parameter: Plant Line Value: WS
  misc_feature: MA Experiment 20001560 PARAMETER Experiment Name: At_Drought_Soil_Dry_P Parameter: Post Timepoint (hr) Value: None
  misc_feature: MA Experiment 20001560 PARAMETER Experiment Name: At_Drought_Soil_Dry_P Parameter: Post-Treatment Value: None
  misc_feature: MA Experiment 20001560 PARAMETER Experiment Name: At_Drought_Soil_Dry_P Parameter: Timepoint (day) Value: 14
  misc_feature: MA Experiment 20001560 PARAMETER Experiment Name: At_Drought_Soil_Dry_P Parameter: Treatment Value: Drought vs. No Drought
  misc_feature: MA Experiment ID: 20001911 Result: Down-regulated in Transcription
  misc_feature: MA Experiment 20001911 PARAMETER Experiment Name: At_Drought_Reproduction_P Parameter: Age (day) Value: 40
  misc_feature: MA Experiment 20001911 PARAMETER Experiment Name: At_Drought_Reproduction_P Parameter: Organism Value: A. thaliana
  misc_feature: MA Experiment 20001911 PARAMETER Experiment Name: At_Drought_Reproduction_P Parameter: Plant Line Value: WS
  misc_feature: MA Experiment 20001911 PARAMETER Experiment Name: At_Drought_Reproduction_P Parameter: Timepoint (day) Value: 10
  misc_feature: MA Experiment 20001911 PARAMETER Experiment Name: At_Drought_Reproduction_P Parameter: Tissue Value: Flowers
  misc_feature: MA Experiment 20001911 PARAMETER Experiment Name: At_Drought_Reproduction_P Parameter: Treatment Value: Drought vs. No Drought

SEQ ID NO: 50421 - protein, 504 aa, Arabidopsis thaliana; identical to SEQ ID NO: 44105
  peptide (1)..(504): Ceres Seq. ID no. 12488450
  misc_feature (280)..(504): Pfam Name: 2-oxoacid dehydrogenases acyltransferase Pfam Description: 2-oxoacid dehydrogenases acyltransferase
  misc_feature (280)..(504): Pfam Name: 2-oxoacid dehydrogenases acyltransferase Pfam Description: 2-oxoacid dehydrogenases acyltransferase
  misc_feature (79)..(504): Homolog of NCBI NO: 17231098 NR Description: dihydrolipoamide S-acetyltransferase [Nostoc sp.
  misc_feature (79)..(504): Homolog of NCBI NO: 22298842 NR Description: dihydrolipoamide S-acetyltransferase
  misc_feature (79)..(504): Homolog of NCBI NO: 23123757 NR Description: hypothetical protein [Nostoc punctiforme]
  misc_feature (79)..(504): Homolog of NCBI NO: 16331208 NR Description: dihydrolipoamide acetyltransferase component (E2)
  misc_feature (53)..(503): Homolog of NCBI NO: 25286434 NR Description: protein F12K21.24 [imported] - Arabidopsis
  misc_feature (79)..(504): Homolog of NCBI NO: 17231098 NR Description: dihydrolipoamide S-acetyltransferase [Nostoc sp.
  misc_feature (79)..(504): Homolog of NCBI NO: 23123757 NR Description: hypothetical protein [Nostoc punctiforme]
  misc_feature (53)..(503): Homolog of NCBI NO: 25286434 NR Description: protein F12K21.24 [imported] - Arabidopsis
  misc_feature (25)..(504): Homolog of NCBI NO: 15230922 NR Description: dihydrolipoamide S-acetyltransferase
  misc_feature (73)..(504): Homolog of NCBI NO: 9279589 NR Description: dihydrolipoamide S-acetyltransferase [Arabidopsis
  misc_feature (136)..(504): Homolog of NCBI NO: 21954074 NR Description: putative dihydrolipoamide S-acetyltransferase
  misc_feature (53)..(503): Homolog of NCBI NO: 15218630 NR Description: dihydrolipoamide S-acetyltransferase, putative
  misc_feature (53)..(503): Homolog of NCBI NO: 21536525 NR Description: dihydrolipoamide S-acetyltransferase, putative
  misc_feature (79)..(504): Homolog of NCBI NO: 16331208 NR Description: dihydrolipoamide acetyltransferase component (E2)
  misc_feature (79)..(504): Homolog of NCBI NO: 22298842 NR Description: dihydrolipoamide S-acetyltransferase
  misc_feature (53)..(503): Homolog of NCBI NO: 21536525 NR Description: dihydrolipoamide S-acetyltransferase, putative
  misc_feature (53)..(503): Homolog of NCBI NO: 15218630 NR Description: dihydrolipoamide S-acetyltransferase, putative
  misc_feature (136)..(504): Homolog of NCBI NO: 21954074 NR Description: putative dihydrolipoamide S-acetyltransferase
  misc_feature (73)..(504): Homolog of NCBI NO: 9279589 NR Description: dihydrolipoamide S-acetyltransferase [Arabidopsis
  misc_feature (25)..(504): Homolog of NCBI NO: 15230922 NR Description: dihydrolipoamide S-acetyltransferase

SEQ ID NO: 50422 - protein, 480 aa, Arabidopsis thaliana; identical to SEQ ID NO: 44106
  peptide (1)..(480): Ceres Seq. ID no. 12488451
  misc_feature (256)..(480): Pfam Name: 2-oxoacid dehydrogenases acyltransferase Pfam Description: 2-oxoacid dehydrogenases acyltransferase
  misc_feature (256)..(480): Pfam Name: 2-oxoacid dehydrogenases acyltransferase Pfam Description: 2-oxoacid dehydrogenases acyltransferase
  misc_feature (55)..(480): Homolog of NCBI NO: 17231098 NR Description: dihydrolipoamide S-acetyltransferase [Nostoc sp.
  misc_feature (55)..(480): Homolog of NCBI NO: 22298842 NR Description: dihydrolipoamide S-acetyltransferase
  misc_feature (55)..(480): Homolog of NCBI NO: 23123757 NR Description: hypothetical protein [Nostoc punctiforme]
  misc_feature (55)..(480): Homolog of NCBI NO: 16331208 NR Description: dihydrolipoamide acetyltransferase component (E2)
  misc_feature (29)..(479): Homolog of NCBI NO: 25286434 NR Description: protein F12K21.24 [imported] - Arabidopsis
  misc_feature (55)..(480): Homolog of NCBI NO: 17231098 NR Description: dihydrolipoamide S-acetyltransferase [Nostoc sp.
  misc_feature (55)..(480): Homolog of NCBI NO: 23123757 NR Description: hypothetical protein [Nostoc punctiforme]
  misc_feature (29)..(479): Homolog of NCBI NO: 25286434 NR Description: protein F12K21.24 [imported] - Arabidopsis
  misc_feature (1)..(480): Homolog of NCBI NO: 15230922 NR Description: dihydrolipoamide S-acetyltransferase
  misc_feature (49)..(480): Homolog of NCBI NO: 9279589 NR Description: dihydrolipoamide S-acetyltransferase [Arabidopsis
  misc_feature (112)..(480): Homolog of NCBI NO: 21954074 NR Description: putative dihydrolipoamide S-acetyltransferase
  misc_feature (29)..(479): Homolog of NCBI NO: 15218630 NR Description: dihydrolipoamide S-acetyltransferase, putative
  misc_feature (29)..(479): Homolog of NCBI NO: 21536525 NR Description: dihydrolipoamide S-acetyltransferase, putative
  misc_feature (55)..(480): Homolog of NCBI NO: 16331208 NR Description: dihydrolipoamide acetyltransferase component (E2)
  misc_feature (55)..(480): Homolog of NCBI NO: 22298842 NR Description: dihydrolipoamide S-acetyltransferase
  misc_feature (29)..(479): Homolog of NCBI NO: 21536525 NR Description: dihydrolipoamide S-acetyltransferase, putative
  misc_feature (29)..(479): Homolog of NCBI NO: 15218630 NR Description: dihydrolipoamide S-acetyltransferase, putative
  misc_feature (112)..(480): Homolog of NCBI NO: 21954074 NR Description: putative dihydrolipoamide S-acetyltransferase
  misc_feature (49)..(480): Homolog of NCBI NO: 9279589 NR Description: dihydrolipoamide S-acetyltransferase [Arabidopsis
  misc_feature (1)..(480): Homolog of NCBI NO: 15230922 NR Description: dihydrolipoamide S-acetyltransferase

SEQ ID NO: 50423 - protein, 432 aa, Arabidopsis thaliana; identical to SEQ ID NO: 44107
  peptide (1)..(432): Ceres Seq. ID no. 12488452
  misc_feature (208)..(432): Pfam Name: 2-oxoacid dehydrogenases acyltransferase Pfam Description: 2-oxoacid dehydrogenases acyltransferase
  misc_feature (208)..(432): Pfam Name: 2-oxoacid dehydrogenases acyltransferase Pfam Description: 2-oxoacid dehydrogenases acyltransferase
  misc_feature (7)..(432): Homolog of NCBI NO: 17231098 NR Description: dihydrolipoamide S-acetyltransferase [Nostoc sp.
  misc_feature (7)..(432): Homolog of NCBI NO: 22298842 NR Description: dihydrolipoamide S-acetyltransferase
  misc_feature (7)..(432): Homolog of NCBI NO: 23123757 NR Description: hypothetical protein [Nostoc punctiforme]
  misc_feature (7)..(432): Homolog of NCBI NO: 16331208 NR Description: dihydrolipoamide acetyltransferase component (E2)
  misc_feature (1)..(431): Homolog of NCBI NO: 25286434 NR Description: protein F12K21.24 [imported] - Arabidopsis
  misc_feature (7)..(432): Homolog of NCBI NO: 17231098 NR Description: dihydrolipoamide S-acetyltransferase [Nostoc sp.
  misc_feature (7)..(432): Homolog of NCBI NO: 23123757 NR Description: hypothetical protein [Nostoc punctiforme]
  misc_feature (1)..(431): Homolog of NCBI NO: 25286434 NR Description: protein F12K21.24 [imported] - Arabidopsis
  misc_feature (1)..(432): Homolog of NCBI NO: 15230922 NR Description: dihydrolipoamide S-acetyltransferase
  misc_feature (1)..(432): Homolog of NCBI NO: 9279589 NR Description: dihydrolipoamide S-acetyltransferase [Arabidopsis
  misc_feature (64)..(432): Homolog of NCBI NO: 21954074 NR Description: putative dihydrolipoamide S-acetyltransferase
  misc_feature (1)..(431): Homolog of NCBI NO: 15218630 NR Description: dihydrolipoamide S-acetyltransferase, putative
  misc_feature (1)..(431): Homolog of NCBI NO: 21536525 NR Description: dihydrolipoamide S-acetyltransferase, putative
  misc_feature (7)..(432): Homolog of NCBI NO: 16331208 NR Description: dihydrolipoamide acetyltransferase component (E2)
  misc_feature (7)..(432): Homolog of NCBI NO: 22298842 NR Description: dihydrolipoamide S-acetyltransferase
  misc_feature (1)..(431): Homolog of NCBI NO: 21536525 NR Description: dihydrolipoamide S-acetyltransferase, putative
  misc_feature (1)..(431): Homolog of NCBI NO: 15218630 NR Description: dihydrolipoamide S-acetyltransferase, putative
  misc_feature (64)..(432): Homolog of NCBI NO: 21954074 NR Description: putative dihydrolipoamide S-acetyltransferase
  misc_feature (1)..(432): Homolog of NCBI NO: 9279589 NR Description: dihydrolipoamide S-acetyltransferase [Arabidopsis
  misc_feature (1)..(432): Homolog of NCBI NO: 15230922 NR Description: dihydrolipoamide S-acetyltransferase

SEQ ID NO: 50424 - DNA, 809 bp, Arabidopsis thaliana
  misc_feature (1)..(809): Ceres Seq. ID no. 13588817
  misc_feature: MA Experiment ID: 20000184 Result: Down-regulated in Transcription
  misc_feature: MA Experiment 20000184 PARAMETER Experiment Name: At_Shoots__P Parameter: Age (day) Value: 7
  misc_feature: MA Experiment 20000184 PARAMETER Experiment Name: At_Shoots__P Parameter: Tissue Value: Shoots vs. Whole Plant
agttggactgaaggagaaagaacggcggagaaggagattacggcgatagtgtttgatctgtcatctatggaagcggtagaaaaacccgaagaaacaatcccagggaattcttcaagattagctggaaatcccaactggggaacagcaactgttgttggagtatttgcaggattgctatatggagggagcaaagaagcttctgcttctgtgagcaaagatgcagaagtgatgttgaagatgggtagtacacaggataagcgtgaacaacacaggttgatgcgagatgcaatggagaaaaggttcatccgagtaactcgtggctccctcattggagggatgcgtcttggaatgttcactgcttccttctttagtctacaaaactttttagctgagacccgaggagtgcatgatgttttcaatgtggttggagctggttcagctactgctgcagtttttggcctaatcatgccggggtctcttgcttggcgtgcgcggaatgtgttgcttggttcagttcttggagccacagtgtgcttccctcttgggtgggtacaactgaagctcatgaagaaagcaaacgaaggcaataacgttgacacaggccaccacggtgaggtcacgagtggtgttggtgcagccattgagagactcgaacaacagttgagaaaataaagaagggaacgcgcacagttttgtatgctaaattcgcttctctgaagcaaatgagaataagataccaaacagaaacagtgtgttcttgtgtaattgcaacaattttcgaatatacaaaaatatcaaaacattgatgg

SEQ ID NO: 50425 - protein, 223 aa, Arabidopsis thaliana
  peptide (1)..(223): Ceres Seq. ID no. 13588818
  misc_feature (27)..(223): Homolog of NCBI NO: 34903198 NR Description: unnamed protein product [Oryza sativa (japonica
  misc_feature (4)..(208): Homolog of NCBI NO: 9758300 NR Description: contains similarity to unknown
  misc_feature (23)..(223): Homolog of NCBI NO: 15242587 NR Description: expressed protein [Arabidopsis thaliana]
SWTEGERTAEKEITAIVFDLSSMEAVEKPEETIPGNSSRLAGNPNWGTATVVGVFAGLLYGGSKEASASVSKDAEVMLKMGSTQDKREQHRLMRDAMEKRFIRVTRGSLIGGMRLGMFTASFFSLQNFLAETRGVHDVFNVVGAGSATAAVFGLIMPGSLAWRARNVLLGSVLGATVCFPLGWVQLKLMKKANEGNNVDTGHHGEVTSGVGAAIERLEQQLRK

SEQ ID NO: 50426 - protein, 201 aa, Arabidopsis thaliana
  peptide (1)..(201): Ceres Seq. ID no. 13588819
  misc_feature (5)..(201): Homolog of NCBI NO: 34903198 NR Description: unnamed protein product [Oryza sativa (japonica
  misc_feature (1)..(186): Homolog of NCBI NO: 9758300 NR Description: contains similarity to unknown
  misc_feature (1)..(201): Homolog of NCBI NO: 15242587 NR Description: expressed protein [Arabidopsis thaliana]
MEAVEKPEETIPGNSSRLAGNPNWGTATVVGVFAGLLYGGSKEASASVSKDAEVMLKMGSTQDKREQHRLMRDAMEKRFIRVTRGSLIGGMRLGMFTASFFSLQNFLAETRGVHDVFNVVGAGSATAAVFGLIMPGSLAWRARNVLLGSVLGATVCFPLGWVQLKLMKKANEGNNVDTGHHGEVTSGVGAAIERLEQQLRK

SEQ ID NO: 50427 - protein, 147 aa, Arabidopsis thaliana
  peptide (1)..(147): Ceres Seq. ID no. 13588820
  misc_feature (1)..(147): Homolog of NCBI NO: 34903198 NR Description: unnamed protein product [Oryza sativa (japonica
  misc_feature (1)..(132): Homolog of NCBI NO: 9758300 NR Description: contains similarity to unknown
  misc_feature (1)..(147): Homolog of NCBI NO: 15242587 NR Description: expressed protein [Arabidopsis thaliana]
MLKMGSTQDKREQHRLMRDAMEKRFIRVTRGSLIGGMRLGMFTASFFSLQNFLAETRGVHDVFNVVGAGSATAAVFGLIMPGSLAWRARNVLLGSVLGATVCFPLGWVQLKLMKKANEGNNVDTGHHGEVTSGVGAAIERLEQQLRK

SEQ ID NO: 50428 - DNA, 1765 bp, Arabidopsis thaliana
  misc_feature (1)..(1765): Ceres Seq. ID no. 13588825
  misc_feature: MA Experiment ID: 20000307 Result: Up-regulated in Transcription
  misc_feature: MA Experiment 20000307 PARAMETER Experiment Name: At_Germinating_Seeds_Sub_P Parameter: Age (hr) Value: 24 vs. 0
  misc_feature: MA Experiment 20000307 PARAMETER Experiment Name: At_Germinating_Seeds_Sub_P Parameter: Organism Value: A. thaliana
  misc_feature: MA Experiment 20000307 PARAMETER Experiment Name: At_Germinating_Seeds_Sub_P Parameter: Plant Line Value: WS
  misc_feature: MA Experiment 20000307 PARAMETER Experiment Name: At_Germinating_Seeds_Sub_P Parameter: Tissue Value: Germinating Seeds
ccttttatctgtagatttttttgcagtaaaaaaaagaaaaaacagaaacatttttaactatttatctcttcttcttcatctccttcgtccttgaagcttaaactagcgcactccagtaaaagcagaggagaagagaagagagacggcgcagagtagcattgacatgcgaaatgtgcctctcagaattcttatcctacgcctgtttcaatttcttctccaccatgaaagttttctgattgctctttcctcagaaattttgaagcttcgtagtttcttctgcattcctcgcaatgcattggattacgagattctctgctttcttctccgccgcattagccatgattctcctttctccttcgctccaatccttttctccggcggcagctatccgatcatctcacccctacgccgacgaattcaaaccccaacaaaactccgattactcctccttcagagaatctccaatgttccgtaacgccgaacaatgcagatcttccggcgaagattccggcgtctgtaaccctaatctcgtccacgtagccatcactctcgacatcgattacctccgtggctcaatcgcagccgtcaattcgatcctccagcactcaatgtgccctcaaagcgtcttcttccacttcctcgtctcctccgagtctcaaaacctagaatctctgattcgttctactttccccaaattgacgaatctcaaaatttactattttgcccctgagaccgtacagtctttgatttcatcttccgtgagacaagccctagagcaaccgttgaattacgccagaaattacttggcggatctgctcgagccttgcgttaagcgagtcatctacttggattcggatctcgtcgtcgtcgatgatatcgtcaagctttggaaaacgggtttaggccagagaacaatcggagctccggagtattgtcacgcgaatttcacgaaatacttcaccggaggtttttggtcagataagaggtttaacgggacgttcaaagggaggaacccttgttacttcaatactggtgtaatggtgattgatttgaagaagtggagacaatttaggttcacgaaacgaattgagaaatggatggagattcagaagatagagaggatttatgagcttggttctcttcctccgtttcttctggtatttgctggtcatgtagctccgatttcacatcggtggaatcaacatgggcttggtggtgataatgttagaggtagttgccgtgatttgcattctggtcctgtgagtttgcttcactggtcaggtagtggtaagccatggttaagactcgattccaagcttccatgtcctttagacacattgtgggcaccttatgatttgtataaacactcccattgatgccaatttcgagttcgacatattcatggtcatggggactaaaccgaagatagcagagttgcaatggtggttttcaactggaaacaactatgttgaagattgagtaaaccctgccggaacagagtgctatagtagtgttgcttcggacagttcaaccagaccgtagacacaatttagaagagtgaacttcgttttaagtgttgtaccggcggttaaatatgttcttgtgggaagaaaaaaaataaaaatatagttaggtcattcacacatagctcaggttaaagcgtttttgttgtttatgattggtcctataagtaattttgtgcagactctagtccttactttggttctcaaaagtctttagaaatctatggttaaagattttacct

SEQ ID NO: 50429 - protein, 361 aa, Arabidopsis thaliana
  peptide (1)..(361): Ceres Seq. ID no. 13588826
  misc_feature (49)..(360): Homolog of NCBI NO: 18391493 NR Description: glycosyltransferase family 8 [Arabidopsis
  misc_feature (17)..(360): Homolog of NCBI NO: 12003394 NR Description: Avr9/Cf-9 rapidly elicited protein 231 [Nicotiana
  misc_feature (49)..(359): Homolog of NCBI NO: 15221684 NR Description: glycosyltransferase family 8 [Arabidopsis
  misc_feature (50)..(359): Homolog of NCBI NO: 18409445 NR Description: glycosyltransferase family 8 [Arabidopsis
  misc_feature (1)..(328): Homolog of NCBI NO: 20258800 NR Description: putative glycosyl transferase [Arabidopsis
  misc_feature (6)..(359): Homolog of NCBI NO: 11281926 NR Description: hypothetical protein F26K9.90 - Arabidopsis
  misc_feature (1)..(359): Homolog of NCBI NO: 22331906 NR Description: glycosyltransferase family 8 [Arabidopsis
  misc_feature (1)..(361): Homolog of NCBI NO: 21554300 NR Description: putative glycosyl transferase [Arabidopsis
  misc_feature (1)..(361): Homolog of NCBI NO: 15235247 NR Description: glycosyltransferase family 8 [Arabidopsis
  misc_feature (1)..(361): Homolog of NCBI NO: 15217851 NR Description: glycosyltransferase family 8 [Arabidopsis
MHWITRFSAFFSAALAMILLSPSLQSFSPAAAIRSSHPYADEFKPQQNSDYSSFRESPMFRNAEQCRSSGEDSGVCNPNLVHVAITLDIDYLRGSIAAVNSILQHSMCPQSVFFHFLVSSESQNLESLIRSTFPKLTNLKIYYFAPETVQSLISSSVRQALEQPLNYARNYLADLLEPCVKRVIYLDSDLVVVDDIVKLWKTGLGQRTIGAPEYCHANFTKYFTGGFWSDKRFNGTFKGRNPCYFNTGVMVIDLKKWRQFRFTKRIEKWMEIQKIERIYELGSLPPFLLVFAGHVAPISHRWNQHGLGGDNVRGSCRDLHSGPVSLLHWSGSGKPWLRLDSKLPCPLDTLWAPYDLYKHSH

SEQ ID NO: 50430 - protein, 345 aa, Arabidopsis thaliana
  peptide (1)..(345): Ceres Seq. ID no. 13588827
  misc_feature (33)..(344): Homolog of NCBI NO: 18391493 NR Description: glycosyltransferase family 8 [Arabidopsis
  misc_feature (1)..(344): Homolog of NCBI NO: 12003394 NR Description: Avr9/Cf-9 rapidly elicited protein 231 [Nicotiana
  misc_feature (33)..(343): Homolog of NCBI NO: 15221684 NR Description: glycosyltransferase family 8 [Arabidopsis
  misc_feature (34)..(343): Homolog of NCBI NO: 18409445 NR Description: glycosyltransferase family 8 [Arabidopsis
  misc_feature (1)..(312): Homolog of NCBI NO: 20258800 NR Description: putative glycosyl transferase [Arabidopsis
  misc_feature (1)..(343): Homolog of NCBI NO: 11281926 NR Description: hypothetical protein F26K9.90 - Arabidopsis
  misc_feature (1)..(343): Homolog of NCBI NO: 22331906 NR Description: glycosyltransferase family 8 [Arabidopsis
  misc_feature (1)..(345): Homolog of NCBI NO: 21554300 NR Description: putative glycosyl transferase [Arabidopsis
  misc_feature (1)..(345): Homolog of NCBI NO: 15235247 NR Description: glycosyltransferase family 8 [Arabidopsis
  misc_feature (1)..(345): Homolog of NCBI NO: 15217851 NR Description: glycosyltransferase family 8 [Arabidopsis
MILLSPSLQSFSPAAAIRSSHPYADEFKPQQNSDYSSFRESPMFRNAEQCRSSGEDSGVCNPNLVHVAITLDIDYLRGSIAAVNSILQHSMCPQSVFFHFLVSSESQNLESLIRSTFPKLTNLKIYYFAPETVQSLISSSVRQALEQPLNYARNYLADLLEPCVKRVIYLDSDLVVVDDIVKLWKTGLGQRTIGAPEYCHANFTKYFTGGFWSDKRFNGTFKGRNPCYFNTGVMVIDLKKWRQFRFTKRIEKWMEIQKIERIYELGSLPPFLLVFAGHVAPISHRWNQHGLGGDNVRGSCRDLHSGPVSLLHWSGSGKPWLRLDSKLPCPLDTLWAPYDLYKHSH

SEQ ID NO: 50431 - protein, 303 aa, Arabidopsis thaliana
  peptide (1)..(303): Ceres Seq. ID no. 13588828
  misc_feature (1)..(302): Homolog of NCBI NO: 18391493 NR Description: glycosyltransferase family 8 [Arabidopsis
  misc_feature (1)..(302): Homolog of NCBI NO: 12003394 NR Description: Avr9/Cf-9 rapidly elicited protein 231 [Nicotiana
  misc_feature (1)..(301): Homolog of NCBI NO: 15221684 NR Description: glycosyltransferase family 8 [Arabidopsis
  misc_feature (1)..(301): Homolog of NCBI NO: 18409445 NR Description: glycosyltransferase family 8 [Arabidopsis
  misc_feature (1)..(270): Homolog of NCBI NO: 20258800 NR Description: putative glycosyl transferase [Arabidopsis
  misc_feature (1)..(301): Homolog of NCBI NO: 11281926 NR Description: hypothetical protein F26K9.90 - Arabidopsis
  misc_feature (1)..(301): Homolog of NCBI NO: 22331906 NR Description: glycosyltransferase family 8 [Arabidopsis
  misc_feature (1)..(303): Homolog of NCBI NO: 21554300 NR Description: putative glycosyl transferase [Arabidopsis
  misc_feature (1)..(303): Homolog of NCBI NO: 15235247 NR Description: glycosyltransferase family 8 [Arabidopsis
  misc_feature (1)..(303): Homolog of NCBI NO: 15217851 NR Description: glycosyltransferase family 8 [Arabidopsis
MFRNAEQCRSSGEDSGVCNPNLVHVAITLDIDYLRGSIAAVNSILQHSMCPQSVFFHFLVSSESQNLESLIRSTFPKLTNLKIYYFAPETVQSLISSSVRQALEQPLNYARNYLADLLEPCVKRVIYLDSDLVVVDDIVKLWKTGLGQRTIGAPEYCHANFTKYFTGGFWSDKRFNGTFKGRNPCYFNTGVMVIDLKKWRQFRFTKRIEKWMEIQKIERIYELGSLPPFLLVFAGHVAPISHRWNQHGLGGDNVRGSCRDLHSGPVSLLHWSGSGKPWLRLDSKLPCPLDTLWAPYDLYKHSH

SEQ ID NO: 50432 - DNA, 1659 bp, Arabidopsis thaliana
  misc_feature (1)..(1659): Ceres Seq. ID no. 12591509
  misc_feature: MA Experiment ID: 20000307 Result: Up-regulated in Transcription
  misc_feature: MA Experiment 20000307 PARAMETER Experiment Name: At_Germinating_Seeds_Sub_P Parameter: Age (hr) Value: 24 vs. 0
  misc_feature: MA Experiment 20000307 PARAMETER Experiment Name: At_Germinating_Seeds_Sub_P Parameter: Organism Value: A. thaliana
  misc_feature: MA Experiment 20000307 PARAMETER Experiment Name: At_Germinating_Seeds_Sub_P Parameter: Plant Line Value: WS
  misc_feature: MA Experiment 20000307 PARAMETER Experiment Name: At_Germinating_Seeds_Sub_P Parameter: Tissue Value: Germinating Seeds
  misc_feature: MA Experiment ID: 20000348 Result: Up-regulated in Transcription
  misc_feature: MA Experiment 20000348 PARAMETER Experiment Name: At_100uM_ABA_Sub_P Parameter: Age (day) Value: 14
  misc_feature: MA Experiment 20000348 PARAMETER Experiment Name: At_100uM_ABA_Sub_P Parameter: Organism Value: A. thaliana
  misc_feature: MA Experiment 20000348 PARAMETER Experiment Name: At_100uM_ABA_Sub_P Parameter: Plant Line Value: WS
  misc_feature: MA Experiment 20000348 PARAMETER Experiment Name: At_100uM_ABA_Sub_P Parameter: Timepoint (hr) Value: 1
  misc_feature: MA Experiment 20000348 PARAMETER Experiment Name: At_100uM_ABA_Sub_P Parameter: Tissue Value: Aerial
  misc_feature: MA Experiment 20000348 PARAMETER Experiment Name: At_100uM_ABA_Sub_P Parameter: Treatment Value: 100uM ABA vs. No Treatment
  misc_feature: MA Experiment ID: 20000349 Result: Up-regulated in Transcription
  misc_feature: MA Experiment 20000349 PARAMETER Experiment Name: At_100uM_ABA_Sub_P Parameter: Age (day) Value: 14
  misc_feature: MA Experiment 20000349 PARAMETER Experiment Name: At_100uM_ABA_Sub_P Parameter: Organism Value: A. thaliana
  misc_feature: MA Experiment 20000349 PARAMETER Experiment Name: At_100uM_ABA_Sub_P Parameter: Plant Line Value: WS
  misc_feature: MA Experiment 20000349 PARAMETER Experiment Name: At_100uM_ABA_Sub_P Parameter: Timepoint (hr) Value: 6
  misc_feature: MA Experiment 20000349 PARAMETER Experiment Name: At_100uM_ABA_Sub_P Parameter: Tissue Value: Aerial
  misc_feature: MA Experiment 20000349 PARAMETER Experiment Name: At_100uM_ABA_Sub_P Parameter: Treatment Value: 100uM ABA vs. No Treatment
  misc_feature: MA Experiment ID: 20000352 Result: Up-regulated in Transcription
  misc_feature: MA Experiment 20000352 PARAMETER Experiment Name: At_Drought_Sub_P Parameter: Age (day) Value: 7
  misc_feature: MA Experiment 20000352 PARAMETER Experiment Name: At_Drought_Sub_P Parameter: Organism Value: A. thaliana
  misc_feature: MA Experiment 20000352 PARAMETER Experiment Name: At_Drought_Sub_P Parameter: Plant Line Value: WS
  misc_feature: MA Experiment 20000352 PARAMETER Experiment Name: At_Drought_Sub_P Parameter: Timepoint (hr) Value: 6
  misc_feature: MA Experiment 20000352 PARAMETER Experiment Name: At_Drought_Sub_P Parameter: Tissue Value: Whole Plant
  misc_feature: MA Experiment 20000352 PARAMETER Experiment Name: At_Drought_Sub_P Parameter: Treatment Value: Drought vs. No Drought
  misc_feature: MA Experiment ID: 20000355 Result: Up-regulated in Transcription
  misc_feature: MA Experiment 20000355 PARAMETER Experiment Name: At_Siliques_Sub_P Parameter: Age (day) Value: 21
  misc_feature: MA Experiment 20000355 PARAMETER Experiment Name: At_Siliques_Sub_P Parameter: Organism Value: A. thaliana
  misc_feature: MA Experiment 20000355 PARAMETER Experiment Name: At_Siliques_Sub_P Parameter: Plant Line Value: WS
  misc_feature: MA Experiment 20000355 PARAMETER Experiment Name: At_Siliques_Sub_P Parameter: Tissue Value: Less Than 5mm Siliques vs. Whole Plant
  misc_feature: MA Experiment ID: 20000440 Result: Up-regulated in Transcription
  misc_feature: MA Experiment 20000440 PARAMETER Experiment Name: At_Closed-Flower__Sub_P Parameter: Tissue Value: Closed Flower vs. Whole Plant
atgaatgagaatcacattcaaagtgatcacatgaacaacaccattcatgtaacaaacaaaaaactcccaaacttcctcttatccgtacgtctcaaatatgttaaacttggttaccattacctaatctcgaatgccgtctacattctcatactccccgtcggcctcctcgccgcaacctcctcctcctttagtctcaccgatctcacactcttatacaaccaccttctcaaattccacttcctctcttccactctcttcgccgctcttcttatctttctaaccaccctctacttcacaactcgtcctcgcagaatctttctcctcgatttcgcttgttacaaacccgactcttctctaatatgcacacgagaaacgttcatggaccggtctcagcgtgtcggtatcttcacagaagacaacctcgctttccaacaaaagatcctcgaacgttccggtcttggacaaaagacttacttcccggaggctctcttacgtgtcccgcctaatccttgtatgtctgaagcaaggaaagaagccgagacggttatgtttggagctatagacgcagtgcttgagaaaaccggagtgaatcctaaggatattgggatacttgtcgtgaattgtagcttgtttaatccgacgccttcgttatcggctatgatcgtgaataaatataagctcagaggaaacgttttgagctataaccttggtggaatgggttgtagtgctggtcttatctccattgatctcgctaaacagcttcttcaggttcaaccaaattcatatgcactagtagtgagcacagagaacataaccctaaactggtatttaggcaacgaccgatcaatgcttctctcaaactgcatcttccgaatgggtggcgccgccgttctcctctctaaccgctcctccgaccgctgccgctccaaataccaactcatccacaccgtccgtacacacaaaggatctgacgacaacgcctttaactgcgtttaccaacgcgaagacaacgacgacaacaaacaaatcggtgtctcactttccaaaaacctaatggctatagctggagaagctctcaagacgaacataaccactctgggaccgctagttctaccaatgtctgaacaacttctctttttcgcaacactagtggcgcgaaaagtctttaatgtgaagaaaataaaaccttatattcctgatttcaagctagctttcgagcacttctgcatccacgcgggaggcagagcagtgctcgatgagattgagaagaatttggatttatctgagtggcatatggaaccttcgaggatgactttgaaccggtttggaaatacttcgagtagctcgctttggtatgagcttgcgtatagtgaggctaaaggaaggattaagagaggagataggacttggcagattgcttttggatccggttttaagtgtaatagtgcggtttggagagctttgagaactatcgatccgtccaaggagaagaagaagaagactaatccttggattgatgagattcatgagtttcccgtgccggttccaaggacatctccggtgacatcttcctcggaatctcgatagttaacttttttaaattttctttcatgtataatactatggttcacatcacatctatctcaaaatcttcaatcc

SEQ ID NO: 50433 - protein, 528 aa, Arabidopsis thaliana
  peptide (1)..(528): Ceres Seq. ID no. 12591510
  misc_feature (342)..(489): Pfam Name: Chalcone and stilbene synthases, C-terminal domain Pfam Description: Chalcone and stilbene synthases, C-terminal
  misc_feature (21)..(516): Homolog of NCBI NO: 29417540 NR Description: beta-ketoacyl-CoA-synthase [Marchantia polymorpha]
  misc_feature (22)..(516): Homolog of NCBI NO: 19908404 NR Description: putative fatty acid elongase [Tropaeolum majus]
  misc_feature (15)..(515): Homolog of NCBI NO: 11066477 NR Description: fatty acid elongase 1-like protein [Limnanthes
  misc_feature (14)..(523): Homolog of NCBI NO: 1045614 NR Description: beta-ketoacyl-CoA synthase
  misc_feature (24)..(521): Homolog of NCBI NO: 9714501 NR Description: putative fatty acid elongase [Zea mays]
  misc_feature (15)..(521): Homolog of NCBI NO: 15225767 NR Description: putative beta-ketoacyl-CoA synthase; protein id:
  misc_feature (1)..(524): Homolog of NCBI NO: 14334714 NR Description: putative beta-ketoacyl-CoA synthase [Arabidopsis
  misc_feature (1)..(524): Homolog of NCBI NO: 15239981 NR Description: beta-ketoacyl-CoA synthase
  misc_feature (6)..(528): Homolog of NCBI NO: 18377979 NR Description: putative beta-ketoacyl-CoA synthase [Arabidopsis
  misc_feature (1)..(528): Homolog of NCBI NO: 15219676 NR Description: putative beta-ketoacyl-CoA synthase; protein id:
MNENHIQSDHMNNTIHVTNKKLPNFLLSVRLKYVKLGYHYLISNAVYILILPVGLLAATSSSFSLTDLTLLYNHLLKFHFLSSTLFAALLIFLTTLYFTTRPRRIFLLDFACYKPDSSLICTRETFMDRSQRVGIFTEDNLAFQQKILERSGLGQKTYFPEALLRVPPNPCMSEARKEAETVMFGAIDAVLEKTGVNPKDIGILVVNCSLFNPTPSLSAMIVNKYKLRGNVLSYNLGGMGCSAGLISIDLAKQLLQVQPNSYALVVSTENITLNWYLGNDRSMLLSNCIFRMGGAAVLLSNRSSDRCRSKYQLIHTVRTHKGSDDNAFNCVYQREDNDDNKQIGVSLSKNLMAIAGEALKTNITTLGPLVLPMSEQLLFFATLVARKVFNVKKIKPYIPDFKLAFEHFCIHAGGRAVLDEIEKNLDLSEWHMEPSRMTLNRFGNTSSSSLWYELAYSEAKGRIKRGDRTWQIAFGSGFKCNSAVWRALRTIDPSKEKKKKTNPWIDEIHEFPVPVPRTSPVTSSSESR

SEQ ID NO: 50434 - protein, 518 aa, Arabidopsis thaliana
  peptide (1)..(518): Ceres Seq. ID no. 12591511
  misc_feature (332)..(479): Pfam Name: Chalcone and stilbene synthases, C-terminal domain Pfam Description: Chalcone and stilbene synthases, C-terminal
  misc_feature (11)..(506): Homolog of NCBI NO: 29417540 NR Description: beta-ketoacyl-CoA-synthase [Marchantia polymorpha]
  misc_feature (12)..(506): Homolog of NCBI NO: 19908404 NR Description: putative fatty acid elongase [Tropaeolum majus]
  misc_feature (5)..(505): Homolog of NCBI NO: 11066477 NR Description: fatty acid elongase 1-like protein [Limnanthes
  misc_feature (4)..(513): Homolog of NCBI NO: 1045614 NR Description: beta-ketoacyl-CoA synthase
  misc_feature (14)..(511): Homolog of NCBI NO: 9714501 NR Description: putative fatty acid elongase [Zea mays]
  misc_feature (5)..(511): Homolog of NCBI NO: 15225767 NR Description: putative beta-ketoacyl-CoA synthase; protein id:
  misc_feature (1)..(514): Homolog of NCBI NO: 14334714 NR Description: putative beta-ketoacyl-CoA synthase [Arabidopsis
  misc_feature (1)..(514): Homolog of NCBI NO: 15239981 NR Description: beta-ketoacyl-CoA synthase
  misc_feature (1)..(518): Homolog of NCBI NO: 18377979 NR Description: putative beta-ketoacyl-CoA synthase [Arabidopsis
  misc_feature (1)..(518): Homolog of NCBI NO: 15219676 NR Description: putative beta-ketoacyl-CoA synthase; protein id:
MNNTIHVTNKKLPNFLLSVRLKYVKLGYHYLISNAVYILILPVGLLAATSSSFSLTDLTLLYNHLLKFHFLSSTLFAALLIFLTTLYFTTRPRRIFLLDFACYKPDSSLICTRETFMDRSQRVGIFTEDNLAFQQKILERSGLGQKTYFPEALLRVPPNPCMSEARKEAETVMFGAIDAVLEKTGVNPKDIGILVVNCSLFNPTPSLSAMIVNKYKLRGNVLSYNLGGMGCSAGLISIDLAKQLLQVQPNSYALVVSTENITLNWYLGNDRSMLLSNCIFRMGGAAVLLSNRSSDRCRSKYQLIHTVRTHKGSDDNAFNCVYQREDNDDNKQIGVSLSKNLMAIAGEALKTNITTLGPLVLPMSEQLLFFATLVARKVFNVKKIKPYIPDFKLAFEHFCIHAGGRAVLDEIEKNLDLSEWHMEPSRMTLNRFGNTSSSSLWYELAYSEAKGRIKRGDRTWQIAFGSGFKCNSAVWRALRTIDPSKEKKKKTNPWIDEIHEFPVPVPRTSPVTSSSESR

SEQ ID NO: 50435 - protein, 402 aa, Arabidopsis thaliana
  peptide (1)..(402): Ceres Seq. ID no. 12591512
  misc_feature (216)..(363): Pfam Name: Chalcone and stilbene synthases, C-terminal domain Pfam Description: Chalcone and stilbene synthases, C-terminal
  misc_feature (1)..(390): Homolog of NCBI NO: 29417540 NR Description: beta-ketoacyl-CoA-synthase [Marchantia polymorpha]
  misc_feature (1)..(390): Homolog of NCBI NO: 19908404 NR Description: putative fatty acid elongase [Tropaeolum majus]
  misc_feature (1)..(389): Homolog of NCBI NO: 11066477 NR Description: fatty acid elongase 1-like protein [Limnanthes
  misc_feature (1)..(397): Homolog of NCBI NO: 1045614 NR Description: beta-ketoacyl-CoA synthase
  misc_feature (1)..(395): Homolog of NCBI NO: 9714501 NR Description: putative fatty acid elongase [Zea mays]
  misc_feature (1)..(395): Homolog of NCBI NO: 15225767 NR Description: putative beta-ketoacyl-CoA synthase; protein id:
  misc_feature (1)..(398): Homolog of NCBI NO: 14334714 NR Description: putative beta-ketoacyl-CoA synthase [Arabidopsis
  misc_feature (1)..(398): Homolog of NCBI NO: 15239981 NR Description: beta-ketoacyl-CoA synthase
  misc_feature (1)..(402): Homolog of NCBI NO: 18377979 NR Description: putative beta-ketoacyl-CoA synthase [Arabidopsis
  misc_feature (1)..(402): Homolog of NCBI NO: 15219676 NR Description: putative beta-ketoacyl-CoA synthase; protein id:
MDRSQRVGIFTEDNLAFQQKILERSGLGQKTYFPEALLRVPPNPCMSEARKEAETVMFGAIDAVLEKTGVNPKDIGILVVNCSLFNPTPSLSAMIVNKYKLRGNVLSYNLGGMGCSAGLISIDLAKQLLQVQPNSYALVVSTENITLNWYLGNDRSMLLSNCIFRMGGAAVLLSNRSSDRCRSKYQLIHTVRTHKGSDDNAFNCVYQREDNDDNKQIGVSLSKNLMAIAGEALKTNITTLGPLVLPMSEQLLFFATLVARKVFNVKKIKPYIPDFKLAFEHFCIHAGGRAVLDEIEKNLDLSEWHMEPSRMTLNRFGNTSSSSLWYELAYSEAKGRIKRGDRTWQIAFGSGFKCNSAVWRALRTIDPSKEKKKKTNPWIDEIHEFPVPVPRTSPVTSSSESR

SEQ ID NO: 50436 - DNA, 1653 bp, Arabidopsis thaliana
  misc_feature (1)..(1653): Ceres Seq. ID no. 13593518
  misc_feature: MA Experiment ID: 20000173 Result: Down-regulated in Transcription
  misc_feature: MA Experiment 20000173 PARAMETER Experiment Name: At_42deg_Heat_P Parameter: Age (day) Value: 14
  misc_feature: MA Experiment 20000173 PARAMETER Experiment Name: At_42deg_Heat_P Parameter: Organism Value: A. thaliana
  misc_feature: MA Experiment 20000173 PARAMETER Experiment Name: At_42deg_Heat_P Parameter: Plant Line Value: WS
  misc_feature: MA Experiment 20000173 PARAMETER Experiment Name: At_42deg_Heat_P Parameter: Temperature (deg C) Value: 42 vs. 22
  misc_feature: MA Experiment 20000173 PARAMETER Experiment Name: At_42deg_Heat_P Parameter: Timepoint (hr) Value: 6
  misc_feature: MA Experiment 20000173 PARAMETER Experiment Name: At_42deg_Heat_P Parameter: Tissue Value: Aerial
  misc_feature: MA Experiment ID: 20000180 Result: Down-regulated in Transcription
  misc_feature: MA Experiment 20000180 PARAMETER Experiment Name: At_Germinating_Seeds_P Parameter: Age (hr) Value: 24 vs. 0
  misc_feature: MA Experiment 20000180 PARAMETER Experiment Name: At_Germinating_Seeds_P Parameter: Tissue Value: Germinating Seeds
  misc_feature: MA Experiment ID: 20001451 Result: Down-regulated in Transcription
  misc_feature: MA Experiment 20001451 PARAMETER Experiment Name: At_Far-red-induction_P Parameter: Age (day) Value: 7
  misc_feature: MA Experiment 20001451 PARAMETER Experiment Name: At_Far-red-induction_P Parameter: Light Value: Far-red vs. White
  misc_feature: MA Experiment 20001451 PARAMETER Experiment Name: At_Far-red-induction_P Parameter: Organism Value: A. thaliana
  misc_feature: MA Experiment 20001451 PARAMETER Experiment Name: At_Far-red-induction_P Parameter: Plant Line Value: Columbia
  misc_feature: MA Experiment 20001451 PARAMETER Experiment Name: At_Far-red-induction_P Parameter: Timepoint (hr) Value: 24
  misc_feature: MA Experiment 20001451 PARAMETER Experiment Name: At_Far-red-induction_P Parameter: Tissue Value: Whole Plant
gaggagatagaagagtagggcaaagctctttcgattaaaaaaaaaaaaaaacacttcaagagattacttatggcggaagaggcgatactagggttccttcagaacaatgaacagatcactgattcgggtcaattctctgccgagttcaacatcgaccacaacgaactcgtcaatgtcatcaaaagtctccatggttttcgttacatcgatgttcaggacattaaaaaggagacatggattctgactgatgaagggaagaaatatgcggcagaagggtcaccagaggttcaacttttcttagctgttcctgaagaaggcagcatatcaaaagatgagctccagaaaaagttagctcctgcagtcttcaagatcggctgttctcaagctggaaaaaacaagtgggtggaaatgggaaagcaagtctcgaggaaggttaaagatgtagaagataaagtgaaaggccagcttttacaaatacaacaagggaaggaatttgacaaagaaagtatcaattctcttaaagccagaaaactcatagtaccacagatatggaaggggtattccgtaaagaaaggtcctaattatgctcccgagagaaagaaagtggctaccgatttgactcgagaaaatcttcaaaactggaaagagttagagtttaaggagtataacttcaaagctaaaggagcgcctgttgacgctgggcatcttcacgctcttctcaaggtgcggaagcagtttaaagacatatttgttcagatggggtttgaggagatgccaacaaacaactatgtggagagcagcttctggaattttgatgctttgttccagcctcagcagcaccctgctcgtgattctcatgacaccttctttctaaaagttccctctactacaagaacacttccggaagattatgttgagagggtgaaacgtgttcatgagtctggtggttatggatcaagagggtataattatgattggaaaagagaagaagcaaacaagaatcttcttcgtacccacacaacggctgtctcatctaggatgctttatgcactagcacagaaaccttttgtgcccaagaagtacttttcgattgaccgtgtcttcagaaacgaggctgttgatcggacccaccttgcagagttccatcaaattgaaggtttgatatgtgatcggggccttacacttggagacctgattggtgtattagaagacttcttctcacgcttagggatgtcgaaattgcgtttcaagccagcttacaacccttacacagagccaagcatggagattttcagctaccatgaaggtttagggaagtgggtggagattggaaactctgggatgttcagacccgaaatgcttctaccgatgggtctccccgaggatgttagagtcatcgcttggggtctctctcttgaaagaccaacaatgatattatacggtatcgacaacatccgagatttgtttggacacaaggtggatctcgatcttattaaacggaatccgatctgccgaattggaatctaagtgatatattttgattgtctttttgattcaagatactctatttggttatctcttggtattttcaattctacctttggttactggactttacaattccatcttaaacgtgtgtacactcttaattgc

SEQ ID NO: 50437 - protein, 485 aa, Arabidopsis thaliana
  peptide (1)..(485): Ceres Seq. ID no. 13593519
  misc_feature (1)..(485): Homolog of NCBI NO: 13905140 NR Description: 0610012A19Rik protein [Mus musculus]
  misc_feature (1)..(485): Homolog of NCBI NO: 34851429 NR Description: similar to 0610012A19Rik protein [Rattus
  misc_feature (1)..(485): Homolog of NCBI NO: 15488801 NR Description: 0610012A19Rik protein [Mus musculus]
  misc_feature (3)..(47): Homolog of NCBI NO: 37534124 NR Description: putative phenylalanyl-tRNA synthetase alpha chain
  misc_feature (49)..(140): Homolog of NCBI NO: 37534124 NR Description: putative phenylalanyl-tRNA synthetase alpha chain
  misc_feature (379)..(485): Homolog of NCBI NO: 37534124 NR Description: putative phenylalanyl-tRNA synthetase alpha chain
  misc_feature (147)..(364): Homolog of NCBI NO: 37534124 NR Description: putative phenylalanyl-tRNA synthetase alpha chain
  misc_feature (1)..(207): Homolog of NCBI NO: 7437805 NR Description: phenylalanine-tRNA ligase (EC 6.1.1.20) beta
  misc_feature (239)..(485): Homolog of NCBI NO: 7437805 NR Description: phenylalanine-tRNA ligase (EC 6.1.1.20) beta
  misc_feature (1)..(485): Homolog of NCBI NO: 22329256 NR Description: phenylalanyl-trna synthetase - like protein
MAEEAILGFLQNNEQITDSGQFSAEFNIDHNELVNVIKSLHGFRYIDVQDIKKETWILTDEGKKYAAEGSPEVQLFLAVPEEGSISKDELQKKLAPAVFKIGCSQAGKNKWVEMGKQVSRKVKDVEDKVKGQLLQIQQGKEFDKESINSLKARKLIVPQIWKGYSVKKGPNYAPERKKVATDLTRENLQNWKELEFKEYNFKAKGAPVDAGHLHALLKVRKQFKDIFVQMGFEEMPTNNYVESSFWNFDALFQPQQHPARDSHDTFFLKVPSTTRTLPEDYVERVKRVHESGGYGSRGYNYDWKREEANKNLLRTHTTAVSSRMLYALAQKPFVPKKYFSIDRVFRNEAVDRTHLAEFHQIEGLICDRGLTLGDLIGVLEDFFSRLGMSKLRFKPAYNPYTEPSMEIFSYHEGLGKWVEIGNSGMFRPEMLLPMGLPEDVRVIAWGLSLERPTMILYGIDNIRDLFGHKVDLDLIKRNPICRIGI

SEQ ID NO: 50438 - protein, 372 aa, Arabidopsis thaliana
  peptide (1)..(372): Ceres Seq. ID no. 13593520
  misc_feature (1)..(370): Homolog of NCBI NO: 7804452 NR Description: phenylalanyl tRNA synthetase beta subunit [Homo
  misc_feature (1)..(372): Homolog of NCBI NO: 13905140 NR Description: 0610012A19Rik protein [Mus musculus]
  misc_feature (1)..(372): Homolog of NCBI NO: 34851429 NR Description: similar to 0610012A19Rik protein [Rattus
  misc_feature (1)..(372): Homolog of NCBI NO: 15488801 NR Description: 0610012A19Rik protein [Mus musculus]
  misc_feature (1)..(27): Homolog of NCBI NO: 37534124 NR Description: putative phenylalanyl-tRNA synthetase alpha chain
  misc_feature (266)..(372): Homolog of NCBI NO: 37534124 NR Description: putative phenylalanyl-tRNA synthetase alpha chain
  misc_feature (34)..(251): Homolog of NCBI NO: 37534124 NR Description: putative phenylalanyl-tRNA synthetase alpha chain
  misc_feature (1)..(94): Homolog of NCBI NO: 7437805 NR Description: phenylalanine-tRNA ligase (EC 6.1.1.20) beta
  misc_feature (126)..(372): Homolog of NCBI NO: 7437805 NR Description: phenylalanine-tRNA ligase (EC 6.1.1.20) beta
  misc_feature (1)..(372): Homolog of NCBI NO: 22329256 NR Description: phenylalanyl-trna synthetase - like protein
MGKQVSRKVKDVEDKVKGQLLQIQQGKEFDKESINSLKARKLIVPQIWKGYSVKKGPNYAPERKKVATDLTRENLQNWKELEFKEYNFKAKGAPVDAGHLHALLKVRKQFKDIFVQMGFEEMPTNNYVESSFWNFDALFQPQQHPARDSHDTFFLKVPSTTRTLPEDYVERVKRVHESGGYGSRGYNYDWKREEANKNLLRTHTTAVSSRMLYALAQKPFVPKKYFSIDRVFRNEAVDRTHLAEFHQIEGLICDRGLTLGDLIGVLEDFFSRLGMSKLRFKPAYNPYTEPSMEIFSYHEGLGKWVEIGNSGMFRPEMLLPMGLPEDVRVIAWGLSLERPTMILYGIDNIRDLFGHKVDLDLIKRNPICRIGI

SEQ ID NO: 50439 - protein, 256 aa, Arabidopsis thaliana
  peptide (1)..(256): Ceres Seq. ID no. 13593521
  misc_feature (1)..(254): Homolog of NCBI NO: 30585361 NR Description: Homo sapiens phenylalanine-tRNA synthetase-like
  misc_feature (1)..(254): Homolog of NCBI NO: 4758340 NR Description: phenylalanine-tRNA synthetase-like protein
  misc_feature (1)..(254): Homolog of NCBI NO: 7804452 NR Description: phenylalanyl tRNA synthetase beta subunit [Homo
  misc_feature (1)..(256): Homolog of NCBI NO: 13905140 NR Description: 0610012A19Rik protein [Mus musculus]
  misc_feature (1)..(256): Homolog of NCBI NO: 34851429 NR Description: similar to 0610012A19Rik protein [Rattus
  misc_feature (1)..(256): Homolog of NCBI NO: 15488801 NR Description: 0610012A19Rik protein [Mus musculus]
  misc_feature (150)..(256): Homolog of NCBI NO: 37534124 NR Description: putative phenylalanyl-tRNA synthetase alpha chain
  misc_feature (1)..(135): Homolog of NCBI NO: 37534124 NR Description: putative phenylalanyl-tRNA synthetase alpha chain
  misc_feature (10)..(256): Homolog of NCBI NO: 7437805 NR Description: phenylalanine-tRNA ligase (EC 6.1.1.20) beta
  misc_feature (1)..(256): Homolog of NCBI NO: 22329256 NR Description: phenylalanyl-trna synthetase - like protein
MGFEEMPTNNYVESSFWNFDALFQPQQHPARDSHDTFFLKVPSTTRTLPEDYVERVKRVHESGGYGSRGYNYDWKREEANKNLLRTHTTAVSSRMLYALAQKPFVPKKYFSIDRVFRNEAVDRTHLAEFHQIEGLICDRGLTLGDLIGVLEDFFSRLGMSKLRFKPAYNPYTEPSMEIFSYHEGLGKWVEIGNSGMFRPEMLLPMGLPEDVRVIAWGLSLERPTMILYGIDNIRDLFGHKVDLDLIKRNPICRIGI

SEQ ID NO: 50440 - DNA, 1892 bp, Arabidopsis thaliana
  misc_feature (1)..(1892): Ceres Seq. ID no. 13592622
  misc_feature: MA Experiment ID: 108595 Result: Down-regulated in Transcription
  misc_feature: MA Experiment 108595 PARAMETER Experiment Name: At_Ler-pi_Ovule_cDNA_P Parameter: Plant Line Value: null
  misc_feature: MA Experiment ID: 20000087 Result: Down-regulated in Transcription
  misc_feature: MA Experiment 20000087 PARAMETER Experiment Name: At_100uM_ABA_Mutants_cDNA_P Parameter: Plant Line Value: WS
  misc_feature: MA Experiment 20000087 PARAMETER Experiment Name: At_100uM_ABA_Mutants_cDNA_P Parameter: Timepoint (hr) Value: 6
  misc_feature: MA Experiment 20000087 PARAMETER Experiment Name: At_100uM_ABA_Mutants_cDNA_P Parameter: Tissue Value: Aerial
  misc_feature: MA Experiment 20000087 PARAMETER Experiment Name: At_100uM_ABA_Mutants_cDNA_P Parameter: Treatment Value: 100uM ABA vs. No Treatment
  misc_feature: MA Experiment ID: 20000224 Result: Up-regulated in Transcription
  misc_feature: MA Experiment ID: 20000265 Result: Up-regulated in Transcription
  misc_feature: MA Experiment 20000265 PARAMETER Experiment Name: At_Open_Flower_P Parameter: Age (day) Value: 21
  misc_feature: MA Experiment 20000265 PARAMETER Experiment Name: At_Open_Flower_P Parameter: Plant Line Value: WS
  misc_feature: MA Experiment 20000265 PARAMETER Experiment Name: At_Open_Flower_P Parameter: Tissue Value: Closed Flower vs. Whole Plant
  misc_feature: MA Experiment ID: 20000794 Result: Up-regulated in Transcription
  misc_feature: MA Experiment 20000794 PARAMETER Experiment Name: At_Petals_P Parameter: Age (day) Value: 23-25 days
  misc_feature: MA Experiment 20000794 PARAMETER Experiment Name: At_Petals_P Parameter: Plant Line Value: WS
  misc_feature: MA Experiment 20000794 PARAMETER Experiment Name: At_Petals_P Parameter: Tissue Value: Petals vs. Whole plant
aacgaaggacccagaagtgaagacgatactctccctcccttcccttgttcaatttctttctttgttctcatcattaaatttctttgacccaaagtttcaatctttttcagtttctggaatctcttgcttcgatcgaatcactctcatgtctaacgaagactctcttccgcctttcactttgtttggtttggatgatgtcgaaaattacggtctggtcactgaagcagacaattcgttacctttagatatacacaatcaggtttttcaacttgtggagaagggaaaccaatcattcaaagagtctcgctttgaagaggctattagcagttattcaaaggccaattctattaaacctcttgaccctattgttcttggcaatagaagtgctgcttatataagatttggccaatatctgaagcagagatctgcatcaatttctgaatataaacctctgaatggttttgatatgtcgatgcttggtgaacttgctcttaaggatgctgataagctaatgagtcttcagagcagtttagtgaagtcatatattacaaaggcttgtgccctcatgttgctagaaagatatgaggtagcccgtgacactatcctctcaggtctacagattgatccctttagcggtcctctacgatccaatcttcaggaattggagaaagtgatgcctaattcgatgcgtaaaacccatggaatggctgagcggtctgatgattttgattgcactgtttgcctgaaattgctgtacgaacctgctacaactccatgtgggcatacattctgccgatcatgcctctttcagtcaatggatcgcggcaacaaatgtccactatgtcgaactgtcatttttatgactccaagaacatgcgctgtcagtgtgacactgaataacatcatagagaaaaactttccagaggagtatgctgaaaggaaatcagagcaagacactctggtccacctaggcaatgaaagtatgccccttttcgtcatggatgtgataatcccctgtcagaagttgtctcttcatatatttgaaccacgatatcgactaatggtgagaagaataatggaaggaaatcatcggatgggaatggtagctcttgattcggcgacaggttctccagtggatgttgcttgcgaagttgaaatcacagagtgtgatccactcccggatggacgttttgtcctggagctggaaagccatagaaggtgccgcattgtaaaagcttgggatcaagatggatatcgtgttgcagaggttgaatgggtgaaagatataccaccacaaagcgagcaagggaaagcagatctgcgggaactgacgaccagcgcagcatcatttgctcggtcatggctagatagagcaaaggaagcagctagacaaggagacagaagaagacttgaaatacttctaaatgttgaatctatgataccaacgcctcaagatcccgagcgcttcagtttctggcttgctacactgacagataggagaccttcagaaagattggaactacttcggcttcaggatactggagagagaataaagcgcggtttgatatatctccgatcagtagaaagaggatgcagaatgcaatgaactggcagcatgatggcattgtattgccggttaaactacagagataaacttgggacctgttcataagaaggttgacaaaacatttattcatgattaaaggaatacataagatagagatccttgtaggatcgctgtcatcctttgtcggatccattgttgtagattttgtttgcgactgtattttatttaattaccatattcttcattatgcaactgtagcaagaagaaacaaaaaaaacaaaacaaaaatatgtaagattcttgacaagataatatcccttttcgg

SEQ ID NO: 50441 - protein, 534 aa, Arabidopsis thaliana
  peptide (1)..(534): Ceres Seq. ID no. 13592623
  misc_feature (327)..(526): Pfam Name: ATP-dependent protease La (LON) domain Pfam Description: ATP-dependent protease La (LON) domain
  misc_feature (89)..(131): Homolog of NCBI NO: 34933034 NR Description: similar to hypothetical protein FLJ22612 [Rattus
  misc_feature (239)..(463): Homolog of NCBI NO: 34933034 NR Description: similar to hypothetical protein FLJ22612 [Rattus
  misc_feature (226)..(517): Homolog of NCBI NO: 38348242 NR Description: FLJ45273 protein [Homo sapiens]
  misc_feature (248)..(519): Homolog of NCBI NO: 18676903 NR Description: unnamed protein product [Homo sapiens]
  misc_feature (89)..(131): Homolog of NCBI NO: 10439066 NR Description: unnamed protein product [Homo sapiens]
  misc_feature (239)..(459): Homolog of NCBI NO: 10439066 NR Description: unnamed protein product [Homo sapiens]
  misc_feature (241)..(519): Homolog of NCBI NO: 40217796 NR Description: hypothetical protein FLJ23749 [Homo sapiens]
  misc_feature (241)..(519): Homolog of NCBI NO: 38089190 NR Description: similar to hypothetical protein FLJ23749 [Mus
  misc_feature (49)..(534): Homolog of NCBI NO: 21554128 NR Description: unknown [Arabidopsis thaliana]
  misc_feature (49)..(534): Homolog of NCBI NO: 18394639 NR Description: RING finger protein family [Arabidopsis thaliana]
TKDPEVKTILSLPSLVQFLSLFSSLNFFDPKFQSFSVSGISCFDRITLMSNEDSLPPFTLFGLDDVENYGLVTEADNSLPLDIHNQVFQLVEKGNQSFKESRFEEAISSYSKANSIKPLDPIVLGNRSAAYIRFGQYLKQRSASISEYKPLNGFDMSMLGELALKDADKLMSLQSSLVKSYITKACALMLLERYEVARDTILSGLQIDPFSGPLRSNLQELEKVMPNSMRKTHGMAERSDDFDCTVCLKLLYEPATTPCGHTFCRSCLFQSMDRGNKCPLCRTVIFMTPRTCAVSVTLNNIIEKNFPEEYAERKSEQDTLVHLGNESMPLFVMDVIIPCQKLSLHIFEPRYRLMVRRIMEGNHRMGMVALDSATGSPVDVACEVEITECDPLPDGRFVLELESHRRCRIVKAWDQDGYRVAEVEWVKDIPPQSEQGKADLRELTTSAASFARSWLDRAKEAARQGDRRRLEILLNVESMIPTPQDPERFSFWLATLTDRRPSERLELLRLQDTGERIKRGLIYLRSVERGCRMQ

SEQ ID NO: 50442 - protein, 486 aa, Arabidopsis thaliana
  peptide (1)..(486): Ceres Seq. ID no. 13592624
  misc_feature (279)..(478): Pfam Name: ATP-dependent protease La (LON) domain Pfam Description: ATP-dependent protease La (LON) domain
  misc_feature (41)..(83): Homolog of NCBI NO: 34933034 NR Description: similar to hypothetical protein FLJ22612 [Rattus
  misc_feature (191)..(415): Homolog of NCBI NO: 34933034 NR Description: similar to hypothetical protein FLJ22612 [Rattus
  misc_feature (178)..(469): Homolog of NCBI NO: 38348242 NR Description: FLJ45273 protein [Homo sapiens]
  misc_feature (200)..(471): Homolog of NCBI NO: 18676903 NR Description: unnamed protein product [Homo sapiens]
  misc_feature (41)..(83): Homolog of NCBI NO: 10439066 NR Description: unnamed protein product [Homo sapiens]
  misc_feature (191)..(411): Homolog of NCBI NO: 10439066 NR Description: unnamed protein product [Homo sapiens]
  misc_feature (193)..(471): Homolog of NCBI NO: 40217796 NR Description: hypothetical protein FLJ23749 [Homo sapiens]
  misc_feature (193)..(471): Homolog of NCBI NO: 38089190 NR Description: similar to hypothetical protein FLJ23749 [Mus
  misc_feature (1)..(486): Homolog of NCBI NO: 21554128 NR Description: unknown [Arabidopsis thaliana]
  misc_feature (1)..(486): Homolog of NCBI NO: 18394639 NR Description: RING finger protein family [Arabidopsis thaliana]
MSNEDSLPPFTLFGLDDVENYGLVTEADNSLPLDIHNQVFQLVEKGNQSFKESRFEEAISSYSKANSIKPLDPIVLGNRSAAYIRFGQYLKQRSASISEYKPLNGFDMSMLGELALKDADKLMSLQSSLVKSYITKACALMLLERYEVARDTILSGLQIDPFSGPLRSNLQELEKVMPNSMRKTHGMAERSDDFDCTVCLKLLYEPATTPCGHTFCRSCLFQSMDRGNKCPLCRTVIFMTPRTCAVSVTLNNIIEKNFPEEYAERKSEQDTLVHLGNESMPLFVMDVIIPCQKLSLHIFEPRYRLMVRRIMEGNHRMGMVALDSATGSPVDVACEVEITECDPLPDGRFVLELESHRRCRIVKAWDQDGYRVAEVEWVKDIPPQSEQGKADLRELTTSAASFARSWLDRAKEAARQGDRRRLEILLNVESMIPTPQDPERFSFWLATLTDRRPSERLELLRLQDTGERIKRGLIYLRSVERGCRMQ

SEQ ID NO: 50443 - protein, 379 aa, Arabidopsis thaliana
  peptide (1)..(379): Ceres Seq. ID no. 13592625
  misc_feature (172)..(371): Pfam Name: ATP-dependent protease La (LON) domain Pfam Description: ATP-dependent protease La (LON) domain
  misc_feature (84)..(304): Homolog of NCBI NO: 37622896 NR Description: ring finger protein 127 [Homo sapiens]
  misc_feature (84)..(369): Homolog of NCBI NO: 26449305 NR Description: hypothetical protein [Macaca fascicularis]
  misc_feature (84)..(308): Homolog of NCBI NO: 34933034 NR Description: similar to hypothetical protein FLJ22612 [Rattus
  misc_feature (71)..(362): Homolog of NCBI NO: 38348242 NR Description: FLJ45273 protein [Homo sapiens]
  misc_feature (93)..(364): Homolog of NCBI NO: 18676903 NR Description: unnamed protein product [Homo sapiens]
  misc_feature (84)..(304): Homolog of NCBI NO: 10439066 NR Description: unnamed protein product [Homo sapiens]
  misc_feature (86)..(364): Homolog of NCBI NO: 40217796 NR Description: hypothetical protein FLJ23749 [Homo sapiens]
  misc_feature (86)..(364): Homolog of NCBI NO: 38089190 NR Description: similar to hypothetical protein FLJ23749 [Mus
  misc_feature (1)..(379): Homolog of NCBI NO: 21554128 NR Description: unknown [Arabidopsis thaliana]
  misc_feature (1)..(379): Homolog of NCBI NO: 18394639 NR Description: RING finger protein family [Arabidopsis thaliana]
MSMLGELALKDADKLMSLQSSLVKSYITKACALMLLERYEVARDTILSGLQIDPFSGPLRSNLQELEKVMPNSMRKTHGMAERSDDFDCTVCLKLLYEPATTPCGHTFCRSCLFQSMDRGNKCPLCRTVIFMTPRTCAVSVTLNNIIEKNFPEEYAERKSEQDTLVHLGNESMPLFVMDVIIPCQKLSLHIFEPRYRLMVRRIMEGNHRMGMVALDSATGSPVDVACEVEITECDPLPDGRFVLELESHRRCRIVKAWDQDGYRVAEVEWVKDIPPQSEQGKADLRELTTSAASFARSWLDRAKEAARQGDRRRLEILLNVESMIPTPQDPERFSFWLATLTDRRPSERLELLRLQDTGERIKRGLIYLRSVERGCRMQ

SEQ ID NO: 50444 - DNA, 878 bp, Arabidopsis thaliana
  misc_feature (1)..(878): Ceres Seq. ID no. 13588723
  misc_feature: MA Experiment ID: 108569 Result: Up-regulated in Transcription
  misc_feature: MA Experiment 108569 PARAMETER Experiment Name: At_0.001%_MeJA__cDNA_P Parameter: Timepoint (hr) Value: 6
  misc_feature: MA Experiment 108569 PARAMETER Experiment Name: At_0.001%_MeJA__cDNA_P Parameter: Tissue Value: Aerial
  misc_feature: MA Experiment 108569 PARAMETER Experiment Name: At_0.001%_MeJA__cDNA_P Parameter: Treatment Value: 0.001% MeJA vs. No Treatment
  misc_feature: MA Experiment ID: 108573 Result: Up-regulated in Transcription
  misc_feature: MA Experiment 108573 PARAMETER Experiment Name: At_Drought_cDNA_P Parameter: Timepoint (hr) Value: 6
  misc_feature: MA Experiment 108573 PARAMETER Experiment Name: At_Drought_cDNA_P Parameter: Tissue Value: Aerial
  misc_feature: MA Experiment 108573 PARAMETER Experiment Name: At_Drought_cDNA_P Parameter: Treatment Value: Drought vs. No Drought
  misc_feature: MA Experiment ID: 108595 Result: Down-regulated in Transcription
  misc_feature: MA Experiment 108595 PARAMETER Experiment Name: At_Ler-pi_Ovule_cDNA_P Parameter: Plant Line Value: null
  misc_feature: MA Experiment ID: 20000111 Result: Down-regulated in Transcription
  misc_feature: MA Experiment 20000111 PARAMETER Experiment Name: At_42deg_Heat_cDNA_P Parameter: Temperature (deg C) Value: 42 vs. 22
  misc_feature: MA Experiment 20000111 PARAMETER Experiment Name: At_42deg_Heat_cDNA_P Parameter: Timepoint (hr) Value: 6
  misc_feature: MA Experiment 20000111 PARAMETER Experiment Name: At_42deg_Heat_cDNA_P Parameter: Tissue Value: Aerial
  misc_feature: MA Experiment ID: 20000113 Result: Down-regulated in Transcription
  misc_feature: MA Experiment 20000113 PARAMETER Experiment Name: At_42deg_Heat_cDNA_P Parameter: Temperature (deg C) Value: 42 vs. 22
  misc_feature: MA Experiment 20000113 PARAMETER Experiment Name: At_42deg_Heat_cDNA_P Parameter: Timepoint (hr) Value: 8
  misc_feature: MA Experiment 20000113 PARAMETER Experiment Name: At_42deg_Heat_cDNA_P Parameter: Tissue Value: Aerial
  misc_feature: MA Experiment ID: 20000224 Result: Down-regulated in Transcription
  misc_feature: MA Experiment ID: 20001911 Result: Down-regulated in Transcription
  misc_feature: MA Experiment 20001911 PARAMETER Experiment Name: At_Drought_Reproduction_P Parameter: Age (day) Value: 40
  misc_feature: MA Experiment 20001911 PARAMETER Experiment Name: At_Drought_Reproduction_P Parameter: Organism Value: A. thaliana
  misc_feature: MA Experiment 20001911 PARAMETER Experiment Name: At_Drought_Reproduction_P Parameter: Plant Line Value: WS
  misc_feature: MA Experiment 20001911 PARAMETER Experiment Name: At_Drought_Reproduction_P Parameter: Timepoint (day) Value: 10
  misc_feature: MA Experiment 20001911 PARAMETER Experiment Name: At_Drought_Reproduction_P Parameter: Tissue Value: Flowers
  misc_feature: MA Experiment 20001911 PARAMETER Experiment Name: At_Drought_Reproduction_P Parameter: Treatment Value: Drought vs. No Drought
gggtaggggaattttgctcttcgtcttgctatttcagatgtataataacatgggacctcaaccggggatgccaagacctccaggaaaccctgagcctggtccatttggtaatcctttcactggagctggctcgggttttatccgtggtggtttgggagcgtatggggagagaattttaggatcgagctctgagtatgttcagagcaatataagccggtacttctctgatccgcaatactatttccaagtgaatgatcaatatgtgaggaataaactgaaggttgttctgtttcctttcctacaccggggacactggaccagaatatctgaaccagttggtggtaggctctcatacaagcctccaatatatgatatcaatgctccagacttgtacattccctttatggcatttggtacctacgttgttcttgctggtctttcattgggacttaatggaaagtttacaccggaagctttgaattggctgtttgtgaaaggattggttggttggtttttgcaagtaatgctcctgaaagtaacacttctatcacttggtagtggagaggcaccattactagatattgtggcatacggagggtatgcttttgctggtctgtgtcttgcgggctttgccaaaataatgtggggatactcgtactacgcgttgatgccatggacttgtctatgcactgggattttcttggtgaagacgatgaaacgtgttctgtttgctgaagtaagaagttacgattcgagcaaacatcactaccttcttctgtttttagccttggtccagttcccacttttgatatggcttggtaacattagtgttaattggcttctttgaaatgaaaaagacgtttttgtgaattcttatt

SEQ ID NO: 50445 - protein, 281 aa, Arabidopsis thaliana
  peptide (1)..(281): Ceres Seq. ID no. 13588724
  misc_feature (26)..(251): Homolog of NCBI NO: 37589677 NR Description: Unknown (protein for MGC:73136) [Danio rerio]
  misc_feature (26)..(251): Homolog of NCBI NO: 28277968 NR Description: Similar to Yip1p-interacting factor [Danio rerio]
  misc_feature (28)..(272): Homolog of NCBI NO: 12861030 NR Description: unnamed protein product [Mus musculus]
  misc_feature (154)..(275): Homolog of NCBI NO: 10241632 NR Description: putative protein [Oryza sativa (indica
  misc_feature (13)..(275): Homolog of NCBI NO: 38346458 NR Description: OSJNBa0019G23.6 [Oryza sativa (japonica
  misc_feature (23)..(280): Homolog of NCBI NO: 33589682 NR Description: At3g59500 [Arabidopsis thaliana]
  misc_feature (23)..(280): Homolog of NCBI NO: 11282553 NR Description: hypothetical protein T16L24.50 - Arabidopsis
  misc_feature (13)..(280): Homolog of NCBI NO: 30695009 NR Description: expressed protein [Arabidopsis thaliana]
  misc_feature (12)..(281): Homolog of NCBI NO: 9755388 NR Description: F17F8.24 [Arabidopsis thaliana]
  misc_feature (13)..(281): Homolog of NCBI NO: 18397705 NR Description: expressed protein [Arabidopsis thaliana]
GRGILLFVLLFQMYNNMGPQPGMPRPPGNPEPGPFGNPFTGAGSGFIRGGLGAYGERILGSSSEYVQSNISRYFSDPQYYFQVNDQYVRNKLKVVLFPFLHRGHWTRISEPVGGRLSYKPPIYDINAPDLYIPFMAFGTYVVLAGLSLGLNGKFTPEALNWLFVKGLVGWFLQVMLLKVTLLSLGSGEAPLLDIVAYGGYAFAGLCLAGFAKIMWGYSYYALMPWTCLCTGIFLVKTMKRVLFAEVRSYDSSKHHYLLLFLALVQFPLLIWLGNISVNWLL

SEQ ID NO: 50446 - protein, 269 aa, Arabidopsis thaliana; identical to SEQ ID NO: 36555
  peptide (1)..(269): Ceres Seq. ID no. 13588725
  misc_feature (14)..(239): Homolog of NCBI NO: 37589677 NR Description: Unknown (protein for MGC:73136) [Danio rerio]
  misc_feature (14)..(239): Homolog of NCBI NO: 28277968 NR Description: Similar to Yip1p-interacting factor [Danio rerio]
  misc_feature (16)..(260): Homolog of NCBI NO: 12861030 NR Description: unnamed protein product [Mus musculus]
  misc_feature (142)..(263): Homolog of NCBI NO: 10241632 NR Description: putative protein [Oryza sativa (indica
  misc_feature (1)..(263): Homolog of NCBI NO: 38346458 NR Description: OSJNBa0019G23.6 [Oryza sativa (japonica
  misc_feature (11)..(268): Homolog of NCBI NO: 33589682 NR Description: At3g59500 [Arabidopsis thaliana]
  misc_feature (11)..(268): Homolog of NCBI NO: 11282553 NR Description: hypothetical protein T16L24.50 - Arabidopsis
  misc_feature (1)..(268): Homolog of NCBI NO: 30695009 NR Description: expressed protein [Arabidopsis thaliana]
  misc_feature (1)..(269): Homolog of NCBI NO: 9755388 NR Description: F17F8.24 [Arabidopsis thaliana]
  misc_feature (1)..(269): Homolog of NCBI NO: 18397705 NR Description: expressed protein [Arabidopsis thaliana]

SEQ ID NO: 50447 - protein, 265 aa, Arabidopsis thaliana; identical to SEQ ID NO: 36556
  peptide (1)..(265): Ceres Seq. ID no. 13588726
  misc_feature (10)..(235): Homolog of NCBI NO: 37589677 NR Description: Unknown (protein for MGC:73136) [Danio rerio]
  misc_feature (10)..(235): Homolog of NCBI NO: 28277968 NR Description: Similar to Yip1p-interacting factor [Danio rerio]
  misc_feature (12)..(256): Homolog of NCBI NO: 12861030 NR Description: unnamed protein product [Mus musculus]
  misc_feature (138)..(259): Homolog of NCBI NO: 10241632 NR Description: putative protein [Oryza sativa (indica
  misc_feature (1)..(259): Homolog of NCBI NO: 38346458 NR Description: OSJNBa0019G23.6 [Oryza sativa (japonica
  misc_feature (7)..(264): Homolog of NCBI NO: 33589682 NR Description: At3g59500 [Arabidopsis thaliana]
  misc_feature (7)..(264): Homolog of NCBI NO: 11282553 NR Description: hypothetical protein T16L24.50 - Arabidopsis
  misc_feature (1)..(264): Homolog of NCBI NO: 30695009 NR Description: expressed protein [Arabidopsis thaliana]
  misc_feature (1)..(265): Homolog of NCBI NO: 9755388 NR Description: F17F8.24 [Arabidopsis thaliana]
  misc_feature (1)..(265): Homolog of NCBI NO: 18397705 NR Description: expressed protein [Arabidopsis thaliana]

SEQ ID NO: 50448 - DNA, 3293 bp, Arabidopsis thaliana
  misc_feature (1)..(3293): Ceres Seq. ID no. 13647822
  misc_feature: MA Experiment ID: 20000185 Result: Up-regulated in Transcription
  misc_feature: MA Experiment 20000185 PARAMETER Experiment Name: At_Roots__P Parameter: Age (day) Value: 7 vs. 21
  misc_feature: MA Experiment 20000185 PARAMETER Experiment Name: At_Roots__P Parameter: Organism Value: A. thaliana
  misc_feature: MA Experiment 20000185 PARAMETER Experiment Name: At_Roots__P Parameter: Tissue Value: Roots vs. Whole Plant
  misc_feature: MA Experiment ID: 20000227 Result: Down-regulated in Transcription
  misc_feature: MA Experiment 20000227 PARAMETER Experiment Name: At_Root-Tips-vs-Tops_P Parameter: Tissue Value: Root Tips vs. Root Tops
  misc_feature: MA Experiment ID: 20000437 Result: Down-regulated in Transcription
  misc_feature: MA Experiment 20000437 PARAMETER Experiment Name: At_Drought_P Parameter: Age (day) Value: 8
  misc_feature: MA Experiment 20000437 PARAMETER Experiment Name: At_Drought_P Parameter: Organism Value: A. thaliana
  misc_feature: MA Experiment 20000437 PARAMETER Experiment Name: At_Drought_P Parameter: Plant Line Value: WS
  misc_feature: MA Experiment 20000437 PARAMETER Experiment Name: At_Drought_P Parameter: Timepoint (hr) Value: 24
  misc_feature: MA Experiment 20000437 PARAMETER Experiment Name: At_Drought_P Parameter: Tissue Value: Whole Plant
  misc_feature: MA Experiment 20000437 PARAMETER Experiment Name: At_Drought_P Parameter: Treatment Value: Drought vs. No Drought
  misc_feature: MA Experiment ID: 20000439 Result: Up-regulated in Transcription
  misc_feature: MA Experiment 20000439 PARAMETER Experiment Name: At_Roots__P Parameter: Age (day) Value: 14 vs. 21
  misc_feature: MA Experiment 20000439 PARAMETER Experiment Name: At_Roots__P Parameter: Organism Value: A. thaliana
  misc_feature: MA Experiment 20000439 PARAMETER Experiment Name: At_Roots__P Parameter: Tissue Value: Roots vs. Whole Plant
  misc_feature: MA Experiment ID: 20000794 Result: Up-regulated in Transcription
  misc_feature: MA Experiment 20000794 PARAMETER Experiment Name: At_Petals_P Parameter: Age (day) Value: 23-25 days
  misc_feature: MA Experiment 20000794 PARAMETER Experiment Name: At_Petals_P Parameter: Plant Line Value: WS
  misc_feature: MA Experiment 20000794 PARAMETER Experiment Name: At_Petals_P Parameter: Tissue Value: Petals vs. Whole plant
  misc_feature: MA Experiment ID: 20001557 Result: Up-regulated in Transcription
  misc_feature: MA Experiment 20001557 PARAMETER Experiment Name: At_Drought_Soil_Dry_P Parameter: Age (day) Value: 27
  misc_feature: MA Experiment 20001557 PARAMETER Experiment Name: At_Drought_Soil_Dry_P Parameter: Organism Value: A. thaliana
  misc_feature: MA Experiment 20001557 PARAMETER Experiment Name: At_Drought_Soil_Dry_P Parameter: Plant Line Value: WS
  misc_feature: MA Experiment 20001557 PARAMETER Experiment Name: At_Drought_Soil_Dry_P Parameter: Post Timepoint (hr) Value: 3
  misc_feature: MA Experiment 20001557 PARAMETER Experiment Name: At_Drought_Soil_Dry_P Parameter: Post-Treatment Value: Re-Water vs. No Drought
  misc_feature: MA Experiment 20001557 PARAMETER Experiment Name: At_Drought_Soil_Dry_P Parameter: Timepoint (day) Value: 13
  misc_feature: MA Experiment 20001557 PARAMETER Experiment Name: At_Drought_Soil_Dry_P Parameter: Treatment Value: Drought vs. No Drought
  misc_feature: MA Experiment ID: 20001558 Result: Up-regulated in Transcription
  misc_feature: MA Experiment 20001558 PARAMETER Experiment Name: At_Drought_Soil_Dry_P Parameter: Age (day) Value: 27
  misc_feature: MA Experiment 20001558 PARAMETER Experiment Name: At_Drought_Soil_Dry_P Parameter: Organism Value: A. thaliana
  misc_feature: MA Experiment 20001558 PARAMETER Experiment Name: At_Drought_Soil_Dry_P Parameter: Plant Line Value: WS
  misc_feature: MA Experiment 20001558 PARAMETER Experiment Name: At_Drought_Soil_Dry_P Parameter: Post Timepoint (hr) Value: 6
  misc_feature: MA Experiment 20001558 PARAMETER Experiment Name: At_Drought_Soil_Dry_P Parameter: Post-Treatment Value: Re-Water vs. No Drought
  misc_feature: MA Experiment 20001558 PARAMETER Experiment Name: At_Drought_Soil_Dry_P Parameter: Timepoint (day) Value: 13
  misc_feature: MA Experiment 20001558 PARAMETER Experiment Name: At_Drought_Soil_Dry_P Parameter: Treatment Value: Drought vs. No Drought
  misc_feature: MA Experiment ID: 20001560 Result: Up-regulated in Transcription
  misc_feature: MA Experiment 20001560 PARAMETER Experiment Name: At_Drought_Soil_Dry_P Parameter: Age (day) Value: 28
  misc_feature: MA Experiment 20001560 PARAMETER Experiment Name: At_Drought_Soil_Dry_P Parameter: Organism Value: A. thaliana
  misc_feature: MA Experiment 20001560 PARAMETER Experiment Name: At_Drought_Soil_Dry_P Parameter: Plant Line Value: WS
  misc_feature: MA Experiment 20001560 PARAMETER Experiment Name: At_Drought_Soil_Dry_P Parameter: Post Timepoint (hr) Value: None
  misc_feature: MA Experiment 20001560 PARAMETER Experiment Name: At_Drought_Soil_Dry_P Parameter: Post-Treatment Value: None
  misc_feature: MA Experiment 20001560 PARAMETER Experiment Name: At_Drought_Soil_Dry_P Parameter: Timepoint (day) Value: 14
  misc_feature: MA Experiment 20001560 PARAMETER Experiment Name: At_Drought_Soil_Dry_P Parameter: Treatment Value: Drought vs. No Drought
acctaatctctcctcctctccttctctctattttgccggaatacatatgatcgagtgaaacggcggacaaagctgtcgtgttgagtactaattcgccgtcgtttttctcagtgaaggagtggtgagagatgtcgagtctcgaagatatcaagaacgagactgttgatctggaaaaaattccgattgaggaagttttccagcagctaaaatgttcaagggaaggattgacaacgcaggaaggggaggacaggattcagatctttggccccaacaagctcgaagagaaaaaggaaagcaaacttctgaagtttttggggtttatgtggaatccactttcatgggtcatggaaatggctgcaatcatggccattgctttggccaacggtgatggtaggcctccggattggcaggattttgttggtattatctgtctgttggttatcaactctaccatcagttttatcgaagaaaacaatgctggtaatgctgctgctgctcttatggctggtcttgctcctaaaaccaaggttcttagggatggaaagtggagtgaacaagaagctgctattcttgtcccaggagatattgttagcattaaattaggagacattatcccagctgatgcccgtctacttgaaggtgatcctttaaaggttgaccaatctgctctaactggagagtcccttcctgtaaccaagcacccgggtcaagaagttttctctggttcaacctgcaaacaaggagaaatcgaggcggttgttattgccactggggttcataccttcttcggtaaagctgctcaccttgtggacagcactaaccaagttggacatttccagaaggttcttacagccattgggaacttctgtatctgttccattgctatcggtatggtgattgagatcatcgtcatgtatccgatccaacgccgaaagtacagagatggaattgacaaccttttggtcctcttgatcggtggtatccccattgctatgcctacagtcttgtccgtgaccatggctattgggtctcacaggttgtctcagcaaggtgccatcaccaagcgtatgactgccattgaagagatggcaggaatggatgtcctgtgcagtgacaaaaccgggacactaaccctcaacaaattgagtgtggacaaaaacttggtcgaggttttctgcaagggtgtggagaaagatcaagtcctattatttgcagctatggcttccagggttgagaaccaggatgccattgatgcagccatggttgggatgcttgctgatccaaaggaggctagagctggaatcagggaagttcacttccttccattcaaccctgtggataagagaactgctttgacttacattgacggcagtggtaactggcacagagtcagtaaaggtgctcctgagcagatcctcgaacttgccaaagccagcaatgatcttagcaagaaggtgctctccattattgacaagtatgctgagcgtggtcttaggtcgttggctgttgctcgccaggtggtgccagagaaaacaaaggaaagcccaggtgcgccatgggaatttgttggcttgttgccactttttgatcccccaagacatgacagtgctgaaacaattcgacgggctttgaatcttggtgttaacgtcaagatgatcactggtgaccaacttgctattggtaaggaaactggtcgcagacttggaatgggaacaaacatgtatccatcttcggctcttcttggtacacacaaagacgcaaacctcgcatccattcctgttgaggagttgattgaaaaggctgatggatttgccggagtcttcccagagcacaaatacgaaattgtgaaaaagttgcaggagaggaagcatattgttggaatgactggtgatggtgtcaatgatgcccctgctctaaagaaagctgatatcggtattgctgttgctgatgctacagatgctgctcgtggtgcttcagatatcgtgctcactgagcctggactcagcgttattatcagtgctgttctcaccagcagagctattttccagagaatgaagaactatactatctatgcagtctcaatcaccatccgtattgtgtttggtttcatgcttattgctttgatatgggaatttgacttctcagccttcatggttctgatcattgccattcttaacgacggtaccatcatgacaatctcaaaggacagagttaagccatctcccacacctgatagctggaaacttaaagaaatttttgctactggagtcgttctaggaggctaccaggccatcatgactgttattttcttctgggcggcgcacaagactgactttttctcggacacattcggtgtgaggtccattagggacaataaccacgagctaatgggtgcggtgtacttacaagttagtatcattagtcaagctctgatcttcgtcacaagatcaaggagttggtcttttgttgaacgtcctggagcattgctgatgattgctttcctcattgcacaactgattgctactttgattgcggtttacgccaactgggaatttgcaaagattaggggtattggatggggatgggctggtgtgatctggctatacagtattgtcacatacttcccattggacgttttcaagtttgccattcgatacatcttgagcggaaaggcgtggctcaacttgtttgagaacaagacggctttcacgatgaagaaagattacggaaaagaagagagagaggctcaatgggcacttgctcaaaggacacttcacggtttacagccaaaagaagctgttaacatcttccctgagaaaggaagttacagagaattgtctgagatcgctgagcaagctaagagaagagctgagatcgctaggcttagggagctgcacacactcaagggacatgtggaatcagtcgtgaagctaaagggcttggacattgaaactcccagtcactacactgtgtagtaaaaccaaacatatgactgatcttcgatcctctcatgttttgtcttcttcttcttctttttttcttcaccacctcttatgattattattcacatagggagagatctttgtttattgccataactcttcccaaaccttattgttagtgttcttgtttctcaaatatgtacttttgcataatttgctcttttgaagaaacaaggcatgcctttgtgtttggcatttggcacatgcacattctcttctttgctcttattccatgagcctatgtaatcttaatcttcttctttttcgtaatccaacttttcttccggcttc

SEQ ID NO: 50449 - protein, 948 aa, Arabidopsis thaliana
  peptide (1)..(948): Ceres Seq. ID no. 13647823
  misc_feature (323)..(609): Pfam Name: haloacid dehalogenase-like hydrolase Pfam Description: haloacid dehalogenase-like hydrolase
  misc_feature (323)..(609): Pfam Name: haloacid dehalogenase-like hydrolase Pfam Description: haloacid dehalogenase-like hydrolase
  misc_feature (323)..(609): Pfam Name: haloacid dehalogenase-like hydrolase Pfam Description: haloacid dehalogenase-like hydrolase
  misc_feature (753)..(804): Homolog of NCBI NO: 16751320 NR Description: putative plasma membrane-type proton ATPase
  misc_feature (10)..(751): Homolog of NCBI NO: 16751320 NR Description: putative plasma membrane-type proton ATPase
  misc_feature (744)..(813): Homolog of NCBI NO: 1709665 NR Description: Plasma membrane ATPase (Proton pump)
  misc_feature (10)..(736): Homolog of NCBI NO: 1709665 NR Description: Plasma membrane ATPase (Proton pump)
  misc_feature (757)..(813): Homolog of NCBI NO: 1709666 NR Description: Plasma membrane ATPase (Proton pump)
  misc_feature (753)..(804): Homolog of NCBI NO: 16751320 NR Description: putative plasma membrane-type proton ATPase
  misc_feature (744)..(813): Homolog of NCBI NO: 1709665 NR Description: Plasma membrane ATPase (Proton pump)
  misc_feature (757)..(813): Homolog of NCBI NO: 1709666 NR Description: Plasma membrane ATPase (Proton pump)
  misc_feature (10)..(736): Homolog of NCBI NO: 1709665 NR Description: Plasma membrane ATPase (Proton pump)
  misc_feature (744)..(813): Homolog of NCBI NO: 1709665 NR Description: Plasma membrane ATPase (Proton pump)
  misc_feature (10)..(751): Homolog of NCBI NO: 16751320 NR Description: putative plasma membrane-type proton ATPase
  misc_feature (753)..(804): Homolog of NCBI NO: 16751320 NR Description: putative plasma membrane-type proton ATPase
  misc_feature (10)..(842): Homolog of NCBI NO: 6691153 NR Description: plasma membrane H(+)-ATPase [Filobasidiella
  misc_feature (10)..(842): Homolog of NCBI NO: 3348073 NR Description: plasma membrane H(+)-ATPase 1 [Filobasidiella
  misc_feature (5)..(845): Homolog of NCBI NO: 2652922 NR Description: plasma membrane (H+) ATPase [Uromyces fabae]
  misc_feature (10)..(867): Homolog of NCBI NO: 1709664 NR Description: Probable plasma membrane ATPase (Proton pump)
  misc_feature (10)..(748): Homolog of NCBI NO: 1709666 NR Description: Plasma membrane ATPase (Proton pump)
  misc_feature (10)..(842): Homolog of NCBI NO: 6691153 NR Description: plasma membrane H(+)-ATPase [Filobasidiella
  misc_feature (10)..(842): Homolog of NCBI NO: 3348073 NR Description: plasma membrane H(+)-ATPase 1 [Filobasidiella
  misc_feature (5)..(845): Homolog of NCBI NO: 2652922 NR Description: plasma membrane (H+) ATPase [Uromyces fabae]
  misc_feature (10)..(867): Homolog of NCBI NO: 1709664 NR Description: Probable plasma membrane ATPase (Proton pump)
  misc_feature (10)..(748): Homolog of NCBI NO: 1709666 NR Description: Plasma membrane ATPase (Proton pump)
  misc_feature (757)..(813): Homolog of NCBI NO: 1709666 NR Description: Plasma membrane ATPase (Proton pump)
  misc_feature (10)..(736): Homolog of NCBI NO: 1709665 NR Description: Plasma membrane ATPase (Proton pump)
  misc_feature (10)..(751): Homolog of NCBI NO: 16751320 NR Description: putative plasma membrane-type proton ATPase
  misc_feature (10)..(748): Homolog of NCBI NO: 1709666 NR Description: Plasma membrane ATPase (Proton pump)
  misc_feature (10)..(867): Homolog of NCBI NO: 1709664 NR Description: Probable plasma membrane ATPase (Proton pump)
  misc_feature (5)..(845): Homolog of NCBI NO: 2652922 NR Description: plasma membrane (H+) ATPase [Uromyces fabae]
  misc_feature (10)..(842): Homolog of NCBI NO: 3348073 NR Description: plasma membrane H(+)-ATPase 1 [Filobasidiella
  misc_feature (10)..(842): Homolog of NCBI NO: 6691153 NR Description: plasma membrane H(+)-ATPase [Filobasidiella
MSSLEDIKNETVDLEKIPIEEVFQQLKCSREGLTTQEGEDRIQIFGPNKLEEKKESKLLKFLGFMWNPLSWVMEMAAIMAIALANGDGRPPDWQDFVGIICLLVINSTISFIEENNAGNAAAALMAGLAPKTKVLRDGKWSEQEAAILVPGDIVSIKLGDIIPADARLLEGDPLKVDQSALTGESLPVTKHPGQEVFSGSTCKQGEIEAVVIATGVHTFFGKAAHLVDSTNQVGHFQKVLTAIGNFCICSIAIGMVIEIIVMYPIQRRKYRDGIDNLLVLLIGGIPIAMPTVLSVTMAIGSHRLSQQGAITKRMTAIEEMAGMDVLCSDKTGTLTLNKLSVDKNLVEVFCKGVEKDQVLLFAAMASRVENQDAIDAAMVGMLADPKEARAGIREVHFLPFNPVDKRTALTYIDGSGNWHRVSKGAPEQILELAKASNDLSKKVLSIIDKYAERGLRSLAVARQVVPEKTKESPGAPWEFVGLLPLFDPPRHDSAETIRRALNLGVNVKMITGDQLAIGKETGRRLGMGTNMYPSSALLGTHKDANLASIPVEELIEKADGFAGVFPEHKYEIVKKLQERKHIVGMTGDGVNDAPALKKADIGIAVADATDAARGASDIVLTEPGLSVIISAVLTSRAIFQRMKNYTIYAVSITIRIVFGFMLIALIWEFDFSAFMVLIIAILNDGTIMTISKDRVKPSPTPDSWKLKEIFATGVVLGGYQAIMTVIFFWAAHKTDFFSDTFGVRSIRDNNHELMGAVYLQVSIISQALIFVTRSRSWSFVERPGALLMIAFLIAQLIATLIAVYANWEFAKIRGIGWGWAGVIWLYSIVTYFPLDVFKFAIRYILSGKAWLNLFENKTAFTMKKDYGKEEREAQWALAQRTLHGLQPKEAVNIFPEKGSYRELSEIAEQAKRRAEIARLRELHTLKGHVESVVKLKGLDIETPSHYTV

SEQ ID NO: 50450 - protein, 884 aa, Arabidopsis thaliana
  peptide (1)..(884): Ceres Seq. ID no. 13647824
  misc_feature (259)..(545): Pfam Name: haloacid dehalogenase-like hydrolase Pfam Description: haloacid dehalogenase-like hydrolase
  misc_feature (259)..(545): Pfam Name: haloacid dehalogenase-like hydrolase Pfam Description: haloacid dehalogenase-like hydrolase
  misc_feature (259)..(545): Pfam Name: haloacid dehalogenase-like hydrolase Pfam Description: haloacid dehalogenase-like hydrolase
  misc_feature (689)..(740): Homolog of NCBI NO: 16751320 NR Description: putative plasma membrane-type proton ATPase
  misc_feature (1)..(687): Homolog of NCBI NO: 16751320 NR Description: putative plasma membrane-type proton ATPase
  misc_feature (680)..(749): Homolog of NCBI NO: 1709665 NR Description: Plasma membrane ATPase (Proton pump)
  misc_feature (1)..(672): Homolog of NCBI NO: 1709665 NR Description: Plasma membrane ATPase (Proton pump)
  misc_feature (693)..(749): Homolog of NCBI NO: 1709666 NR Description: Plasma membrane ATPase (Proton pump)
  misc_feature (689)..(740): Homolog of NCBI NO: 16751320 NR Description: putative plasma membrane-type proton ATPase
  misc_feature (680)..(749): Homolog of NCBI NO: 1709665 NR Description: Plasma membrane ATPase (Proton pump)
  misc_feature (693)..(749): Homolog of NCBI NO: 1709666 NR Description: Plasma membrane ATPase (Proton pump)
  misc_feature (1)..(672): Homolog of NCBI NO: 1709665 NR Description: Plasma membrane ATPase (Proton pump)
  misc_feature (680)..(749): Homolog of NCBI NO: 1709665 NR Description: Plasma membrane ATPase (Proton pump)
  misc_feature (1)..(687): Homolog of NCBI NO: 16751320 NR Description: putative plasma membrane-type proton ATPase
  misc_feature (689)..(740): Homolog of NCBI NO: 16751320 NR Description: putative plasma membrane-type proton ATPase
  misc_feature (1)..(778): Homolog of NCBI NO: 6691153 NR Description: plasma membrane H(+)-ATPase [Filobasidiella
  misc_feature (1)..(778): Homolog of NCBI NO: 3348073 NR Description: plasma membrane H(+)-ATPase 1 [Filobasidiella
  misc_feature (1)..(781): Homolog of NCBI NO: 2652922 NR Description: plasma membrane (H+) ATPase [Uromyces fabae]
  misc_feature (1)..(803): Homolog of NCBI NO: 1709664 NR Description: Probable plasma membrane ATPase (Proton pump)
  misc_feature (1)..(684): Homolog of NCBI NO: 1709666 NR Description: Plasma membrane ATPase (Proton pump)
  misc_feature (1)..(778): Homolog of NCBI NO: 6691153 NR Description: plasma membrane H(+)-ATPase [Filobasidiella
  misc_feature (1)..(778): Homolog of NCBI NO: 3348073 NR Description: plasma membrane H(+)-ATPase 1 [Filobasidiella
  misc_feature (1)..(781): Homolog of NCBI NO: 2652922 NR Description: plasma membrane (H+) ATPase [Uromyces fabae]
  misc_feature (1)..(803): Homolog of NCBI NO: 1709664 NR Description: Probable plasma membrane ATPase (Proton pump)
  misc_feature (1)..(684): Homolog of NCBI NO: 1709666 NR Description: Plasma membrane ATPase (Proton pump)
  misc_feature (693)..(749): Homolog of NCBI NO: 1709666 NR Description: Plasma membrane ATPase (Proton pump)
  misc_feature (1)..(672): Homolog of NCBI NO: 1709665 NR Description: Plasma membrane ATPase (Proton pump)
  misc_feature (1)..(687): Homolog of NCBI NO: 16751320 NR Description: putative plasma membrane-type proton ATPase
  misc_feature (1)..(684): Homolog of NCBI NO: 1709666 NR Description: Plasma membrane ATPase (Proton pump)
  misc_feature (1)..(803): Homolog of NCBI NO: 1709664 NR Description: Probable plasma membrane ATPase (Proton pump)
  misc_feature (1)..(781): Homolog of NCBI NO: 2652922 NR Description: plasma membrane (H+) ATPase [Uromyces fabae]
  misc_feature (1)..(778): Homolog of NCBI NO: 3348073 NR Description: plasma membrane H(+)-ATPase 1 [Filobasidiella
  misc_feature (1)..(778): Homolog of NCBI NO: 6691153 NR Description: plasma membrane H(+)-ATPase [Filobasidiella
MWNPLSWVMEMAAIMAIALANGDGRPPDWQDFVGIICLLVINSTISFIEENNAGNAAAALMAGLAPKTKVLRDGKWSEQEAAILVPGDIVSIKLGDIIPADARLLEGDPLKVDQSALTGESLPVTKHPGQEVFSGSTCKQGEIEAVVIATGVHTFFGKAAHLVDSTNQVGHFQKVLTAIGNFCICSIAIGMVIEIIVMYPIQRRKYRDGIDNLLVLLIGGIPIAMPTVLSVTMAIGSHRLSQQGAITKRMTAIEEMAGMDVLCSDKTGTLTLNKLSVDKNLVEVFCKGVEKDQVLLFAAMASRVENQDAIDAAMVGMLADPKEARAGIREVHFLPFNPVDKRTALTYIDGSGNWHRVSKGAPEQILELAKASNDLSKKVLSIIDKYAERGLRSLAVARQVVPEKTKESPGAPWEFVGLLPLFDPPRHDSAETIRRALNLGVNVKMITGDQLAIGKETGRRLGMGTNMYPSSALLGTHKDANLASIPVEELIEKADGFAGVFPEHKYEIVKKLQERKHIVGMTGDGVNDAPALKKADIGIAVADATDAARGASDIVLTEPGLSVIISAVLTSRAIFQRMKNYTIYAVSITIRIVFGFMLIALIWEFDFSAFMVLIIAILNDGTIMTISKDRVKPSPTPDSWKLKEIFATGVVLGGYQAIMTVIFFWAAHKTDFFSDTFGVRSIRDNNHELMGAVYLQVSIISQALIFVTRSRSWSFVERPGALLMIAFLIAQLIATLIAVYANWEFAKIRGIGWGWAGVIWLYSIVTYFPLDVFKFAIRYILSGKAWLNLFENKTAFTMKKDYGKEEREAQWALAQRTLHGLQPKEAVNIFPEKGSYRELSEIAEQAKRRAEIARLRELHTLKGHVESVVKLKGLDIETPSHYTV

SEQ ID NO: 50451 - protein, 876 aa, Arabidopsis thaliana
  peptide (1)..(876): Ceres Seq. ID no. 13647825
  misc_feature (251)..(537): Pfam Name: haloacid dehalogenase-like hydrolase Pfam Description: haloacid dehalogenase-like hydrolase
  misc_feature (251)..(537): Pfam Name: haloacid dehalogenase-like hydrolase Pfam Description: haloacid dehalogenase-like hydrolase
  misc_feature (251)..(537): Pfam Name: haloacid dehalogenase-like hydrolase Pfam Description: haloacid dehalogenase-like hydrolase
  misc_feature (681)..(732): Homolog of NCBI NO: 16751320 NR Description: putative plasma membrane-type proton ATPase
  misc_feature (1)..(679): Homolog of NCBI NO: 16751320 NR Description: putative plasma membrane-type proton ATPase
  misc_feature (672)..(741): Homolog of NCBI NO: 1709665 NR Description: Plasma membrane ATPase (Proton pump)
  misc_feature (1)..(664): Homolog of NCBI NO: 1709665 NR Description: Plasma membrane ATPase (Proton pump)
  misc_feature (685)..(741): Homolog of NCBI NO: 1709666 NR Description: Plasma membrane ATPase (Proton pump)
  misc_feature (681)..(732): Homolog of NCBI NO: 16751320 NR Description: putative plasma membrane-type proton ATPase
  misc_feature (672)..(741): Homolog of NCBI NO: 1709665 NR Description: Plasma membrane ATPase (Proton pump)
  misc_feature (685)..(741): Homolog of NCBI NO: 1709666 NR Description: Plasma membrane ATPase (Proton pump)
  misc_feature (1)..(664): Homolog of NCBI NO: 1709665 NR Description: Plasma membrane ATPase (Proton pump)
  misc_feature (672)..(741): Homolog of NCBI NO: 1709665 NR Description: Plasma membrane ATPase (Proton pump)
  misc_feature (1)..(679): Homolog of NCBI NO: 16751320 NR Description: putative plasma membrane-type proton ATPase
  misc_feature (681)..(732): Homolog of NCBI NO: 16751320 NR Description: putative plasma membrane-type proton ATPase
  misc_feature (1)..(770): Homolog of NCBI NO: 6691153 NR Description: plasma membrane H(+)-ATPase [Filobasidiella
  misc_feature (1)..(770): Homolog of NCBI NO: 3348073 NR Description: plasma membrane H(+)-ATPase 1 [Filobasidiella
  misc_feature (1)..(773): Homolog of NCBI NO: 2652922 NR Description: plasma membrane (H+) ATPase [Uromyces fabae]
  misc_feature (1)..(795): Homolog of NCBI NO: 1709664 NR Description: Probable plasma membrane ATPase (Proton pump)
  misc_feature (1)..(676): Homolog of NCBI NO: 1709666 NR Description: Plasma membrane ATPase (Proton pump)
  misc_feature (1)..(770): Homolog of NCBI NO: 6691153 NR Description: plasma membrane H(+)-ATPase [Filobasidiella
  misc_feature (1)..(770): Homolog of NCBI NO: 3348073 NR Description: plasma membrane H(+)-ATPase 1 [Filobasidiella
  misc_feature (1)..(773): Homolog of NCBI NO: 2652922 NR Description: plasma membrane (H+) ATPase [Uromyces fabae]
  misc_feature (1)..(795): Homolog of NCBI NO: 1709664 NR Description: Probable plasma membrane ATPase (Proton pump)
  misc_feature (1)..(676): Homolog of NCBI NO: 1709666 NR Description: Plasma membrane ATPase (Proton pump)
  misc_feature (685)..(741): Homolog of NCBI NO: 1709666 NR Description: Plasma membrane ATPase (Proton pump)
  misc_feature (1)..(664): Homolog of NCBI NO: 1709665 NR Description: Plasma membrane ATPase (Proton pump)
  misc_feature (1)..(679): Homolog of NCBI NO: 16751320 NR Description: putative plasma membrane-type proton ATPase
  misc_feature (1)..(676): Homolog of NCBI NO: 1709666 NR Description: Plasma membrane ATPase (Proton pump)
  misc_feature (1)..(795): Homolog of NCBI NO: 1709664 NR Description: Probable plasma membrane ATPase (Proton pump)
  misc_feature (1)..(773): Homolog of NCBI NO: 2652922 NR Description: plasma membrane (H+) ATPase [Uromyces fabae]
  misc_feature (1)..(770): Homolog of NCBI NO: 3348073 NR Description: plasma membrane H(+)-ATPase 1 [Filobasidiella
  misc_feature (1)..(770): Homolog of NCBI NO: 6691153 NR Description: plasma membrane H(+)-ATPase [Filobasidiella
MEMAAIMAIALANGDGRPPDWQDFVGIICLLVINSTISFIEENNAGNAAAALMAGLAPKTKVLRDGKWSEQEAAILVPGDIVSIKLGDIIPADARLLEGDPLKVDQSALTGESLPVTKHPGQEVFSGSTCKQGEIEAVVIATGVHTFFGKAAHLVDSTNQVGHFQKVLTAIGNFCICSIAIGMVIEIIVMYPIQRRKYRDGIDNLLVLLIGGIPIAMPTVLSVTMAIGSHRLSQQGAITKRMTAIEEMAGMDVLCSDKTGTLTLNKLSVDKNLVEVFCKGVEKDQVLLFAAMASRVENQDAIDAAMVGMLADPKEARAGIREVHFLPFNPVDKRTALTYIDGSGNWHRVSKGAPEQILELAKASNDLSKKVLSIIDKYAERGLRSLAVARQVVPEKTKESPGAPWEFVGLLPLFDPPRHDSAETIRRALNLGVNVKMITGDQLAIGKETGRRLGMGTNMYPSSALLGTHKDANLASIPVEELIEKADGFAGVFPEHKYEIVKKLQERKHIVGMTGDGVNDAPALKKADIGIAVADATDAARGASDIVLTEPGLSVIISAVLTSRAIFQRMKNYTIYAVSITIRIVFGFMLIALIWEFDFSAFMVLIIAILNDGTIMTISKDRVKPSPTPDSWKLKEIFATGVVLGGYQAIMTVIFFWAAHKTDFFSDTFGVRSIRDNNHELMGAVYLQVSIISQALIFVTRSRSWSFVERPGALLMIAFLIAQLIATLIAVYANWEFAKIRGIGWGWAGVIWLYSIVTYFPLDVFKFAIRYILSGKAWLNLFENKTAFTMKKDYGKEEREAQWALAQRTLHGLQPKEAVNIFPEKGSYRELSEIAEQAKRRAEIARLRELHTLKGHVESVVKLKGLDIETPSHYTV

SEQ ID NO: 50452 - DNA, 1316 bp, Arabidopsis thaliana
  misc_feature (1)..(1316): Ceres Seq. ID no. 13592351
  misc_feature: MA Experiment ID: 20000171 Result: Down-regulated in Transcription
  misc_feature: MA Experiment 20000171 PARAMETER Experiment Name: At_42deg_Heat_P Parameter: Age (day) Value: 14
  misc_feature: MA Experiment 20000171 PARAMETER Experiment Name: At_42deg_Heat_P Parameter: Organism Value: A. thaliana
  misc_feature: MA Experiment 20000171 PARAMETER Experiment Name: At_42deg_Heat_P Parameter: Plant Line Value: WS
  misc_feature: MA Experiment 20000171 PARAMETER Experiment Name: At_42deg_Heat_P Parameter: Temperature (deg C) Value: 42 vs. 22
  misc_feature: MA Experiment 20000171 PARAMETER Experiment Name: At_42deg_Heat_P Parameter: Timepoint (hr) Value: 1
  misc_feature: MA Experiment 20000171 PARAMETER Experiment Name: At_42deg_Heat_P Parameter: Tissue Value: Aerial
  misc_feature: MA Experiment ID: 20000173 Result: Down-regulated in Transcription
  misc_feature: MA Experiment 20000173 PARAMETER Experiment Name: At_42deg_Heat_P Parameter: Age (day) Value: 14
  misc_feature: MA Experiment 20000173 PARAMETER Experiment Name: At_42deg_Heat_P Parameter: Organism Value: A. thaliana
  misc_feature: MA Experiment 20000173 PARAMETER Experiment Name: At_42deg_Heat_P Parameter: Plant Line Value: WS
  misc_feature: MA Experiment 20000173 PARAMETER Experiment Name: At_42deg_Heat_P Parameter: Temperature (deg C) Value: 42 vs. 22
  misc_feature: MA Experiment 20000173 PARAMETER Experiment Name: At_42deg_Heat_P Parameter: Timepoint (hr) Value: 6
  misc_feature: MA Experiment 20000173 PARAMETER Experiment Name: At_42deg_Heat_P Parameter: Tissue Value: Aerial
  misc_feature: MA Experiment ID: 20000179 Result: Up-regulated in Transcription
  misc_feature: MA Experiment 20000179 PARAMETER Experiment Name: At_Germinating_Seeds_P Parameter: Age (hr) Value: 6 vs. 0
  misc_feature: MA Experiment 20000179 PARAMETER Experiment Name: At_Germinating_Seeds_P Parameter: Tissue Value: Germinating Seeds
  misc_feature: MA Experiment ID: 20000180 Result: Up-regulated in Transcription
  misc_feature: MA Experiment 20000180 PARAMETER Experiment Name: At_Germinating_Seeds_P Parameter: Age (hr) Value: 24 vs. 0
  misc_feature: MA Experiment 20000180 PARAMETER Experiment Name: At_Germinating_Seeds_P Parameter: Tissue Value: Germinating Seeds
  misc_feature: MA Experiment ID: 20000182 Result: Up-regulated in Transcription
  misc_feature: MA Experiment 20000182 PARAMETER Experiment Name: At_2mM_SA_P Parameter: Age (day) Value: 14
  misc_feature: MA Experiment 20000182 PARAMETER Experiment Name: At_2mM_SA_P Parameter: Organism Value: A. thaliana
  misc_feature: MA Experiment 20000182 PARAMETER Experiment Name: At_2mM_SA_P Parameter: Plant Line Value: WS
  misc_feature: MA Experiment 20000182 PARAMETER Experiment Name: At_2mM_SA_P Parameter: Timepoint (hr) Value: 6
  misc_feature: MA Experiment 20000182 PARAMETER Experiment Name: At_2mM_SA_P Parameter: Tissue Value: Aerial
  misc_feature: MA Experiment 20000182 PARAMETER Experiment Name: At_2mM_SA_P Parameter: Treatment Value: 2mM SA vs. No Treatment
  misc_feature: MA Experiment ID: 20000185 Result: Up-regulated in Transcription
  misc_feature: MA Experiment 20000185 PARAMETER Experiment Name: At_Roots__P Parameter: Age (day) Value: 7 vs. 21
  misc_feature: MA Experiment 20000185 PARAMETER Experiment Name: At_Roots__P Parameter: Organism Value: A. thaliana
  misc_feature: MA Experiment 20000185 PARAMETER Experiment Name: At_Roots__P Parameter: Tissue Value: Roots vs. Whole Plant
  misc_feature: MA Experiment ID: 20000227 Result: Down-regulated in Transcription
  misc_feature: MA Experiment 20000227 PARAMETER Experiment Name: At_Root-Tips-vs-Tops_P Parameter: Tissue Value: Root Tips vs. Root Tops
  misc_feature: MA Experiment ID: 20000439 Result: Up-regulated in Transcription
  misc_feature: MA Experiment 20000439 PARAMETER Experiment Name: At_Roots__P Parameter: Age (day) Value: 14 vs. 21
  misc_feature: MA Experiment 20000439 PARAMETER Experiment Name: At_Roots__P Parameter: Organism Value: A. thaliana
  misc_feature: MA Experiment 20000439 PARAMETER Experiment Name: At_Roots__P Parameter: Tissue Value: Roots vs. Whole Plant
  misc_feature: MA Experiment ID: 20000496 Result: Down-regulated in Transcription
  misc_feature: MA Experiment 20000496 PARAMETER Experiment Name: At_Guard_Cells_P Parameter: Harvest Date Value: 7/19/2002
  misc_feature: MA Experiment 20000496 PARAMETER Experiment Name: At_Guard_Cells_P Parameter: Organism Value: Canola
  misc_feature: MA Experiment 20000496 PARAMETER Experiment Name: At_Guard_Cells_P Parameter: Tissue Value: Guard Cells vs. Leaves
gagcttaagccaaagatctctcattgacctttgcttcttcatcttcttctccgatcacagtttctctctttctggattccaccattcttctctttgtcgtctatgtgacctattctcgattcgatccatggaataatctctgtccgaagaagatctctcattccccttcaaaagcagacagattcgaaactttcccccaaattcgtggaaatcttgtgttagggtttgggttattctcaaatagaatcaatcagatcgttttttctttttgttagaagaagatgaagatagcggccaatggccggtttttcacaatcggactcgtagcgtcatggtattcatcgaacatcggagttttattgctgaacaagtacttgttaagcaactatggattcaagtatccgatcttcctcaccatgtgtcacatgacggcttgttctcttctcagctacgttgctattgcttggatgaagatggttccgatgcaaacgatccgatctcgagttcagtttcttaagatcgctgcgttaagtctcgttttctgtgtgtcggtggtttttgggaatatctctcttcggtttcttcctgtatcgtttaatcaagcgattggtgctacgacgccgtttttcaccgccgtgtttgcttatctgattacttttaagagagaagcttggttgacttacttcactctcgtccctgttgttaccggtgttgtcattgccagtgggaaacatccttgggatttgcctgagcttgatcacttcatgatatgtagtttatatgctgctcaaattagactagaagttgttcttttatgcgtgcatagtgtgaatcctagtgagccaagtttccacctgtttggattcattatgtgcattgcagctacagctgcaagagcacttaaatcagttcttcaaggaattttgctttcttcagaaggggagaagctaaattccatgaacctcctcctttacatggctcccatagctgttgtgttcctccttcctgctacacttatcatggaaaaaaatgttgttggcattacaattgcacttgccagagacgattttagaatcgtttggtatctgctattcaattcggcgctagcttattttgtgaacttgaccaatttcttagtcacgaaacacaccagcgctctgactctccaggtgctaggaaacgccaaaggtgcagtagcagtggtggtatcaatcctgatattcaggaatcctgtctcagtgactggaatgttaggttactcgctcactgtctgtggagttatcctctacagcgaagccaagaaacgaagcaaataa

SEQ ID NO: 50453 - protein, 344 aa, Arabidopsis thaliana
  peptide (1)..(344): Ceres Seq. ID no. 13592352
  misc_feature (25)..(148): Pfam Name: Integral membrane protein DUF6 Pfam Description: Integral membrane protein DUF6
  misc_feature (1)..(246): Homolog of NCBI NO: 30681126 NR Description: phosphate translocator-related [Arabidopsis
  misc_feature (187)..(344): Homolog of NCBI NO: 30681126 NR Description: phosphate translocator-related [Arabidopsis
  misc_feature (187)..(344): Homolog of NCBI NO: 9759107 NR Description: phosphate/phosphoenolpyruvate translocator
  misc_feature (10)..(152): Homolog of NCBI NO: 15228248 NR Description: phosphate translocator-related [Arabidopsis
  misc_feature (187)..(342): Homolog of NCBI NO: 15228248 NR Description: phosphate translocator-related [Arabidopsis
  misc_feature (10)..(152): Homolog of NCBI NO: 17064798 NR Description: phosphate/phosphoenolpyruvate translocator-like
  misc_feature (187)..(342): Homolog of NCBI NO: 17064798 NR Description: phosphate/phosphoenolpyruvate translocator-like
  misc_feature (10)..(152): Homolog of NCBI NO: 15237644 NR Description: phosphate translocator-related [Arabidopsis
  misc_feature (187)..(342): Homolog of NCBI NO: 15237644 NR Description: phosphate translocator-related [Arabidopsis
  misc_feature (1)..(344): Homolog of NCBI NO: 15229717 NR Description: phosphate translocator-related [Arabidopsis
MKIAANGRFFTIGLVASWYSSNIGVLLLNKYLLSNYGFKYPIFLTMCHMTACSLLSYVAIAWMKMVPMQTIRSRVQFLKIAALSLVFCVSVVFGNISLRFLPVSFNQAIGATTPFFTAVFAYLITFKREAWLTYFTLVPVVTGVVIASGKHPWDLPELDHFMICSLYAAQIRLEVVLLCVHSVNPSEPSFHLFGFIMCIAATAARALKSVLQGILLSSEGEKLNSMNLLLYMAPIAVVFLLPATLIMEKNVVGITIALARDDFRIVWYLLFNSALAYFVNLTNFLVTKHTSALTLQVLGNAKGAVAVVVSILIFRNPVSVTGMLGYSLTVCGVILYSEAKKRSK

SEQ ID NO: 50454 - protein, 299 aa, Arabidopsis thaliana
  peptide (1)..(299): Ceres Seq. ID no. 13592353
  misc_feature (1)..(103): Pfam Name: Integral membrane protein DUF6 Pfam Description: Integral membrane protein DUF6
  misc_feature (1)..(201): Homolog of NCBI NO: 30681126 NR Description: phosphate translocator-related [Arabidopsis
  misc_feature (142)..(299): Homolog of NCBI NO: 30681126 NR Description: phosphate translocator-related [Arabidopsis
  misc_feature (142)..(299): Homolog of NCBI NO: 9759107 NR Description: phosphate/phosphoenolpyruvate translocator
  misc_feature (1)..(107): Homolog of NCBI NO: 15228248 NR Description: phosphate translocator-related [Arabidopsis
  misc_feature (142)..(297): Homolog of NCBI NO: 15228248 NR Description: phosphate translocator-related [Arabidopsis
  misc_feature (1)..(107): Homolog of NCBI NO: 17064798 NR Description: phosphate/phosphoenolpyruvate translocator-like
  misc_feature (142)..(297): Homolog of NCBI NO: 17064798 NR Description: phosphate/phosphoenolpyruvate translocator-like
  misc_feature (1)..(107): Homolog of NCBI NO: 15237644 NR Description: phosphate translocator-related [Arabidopsis
  misc_feature (142)..(297): Homolog of NCBI NO: 15237644 NR Description: phosphate translocator-related [Arabidopsis
  misc_feature (1)..(299): Homolog of NCBI NO: 15229717 NR Description: phosphate translocator-related [Arabidopsis
MCHMTACSLLSYVAIAWMKMVPMQTIRSRVQFLKIAALSLVFCVSVVFGNISLRFLPVSFNQAIGATTPFFTAVFAYLITFKREAWLTYFTLVPVVTGVVIASGKHPWDLPELDHFMICSLYAAQIRLEVVLLCVHSVNPSEPSFHLFGFIMCIAATAARALKSVLQGILLSSEGEKLNSMNLLLYMAPIAVVFLLPATLIMEKNVVGITIALARDDFRIVWYLLFNSALAYFVNLTNFLVTKHTSALTLQVLGNAKGAVAVVVSILIFRNPVSVTGMLGYSLTVCGVILYSEAKKRSK

SEQ ID NO: 50455 - protein, 296 aa, Arabidopsis thaliana
  peptide (1)..(296): Ceres Seq. ID no. 13592354
  misc_feature (1)..(100): Pfam Name: Integral membrane protein DUF6 Pfam Description: Integral membrane protein DUF6
  misc_feature (1)..(198): Homolog of NCBI NO: 30681126 NR Description: phosphate translocator-related [Arabidopsis
  misc_feature (139)..(296): Homolog of NCBI NO: 30681126 NR Description: phosphate translocator-related [Arabidopsis
  misc_feature (139)..(296): Homolog of NCBI NO: 9759107 NR Description: phosphate/phosphoenolpyruvate translocator
  misc_feature (1)..(104): Homolog of NCBI NO: 15228248 NR Description: phosphate translocator-related [Arabidopsis
  misc_feature (139)..(294): Homolog of NCBI NO: 15228248 NR Description: phosphate translocator-related [Arabidopsis
  misc_feature (1)..(104): Homolog of NCBI NO: 17064798 NR Description: phosphate/phosphoenolpyruvate translocator-like
  misc_feature (139)..(294): Homolog of NCBI NO: 17064798 NR Description: phosphate/phosphoenolpyruvate translocator-like
  misc_feature (1)..(104): Homolog of NCBI NO: 15237644 NR Description: phosphate translocator-related [Arabidopsis
  misc_feature (139)..(294): Homolog of NCBI NO: 15237644 NR Description: phosphate translocator-related [Arabidopsis
  misc_feature (1)..(296): Homolog of NCBI NO: 15229717 NR Description: phosphate translocator-related [Arabidopsis
MTACSLLSYVAIAWMKMVPMQTIRSRVQFLKIAALSLVFCVSVVFGNISLRFLPVSFNQAIGATTPFFTAVFAYLITFKREAWLTYFTLVPVVTGVVIASGKHPWDLPELDHFMICSLYAAQIRLEVVLLCVHSVNPSEPSFHLFGFIMCIAATAARALKSVLQGILLSSEGEKLNSMNLLLYMAPIAVVFLLPATLIMEKNVVGITIALARDDFRIVWYLLFNSALAYFVNLTNFLVTKHTSALTLQVLGNAKGAVAVVVSILIFRNPVSVTGMLGYSLTVCGVILYSEAKKRSK

SEQ ID NO: 50456 - DNA, 755 bp, Arabidopsis thaliana
  misc_feature (1)..(755): Ceres Seq. ID no. 13588210
  misc_feature: MA Experiment ID: 20000307 Result: Up-regulated in Transcription
  misc_feature: MA Experiment 20000307 PARAMETER Experiment Name: At_Germinating_Seeds_Sub_P Parameter: Age (hr) Value: 24 vs. 0
  misc_feature: MA Experiment 20000307 PARAMETER Experiment Name: At_Germinating_Seeds_Sub_P Parameter: Organism Value: A. thaliana
  misc_feature: MA Experiment 20000307 PARAMETER Experiment Name: At_Germinating_Seeds_Sub_P Parameter: Plant Line Value: WS
  misc_feature: MA Experiment 20000307 PARAMETER Experiment Name: At_Germinating_Seeds_Sub_P Parameter: Tissue Value: Germinating Seeds
  misc_feature: MA Experiment ID: 20000315 Result: Down-regulated in Transcription
  misc_feature: MA Experiment 20000315 PARAMETER Experiment Name: At_14day_Shoots-Roots_Sub_P Parameter: Age (day) Value: 14
  misc_feature: MA Experiment 20000315 PARAMETER Experiment Name: At_14day_Shoots-Roots_Sub_P Parameter: Organism Value: A. thaliana
  misc_feature: MA Experiment 20000315 PARAMETER Experiment Name: At_14day_Shoots-Roots_Sub_P Parameter: Plant Line Value: WS
  misc_feature: MA Experiment 20000315 PARAMETER Experiment Name: At_14day_Shoots-Roots_Sub_P Parameter: Tissue Value: Shoots vs. Whole Plant
  misc_feature: MA Experiment ID: 20000347 Result: Up-regulated in Transcription
  misc_feature: MA Experiment 20000347 PARAMETER Experiment Name: At_2mM_SA_Sub_P Parameter: Age (day) Value: 14
  misc_feature: MA Experiment 20000347 PARAMETER Experiment Name: At_2mM_SA_Sub_P Parameter: Organism Value: A. thaliana
  misc_feature: MA Experiment 20000347 PARAMETER Experiment Name: At_2mM_SA_Sub_P Parameter: Plant Line Value: WS
  misc_feature: MA Experiment 20000347 PARAMETER Experiment Name: At_2mM_SA_Sub_P Parameter: Timepoint (hr) Value: 6
  misc_feature: MA Experiment 20000347 PARAMETER Experiment Name: At_2mM_SA_Sub_P Parameter: Tissue Value: Aerial
  misc_feature: MA Experiment 20000347 PARAMETER Experiment Name: At_2mM_SA_Sub_P Parameter: Treatment Value: 2mM SA vs. No Treatment
  misc_feature: MA Experiment ID: 20000355 Result: Down-regulated in Transcription
  misc_feature: MA Experiment 20000355 PARAMETER Experiment Name: At_Siliques_Sub_P Parameter: Age (day) Value: 21
  misc_feature: MA Experiment 20000355 PARAMETER Experiment Name: At_Siliques_Sub_P Parameter: Organism Value: A. thaliana
  misc_feature: MA Experiment 20000355 PARAMETER Experiment Name: At_Siliques_Sub_P Parameter: Plant Line Value: WS
  misc_feature: MA Experiment 20000355 PARAMETER Experiment Name: At_Siliques_Sub_P Parameter: Tissue Value: Less Than 5mm Siliques vs. Whole Plant
  misc_feature: MA Experiment ID: 20000440 Result: Down-regulated in Transcription
  misc_feature: MA Experiment 20000440 PARAMETER Experiment Name: At_Closed-Flower__Sub_P Parameter: Tissue Value: Closed Flower vs. Whole Plant
gacgaatcgtctcacaaactctttcgtttttccctttttctccaatcacagaaaagaaaagaaaaaacaatggcggatcagctcacagacgatcagatctcagaattcaaggaagccttcagcttattcgacaaggatggtgatggttgcattaccacaaaggagcttggtaccgtgatgcgttccctcggtcaaaacccaaccgaagctgagcttcaggacatgatcaacgaagttgatgcggatggtaacggaaccattgatttcccggagttcttgaacctaatggctaggaaaatgaaggacactgactctgaggaagaactcaaggaagctttcagagttttcgacaaagaccagaacggtttcatctcagctgctgaattgagacatgtgatgactaacctcggcgagaagcttactgatgaagaagttgatgagatgattaaggaagctgatgttgatggtgatggtcagatcaactacgaagagtttgtgaaggttatgatggctaagtgaggattgaaacaacttcttcggctttctccttttttttttttgactaccttcttatgtaatttcataaagaatgttccttcgctttgttctaaaatttcattcatggctggtttttgctggttaaaaagacaggaatgttatgtgtttttaccttttgtctaaatgactcattgttcatgttattgacaggttcagaacctgattcttgaaatataacagtaatgagatcttcttct

SEQ ID NO: 50457 - protein, 172 aa, Arabidopsis thaliana
  peptide (1)..(172): Ceres Seq. ID no. 13588211
  misc_feature (35)..(63): Pfam Name: EF hand Pfam Description: EF hand
  misc_feature (24)..(172): Homolog of NCBI NO: 289525 NR Description: calmodulin
  misc_feature (24)..(172): Homolog of NCBI NO: 30688187 NR Description: calmodulin-6 (CAM6) [Arabidopsis thaliana]
  misc_feature (24)..(172): Homolog of NCBI NO: 3121849 NR Description: CALMODULIN
  misc_feature (24)..(172): Homolog of NCBI NO: 115515 NR Description: Calmodulin
  misc_feature (24)..(172): Homolog of NCBI NO: 34903134 NR Description: unnamed protein product [Oryza sativa (japonica
  misc_feature (24)..(172): Homolog of NCBI NO: 3121848 NR Description: CALMODULIN
  misc_feature (24)..(172): Homolog of NCBI NO: 34304715 NR Description: calmodulin 4 [Daucus carota]
  misc_feature (24)..(172): Homolog of NCBI NO: 15229784 NR Description: calmodulin [Arabidopsis thaliana]
  misc_feature (24)..(172): Homolog of NCBI NO: 30683369 NR Description: calmodulin [Arabidopsis thaliana]
  misc_feature (24)..(172): Homolog of NCBI NO: 15225840 NR Description: calmodulin [Arabidopsis thaliana]
DESSHKLFRFSLFLQSQKRKEKTMADQLTDDQISEFKEAFSLFDKDGDGCITTKELGTVMRSLGQNPTEAELQDMINEVDADGNGTIDFPEFLNLMARKMKDTDSEEELKEAFRVFDKDQNGFISAAELRHVMTNLGEKLTDEEVDEMIKEADVDGDGQINYEEFVKVMMAK

SEQ ID NO: 50458 - protein, 149 aa, Arabidopsis thaliana; identical to SEQ ID NO: 29417
  peptide (1)..(149): Ceres Seq. ID no. 13588212
  misc_feature (12)..(40): Pfam Name: EF hand Pfam Description: EF hand
  misc_feature (1)..(149): Homolog of NCBI NO: 289525 NR Description: calmodulin
  misc_feature (1)..(149): Homolog of NCBI NO: 3121849 NR Description: CALMODULIN
  misc_feature (1)..(149): Homolog of NCBI NO: 30688187 NR Description: calmodulin-6 (CAM6) [Arabidopsis thaliana]
  misc_feature (1)..(149): Homolog of NCBI NO: 115515 NR Description: Calmodulin
  misc_feature (1)..(149): Homolog of NCBI NO: 34903134 NR Description: unnamed protein product [Oryza sativa (japonica
  misc_feature (1)..(149): Homolog of NCBI NO: 3121848 NR Description: CALMODULIN
  misc_feature (1)..(149): Homolog of NCBI NO: 34304715 NR Description: calmodulin 4 [Daucus carota]
  misc_feature (1)..(149): Homolog of NCBI NO: 15229784 NR Description: calmodulin [Arabidopsis thaliana]
  misc_feature (1)..(149): Homolog of NCBI NO: 30683369 NR Description: calmodulin [Arabidopsis thaliana]
  misc_feature (1)..(149): Homolog of NCBI NO: 15225840 NR Description: calmodulin [Arabidopsis thaliana]

SEQ ID NO: 50459 - protein, 113 aa, Arabidopsis thaliana; identical to SEQ ID NO: 29418
  peptide (1)..(113): Ceres Seq. ID no. 13588213
  misc_feature (1)..(113): Homolog of NCBI NO: 289525 NR Description: calmodulin
  misc_feature (1)..(113): Homolog of NCBI NO: 3121849 NR Description: CALMODULIN
  misc_feature (1)..(113): Homolog of NCBI NO: 30688187 NR Description: calmodulin-6 (CAM6) [Arabidopsis thaliana]
  misc_feature (1)..(113): Homolog of NCBI NO: 115515 NR Description: Calmodulin
  misc_feature (1)..(113): Homolog of NCBI NO: 34903134 NR Description: unnamed protein product [Oryza sativa (japonica
  misc_feature (1)..(113): Homolog of NCBI NO: 3121848 NR Description: CALMODULIN
  misc_feature (1)..(113): Homolog of NCBI NO: 34304715 NR Description: calmodulin 4 [Daucus carota]
  misc_feature (1)..(113): Homolog of NCBI NO: 15229784 NR Description: calmodulin [Arabidopsis thaliana]
  misc_feature (1)..(113): Homolog of NCBI NO: 30683369 NR Description: calmodulin [Arabidopsis thaliana]
  misc_feature (1)..(113): Homolog of NCBI NO: 15225840 NR Description: calmodulin [Arabidopsis thaliana]

SEQ ID NO: 50460 - DNA, 2271 bp, Arabidopsis thaliana; identical to SEQ ID NO: 48862
  misc_feature (1)..(2271): Ceres Seq. ID no. 12601691
  misc_feature: MA Experiment ID: 20000495 Result: Down-regulated in Transcription
  misc_feature: MA Experiment 20000495 PARAMETER Experiment Name: At_Guard_Cells_P Parameter: Harvest Date Value: 8/2/2002
  misc_feature: MA Experiment 20000495 PARAMETER Experiment Name: At_Guard_Cells_P Parameter: Organism Value: A. thaliana
  misc_feature: MA Experiment 20000495 PARAMETER Experiment Name: At_Guard_Cells_P Parameter: Tissue Value: Guard Cells vs. Leaves

SEQ ID NO: 50461 - protein, 550 aa, Arabidopsis thaliana; identical to SEQ ID NO: 48863
  peptide (1)..(550): Ceres Seq. ID no. 12601692
  misc_feature (1)..(57): Pfam Name: Lipoprotein amino terminal region Pfam Description: Lipoprotein amino terminal region
  misc_feature (1)..(57): Pfam Name: Lipoprotein amino terminal region Pfam Description: Lipoprotein amino terminal region
  misc_feature (96)..(262): Homolog of NCBI NO: 15224288 NR Description: hypothetical protein; protein id: At2g43490.1
  misc_feature (178)..(542): Homolog of NCBI NO: 37536102 NR Description: putative GTPase activating protein
  misc_feature (1)..(29): Homolog of NCBI NO: 15229125 NR Description: GTPase activating -like protein; protein id:
  misc_feature (85)..(541): Homolog of NCBI NO: 15238237 NR Description: GTPase activator protein of Rab-like small
  misc_feature (50)..(542): Homolog of NCBI NO: 15238518 NR Description: GTPase activator-like protein of Rab-like small
  misc_feature (96)..(262): Homolog of NCBI NO: 15224288 NR Description: hypothetical protein; protein id: At2g43490.1
  misc_feature (1)..(29): Homolog of NCBI NO: 15229125 NR Description: GTPase activating -like protein; protein id:
  misc_feature (50)..(542): Homolog of NCBI NO: 15238518 NR Description: GTPase activator-like protein of Rab-like small
  misc_feature (1)..(550): Homolog of NCBI NO: 15238777 NR Description: GTPase activator protein of Rab-like small
  misc_feature (34)..(550): Homolog of NCBI NO: 9759196 NR Description: GTPase activator protein of Rab-like small
  misc_feature (1)..(29): Homolog of NCBI NO: 9759196 NR Description: GTPase activator protein of Rab-like small
  misc_feature (176)..(542): Homolog of NCBI NO: 15229125 NR Description: GTPase activating -like protein; protein id:
  misc_feature (22)..(230): Homolog of NCBI NO: 15229125 NR Description: GTPase activating -like protein; protein id:
  misc_feature (85)..(541): Homolog of NCBI NO: 15238237 NR Description: GTPase activator protein of Rab-like small
  misc_feature (178)..(542): Homolog of NCBI NO: 37536102 NR Description: putative GTPase activating protein
  misc_feature (22)..(230): Homolog of NCBI NO: 15229125 NR Description: GTPase activating -like protein; protein id:
  misc_feature (176)..(542): Homolog of NCBI NO: 15229125 NR Description: GTPase activating -like protein; protein id:
  misc_feature (1)..(29): Homolog of NCBI NO: 9759196 NR Description: GTPase activator protein of Rab-like small
  misc_feature (34)..(550): Homolog of NCBI NO: 9759196 NR Description: GTPase activator protein of Rab-like small
  misc_feature (1)..(550): Homolog of NCBI NO: 15238777 NR Description: GTPase activator protein of Rab-like small

SEQ ID NO: 50462 - protein, 379 aa, Arabidopsis thaliana; identical to SEQ ID NO: 48864
  peptide (1)..(379): Ceres Seq. ID no. 12601693
  misc_feature (167)..(287): Homolog of NCBI NO: 23296366 NR Description: unknown protein [Arabidopsis thaliana]
  misc_feature (168)..(287): Homolog of NCBI NO: 15224288 NR Description: hypothetical protein; protein id: At2g43490.1
  misc_feature (1)..(91): Homolog of NCBI NO: 15224288 NR Description: hypothetical protein; protein id: At2g43490.1
  misc_feature (7)..(371): Homolog of NCBI NO: 37536102 NR Description: putative GTPase activating protein
  misc_feature (1)..(370): Homolog of NCBI NO: 15238237 NR Description: GTPase activator protein of Rab-like small
  misc_feature (1)..(371): Homolog of NCBI NO: 15238518 NR Description: GTPase activator-like protein of Rab-like small
  misc_feature (1)..(59): Homolog of NCBI NO: 15229125 NR Description: GTPase activating -like protein; protein id:
  misc_feature (5)..(371): Homolog of NCBI NO: 15229125 NR Description: GTPase activating -like protein; protein id:
  misc_feature (1)..(379): Homolog of NCBI NO: 9759196 NR Description: GTPase activator protein of Rab-like small
  misc_feature (1)..(379): Homolog of NCBI NO: 15238777 NR Description: GTPase activator protein of Rab-like small
  misc_feature (167)..(287): Homolog of NCBI NO: 23296366 NR Description: unknown protein [Arabidopsis thaliana]
  misc_feature (168)..(287): Homolog of NCBI NO: 15224288 NR Description: hypothetical protein; protein id: At2g43490.1
  misc_feature (1)..(91): Homolog of NCBI NO: 15224288 NR Description: hypothetical protein; protein id: At2g43490.1
  misc_feature (7)..(371): Homolog of NCBI NO: 37536102 NR Description: putative GTPase activating protein
  misc_feature (1)..(370): Homolog of NCBI NO: 15238237 NR Description: GTPase activator protein of Rab-like small
  misc_feature (1)..(371): Homolog of NCBI NO: 15238518 NR Description: GTPase activator-like protein of Rab-like small
  misc_feature (1)..(59): Homolog of NCBI NO: 15229125 NR Description: GTPase activating -like protein; protein id:
  misc_feature (5)..(371): Homolog of NCBI NO: 15229125 NR Description: GTPase activating -like protein; protein id:
  misc_feature (1)..(379): Homolog of NCBI NO: 9759196 NR Description: GTPase activator protein of Rab-like small
  misc_feature (1)..(379): Homolog of NCBI NO: 15238777 NR Description: GTPase activator protein of Rab-like small

SEQ ID NO: 50463 - protein, 342 aa, Arabidopsis thaliana; identical to SEQ ID NO: 48865
  peptide (1)..(342): Ceres Seq. ID no. 12601694
  misc_feature (130)..(250): Homolog of NCBI NO: 23296366 NR Description: unknown protein [Arabidopsis thaliana]
  misc_feature (131)..(250): Homolog of NCBI NO: 15224288 NR Description: hypothetical protein; protein id: At2g43490.1
  misc_feature (1)..(54): Homolog of NCBI NO: 15224288 NR Description: hypothetical protein; protein id: At2g43490.1
  misc_feature (1)..(334): Homolog of NCBI NO: 37536102 NR Description: putative GTPase activating protein
  misc_feature (1)..(333): Homolog of NCBI NO: 15238237 NR Description: GTPase activator protein of Rab-like small
  misc_feature (1)..(334): Homolog of NCBI NO: 15238518 NR Description: GTPase activator-like protein of Rab-like small
  misc_feature (1)..(22): Homolog of NCBI NO: 15229125 NR Description: GTPase activating -like protein; protein id:
  misc_feature (1)..(334): Homolog of NCBI NO: 15229125 NR Description: GTPase activating -like protein; protein id:
  misc_feature (1)..(342): Homolog of NCBI NO: 9759196 NR Description: GTPase activator protein of Rab-like small
  misc_feature (1)..(342): Homolog of NCBI NO: 15238777 NR Description: GTPase activator protein of Rab-like small
  misc_feature (130)..(250): Homolog of NCBI NO: 23296366 NR Description: unknown protein [Arabidopsis thaliana]
  misc_feature (131)..(250): Homolog of NCBI NO: 15224288 NR Description: hypothetical protein; protein id: At2g43490.1
  misc_feature (1)..(54): Homolog of NCBI NO: 15224288 NR Description: hypothetical protein; protein id: At2g43490.1
  misc_feature (1)..(334): Homolog of NCBI NO: 37536102 NR Description: putative GTPase activating protein
  misc_feature (1)..(333): Homolog of NCBI NO: 15238237 NR Description: GTPase activator protein of Rab-like small
  misc_feature (1)..(334): Homolog of NCBI NO: 15238518 NR Description: GTPase activator-like protein of Rab-like small
  misc_feature (1)..(22): Homolog of NCBI NO: 15229125 NR Description: GTPase activating -like protein; protein id:
  misc_feature (1)..(334): Homolog of NCBI NO: 15229125 NR Description: GTPase activating -like protein; protein id:
  misc_feature (1)..(342): Homolog of NCBI NO: 9759196 NR Description: GTPase activator protein of Rab-like small
  misc_feature (1)..(342): Homolog of NCBI NO: 15238777 NR Description: GTPase activator protein of Rab-like small

SEQ ID NO: 50464 - DNA, 1084 bp, Arabidopsis thaliana; identical to SEQ ID NO: 50083
  misc_feature (1)..(1084): Ceres Seq. ID no. 13592597
  misc_feature: MA Experiment ID: 20000184 Result: Down-regulated in Transcription
  misc_feature: MA Experiment 20000184 PARAMETER Experiment Name: At_Shoots__P Parameter: Age (day) Value: 7
  misc_feature: MA Experiment 20000184 PARAMETER Experiment Name: At_Shoots__P Parameter: Tissue Value: Shoots vs. Whole Plant

SEQ ID NO: 50465 - protein, 250 aa, Arabidopsis thaliana; identical to SEQ ID NO: 50084
  peptide (1)..(250): Ceres Seq. ID no. 13592598
  misc_feature (196)..(246): Pfam Name: PHD-finger Pfam Description: PHD-finger
  misc_feature (196)..(246): Pfam Name: PHD-finger Pfam Description: PHD-finger
  misc_feature (10)..(249): Homolog of NCBI NO: 21593407 NR Description: putative PHD-type zinc finger protein
  misc_feature (3)..(250): Homolog of NCBI NO: 11281498 NR Description: nucleic acid binding protein [imported] - rice
  misc_feature (10)..(249): Homolog of NCBI NO: 15226967 NR Description: PHD-type zinc finger protein -related
  misc_feature (10)..(250): Homolog of NCBI NO: 15223786 NR Description: nucleic acid binding protein (alfin-1) -related
  misc_feature (1)..(250): Homolog of NCBI NO: 7486722 NR Description: hypothetical protein F9D12.13 - Arabidopsis
  misc_feature (10)..(249): Homolog of NCBI NO: 21593407 NR Description: putative PHD-type zinc finger protein
  misc_feature (10)..(249): Homolog of NCBI NO: 15226967 NR Description: PHD-type zinc finger protein -related
  misc_feature (1)..(250): Homolog of NCBI NO: 7486722 NR Description: hypothetical protein F9D12.13 - Arabidopsis
  misc_feature (1)..(250): Homolog of NCBI NO: 15229157 NR Description: nucleic acid binding protein-related [Arabidopsis
  misc_feature (1)..(249): Homolog of NCBI NO: 30687843 NR Description: zinc finger protein - like [Arabidopsis thaliana]
  misc_feature (1)..(250): Homolog of NCBI NO: 15239624 NR Description: nucleic acid binding protein - like [Arabidopsis
  misc_feature (3)..(250): Homolog of NCBI NO: 4091080 NR Description: nucleic acid binding protein [Oryza sativa]
  misc_feature (3)..(250): Homolog of NCBI NO: 34907474 NR Description: nucleic acid binding protein
  misc_feature (10)..(250): Homolog of NCBI NO: 15223786 NR Description: nucleic acid binding protein (alfin-1) -related
  misc_feature (3)..(250): Homolog of NCBI NO: 11281498 NR Description: nucleic acid binding protein [imported] - rice
  misc_feature (3)..(250): Homolog of NCBI NO: 34907474 NR Description: nucleic acid binding protein
  misc_feature (3)..(250): Homolog of NCBI NO: 4091080 NR Description: nucleic acid binding protein [Oryza sativa]
  misc_feature (1)..(250): Homolog of NCBI NO: 15239624 NR Description: nucleic acid binding protein - like [Arabidopsis
  misc_feature (1)..(249): Homolog of NCBI NO: 30687843 NR Description: zinc finger protein - like [Arabidopsis thaliana]
  misc_feature (1)..(250): Homolog of NCBI NO: 15229157 NR Description: nucleic acid binding protein-related [Arabidopsis

SEQ ID NO: 50466 - DNA, 1701 bp, Arabidopsis thaliana; identical to SEQ ID NO: 47853
  misc_feature (1)..(1701): Ceres Seq. ID no. 12562851
  misc_feature: MA Experiment ID: 20000179 Result: Up-regulated in Transcription
  misc_feature: MA Experiment 20000179 PARAMETER Experiment Name: At_Germinating_Seeds_P Parameter: Age (hr) Value: 6 vs. 0
  misc_feature: MA Experiment 20000179 PARAMETER Experiment Name: At_Germinating_Seeds_P Parameter: Tissue Value: Germinating Seeds
  misc_feature: MA Experiment ID: 20000180 Result: Up-regulated in Transcription
  misc_feature: MA Experiment 20000180 PARAMETER Experiment Name: At_Germinating_Seeds_P Parameter: Age (hr) Value: 24 vs. 0
  misc_feature: MA Experiment 20000180 PARAMETER Experiment Name: At_Germinating_Seeds_P Parameter: Tissue Value: Germinating Seeds
  misc_feature: MA Experiment ID: 20000185 Result: Down-regulated in Transcription
  misc_feature: MA Experiment 20000185 PARAMETER Experiment Name: At_Roots__P Parameter: Age (day) Value: 7 vs. 21
  misc_feature: MA Experiment 20000185 PARAMETER Experiment Name: At_Roots__P Parameter: Organism Value: A. thaliana
  misc_feature: MA Experiment 20000185 PARAMETER Experiment Name: At_Roots__P Parameter: Tissue Value: Roots vs. Whole Plant
  misc_feature: MA Experiment ID: 20000438 Result: Up-regulated in Transcription
  misc_feature: MA Experiment 20000438 PARAMETER Experiment Name: At_Shoots__P Parameter: Age (day) Value: 14
  misc_feature: MA Experiment 20000438 PARAMETER Experiment Name: At_Shoots__P Parameter: Tissue Value: Shoots vs. Whole Plant
  misc_feature: MA Experiment ID: 20000439 Result: Down-regulated in Transcription
  misc_feature: MA Experiment 20000439 PARAMETER Experiment Name: At_Roots__P Parameter: Age (day) Value: 14 vs. 21
  misc_feature: MA Experiment 20000439 PARAMETER Experiment Name: At_Roots__P Parameter: Organism Value: A. thaliana
  misc_feature: MA Experiment 20000439 PARAMETER Experiment Name: At_Roots__P Parameter: Tissue Value: Roots vs. Whole Plant
  misc_feature: MA Experiment ID: 20001247 Result: Up-regulated in Transcription
  misc_feature: MA Experiment 20001247 PARAMETER Experiment Name: At_Far-red-induction_P Parameter: Age (day) Value: 7
  misc_feature: MA Experiment 20001247 PARAMETER Experiment Name: At_Far-red-induction_P Parameter: Light Value: Far-red vs. White
  misc_feature: MA Experiment 20001247 PARAMETER Experiment Name: At_Far-red-induction_P Parameter: Organism Value: A. thaliana
  misc_feature: MA Experiment 20001247 PARAMETER Experiment Name: At_Far-red-induction_P Parameter: Plant Line Value: Columbia
  misc_feature: MA Experiment 20001247 PARAMETER Experiment Name: At_Far-red-induction_P Parameter: Timepoint (hr) Value: 1
  misc_feature: MA Experiment 20001247 PARAMETER Experiment Name: At_Far-red-induction_P Parameter: Tissue Value: Whole Plant
  misc_feature: MA Experiment ID: 20001450 Result: Down-regulated in Transcription
  misc_feature: MA Experiment 20001450 PARAMETER Experiment Name: At_Far-red-induction_P Parameter: Age (day) Value: 7
  misc_feature: MA Experiment 20001450 PARAMETER Experiment Name: At_Far-red-induction_P Parameter: Light Value: Far-red vs. White
  misc_feature: MA Experiment 20001450 PARAMETER Experiment Name: At_Far-red-induction_P Parameter: Organism Value: A. thaliana
  misc_feature: MA Experiment 20001450 PARAMETER Experiment Name: At_Far-red-induction_P Parameter: Plant Line Value: Columbia
  misc_feature: MA Experiment 20001450 PARAMETER Experiment Name: At_Far-red-induction_P Parameter: Timepoint (hr) Value: 8
  misc_feature: MA Experiment 20001450 PARAMETER Experiment Name: At_Far-red-induction_P Parameter: Tissue Value: Whole Plant
  misc_feature: MA Experiment ID: 20001556 Result: Down-regulated in Transcription
  misc_feature: MA Experiment 20001556 PARAMETER Experiment Name: At_Drought_Soil_Dry_P Parameter: Age (day) Value: 26
  misc_feature: MA Experiment 20001556 PARAMETER Experiment Name: At_Drought_Soil_Dry_P Parameter: Organism Value: A. thaliana
  misc_feature: MA Experiment 20001556 PARAMETER Experiment Name: At_Drought_Soil_Dry_P Parameter: Plant Line Value: WS
  misc_feature: MA Experiment 20001556 PARAMETER Experiment Name: At_Drought_Soil_Dry_P Parameter: Post Timepoint (hr) Value: None
  misc_feature: MA Experiment 20001556 PARAMETER Experiment Name: At_Drought_Soil_Dry_P Parameter: Post-Treatment Value: None
  misc_feature: MA Experiment 20001556 PARAMETER Experiment Name: At_Drought_Soil_Dry_P Parameter: Timepoint (day) Value: 12
  misc_feature: MA Experiment 20001556 PARAMETER Experiment Name: At_Drought_Soil_Dry_P Parameter: Treatment Value: Drought vs. No Drought
  misc_feature: MA Experiment ID: 20001559 Result: Down-regulated in Transcription
  misc_feature: MA Experiment 20001559 PARAMETER Experiment Name: At_Drought_Soil_Dry_P Parameter: Age (day) Value: 28
  misc_feature: MA Experiment 20001559 PARAMETER Experiment Name: At_Drought_Soil_Dry_P Parameter: Organism Value: A. thaliana
  misc_feature: MA Experiment 20001559 PARAMETER Experiment Name: At_Drought_Soil_Dry_P Parameter: Plant Line Value: WS
  misc_feature: MA Experiment 20001559 PARAMETER Experiment Name: At_Drought_Soil_Dry_P Parameter: Post Timepoint (hr) Value: 29
  misc_feature: MA Experiment 20001559 PARAMETER Experiment Name: At_Drought_Soil_Dry_P Parameter: Post-Treatment Value: Re-Water vs. No Drought
  misc_feature: MA Experiment 20001559 PARAMETER Experiment Name: At_Drought_Soil_Dry_P Parameter: Timepoint (day) Value: 14
  misc_feature: MA Experiment 20001559 PARAMETER Experiment Name: At_Drought_Soil_Dry_P Parameter: Treatment Value: Drought vs. No Drought
  misc_feature: MA Experiment ID: 20001904 Result: Down-regulated in Transcription
  misc_feature: MA Experiment 20001904 PARAMETER Experiment Name: At_Drought_Reproduction_P Parameter: Age (day) Value: 37
  misc_feature: MA Experiment 20001904 PARAMETER Experiment Name: At_Drought_Reproduction_P Parameter: Organism Value: A. thaliana
  misc_feature: MA Experiment 20001904 PARAMETER Experiment Name: At_Drought_Reproduction_P Parameter: Plant Line Value: WS
  misc_feature: MA Experiment 20001904 PARAMETER Experiment Name: At_Drought_Reproduction_P Parameter: Timepoint (day) Value: 7
  misc_feature: MA Experiment 20001904 PARAMETER Experiment Name: At_Drought_Reproduction_P Parameter: Tissue Value: Rosettes
  misc_feature: MA Experiment 20001904 PARAMETER Experiment Name: At_Drought_Reproduction_P Parameter: Treatment Value: Drought vs. No Drought
  misc_feature: MA Experiment ID: 20001905 Result: Down-regulated in Transcription
  misc_feature: MA Experiment 20001905 PARAMETER Experiment Name: At_Drought_Reproduction_P Parameter: Age (day) Value: 40
  misc_feature: MA Experiment 20001905 PARAMETER Experiment Name: At_Drought_Reproduction_P Parameter: Organism Value: A. thaliana
  misc_feature: MA Experiment 20001905 PARAMETER Experiment Name: At_Drought_Reproduction_P Parameter: Plant Line Value: WS
  misc_feature: MA Experiment 20001905 PARAMETER Experiment Name: At_Drought_Reproduction_P Parameter: Timepoint (day) Value: 10
  misc_feature: MA Experiment 20001905 PARAMETER Experiment Name: At_Drought_Reproduction_P Parameter: Tissue Value: Rosettes
  misc_feature: MA Experiment 20001905 PARAMETER Experiment Name: At_Drought_Reproduction_P Parameter: Treatment Value: Drought vs. No Drought
  misc_feature: MA Experiment ID: 20001906 Result: Down-regulated in Transcription
  misc_feature: MA Experiment 20001906 PARAMETER Experiment Name: At_Drought_Reproduction_P Parameter: Age (day) Value: 35
  misc_feature: MA Experiment 20001906 PARAMETER Experiment Name: At_Drought_Reproduction_P Parameter: Organism Value: A. thaliana
  misc_feature: MA Experiment 20001906 PARAMETER Experiment Name: At_Drought_Reproduction_P Parameter: Plant Line Value: WS
  misc_feature: MA Experiment 20001906 PARAMETER Experiment Name: At_Drought_Reproduction_P Parameter: Timepoint (day) Value: 5
  misc_feature: MA Experiment 20001906 PARAMETER Experiment Name: At_Drought_Reproduction_P Parameter: Tissue Value: Siliques
  misc_feature: MA Experiment 20001906 PARAMETER Experiment Name: At_Drought_Reproduction_P Parameter: Treatment Value: Drought vs. No Drought

SEQ ID NO: 50467 - protein, 446 aa, Arabidopsis thaliana; identical to SEQ ID NO: 47854
  peptide (1)..(446): Ceres Seq. ID no. 12562852
  misc_feature (160)..(358): Pfam Name: ATPase family associated with various cellular Pfam Description: ATPase family associated with various cellular
  misc_feature (160)..(358): Pfam Name: ATPase family associated with various cellular Pfam Description: ATPase family associated with various cellular
  misc_feature (23)..(438): Homolog of NCBI NO: 32481061 NR Description: Rubisco activase alpha form precursor
  misc_feature (44)..(442): Homolog of NCBI NO: 12620883 NR Description: ribulose-1,5-bisphosphate carboxylase/oxygenase
  misc_feature (23)..(438): Homolog of NCBI NO: 8918359 NR Description: RuBisCO activase large isoform precursor
  misc_feature (1)..(437): Homolog of NCBI NO: 32481065 NR Description: Rubisco activase alpha form precursor [Larrea
  misc_feature (1)..(440): Homolog of NCBI NO: 30687999 NR Description: auxin-regulated protein [Arabidopsis thaliana]
  misc_feature (23)..(438): Homolog of NCBI NO: 32481061 NR Description: Rubisco activase alpha form precursor
  misc_feature (23)..(438): Homolog of NCBI NO: 8918359 NR Description: RuBisCO activase large isoform precursor
  misc_feature (1)..(440): Homolog of NCBI NO: 30687999 NR Description: auxin-regulated protein [Arabidopsis thaliana]
  misc_feature (1)..(438): Homolog of NCBI NO: 18405145 NR Description: auxin-regulated protein
  misc_feature (1)..(438): Homolog of NCBI NO: 15450379 NR Description: At2g39730/T5I7.3 [Arabidopsis thaliana]
  misc_feature (1)..(438): Homolog of NCBI NO: 23308421 NR Description: At2g39730/T5I7.3 [Arabidopsis thaliana]
  misc_feature (1)..(438): Homolog of NCBI NO: 81660 NR Description: ribulose-bisphosphate carboxylase activase (EC
  misc_feature (1)..(446): Homolog of NCBI NO: 30687995 NR Description: auxin-regulated protein [Arabidopsis thaliana]
  misc_feature (1)..(437): Homolog of NCBI NO: 32481065 NR Description: Rubisco activase alpha form precursor [Larrea
  misc_feature (44)..(442): Homolog of NCBI NO: 12620883 NR Description: ribulose-1,5-bisphosphate carboxylase/oxygenase
  misc_feature (1)..(446): Homolog of NCBI NO: 30687995 NR Description: auxin-regulated protein [Arabidopsis thaliana]
  misc_feature (1)..(438): Homolog of NCBI NO: 81660 NR Description: ribulose-bisphosphate carboxylase activase (EC
  misc_feature (1)..(438): Homolog of NCBI NO: 23308421 NR Description: At2g39730/T5I7.3 [Arabidopsis thaliana]
  misc_feature (1)..(438): Homolog of NCBI NO: 15450379 NR Description: At2g39730/T5I7.3 [Arabidopsis thaliana]
  misc_feature (1)..(438): Homolog of NCBI NO: 18405145 NR Description: auxin-regulated protein

SEQ ID NO: 50468 - protein, 356 aa, Arabidopsis thaliana; identical to SEQ ID NO: 47855
  peptide (1)..(356): Ceres Seq. ID no. 12562853
  misc_feature (70)..(268): Pfam Name: ATPase family associated with various cellular Pfam Description: ATPase family associated with various cellular
  misc_feature (70)..(268): Pfam Name: ATPase family associated with various cellular Pfam Description: ATPase family associated with various cellular
  misc_feature (1)..(348): Homolog of NCBI NO: 32481061 NR Description: Rubisco activase alpha form precursor
  misc_feature (1)..(352): Homolog of NCBI NO: 12620883 NR Description: ribulose-1,5-bisphosphate carboxylase/oxygenase
  misc_feature (1)..(348): Homolog of NCBI NO: 8918359 NR Description: RuBisCO activase large isoform precursor
  misc_feature (1)..(347): Homolog of NCBI NO: 32481065 NR Description: Rubisco activase alpha form precursor [Larrea
  misc_feature (1)..(350): Homolog of NCBI NO: 30687999 NR Description: auxin-regulated protein [Arabidopsis thaliana]
  misc_feature (1)..(348): Homolog of NCBI NO: 32481061 NR Description: Rubisco activase alpha form precursor
  misc_feature (1)..(348): Homolog of NCBI NO: 8918359 NR Description: RuBisCO activase large isoform precursor
  misc_feature (1)..(350): Homolog of NCBI NO: 30687999 NR Description: auxin-regulated protein [Arabidopsis thaliana]
  misc_feature (1)..(348): Homolog of NCBI NO: 18405145 NR Description: auxin-regulated protein
  misc_feature (1)..(348): Homolog of NCBI NO: 15450379 NR Description: At2g39730/T5I7.3 [Arabidopsis thaliana]
  misc_feature (1)..(348): Homolog of NCBI NO: 23308421 NR Description: At2g39730/T5I7.3 [Arabidopsis thaliana]
  misc_feature (1)..(348): Homolog of NCBI NO: 81660 NR Description: ribulose-bisphosphate carboxylase activase (EC
  misc_feature (1)..(356): Homolog of NCBI NO: 30687995 NR Description: auxin-regulated protein [Arabidopsis thaliana]
  misc_feature (1)..(347): Homolog of NCBI NO: 32481065 NR Description: Rubisco activase alpha form precursor [Larrea
  misc_feature (1)..(352): Homolog of NCBI NO: 12620883 NR Description: ribulose-1,5-bisphosphate carboxylase/oxygenase
  misc_feature (1)..(356): Homolog of NCBI NO: 30687995 NR Description: auxin-regulated protein [Arabidopsis thaliana]
  misc_feature (1)..(348): Homolog of NCBI NO: 81660 NR Description: ribulose-bisphosphate carboxylase activase (EC
  misc_feature (1)..(348): Homolog of NCBI NO: 23308421 NR Description: At2g39730/T5I7.3 [Arabidopsis thaliana]
  misc_feature (1)..(348): Homolog of NCBI NO: 15450379 NR Description: At2g39730/T5I7.3 [Arabidopsis thaliana]
  misc_feature (1)..(348): Homolog of NCBI NO: 18405145 NR Description: auxin-regulated protein

SEQ ID NO: 50469 - protein, 347 aa, Arabidopsis thaliana; identical to SEQ ID NO: 47856
  peptide (1)..(347): Ceres Seq. ID no. 12562854
  misc_feature (61)..(259): Pfam Name: ATPase family associated with various cellular Pfam Description: ATPase family associated with various cellular
  misc_feature (61)..(259): Pfam Name: ATPase family associated with various cellular Pfam Description: ATPase family associated with various cellular
  misc_feature (1)..(339): Homolog of NCBI NO: 32481061 NR Description: Rubisco activase alpha form precursor
  misc_feature (1)..(343): Homolog of NCBI NO: 12620883 NR Description: ribulose-1,5-bisphosphate carboxylase/oxygenase
  misc_feature (1)..(339): Homolog of NCBI NO: 8918359 NR Description: RuBisCO activase large isoform precursor
  misc_feature (1)..(338): Homolog of NCBI NO: 32481065 NR Description: Rubisco activase alpha form precursor [Larrea
  misc_feature (1)..(341): Homolog of NCBI NO: 30687999 NR Description: auxin-regulated protein [Arabidopsis thaliana]
  misc_feature (1)..(339): Homolog of NCBI NO: 32481061 NR Description: Rubisco activase alpha form precursor
  misc_feature (1)..(339): Homolog of NCBI NO: 8918359 NR Description: RuBisCO activase large isoform precursor
  misc_feature (1)..(341): Homolog of NCBI NO: 30687999 NR Description: auxin-regulated protein [Arabidopsis thaliana]
  misc_feature (1)..(339): Homolog of NCBI NO: 18405145 NR Description: auxin-regulated protein
  misc_feature (1)..(339): Homolog of NCBI NO: 15450379 NR Description: At2g39730/T5I7.3 [Arabidopsis thaliana]
  misc_feature (1)..(339): Homolog of NCBI NO: 23308421 NR Description: At2g39730/T5I7.3 [Arabidopsis thaliana]
  misc_feature (1)..(339): Homolog of NCBI NO: 81660 NR Description: ribulose-bisphosphate carboxylase activase (EC
  misc_feature (1)..(347): Homolog of NCBI NO: 30687995 NR Description: auxin-regulated protein [Arabidopsis thaliana]
  misc_feature (1)..(338): Homolog of NCBI NO: 32481065 NR Description: Rubisco activase alpha form precursor [Larrea
  misc_feature (1)..(343): Homolog of NCBI NO: 12620883 NR Description: ribulose-1,5-bisphosphate carboxylase/oxygenase
  misc_feature (1)..(347): Homolog of NCBI NO: 30687995 NR Description: auxin-regulated protein [Arabidopsis thaliana]
  misc_feature (1)..(339): Homolog of NCBI NO: 81660 NR Description: ribulose-bisphosphate carboxylase activase (EC
  misc_feature (1)..(339): Homolog of NCBI NO: 23308421 NR Description: At2g39730/T5I7.3 [Arabidopsis thaliana]
  misc_feature (1)..(339): Homolog of NCBI NO: 15450379 NR Description: At2g39730/T5I7.3 [Arabidopsis thaliana]
  misc_feature (1)..(339): Homolog of NCBI NO: 18405145 NR Description: auxin-regulated protein

SEQ ID NO: 50470 - DNA, 1651 bp, Arabidopsis thaliana
  misc_feature (1)..(1651): Ceres Seq. ID no. 12602386
  misc_feature: MA Experiment ID: 20000171 Result: Down-regulated in Transcription
  misc_feature: MA Experiment 20000171 PARAMETER Experiment Name: At_42deg_Heat_P Parameter: Age (day) Value: 14
  misc_feature: MA Experiment 20000171 PARAMETER Experiment Name: At_42deg_Heat_P Parameter: Organism Value: A. thaliana
  misc_feature: MA Experiment 20000171 PARAMETER Experiment Name: At_42deg_Heat_P Parameter: Plant Line Value: WS
  misc_feature: MA Experiment 20000171 PARAMETER Experiment Name: At_42deg_Heat_P Parameter: Temperature (deg C) Value: 42 vs. 22
  misc_feature: MA Experiment 20000171 PARAMETER Experiment Name: At_42deg_Heat_P Parameter: Timepoint (hr) Value: 1
  misc_feature: MA Experiment 20000171 PARAMETER Experiment Name: At_42deg_Heat_P Parameter: Tissue Value: Aerial
  misc_feature: MA Experiment ID: 20000234 Result: Up-regulated in Transcription
  misc_feature: MA Experiment 20000234 PARAMETER Experiment Name: At_Siliques_P Parameter: Age (day) Value: 21
  misc_feature: MA Experiment 20000234 PARAMETER Experiment Name: At_Siliques_P Parameter: Organism Value: A. thaliana
  misc_feature: MA Experiment 20000234 PARAMETER Experiment Name: At_Siliques_P Parameter: Plant Line Value: WS
  misc_feature: MA Experiment 20000234 PARAMETER Experiment Name: At_Siliques_P Parameter: Tissue Value: Less Than 5mm Siliques vs. Whole Plant
  misc_feature: MA Experiment ID: 20001451 Result: Down-regulated in Transcription
  misc_feature: MA Experiment 20001451 PARAMETER Experiment Name: At_Far-red-induction_P Parameter: Age (day) Value: 7
  misc_feature: MA Experiment 20001451 PARAMETER Experiment Name: At_Far-red-induction_P Parameter: Light Value: Far-red vs. White
  misc_feature: MA Experiment 20001451 PARAMETER Experiment Name: At_Far-red-induction_P Parameter: Organism Value: A. thaliana
  misc_feature: MA Experiment 20001451 PARAMETER Experiment Name: At_Far-red-induction_P Parameter: Plant Line Value: Columbia
  misc_feature: MA Experiment 20001451 PARAMETER Experiment Name: At_Far-red-induction_P Parameter: Timepoint (hr) Value: 24
  misc_feature: MA Experiment 20001451 PARAMETER Experiment Name: At_Far-red-induction_P Parameter: Tissue Value: Whole Plant
taatattaacaaataaataaaagataaaaaaatcttcgagggaacattcagaaaccctaacttcaacgggaactcaaaaatcagaatctccagatcgagagcttaaaaagtcgatttcaattcccctttaagattttttgcttttggaatgtagtgtgaagaagaaaccctagttttttctcacttgaattctctgccttctttagtaatgtcaagtgagcagcgagaaggttcgcaagagacgacgacgacgacggtggaaggtaacggaacaattgcaggtcagaattctcattcggcggctcccacgacattgagagctacctctacgatggtttcttgccagagactaaggctaaaccctaacaacgagcatagacccgatagttatgaagatctgcagcttgatttcccaaactcggtatattctagtctggagaagtacttgcctccgaatatgctcgtctcgaatcgtgatgagaaaatcaaattcatgactgatattatgcttaggcatcttcctcatggagagcgttccagagctcaaaggcacagtgactataggctgaagattacaacaaattatcagccacttcacaaggagttgtatactctagttcccacagtatgtttcgttcctgctttccttaaggcgataaatgaaaacacagaggaaagcttcagaaatataatatctgaaccgtctcctggtgttttcgtctttgacatgctccagcctagcttttgtgagatgatgctagccgagatagacaattttgaaaggtgggtgggtgagaccaaattccggataatgagaccaaacaccatgaataaatacggtgctgtgcttgacgactttggtctagacaccatgcttgacaaactcatggaggggtttatacgtcccatctctaaagtattcttcagtgatgtgggtggagcaactctggactctcaccatggttttgttgttgaatatgggaaagatagggatgttgatttaggctttcatgtggatgattcagaagtaacgctgaatgtttgtttgggtaatcaatttgtgggaggggagctatttttcagaggcacacggtgtgaaaaacatgtgaacacagcaacaaaggcagatgaaacatatgattattgtcatatacctggacaagctgtgcttcaccgtggccgccaccgccatggtgccagagccacaacatgcgggcatcgggtcaatatgcttctatggtgcagaagttctgtatttagagagctcaaaactcatcacaaggatttctccagctggtgtggagagtgcttttgtgaaaagagagatgagaaagtgcggtcgattgatgctctaagaaagaaattgtttaaaccacgtcaaacccaagcttgatggaacactagcaagatgagcaattgatgaaacattagtaagataagcaataacatatattggatgacattaaaacttgagatcaagccctgaagaattgctcctgttttaagctgacttaaaactgagcctatgtagaaatcatttgagttatatgggtctctgtttatcgtttctcagactctttgataaaatatgtacatgaaagaatctagtctcaacttcacttgtgtactacaaggagtcatattgttgtcc

SEQ ID NO: 50471 - protein, 394 aa, Arabidopsis thaliana
  peptide (1)..(394): Ceres Seq. ID no. 12602387
  misc_feature (248)..(347): Pfam Name: 2OG-Fe(II) oxygenase superfamily Pfam Description: 2OG-Fe(II) oxygenase superfamily
  misc_feature (156)..(388): Homolog of NCBI NO: 15221938 NR Description: unknown protein; protein id: At1g48700.1
  misc_feature (47)..(259): Homolog of NCBI NO: 34906198 NR Description: OJ1174_D05.17 [Oryza sativa (japonica
  misc_feature (47)..(384): Homolog of NCBI NO: 15239932 NR Description: putative protein; protein id: At5g43660.1
  misc_feature (17)..(388): Homolog of NCBI NO: 15221946 NR Description: unknown protein; protein id: At1g48740.1
  misc_feature (228)..(386): Homolog of NCBI NO: 25518648 NR Description: hypothetical protein F19G10.9 [imported] -
  misc_feature (47)..(238): Homolog of NCBI NO: 25518648 NR Description: hypothetical protein F19G10.9 [imported] -
  misc_feature (228)..(386): Homolog of NCBI NO: 15219973 NR Description: unknown protein; protein id: At1g22950.1
  misc_feature (47)..(238): Homolog of NCBI NO: 15219973 NR Description: unknown protein; protein id: At1g22950.1
  misc_feature (46)..(383): Homolog of NCBI NO: 34914494 NR Description: B1080D07.28 [Oryza sativa (japonica
  misc_feature (1)..(394): Homolog of NCBI NO: 18401806 NR Description: expressed protein
MSSEQREGSQETTTTTVEGNGTIAGQNSHSAAPTTLRATSTMVSCQRLRLNPNNEHRPDSYEDLQLDFPNSVYSSLEKYLPPNMLVSNRDEKIKFMTDIMLRHLPHGERSRAQRHSDYRLKITTNYQPLHKELYTLVPTVCFVPAFLKAINENTEESFRNIISEPSPGVFVFDMLQPSFCEMMLAEIDNFERWVGETKFRIMRPNTMNKYGAVLDDFGLDTMLDKLMEGFIRPISKVFFSDVGGATLDSHHGFVVEYGKDRDVDLGFHVDDSEVTLNVCLGNQFVGGELFFRGTRCEKHVNTATKADETYDYCHIPGQAVLHRGRHRHGARATTCGHRVNMLLWCRSSVFRELKTHHKDFSSWCGECFCEKRDEKVRSIDALRKKLFKPRQTQA

SEQ ID NO: 50472 - protein, 353 aa, Arabidopsis thaliana
  peptide (1)..(353): Ceres Seq. ID no. 12602388
  misc_feature (207)..(306): Pfam Name: 2OG-Fe(II) oxygenase superfamily Pfam Description: 2OG-Fe(II) oxygenase superfamily
  misc_feature (115)..(347): Homolog of NCBI NO: 15221938 NR Description: unknown protein; protein id: At1g48700.1
  misc_feature (6)..(218): Homolog of NCBI NO: 34906198 NR Description: OJ1174_D05.17 [Oryza sativa (japonica
  misc_feature (6)..(343): Homolog of NCBI NO: 15239932 NR Description: putative protein; protein id: At5g43660.1
  misc_feature (1)..(347): Homolog of NCBI NO: 15221946 NR Description: unknown protein; protein id: At1g48740.1
  misc_feature (187)..(345): Homolog of NCBI NO: 25518648 NR Description: hypothetical protein F19G10.9 [imported] -
  misc_feature (6)..(197): Homolog of NCBI NO: 25518648 NR Description: hypothetical protein F19G10.9 [imported] -
  misc_feature (187)..(345): Homolog of NCBI NO: 15219973 NR Description: unknown protein; protein id: At1g22950.1
  misc_feature (6)..(197): Homolog of NCBI NO: 15219973 NR Description: unknown protein; protein id: At1g22950.1
  misc_feature (5)..(342): Homolog of NCBI NO: 34914494 NR Description: B1080D07.28 [Oryza sativa (japonica
  misc_feature (1)..(353): Homolog of NCBI NO: 18401806 NR Description: expressed protein
MVSCQRLRLNPNNEHRPDSYEDLQLDFPNSVYSSLEKYLPPNMLVSNRDEKIKFMTDIMLRHLPHGERSRAQRHSDYRLKITTNYQPLHKELYTLVPTVCFVPAFLKAINENTEESFRNIISEPSPGVFVFDMLQPSFCEMMLAEIDNFERWVGETKFRIMRPNTMNKYGAVLDDFGLDTMLDKLMEGFIRPISKVFFSDVGGATLDSHHGFVVEYGKDRDVDLGFHVDDSEVTLNVCLGNQFVGGELFFRGTRCEKHVNTATKADETYDYCHIPGQAVLHRGRHRHGARATTCGHRVNMLLWCRSSVFRELKTHHKDFSSWCGECFCEKRDEKVRSIDALRKKLFKPRQTQA

SEQ ID NO: 50473 - protein, 311 aa, Arabidopsis thaliana
  peptide (1)..(311): Ceres Seq. ID no. 12602389
  misc_feature (165)..(264): Pfam Name: 2OG-Fe(II) oxygenase superfamily Pfam Description: 2OG-Fe(II) oxygenase superfamily
  misc_feature (73)..(305): Homolog of NCBI NO: 15221938 NR Description: unknown protein; protein id: At1g48700.1
  misc_feature (1)..(176): Homolog of NCBI NO: 34906198 NR Description: OJ1174_D05.17 [Oryza sativa (japonica
  misc_feature (1)..(301): Homolog of NCBI NO: 15239932 NR Description: putative protein; protein id: At5g43660.1
  misc_feature (1)..(305): Homolog of NCBI NO: 15221946 NR Description: unknown protein; protein id: At1g48740.1
  misc_feature (145)..(303): Homolog of NCBI NO: 25518648 NR Description: hypothetical protein F19G10.9 [imported] -
  misc_feature (1)..(155): Homolog of NCBI NO: 25518648 NR Description: hypothetical protein F19G10.9 [imported] -
  misc_feature (145)..(303): Homolog of NCBI NO: 15219973 NR Description: unknown protein; protein id: At1g22950.1
  misc_feature (1)..(155): Homolog of NCBI NO: 15219973 NR Description: unknown protein; protein id: At1g22950.1
  misc_feature (1)..(300): Homolog of NCBI NO: 34914494 NR Description: B1080D07.28 [Oryza sativa (japonica
  misc_feature (1)..(311): Homolog of NCBI NO: 18401806 NR Description: expressed protein
MLVSNRDEKIKFMTDIMLRHLPHGERSRAQRHSDYRLKITTNYQPLHKELYTLVPTVCFVPAFLKAINENTEESFRNIISEPSPGVFVFDMLQPSFCEMMLAEIDNFERWVGETKFRIMRPNTMNKYGAVLDDFGLDTMLDKLMEGFIRPISKVFFSDVGGATLDSHHGFVVEYGKDRDVDLGFHVDDSEVTLNVCLGNQFVGGELFFRGTRCEKHVNTATKADETYDYCHIPGQAVLHRGRHRHGARATTCGHRVNMLLWCRSSVFRELKTHHKDFSSWCGECFCEKRDEKVRSIDALRKKLFKPRQTQA

SEQ ID NO: 50474 - DNA, 1795 bp, Arabidopsis thaliana; identical to SEQ ID NO: 49580
  misc_feature (1)..(1795): Ceres Seq. ID no. 12606328
  misc_feature: MA Experiment ID: 20000444 Result: Up-regulated in Transcription
  misc_feature: MA Experiment 20000444 PARAMETER Experiment Name: At_100uM_NAA__P Parameter: Age (day) Value: 14
  misc_feature: MA Experiment 20000444 PARAMETER Experiment Name: At_100uM_NAA__P Parameter: Organism Value: A. thaliana
  misc_feature: MA Experiment 20000444 PARAMETER Experiment Name: At_100uM_NAA__P Parameter: Plant Line Value: WS
  misc_feature: MA Experiment 20000444 PARAMETER Experiment Name: At_100uM_NAA__P Parameter: Timepoint (hr) Value: 1
  misc_feature: MA Experiment 20000444 PARAMETER Experiment Name: At_100uM_NAA__P Parameter: Tissue Value: Aerial
  misc_feature: MA Experiment 20000444 PARAMETER Experiment Name: At_100uM_NAA__P Parameter: Treatment Value: 100uM NAA vs. No Treatment
  misc_feature: MA Experiment ID: 20000495 Result: Up-regulated in Transcription
  misc_feature: MA Experiment 20000495 PARAMETER Experiment Name: At_Guard_Cells_P Parameter: Harvest Date Value: 8/2/2002
  misc_feature: MA Experiment 20000495 PARAMETER Experiment Name: At_Guard_Cells_P Parameter: Organism Value: A. thaliana
  misc_feature: MA Experiment 20000495 PARAMETER Experiment Name: At_Guard_Cells_P Parameter: Tissue Value: Guard Cells vs. Leaves
  misc_feature: MA Experiment ID: 20001911 Result: Down-regulated in Transcription
  misc_feature: MA Experiment 20001911 PARAMETER Experiment Name: At_Drought_Reproduction_P Parameter: Age (day) Value: 40
  misc_feature: MA Experiment 20001911 PARAMETER Experiment Name: At_Drought_Reproduction_P Parameter: Organism Value: A. thaliana
  misc_feature: MA Experiment 20001911 PARAMETER Experiment Name: At_Drought_Reproduction_P Parameter: Plant Line Value: WS
  misc_feature: MA Experiment 20001911 PARAMETER Experiment Name: At_Drought_Reproduction_P Parameter: Timepoint (day) Value: 10
  misc_feature: MA Experiment 20001911 PARAMETER Experiment Name: At_Drought_Reproduction_P Parameter: Tissue Value: Flowers
  misc_feature: MA Experiment 20001911 PARAMETER Experiment Name: At_Drought_Reproduction_P Parameter: Treatment Value: Drought vs. No Drought

SEQ ID NO: 50475 - protein, 517 aa, Arabidopsis thaliana; identical to SEQ ID NO: 49581
  peptide (1)..(517): Ceres Seq. ID no. 12606329
  misc_feature (39)..(505): Homolog of NCBI NO: 6650716 NR Description: AUX1-like protein [Populus tremula x Populus
  misc_feature (39)..(513): Homolog of NCBI NO: 10800920 NR Description: putative AUX1-like permease [Medicago truncatula]
  misc_feature (46)..(513): Homolog of NCBI NO: 37651177 NR Description: AUX1-like auxin influx carrier protein [Pisum
  misc_feature (52)..(509): Homolog of NCBI NO: 6689614 NR Description: AUX1 protein [Zea mays]
  misc_feature (48)..(517): Homolog of NCBI NO: 37531048 NR Description: putative AUX1-like permease
  misc_feature (39)..(497): Homolog of NCBI NO: 10800922 NR Description: putative AUX1-like permease [Medicago truncatula]
  misc_feature (43)..(497): Homolog of NCBI NO: 15217443 NR Description: putative AUX1-like permease
  misc_feature (39)..(515): Homolog of NCBI NO: 14279184 NR Description: putative AUX1-like permease
  misc_feature (34)..(513): Homolog of NCBI NO: 21586474 NR Description: auxin influx carrier protein [Medicago truncatula]
  misc_feature (35)..(517): Homolog of NCBI NO: 15226450 NR Description: AUX1-like amino acid permease
  misc_feature (39)..(505): Homolog of NCBI NO: 6650716 NR Description: AUX1-like protein [Populus tremula x Populus
  misc_feature (39)..(513): Homolog of NCBI NO: 10800920 NR Description: putative AUX1-like permease [Medicago truncatula]
  misc_feature (46)..(513): Homolog of NCBI NO: 37651177 NR Description: AUX1-like auxin influx carrier protein [Pisum
  misc_feature (52)..(509): Homolog of NCBI NO: 6689614 NR Description: AUX1 protein [Zea mays]
  misc_feature (48)..(517): Homolog of NCBI NO: 37531048 NR Description: putative AUX1-like permease
  misc_feature (39)..(497): Homolog of NCBI NO: 10800922 NR Description: putative AUX1-like permease [Medicago truncatula]
  misc_feature (43)..(497): Homolog of NCBI NO: 15217443 NR Description: putative AUX1-like permease
  misc_feature (39)..(515): Homolog of NCBI NO: 14279184 NR Description: putative AUX1-like permease
  misc_feature (34)..(513): Homolog of NCBI NO: 21586474 NR Description: auxin influx carrier protein [Medicago truncatula]
  misc_feature (35)..(517): Homolog of NCBI NO: 15226450 NR Description: AUX1-like amino acid permease

SEQ ID NO: 50476 - protein, 483 aa, Arabidopsis thaliana; identical to SEQ ID NO: 49582
  peptide (1)..(483): Ceres Seq. ID no. 12606330
  misc_feature (5)..(471): Homolog of NCBI NO: 6650716 NR Description: AUX1-like protein [Populus tremula x Populus
  misc_feature (5)..(479): Homolog of NCBI NO: 10800920 NR Description: putative AUX1-like permease [Medicago truncatula]
  misc_feature (12)..(479): Homolog of NCBI NO: 37651177 NR Description: AUX1-like auxin influx carrier protein [Pisum
  misc_feature (18)..(475): Homolog of NCBI NO: 6689614 NR Description: AUX1 protein [Zea mays]
  misc_feature (14)..(483): Homolog of NCBI NO: 37531048 NR Description: putative AUX1-like permease
  misc_feature (5)..(463): Homolog of NCBI NO: 10800922 NR Description: putative AUX1-like permease [Medicago truncatula]
  misc_feature (9)..(463): Homolog of NCBI NO: 15217443 NR Description: putative AUX1-like permease
  misc_feature (5)..(481): Homolog of NCBI NO: 14279184 NR Description: putative AUX1-like permease
  misc_feature (1)..(479): Homolog of NCBI NO: 21586474 NR Description: auxin influx carrier protein [Medicago truncatula]
  misc_feature (1)..(483): Homolog of NCBI NO: 15226450 NR Description: AUX1-like amino acid permease
  misc_feature (5)..(471): Homolog of NCBI NO: 6650716 NR Description: AUX1-like protein [Populus tremula x Populus
  misc_feature (5)..(479): Homolog of NCBI NO: 10800920 NR Description: putative AUX1-like permease [Medicago truncatula]
  misc_feature (12)..(479): Homolog of NCBI NO: 37651177 NR Description: AUX1-like auxin influx carrier protein [Pisum
  misc_feature (18)..(475): Homolog of NCBI NO: 6689614 NR Description: AUX1 protein [Zea mays]
  misc_feature (14)..(483): Homolog of NCBI NO: 37531048 NR Description: putative AUX1-like permease
  misc_feature (5)..(463): Homolog of NCBI NO: 10800922 NR Description: putative AUX1-like permease [Medicago truncatula]
  misc_feature (9)..(463): Homolog of NCBI NO: 15217443 NR Description: putative AUX1-like permease
  misc_feature (5)..(481): Homolog of NCBI NO: 14279184 NR Description: putative AUX1-like permease
  misc_feature (1)..(479): Homolog of NCBI NO: 21586474 NR Description: auxin influx carrier protein [Medicago truncatula]
  misc_feature (1)..(483): Homolog of NCBI NO: 15226450 NR Description: AUX1-like amino acid permease

SEQ ID NO: 50477 - protein, 465 aa, Arabidopsis thaliana; identical to SEQ ID NO: 49583
  peptide (1)..(465): Ceres Seq. ID no. 12606331
  misc_feature (1)..(453): Homolog of NCBI NO: 6650716 NR Description: AUX1-like protein [Populus tremula x Populus
  misc_feature (1)..(461): Homolog of NCBI NO: 10800920 NR Description: putative AUX1-like permease [Medicago truncatula]
  misc_feature (1)..(461): Homolog of NCBI NO: 37651177 NR Description: AUX1-like auxin influx carrier protein [Pisum
  misc_feature (1)..(457): Homolog of NCBI NO: 6689614 NR Description: AUX1 protein [Zea mays]
  misc_feature (1)..(465): Homolog of NCBI NO: 37531048 NR Description: putative AUX1-like permease
  misc_feature (1)..(445): Homolog of NCBI NO: 10800922 NR Description: putative AUX1-like permease [Medicago truncatula]
  misc_feature (1)..(445): Homolog of NCBI NO: 15217443 NR Description: putative AUX1-like permease
  misc_feature (1)..(463): Homolog of NCBI NO: 14279184 NR Description: putative AUX1-like permease
  misc_feature (1)..(461): Homolog of NCBI NO: 21586474 NR Description: auxin influx carrier protein [Medicago truncatula]
  misc_feature (1)..(465): Homolog of NCBI NO: 15226450 NR Description: AUX1-like amino acid permease
  misc_feature (1)..(453): Homolog of NCBI NO: 6650716 NR Description: AUX1-like protein [Populus tremula x Populus
  misc_feature (1)..(461): Homolog of NCBI NO: 10800920 NR Description: putative AUX1-like permease [Medicago truncatula]
  misc_feature (1)..(461): Homolog of NCBI NO: 37651177 NR Description: AUX1-like auxin influx carrier protein [Pisum
  misc_feature (1)..(457): Homolog of NCBI NO: 6689614 NR Description: AUX1 protein [Zea mays]
  misc_feature (1)..(465): Homolog of NCBI NO: 37531048 NR Description: putative AUX1-like permease
  misc_feature (1)..(445): Homolog of NCBI NO: 10800922 NR Description: putative AUX1-like permease [Medicago truncatula]
  misc_feature (1)..(445): Homolog of NCBI NO: 15217443 NR Description: putative AUX1-like permease
  misc_feature (1)..(463): Homolog of NCBI NO: 14279184 NR Description: putative AUX1-like permease
  misc_feature (1)..(461): Homolog of NCBI NO: 21586474 NR Description: auxin influx carrier protein [Medicago truncatula]
  misc_feature (1)..(465): Homolog of NCBI NO: 15226450 NR Description: AUX1-like amino acid permease

SEQ ID NO: 50478 - DNA, 1867 bp, Arabidopsis thaliana
  misc_feature (1)..(1867): Ceres Seq. ID no. 13593702
  misc_feature: MA Experiment ID: 20000166 Result: Down-regulated in Transcription
  misc_feature: MA Experiment 20000166 PARAMETER Experiment Name: At_100uM_ABA_P Parameter: Age (day) Value: 14
  misc_feature: MA Experiment 20000166 PARAMETER Experiment Name: At_100uM_ABA_P Parameter: Organism Value: A. thaliana
  misc_feature: MA Experiment 20000166 PARAMETER Experiment Name: At_100uM_ABA_P Parameter: Plant Line Value: WS
  misc_feature: MA Experiment 20000166 PARAMETER Experiment Name: At_100uM_ABA_P Parameter: Timepoint (hr) Value: 1
  misc_feature: MA Experiment 20000166 PARAMETER Experiment Name: At_100uM_ABA_P Parameter: Tissue Value: Aerial
  misc_feature: MA Experiment 20000166 PARAMETER Experiment Name: At_100uM_ABA_P Parameter: Treatment Value: 100uM ABA vs. No Treatment
  misc_feature: MA Experiment ID: 20000171 Result: Down-regulated in Transcription
  misc_feature: MA Experiment 20000171 PARAMETER Experiment Name: At_42deg_Heat_P Parameter: Age (day) Value: 14
  misc_feature: MA Experiment 20000171 PARAMETER Experiment Name: At_42deg_Heat_P Parameter: Organism Value: A. thaliana
  misc_feature: MA Experiment 20000171 PARAMETER Experiment Name: At_42deg_Heat_P Parameter: Plant Line Value: WS
  misc_feature: MA Experiment 20000171 PARAMETER Experiment Name: At_42deg_Heat_P Parameter: Temperature (deg C) Value: 42 vs. 22
  misc_feature: MA Experiment 20000171 PARAMETER Experiment Name: At_42deg_Heat_P Parameter: Timepoint (hr) Value: 1
  misc_feature: MA Experiment 20000171 PARAMETER Experiment Name: At_42deg_Heat_P Parameter: Tissue Value: Aerial
  misc_feature: MA Experiment ID: 20000173 Result: Down-regulated in Transcription
  misc_feature: MA Experiment 20000173 PARAMETER Experiment Name: At_42deg_Heat_P Parameter: Age (day) Value: 14
  misc_feature: MA Experiment 20000173 PARAMETER Experiment Name: At_42deg_Heat_P Parameter: Organism Value: A. thaliana
  misc_feature: MA Experiment 20000173 PARAMETER Experiment Name: At_42deg_Heat_P Parameter: Plant Line Value: WS
  misc_feature: MA Experiment 20000173 PARAMETER Experiment Name: At_42deg_Heat_P Parameter: Temperature (deg C) Value: 42 vs. 22
  misc_feature: MA Experiment 20000173 PARAMETER Experiment Name: At_42deg_Heat_P Parameter: Timepoint (hr) Value: 6
  misc_feature: MA Experiment 20000173 PARAMETER Experiment Name: At_42deg_Heat_P Parameter: Tissue Value: Aerial
  misc_feature: MA Experiment ID: 20000180 Result: Down-regulated in Transcription
  misc_feature: MA Experiment 20000180 PARAMETER Experiment Name: At_Germinating_Seeds_P Parameter: Age (hr) Value: 24 vs. 0
  misc_feature: MA Experiment 20000180 PARAMETER Experiment Name: At_Germinating_Seeds_P Parameter: Tissue Value: Germinating Seeds
  misc_feature: MA Experiment ID: 20000227 Result: Down-regulated in Transcription
  misc_feature: MA Experiment 20000227 PARAMETER Experiment Name: At_Root-Tips-vs-Tops_P Parameter: Tissue Value: Root Tips vs. Root Tops
  misc_feature: MA Experiment ID: 20000234 Result: Down-regulated in Transcription
  misc_feature: MA Experiment 20000234 PARAMETER Experiment Name: At_Siliques_P Parameter: Age (day) Value: 21
  misc_feature: MA Experiment 20000234 PARAMETER Experiment Name: At_Siliques_P Parameter: Organism Value: A. thaliana
  misc_feature: MA Experiment 20000234 PARAMETER Experiment Name: At_Siliques_P Parameter: Plant Line Value: WS
  misc_feature: MA Experiment 20000234 PARAMETER Experiment Name: At_Siliques_P Parameter: Tissue Value: Less Than 5mm Siliques vs. Whole Plant
  misc_feature: MA Experiment ID: 20000235 Result: Down-regulated in Transcription
  misc_feature: MA Experiment 20000235 PARAMETER Experiment Name: At_Siliques_P Parameter: Age (day) Value: 21
  misc_feature: MA Experiment 20000235 PARAMETER Experiment Name: At_Siliques_P Parameter: Organism Value: A. thaliana
  misc_feature: MA Experiment 20000235 PARAMETER Experiment Name: At_Siliques_P Parameter: Plant Line Value: WS
  misc_feature: MA Experiment 20000235 PARAMETER Experiment Name: At_Siliques_P Parameter: Tissue Value: 5-10mm Siliques vs. Whole Plant
  misc_feature: MA Experiment ID: 20000264 Result: Down-regulated in Transcription
  misc_feature: MA Experiment 20000264 PARAMETER Experiment Name: At_Open_Flower_P Parameter: Age (day) Value: 21
  misc_feature: MA Experiment 20000264 PARAMETER Experiment Name: At_Open_Flower_P Parameter: Plant Line Value: WS
  misc_feature: MA Experiment 20000264 PARAMETER Experiment Name: At_Open_Flower_P Parameter: Tissue Value: Open Flower vs. Whole Plant
  misc_feature: MA Experiment ID: 20000265 Result: Down-regulated in Transcription
  misc_feature: MA Experiment 20000265 PARAMETER Experiment Name: At_Open_Flower_P Parameter: Age (day) Value: 21
  misc_feature: MA Experiment 20000265 PARAMETER Experiment Name: At_Open_Flower_P Parameter: Plant Line Value: WS
  misc_feature: MA Experiment 20000265 PARAMETER Experiment Name: At_Open_Flower_P Parameter: Tissue Value: Closed Flower vs. Whole Plant
  misc_feature: MA Experiment ID: 20000286 Result: Down-regulated in Transcription
  misc_feature: MA Experiment 20000286 PARAMETER Experiment Name: At_Open_Flower_P Parameter: Age (day) Value: 21
  misc_feature: MA Experiment 20000286 PARAMETER Experiment Name: At_Open_Flower_P Parameter: Plant Line Value: WS
  misc_feature: MA Experiment 20000286 PARAMETER Experiment Name: At_Open_Flower_P Parameter: Tissue Value: Half Open vs. Whole Plant
  misc_feature: MA Experiment ID: 20000495 Result: Down-regulated in Transcription
  misc_feature: MA Experiment 20000495 PARAMETER Experiment Name: At_Guard_Cells_P Parameter: Harvest Date Value: 8/2/2002
  misc_feature: MA Experiment 20000495 PARAMETER Experiment Name: At_Guard_Cells_P Parameter: Organism Value: A. thaliana
  misc_feature: MA Experiment 20000495 PARAMETER Experiment Name: At_Guard_Cells_P Parameter: Tissue Value: Guard Cells vs. Leaves
  misc_feature: MA Experiment ID: 20001248 Result: Down-regulated in Transcription
  misc_feature: MA Experiment 20001248 PARAMETER Experiment Name: At_Far-red-induction_P Parameter: Age (day) Value: 7
  misc_feature: MA Experiment 20001248 PARAMETER Experiment Name: At_Far-red-induction_P Parameter: Light Value: Far-red vs. White
  misc_feature: MA Experiment 20001248 PARAMETER Experiment Name: At_Far-red-induction_P Parameter: Organism Value: A. thaliana
  misc_feature: MA Experiment 20001248 PARAMETER Experiment Name: At_Far-red-induction_P Parameter: Plant Line Value: Columbia
  misc_feature: MA Experiment 20001248 PARAMETER Experiment Name: At_Far-red-induction_P Parameter: Timepoint (hr) Value: 4
  misc_feature: MA Experiment 20001248 PARAMETER Experiment Name: At_Far-red-induction_P Parameter: Tissue Value: Whole Plant
  misc_feature: MA Experiment ID: 20001450 Result: Down-regulated in Transcription
  misc_feature: MA Experiment 20001450 PARAMETER Experiment Name: At_Far-red-induction_P Parameter: Age (day) Value: 7
  misc_feature: MA Experiment 20001450 PARAMETER Experiment Name: At_Far-red-induction_P Parameter: Light Value: Far-red vs. White
  misc_feature: MA Experiment 20001450 PARAMETER Experiment Name: At_Far-red-induction_P Parameter: Organism Value: A. thaliana
  misc_feature: MA Experiment 20001450 PARAMETER Experiment Name: At_Far-red-induction_P Parameter: Plant Line Value: Columbia
  misc_feature: MA Experiment 20001450 PARAMETER Experiment Name: At_Far-red-induction_P Parameter: Timepoint (hr) Value: 8
  misc_feature: MA Experiment 20001450 PARAMETER Experiment Name: At_Far-red-induction_P Parameter: Tissue Value: Whole Plant
  misc_feature: MA Experiment ID: 20001451 Result: Down-regulated in Transcription
  misc_feature: MA Experiment 20001451 PARAMETER Experiment Name: At_Far-red-induction_P Parameter: Age (day) Value: 7
  misc_feature: MA Experiment 20001451 PARAMETER Experiment Name: At_Far-red-induction_P Parameter: Light Value: Far-red vs. White
  misc_feature: MA Experiment 20001451 PARAMETER Experiment Name: At_Far-red-induction_P Parameter: Organism Value: A. thaliana
  misc_feature: MA Experiment 20001451 PARAMETER Experiment Name: At_Far-red-induction_P Parameter: Plant Line Value: Columbia
  misc_feature: MA Experiment 20001451 PARAMETER Experiment Name: At_Far-red-induction_P Parameter: Timepoint (hr) Value: 24
  misc_feature: MA Experiment 20001451 PARAMETER Experiment Name: At_Far-red-induction_P Parameter: Tissue Value: Whole Plant
gacatcctcaagcgataacaccacaaacaaaacaacaaaccaaaaaaaaaaaaaagagagagagagagagcaaatctccatcatcatcatggactcgtctccaaacgacggcgtacaccaaccgcttctccatcctcaaccatctccatctccgccggagtcaaccaacggcgagctagaaactgtcctctccgacgtagaaactcctctgtttctccgcctacgtaaagccaccataatcgaatcaaagcttctctttaacctcgctgcaccagccgtcatcgtctacatgattaactacctcatgtccatgtctactcaaatcttctccggccatctcggtaacctcgaactcgccgccgcttctcttggtaacaccggtattcaagtcttcgcttacggtctcatgctaggcatggggagtgcagtggagacgttatgtggtcaagcgtacggtggtagaaaatacgagatgcttggagtttatctccaaagatcaaccgtattactaacactcaccggcctcctccttactttaatctacgttttctccgaaccaatccttctcttcctcggtgaatctcccgcaatcgcttcggccgcatcgctcttcgtctacggtcttatccctcaaatctttgcctacgcagcgaactttccaatacaaaaatttctccaatcacaaagcatagtagctccaagtgcttatatctcaacggctacgctctttgttcaccttcttttaagttggctcgcggtttacaagcttggtatgggacttcttggtgcgtcgcttgtgcttagcttgtcgtggtggattatagtcgtggctcagtttgtttatattgtgacgagtgagaggtgtcgtgagacgtggagaggttttagtgttcaagctttctcgggtttgtggagtttctttaaactctccgccgcttctgccgtgatgctttgccttgagacttggtattttcagattctcgttcttcttgccggacttctcgagaatcctgaacttgctcttgattcactctctatttgcatgacgatttcagggtgggtgttcatgatatctgttggattcaatgcagcgataagtgtaagagtgagcaatgaacttggagctgggaaccctaaatcagcagctttttctgtgatcatcgttaacatttattcgttaatcacttgtgtgatcctagccattgttattttagcgtgccgcgatgttttaagctatgctttcactgagggtaaagaagtctcggacgctgtttctgatctctgtccgcttcttgccgtaacacttgtccttaacggaatccaacctgtcctctctggtgtggcggttggatgcggttggcaaacgtttgtggcgaaggttaacgttggatgttactacattattggaattcctcttggggctctctttgggttttactttaacttcggtgccaagggtatatggacggggatgatcggtggtacggttatacaaacgtttattttggcgtgggtcacgtttagaacagattggacaaaagaagtggaagaagcttccaaaaggttggacaaatggagcaacaagaaacaagaagttgttcctgaatgatgcaggttgatgaaagtttggtatccaaggaaccgattagattcatcggtaaaccgatgcaaatgctcaaagtaacatgtgagctggtaaaaaaggatatggatcaaccttttaaacttctacaactcaattttaagttttttgtgttcttgtttaaaatgttagaggtaggttatgtatttttgtatgccaagattataatagttactgcgttattttttattgatttatatatatatgcatgtctttgattggatt

SEQ ID NO: 50479 - protein, 535 aa, Arabidopsis thaliana
  peptide (1)..(535): Ceres Seq. ID no. 15221232
  misc_feature (102)..(524): Homolog of NCBI NO: 15234633 NR Description: MATE efflux protein family [Arabidopsis thaliana]
  misc_feature (38)..(494): Homolog of NCBI NO: 7487826 NR Description: hypothetical protein T8O5.120 - Arabidopsis
  misc_feature (41)..(530): Homolog of NCBI NO: 21553843 NR Description: unknown [Arabidopsis thaliana]
  misc_feature (41)..(530): Homolog of NCBI NO: 18415793 NR Description: MATE efflux protein family [Arabidopsis thaliana]
  misc_feature (36)..(527): Homolog of NCBI NO: 22655139 NR Description: unknown protein [Arabidopsis thaliana]
  misc_feature (36)..(527): Homolog of NCBI NO: 15221073 NR Description: MATE efflux protein family [Arabidopsis thaliana]
  misc_feature (30)..(535): Homolog of NCBI NO: 15081773 NR Description: At1g61890/F8K4_9 [Arabidopsis thaliana]
  misc_feature (30)..(535): Homolog of NCBI NO: 18407368 NR Description: MATE efflux protein family [Arabidopsis thaliana]
  misc_feature (30)..(535): Homolog of NCBI NO: 20466556 NR Description: integral membrane protein, putative [Arabidopsis
  misc_feature (30)..(535): Homolog of NCBI NO: 15233127 NR Description: MATE efflux protein family [Arabidopsis thaliana]
TSSSDNTTNKTTNQKKKKEREREQISIIIMDSSPNDGVHQPLLHPQPSPSPPESTNGELETVLSDVETPLFLRLRKATIIESKLLFNLAAPAVIVYMINYLMSMSTQIFSGHLGNLELAAASLGNTGIQVFAYGLMLGMGSAVETLCGQAYGGRKYEMLGVYLQRSTVLLTLTGLLLTLIYVFSEPILLFLGESPAIASAASLFVYGLIPQIFAYAANFPIQKFLQSQSIVAPSAYISTATLFVHLLLSWLAVYKLGMGLLGASLVLSLSWWIIVVAQFVYIVTSERCRETWRGFSVQAFSGLWSFFKLSAASAVMLCLETWYFQILVLLAGLLENPELALDSLSICMTISGWVFMISVGFNAAISVRVSNELGAGNPKSAAFSVIIVNIYSLITCVILAIVILACRDVLSYAFTEGKEVSDAVSDLCPLLAVTLVLNGIQPVLSGVAVGCGWQTFVAKVNVGCYYIIGIPLGALFGFYFNFGAKGIWTGMIGGTVIQTFILAWVTFRTDWTKEVEEASKRLDKWSNKKQEVVPE

SEQ ID NO: 50480 - protein, 506 aa, Arabidopsis thaliana
  peptide (1)..(506): Ceres Seq. ID no. 15221233
  misc_feature (73)..(495): Homolog of NCBI NO: 15234633 NR Description: MATE efflux protein family [Arabidopsis thaliana]
  misc_feature (9)..(465): Homolog of NCBI NO: 7487826 NR Description: hypothetical protein T8O5.120 - Arabidopsis
  misc_feature (12)..(501): Homolog of NCBI NO: 21553843 NR Description: unknown [Arabidopsis thaliana]
  misc_feature (12)..(501): Homolog of NCBI NO: 18415793 NR Description: MATE efflux protein family [Arabidopsis thaliana]
  misc_feature (7)..(498): Homolog of NCBI NO: 22655139 NR Description: unknown protein [Arabidopsis thaliana]
  misc_feature (7)..(498): Homolog of NCBI NO: 15221073 NR Description: MATE efflux protein family [Arabidopsis thaliana]
  misc_feature (1)..(506): Homolog of NCBI NO: 15081773 NR Description: At1g61890/F8K4_9 [Arabidopsis thaliana]
  misc_feature (1)..(506): Homolog of NCBI NO: 18407368 NR Description: MATE efflux protein family [Arabidopsis thaliana]
  misc_feature (1)..(506): Homolog of NCBI NO: 20466556 NR Description: integral membrane protein, putative [Arabidopsis
  misc_feature (1)..(506): Homolog of NCBI NO: 15233127 NR Description: MATE efflux protein family [Arabidopsis thaliana]
MDSSPNDGVHQPLLHPQPSPSPPESTNGELETVLSDVETPLFLRLRKATIIESKLLFNLAAPAVIVYMINYLMSMSTQIFSGHLGNLELAAASLGNTGIQVFAYGLMLGMGSAVETLCGQAYGGRKYEMLGVYLQRSTVLLTLTGLLLTLIYVFSEPILLFLGESPAIASAASLFVYGLIPQIFAYAANFPIQKFLQSQSIVAPSAYISTATLFVHLLLSWLAVYKLGMGLLGASLVLSLSWWIIVVAQFVYIVTSERCRETWRGFSVQAFSGLWSFFKLSAASAVMLCLETWYFQILVLLAGLLENPELALDSLSICMTISGWVFMISVGFNAAISVRVSNELGAGNPKSAAFSVIIVNIYSLITCVILAIVILACRDVLSYAFTEGKEVSDAVSDLCPLLAVTLVLNGIQPVLSGVAVGCGWQTFVAKVNVGCYYIIGIPLGALFGFYFNFGAKGIWTGMIGGTVIQTFILAWVTFRTDWTKEVEEASKRLDKWSNKKQEVVPE

SEQ ID NO: 50481 - protein, 439 aa, Arabidopsis thaliana
  peptide (1)..(439): Ceres Seq. ID no. 15221234
  misc_feature (6)..(428): Homolog of NCBI NO: 15234633 NR Description: MATE efflux protein family [Arabidopsis thaliana]
  misc_feature (1)..(398): Homolog of NCBI NO: 7487826 NR Description: hypothetical protein T8O5.120 - Arabidopsis
  misc_feature (1)..(434): Homolog of NCBI NO: 21553843 NR Description: unknown [Arabidopsis thaliana]
  misc_feature (1)..(434): Homolog of NCBI NO: 18415793 NR Description: MATE efflux protein family [Arabidopsis thaliana]
  misc_feature (1)..(431): Homolog of NCBI NO: 22655139 NR Description: unknown protein [Arabidopsis thaliana]
  misc_feature (1)..(431): Homolog of NCBI NO: 15221073 NR Description: MATE efflux protein family [Arabidopsis thaliana]
  misc_feature (1)..(439): Homolog of NCBI NO: 15081773 NR Description: At1g61890/F8K4_9 [Arabidopsis thaliana]
  misc_feature (1)..(439): Homolog of NCBI NO: 18407368 NR Description: MATE efflux protein family [Arabidopsis thaliana]
  misc_feature (1)..(439): Homolog of NCBI NO: 20466556 NR Description: integral membrane protein, putative [Arabidopsis
  misc_feature (1)..(439): Homolog of NCBI NO: 15233127 NR Description: MATE efflux protein family [Arabidopsis thaliana]
MINYLMSMSTQIFSGHLGNLELAAASLGNTGIQVFAYGLMLGMGSAVETLCGQAYGGRKYEMLGVYLQRSTVLLTLTGLLLTLIYVFSEPILLFLGESPAIASAASLFVYGLIPQIFAYAANFPIQKFLQSQSIVAPSAYISTATLFVHLLLSWLAVYKLGMGLLGASLVLSLSWWIIVVAQFVYIVTSERCRETWRGFSVQAFSGLWSFFKLSAASAVMLCLETWYFQILVLLAGLLENPELALDSLSICMTISGWVFMISVGFNAAISVRVSNELGAGNPKSAAFSVIIVNIYSLITCVILAIVILACRDVLSYAFTEGKEVSDAVSDLCPLLAVTLVLNGIQPVLSGVAVGCGWQTFVAKVNVGCYYIIGIPLGALFGFYFNFGAKGIWTGMIGGTVIQTFILAWVTFRTDWTKEVEEASKRLDKWSNKKQEVVPE

SEQ ID NO: 50482 - DNA, 1881 bp, Arabidopsis thaliana
  misc_feature (1)..(1881): Ceres Seq. ID no. 13592686
  misc_feature: MA Experiment ID: 108434 Result: Up-regulated in Transcription
  misc_feature: MA Experiment 108434 PARAMETER Experiment Name: At_Root_Tips_cDNA_P Parameter: Tissue Value: Root Tips
  misc_feature: MA Experiment ID: 108462 Result: Down-regulated in Transcription
  misc_feature: MA Experiment 108462 PARAMETER Experiment Name: At_Germinating_Seeds_cDNA_P Parameter: Age (day) Value: 2 vs. 0
  misc_feature: MA Experiment 108462 PARAMETER Experiment Name: At_Germinating_Seeds_cDNA_P Parameter: Tissue Value: Germinating Seeds
  misc_feature: MA Experiment ID: 108463 Result: Down-regulated in Transcription
  misc_feature: MA Experiment 108463 PARAMETER Experiment Name: At_Germinating_Seeds_cDNA_P Parameter: Age (day) Value: 3 vs. 0
  misc_feature: MA Experiment 108463 PARAMETER Experiment Name: At_Germinating_Seeds_cDNA_P Parameter: Tissue Value: Germinating Seeds
  misc_feature: MA Experiment ID: 108464 Result: Down-regulated in Transcription
  misc_feature: MA Experiment 108464 PARAMETER Experiment Name: At_Germinating_Seeds_cDNA_P Parameter: Age (day) Value: 4 vs. 0
  misc_feature: MA Experiment 108464 PARAMETER Experiment Name: At_Germinating_Seeds_cDNA_P Parameter: Tissue Value: Germinating Seeds
  misc_feature: MA Experiment ID: 108605 Result: Down-regulated in Transcription
  misc_feature: MA Experiment 108605 PARAMETER Experiment Name: At_100uM_ABA_cDNA_P Parameter: Timepoint (hr) Value: 6
  misc_feature: MA Experiment 108605 PARAMETER Experiment Name: At_100uM_ABA_cDNA_P Parameter: Tissue Value: Aerial
  misc_feature: MA Experiment 108605 PARAMETER Experiment Name: At_100uM_ABA_cDNA_P Parameter: Treatment Value: 100uM ABA vs. No Treatment
  misc_feature: MA Experiment ID: 20000180 Result: Down-regulated in Transcription
  misc_feature: MA Experiment 20000180 PARAMETER Experiment Name: At_Germinating_Seeds_P Parameter: Age (hr) Value: 24 vs. 0
  misc_feature: MA Experiment 20000180 PARAMETER Experiment Name: At_Germinating_Seeds_P Parameter: Tissue Value: Germinating Seeds
gaagagagagagatatagagacactgaaagcaaagaccaaaaaagaaaaattaaaaagagagagaggaaaatggagagcgacgaagcagcagcagtgtctcctcaagcaacgacaccgagcggaggaaccggagcttctgggccgaagaagagaggtcggaaacctaaaaccaaggaagattctcagacgccgtcgtctcagcaacagagcgatgttaaaatgaaagaaagtgggaagaaaacgcagcagtcgccgagtgttgacgagaagtactctcagtggaaaggtctcgtccccattctctacgactggctcgctaaccataacctcgtctggccttcactctcttgcagatggggtccgcagcttgagcaagcaacctacaagaatcgccagcgtctgtacctctcagagcaaactgatggaagtgtgcccaatactttggtcatagcaaattgtgaagttgttaagccaagggttgctgcagcagagcacatttctcagttcaatgaagaagcacgttctccatttgtgaagaagtacaagaccatcattcaccctggagaggttaacagaatcagggaactcccacagaatagtaagattgttgctactcacaccgacagtcctgatgttctcatttgggatgttgaaacccaaccaaaccgtcatgctgtgcttggagctgcaaattcccgtccagatttgatactaactgggcaccaagataatgctgaatttgctcttgccatgtgcccaacggaaccctttgtgctctccggaggcaaggacaagtcagttgttttgtggagtatccaagatcacatcacaacgattgggacagattccaaatcatctggatctatcatcaaacagactggtgaaggtactgataagaatgagagtcctactgttggcccacgaggtgtatatcatggccatgaagatacagttgaagatgtggcattcagcccgacgagtgcacaagaattctgcagtgttggtgatgattcttgccttatactatgggatgcgagaactggcacaaaccctgtcacgaaggttgaaaaagcgcatgatgctgatcttcattgtgttgattggaatcctcatgacgacaatctgatcctgacagggtcagcagacaacactgtccggttgtttgatcgtaggaagcttaccgctaatggagttggttcgcctatttacaaatttgagggacacaaagctgctgttctttgtgttcagtggtctcctgataagtcatccgtctttgggagctctgcagaagatggtctcttgaacatctgggattatgacagggtcagtaagaagtctgatcgtgcagctaaaagccccgctgggctcttcttccagcatgctggtcacagggacaaagttgttgatttccactggaatgcttcagacccttggactattgtcagtgtttctgatgactgtgagactactggtggaggtggaacattgcagatatggcggatgagtgacttgatttacagaccagaagaagaagtcgtggcagaattggagaagttcaagtcgcatgttatgacttgtgcctccaagccttaagagtaaagaaaacccattgtctatctatctatcgcctatggtaaactaatgcgggttttagcgaggagtcttggtttttgtaaggctggtttgtcttttgagatattggtggtagcttttaggacctttccatatcagttaggggtacatggttctggttcatgatcctgtttcatcagactcttaggtgctgttttgttcaactgagatgttaatcaaatcggaccaactttatgtgttttggtttaaggtttcaatacttggcctgaacctaatgattccttctc

SEQ ID NO: 50483 - protein, 530 aa, Arabidopsis thaliana
  peptide (1)..(530): Ceres Seq. ID no. 13592687
  misc_feature (306)..(344): Pfam Name: WD domain, G-beta repeat Pfam Description: WD domain, G-beta repeat
  misc_feature (74)..(530): Homolog of NCBI NO: 5701951 NR Description: Y1 protein [Silene latifolia]
  misc_feature (74)..(530): Homolog of NCBI NO: 5701955 NR Description: X1 protein [Silene latifolia]
  misc_feature (73)..(530): Homolog of NCBI NO: 17902570 NR Description: putative WD-repeat protein [Silene latifolia]
  misc_feature (74)..(529): Homolog of NCBI NO: 14550114 NR Description: nucleosome/chromatin assembly factor C [Zea mays]
  misc_feature (74)..(529): Homolog of NCBI NO: 21898564 NR Description: nucleosome/chromatin assembly factor group C [Zea
  misc_feature (74)..(529): Homolog of NCBI NO: 9716495 NR Description: WD-repeat protein RBAP1 [Zea mays]
  misc_feature (24)..(529): Homolog of NCBI NO: 15233674 NR Description: WD-40 repeat protein [Arabidopsis thaliana]
  misc_feature (74)..(530): Homolog of NCBI NO: 2599092 NR Description: WD-40 repeat protein MSI4 [Arabidopsis thaliana]
  misc_feature (74)..(530): Homolog of NCBI NO: 20197482 NR Description: putative WD-40 repeat protein, MSI4 [Arabidopsis
  misc_feature (24)..(530): Homolog of NCBI NO: 30680701 NR Description: WD-40 repeat protein (MSI4) [Arabidopsis
KRERYRDTESKDQKRKIKKRERKMESDEAAAVSPQATTPSGGTGASGPKKRGRKPKTKEDSQTPSSQQQSDVKMKESGKKTQQSPSVDEKYSQWKGLVPILYDWLANHNLVWPSLSCRWGPQLEQATYKNRQRLYLSEQTDGSVPNTLVIANCEVVKPRVAAAEHISQFNEEARSPFVKKYKTIIHPGEVNRIRELPQNSKIVATHTDSPDVLIWDVETQPNRHAVLGAANSRPDLILTGHQDNAEFALAMCPTEPFVLSGGKDKSVVLWSIQDHITTIGTDSKSSGSIIKQTGEGTDKNESPTVGPRGVYHGHEDTVEDVAFSPTSAQEFCSVGDDSCLILWDARTGTNPVTKVEKAHDADLHCVDWNPHDDNLILTGSADNTVRLFDRRKLTANGVGSPIYKFEGHKAAVLCVQWSPDKSSVFGSSAEDGLLNIWDYDRVSKKSDRAAKSPAGLFFQHAGHRDKVVDFHWNASDPWTIVSVSDDCETTGGGGTLQIWRMSDLIYRPEEEVVAELEKFKSHVMTCASKP

SEQ ID NO: 50484 - protein, 507 aa, Arabidopsis thaliana
  peptide (1)..(507): Ceres Seq. ID no. 13592688
  misc_feature (283)..(321): Pfam Name: WD domain, G-beta repeat Pfam Description: WD domain, G-beta repeat
  misc_feature (51)..(507): Homolog of NCBI NO: 5701951 NR Description: Y1 protein [Silene latifolia]
  misc_feature (51)..(507): Homolog of NCBI NO: 5701955 NR Description: X1 protein [Silene latifolia]
  misc_feature (50)..(507): Homolog of NCBI NO: 17902570 NR Description: putative WD-repeat protein [Silene latifolia]
  misc_feature (51)..(506): Homolog of NCBI NO: 14550114 NR Description: nucleosome/chromatin assembly factor C [Zea mays]
  misc_feature (51)..(506): Homolog of NCBI NO: 21898564 NR Description: nucleosome/chromatin assembly factor group C [Zea
  misc_feature (51)..(506): Homolog of NCBI NO: 9716495 NR Description: WD-repeat protein RBAP1 [Zea mays]
  misc_feature (1)..(506): Homolog of NCBI NO: 15233674 NR Description: WD-40 repeat protein [Arabidopsis thaliana]
  misc_feature (51)..(507): Homolog of NCBI NO: 2599092 NR Description: WD-40 repeat protein MSI4 [Arabidopsis thaliana]
  misc_feature (51)..(507): Homolog of NCBI NO: 20197482 NR Description: putative WD-40 repeat protein, MSI4 [Arabidopsis
  misc_feature (1)..(507): Homolog of NCBI NO: 30680701 NR Description: WD-40 repeat protein (MSI4) [Arabidopsis
MESDEAAAVSPQATTPSGGTGASGPKKRGRKPKTKEDSQTPSSQQQSDVKMKESGKKTQQSPSVDEKYSQWKGLVPILYDWLANHNLVWPSLSCRWGPQLEQATYKNRQRLYLSEQTDGSVPNTLVIANCEVVKPRVAAAEHISQFNEEARSPFVKKYKTIIHPGEVNRIRELPQNSKIVATHTDSPDVLIWDVETQPNRHAVLGAANSRPDLILTGHQDNAEFALAMCPTEPFVLSGGKDKSVVLWSIQDHITTIGTDSKSSGSIIKQTGEGTDKNESPTVGPRGVYHGHEDTVEDVAFSPTSAQEFCSVGDDSCLILWDARTGTNPVTKVEKAHDADLHCVDWNPHDDNLILTGSADNTVRLFDRRKLTANGVGSPIYKFEGHKAAVLCVQWSPDKSSVFGSSAEDGLLNIWDYDRVSKKSDRAAKSPAGLFFQHAGHRDKVVDFHWNASDPWTIVSVSDDCETTGGGGTLQIWRMSDLIYRPEEEVVAELEKFKSHVMTCASKP

SEQ ID NO: 50485 - protein, 457 aa, Arabidopsis thaliana
  peptide (1)..(457): Ceres Seq. ID no. 13592689
  misc_feature (233)..(271): Pfam Name: WD domain, G-beta repeat Pfam Description: WD domain, G-beta repeat
  misc_feature (1)..(457): Homolog of NCBI NO: 5701951 NR Description: Y1 protein [Silene latifolia]
  misc_feature (1)..(457): Homolog of NCBI NO: 5701955 NR Description: X1 protein [Silene latifolia]
  misc_feature (1)..(457): Homolog of NCBI NO: 17902570 NR Description: putative WD-repeat protein [Silene latifolia]
  misc_feature (1)..(456): Homolog of NCBI NO: 14550114 NR Description: nucleosome/chromatin assembly factor C [Zea mays]
  misc_feature (1)..(456): Homolog of NCBI NO: 21898564 NR Description: nucleosome/chromatin assembly factor group C [Zea
  misc_feature (1)..(456): Homolog of NCBI NO: 9716495 NR Description: WD-repeat protein RBAP1 [Zea mays]
  misc_feature (1)..(456): Homolog of NCBI NO: 15233674 NR Description: WD-40 repeat protein [Arabidopsis thaliana]
  misc_feature (1)..(457): Homolog of NCBI NO: 2599092 NR Description: WD-40 repeat protein MSI4 [Arabidopsis thaliana]
  misc_feature (1)..(457): Homolog of NCBI NO: 20197482 NR Description: putative WD-40 repeat protein, MSI4 [Arabidopsis
  misc_feature (1)..(457): Homolog of NCBI NO: 30680701 NR Description: WD-40 repeat protein (MSI4) [Arabidopsis
MKESGKKTQQSPSVDEKYSQWKGLVPILYDWLANHNLVWPSLSCRWGPQLEQATYKNRQRLYLSEQTDGSVPNTLVIANCEVVKPRVAAAEHISQFNEEARSPFVKKYKTIIHPGEVNRIRELPQNSKIVATHTDSPDVLIWDVETQPNRHAVLGAANSRPDLILTGHQDNAEFALAMCPTEPFVLSGGKDKSVVLWSIQDHITTIGTDSKSSGSIIKQTGEGTDKNESPTVGPRGVYHGHEDTVEDVAFSPTSAQEFCSVGDDSCLILWDARTGTNPVTKVEKAHDADLHCVDWNPHDDNLILTGSADNTVRLFDRRKLTANGVGSPIYKFEGHKAAVLCVQWSPDKSSVFGSSAEDGLLNIWDYDRVSKKSDRAAKSPAGLFFQHAGHRDKVVDFHWNASDPWTIVSVSDDCETTGGGGTLQIWRMSDLIYRPEEEVVAELEKFKSHVMTCASKP

SEQ ID NO: 50486 - DNA, 1542 bp, Arabidopsis thaliana
  misc_feature (1)..(1542): Ceres Seq. ID no. 13592362
  misc_feature: MA Experiment ID: 20000171 Result: Down-regulated in Transcription
  misc_feature: MA Experiment 20000171 PARAMETER Experiment Name: At_42deg_Heat_P Parameter: Age (day) Value: 14
  misc_feature: MA Experiment 20000171 PARAMETER Experiment Name: At_42deg_Heat_P Parameter: Organism Value: A. thaliana
  misc_feature: MA Experiment 20000171 PARAMETER Experiment Name: At_42deg_Heat_P Parameter: Plant Line Value: WS
  misc_feature: MA Experiment 20000171 PARAMETER Experiment Name: At_42deg_Heat_P Parameter: Temperature (deg C) Value: 42 vs. 22
  misc_feature: MA Experiment 20000171 PARAMETER Experiment Name: At_42deg_Heat_P Parameter: Timepoint (hr) Value: 1
  misc_feature: MA Experiment 20000171 PARAMETER Experiment Name: At_42deg_Heat_P Parameter: Tissue Value: Aerial
  misc_feature: MA Experiment ID: 20000185 Result: Up-regulated in Transcription
  misc_feature: MA Experiment 20000185 PARAMETER Experiment Name: At_Roots__P Parameter: Age (day) Value: 7 vs. 21
  misc_feature: MA Experiment 20000185 PARAMETER Experiment Name: At_Roots__P Parameter: Organism Value: A. thaliana
  misc_feature: MA Experiment 20000185 PARAMETER Experiment Name: At_Roots__P Parameter: Tissue Value: Roots vs. Whole Plant
  misc_feature: MA Experiment ID: 20000234 Result: Up-regulated in Transcription
  misc_feature: MA Experiment 20000234 PARAMETER Experiment Name: At_Siliques_P Parameter: Age (day) Value: 21
  misc_feature: MA Experiment 20000234 PARAMETER Experiment Name: At_Siliques_P Parameter: Organism Value: A. thaliana
  misc_feature: MA Experiment 20000234 PARAMETER Experiment Name: At_Siliques_P Parameter: Plant Line Value: WS
  misc_feature: MA Experiment 20000234 PARAMETER Experiment Name: At_Siliques_P Parameter: Tissue Value: Less Than 5mm Siliques vs. Whole Plant
  misc_feature: MA Experiment ID: 20000264 Result: Up-regulated in Transcription
  misc_feature: MA Experiment 20000264 PARAMETER Experiment Name: At_Open_Flower_P Parameter: Age (day) Value: 21
  misc_feature: MA Experiment 20000264 PARAMETER Experiment Name: At_Open_Flower_P Parameter: Plant Line Value: WS
  misc_feature: MA Experiment 20000264 PARAMETER Experiment Name: At_Open_Flower_P Parameter: Tissue Value: Open Flower vs. Whole Plant
  misc_feature: MA Experiment ID: 20000265 Result: Up-regulated in Transcription
  misc_feature: MA Experiment 20000265 PARAMETER Experiment Name: At_Open_Flower_P Parameter: Age (day) Value: 21
  misc_feature: MA Experiment 20000265 PARAMETER Experiment Name: At_Open_Flower_P Parameter: Plant Line Value: WS
  misc_feature: MA Experiment 20000265 PARAMETER Experiment Name: At_Open_Flower_P Parameter: Tissue Value: Closed Flower vs. Whole Plant
  misc_feature: MA Experiment ID: 20000286 Result: Up-regulated in Transcription
  misc_feature: MA Experiment 20000286 PARAMETER Experiment Name: At_Open_Flower_P Parameter: Age (day) Value: 21
  misc_feature: MA Experiment 20000286 PARAMETER Experiment Name: At_Open_Flower_P Parameter: Plant Line Value: WS
  misc_feature: MA Experiment 20000286 PARAMETER Experiment Name: At_Open_Flower_P Parameter: Tissue Value: Half Open vs. Whole Plant
  misc_feature: MA Experiment ID: 20000439 Result: Up-regulated in Transcription
  misc_feature: MA Experiment 20000439 PARAMETER Experiment Name: At_Roots__P Parameter: Age (day) Value: 14 vs. 21
  misc_feature: MA Experiment 20000439 PARAMETER Experiment Name: At_Roots__P Parameter: Organism Value: A. thaliana
  misc_feature: MA Experiment 20000439 PARAMETER Experiment Name: At_Roots__P Parameter: Tissue Value: Roots vs. Whole Plant
  misc_feature: MA Experiment ID: 20000495 Result: Up-regulated in Transcription
  misc_feature: MA Experiment 20000495 PARAMETER Experiment Name: At_Guard_Cells_P Parameter: Harvest Date Value: 8/2/2002
  misc_feature: MA Experiment 20000495 PARAMETER Experiment Name: At_Guard_Cells_P Parameter: Organism Value: A. thaliana
  misc_feature: MA Experiment 20000495 PARAMETER Experiment Name: At_Guard_Cells_P Parameter: Tissue Value: Guard Cells vs. Leaves
  misc_feature: MA Experiment ID: 20000573 Result: Down-regulated in Transcription
  misc_feature: MA Experiment 20000573 PARAMETER Experiment Name: At_100uM_ABA_Mutants__P Parameter: Organism Value: A. thaliana
  misc_feature: MA Experiment 20000573 PARAMETER Experiment Name: At_100uM_ABA_Mutants__P Parameter: Plant Line Value: CS22 vs. Ler wt
  misc_feature: MA Experiment 20000573 PARAMETER Experiment Name: At_100uM_ABA_Mutants__P Parameter: Timepoint (hr) Value: N/A
  misc_feature: MA Experiment 20000573 PARAMETER Experiment Name: At_100uM_ABA_Mutants__P Parameter: Tissue Value: Whole Plant
  misc_feature: MA Experiment 20000573 PARAMETER Experiment Name: At_100uM_ABA_Mutants__P Parameter: Treatment Value: None
  misc_feature: MA Experiment ID: 20000574 Result: Down-regulated in Transcription
  misc_feature: MA Experiment 20000574 PARAMETER Experiment Name: At_100uM_ABA_Mutants__P Parameter: Organism Value: A. thaliana
  misc_feature: MA Experiment 20000574 PARAMETER Experiment Name: At_100uM_ABA_Mutants__P Parameter: Plant Line Value: CS23 vs. Ler wt
  misc_feature: MA Experiment 20000574 PARAMETER Experiment Name: At_100uM_ABA_Mutants__P Parameter: Timepoint (hr) Value: N/A
  misc_feature: MA Experiment 20000574 PARAMETER Experiment Name: At_100uM_ABA_Mutants__P Parameter: Tissue Value: Whole Plant
  misc_feature: MA Experiment 20000574 PARAMETER Experiment Name: At_100uM_ABA_Mutants__P Parameter: Treatment Value: None
  misc_feature: MA Experiment ID: 20001247 Result: Down-regulated in Transcription
  misc_feature: MA Experiment 20001247 PARAMETER Experiment Name: At_Far-red-induction_P Parameter: Age (day) Value: 7
  misc_feature: MA Experiment 20001247 PARAMETER Experiment Name: At_Far-red-induction_P Parameter: Light Value: Far-red vs. White
  misc_feature: MA Experiment 20001247 PARAMETER Experiment Name: At_Far-red-induction_P Parameter: Organism Value: A. thaliana
  misc_feature: MA Experiment 20001247 PARAMETER Experiment Name: At_Far-red-induction_P Parameter: Plant Line Value: Columbia
  misc_feature: MA Experiment 20001247 PARAMETER Experiment Name: At_Far-red-induction_P Parameter: Timepoint (hr) Value: 1
  misc_feature: MA Experiment 20001247 PARAMETER Experiment Name: At_Far-red-induction_P Parameter: Tissue Value: Whole Plant
  misc_feature: MA Experiment ID: 20001554 Result: Up-regulated in Transcription
  misc_feature: MA Experiment 20001554 PARAMETER Experiment Name: At_Drought_Soil_Dry_P Parameter: Age (day) Value: 21
  misc_feature: MA Experiment 20001554 PARAMETER Experiment Name: At_Drought_Soil_Dry_P Parameter: Organism Value: A. thaliana
  misc_feature: MA Experiment 20001554 PARAMETER Experiment Name: At_Drought_Soil_Dry_P Parameter: Plant Line Value: WS
  misc_feature: MA Experiment 20001554 PARAMETER Experiment Name: At_Drought_Soil_Dry_P Parameter: Post Timepoint (hr) Value: None
  misc_feature: MA Experiment 20001554 PARAMETER Experiment Name: At_Drought_Soil_Dry_P Parameter: Post-Treatment Value: None
  misc_feature: MA Experiment 20001554 PARAMETER Experiment Name: At_Drought_Soil_Dry_P Parameter: Timepoint (day) Value: 7
  misc_feature: MA Experiment 20001554 PARAMETER Experiment Name: At_Drought_Soil_Dry_P Parameter: Treatment Value: Drought vs. No Drought
  misc_feature: MA Experiment ID: 20001555 Result: Up-regulated in Transcription
  misc_feature: MA Experiment 20001555 PARAMETER Experiment Name: At_Drought_Soil_Dry_P Parameter: Age (day) Value: 24
  misc_feature: MA Experiment 20001555 PARAMETER Experiment Name: At_Drought_Soil_Dry_P Parameter: Organism Value: A. thaliana
  misc_feature: MA Experiment 20001555 PARAMETER Experiment Name: At_Drought_Soil_Dry_P Parameter: Plant Line Value: WS
  misc_feature: MA Experiment 20001555 PARAMETER Experiment Name: At_Drought_Soil_Dry_P Parameter: Post Timepoint (hr) Value: None
  misc_feature: MA Experiment 20001555 PARAMETER Experiment Name: At_Drought_Soil_Dry_P Parameter: Post-Treatment Value: None
  misc_feature: MA Experiment 20001555 PARAMETER Experiment Name: At_Drought_Soil_Dry_P Parameter: Timepoint (day) Value: 10
  misc_feature: MA Experiment 20001555 PARAMETER Experiment Name: At_Drought_Soil_Dry_P Parameter: Treatment Value: Drought vs. No Drought
  misc_feature: MA Experiment ID: 20001556 Result: Up-regulated in Transcription
  misc_feature: MA Experiment 20001556 PARAMETER Experiment Name: At_Drought_Soil_Dry_P Parameter: Age (day) Value: 26
  misc_feature: MA Experiment 20001556 PARAMETER Experiment Name: At_Drought_Soil_Dry_P Parameter: Organism Value: A. thaliana
  misc_feature: MA Experiment 20001556 PARAMETER Experiment Name: At_Drought_Soil_Dry_P Parameter: Plant Line Value: WS
  misc_feature: MA Experiment 20001556 PARAMETER Experiment Name: At_Drought_Soil_Dry_P Parameter: Post Timepoint (hr) Value: None
  misc_feature: MA Experiment 20001556 PARAMETER Experiment Name: At_Drought_Soil_Dry_P Parameter: Post-Treatment Value: None
  misc_feature: MA Experiment 20001556 PARAMETER Experiment Name: At_Drought_Soil_Dry_P Parameter: Timepoint (day) Value: 12
  misc_feature: MA Experiment 20001556 PARAMETER Experiment Name: At_Drought_Soil_Dry_P Parameter: Treatment Value: Drought vs. No Drought
  misc_feature: MA Experiment ID: 20001559 Result: Up-regulated in Transcription
  misc_feature: MA Experiment 20001559 PARAMETER Experiment Name: At_Drought_Soil_Dry_P Parameter: Age (day) Value: 28
  misc_feature: MA Experiment 20001559 PARAMETER Experiment Name: At_Drought_Soil_Dry_P Parameter: Organism Value: A. thaliana
  misc_feature: MA Experiment 20001559 PARAMETER Experiment Name: At_Drought_Soil_Dry_P Parameter: Plant Line Value: WS
  misc_feature: MA Experiment 20001559 PARAMETER Experiment Name: At_Drought_Soil_Dry_P Parameter: Post Timepoint (hr) Value: 29
  misc_feature: MA Experiment 20001559 PARAMETER Experiment Name: At_Drought_Soil_Dry_P Parameter: Post-Treatment Value: Re-Water vs. No Drought
  misc_feature: MA Experiment 20001559 PARAMETER Experiment Name: At_Drought_Soil_Dry_P Parameter: Timepoint (day) Value: 14
  misc_feature: MA Experiment 20001559 PARAMETER Experiment Name: At_Drought_Soil_Dry_P Parameter: Treatment Value: Drought vs. No Drought
  misc_feature: MA Experiment ID: 20001904 Result: Up-regulated in Transcription
  misc_feature: MA Experiment 20001904 PARAMETER Experiment Name: At_Drought_Reproduction_P Parameter: Age (day) Value: 37
  misc_feature: MA Experiment 20001904 PARAMETER Experiment Name: At_Drought_Reproduction_P Parameter: Organism Value: A. thaliana
  misc_feature: MA Experiment 20001904 PARAMETER Experiment Name: At_Drought_Reproduction_P Parameter: Plant Line Value: WS
  misc_feature: MA Experiment 20001904 PARAMETER Experiment Name: At_Drought_Reproduction_P Parameter: Timepoint (day) Value: 7
  misc_feature: MA Experiment 20001904 PARAMETER Experiment Name: At_Drought_Reproduction_P Parameter: Tissue Value: Rosettes
  misc_feature: MA Experiment 20001904 PARAMETER Experiment Name: At_Drought_Reproduction_P Parameter: Treatment Value: Drought vs. No Drought
  misc_feature: MA Experiment ID: 20001905 Result: Up-regulated in Transcription
  misc_feature: MA Experiment 20001905 PARAMETER Experiment Name: At_Drought_Reproduction_P Parameter: Age (day) Value: 40
  misc_feature: MA Experiment 20001905 PARAMETER Experiment Name: At_Drought_Reproduction_P Parameter: Organism Value: A. thaliana
  misc_feature: MA Experiment 20001905 PARAMETER Experiment Name: At_Drought_Reproduction_P Parameter: Plant Line Value: WS
  misc_feature: MA Experiment 20001905 PARAMETER Experiment Name: At_Drought_Reproduction_P Parameter: Timepoint (day) Value: 10
  misc_feature: MA Experiment 20001905 PARAMETER Experiment Name: At_Drought_Reproduction_P Parameter: Tissue Value: Rosettes
  misc_feature: MA Experiment 20001905 PARAMETER Experiment Name: At_Drought_Reproduction_P Parameter: Treatment Value: Drought vs. No Drought
  misc_feature: MA Experiment ID: 20001906 Result: Up-regulated in Transcription
  misc_feature: MA Experiment 20001906 PARAMETER Experiment Name: At_Drought_Reproduction_P Parameter: Age (day) Value: 35
  misc_feature: MA Experiment 20001906 PARAMETER Experiment Name: At_Drought_Reproduction_P Parameter: Organism Value: A. thaliana
  misc_feature: MA Experiment 20001906 PARAMETER Experiment Name: At_Drought_Reproduction_P Parameter: Plant Line Value: WS
  misc_feature: MA Experiment 20001906 PARAMETER Experiment Name: At_Drought_Reproduction_P Parameter: Timepoint (day) Value: 5
  misc_feature: MA Experiment 20001906 PARAMETER Experiment Name: At_Drought_Reproduction_P Parameter: Tissue Value: Siliques
  misc_feature: MA Experiment 20001906 PARAMETER Experiment Name: At_Drought_Reproduction_P Parameter: Treatment Value: Drought vs. No Drought
  misc_feature: MA Experiment ID: 20001908 Result: Up-regulated in Transcription
  misc_feature: MA Experiment 20001908 PARAMETER Experiment Name: At_Drought_Reproduction_P Parameter: Age (day) Value: 40
  misc_feature: MA Experiment 20001908 PARAMETER Experiment Name: At_Drought_Reproduction_P Parameter: Organism Value: A. thaliana
  misc_feature: MA Experiment 20001908 PARAMETER Experiment Name: At_Drought_Reproduction_P Parameter: Plant Line Value: WS
  misc_feature: MA Experiment 20001908 PARAMETER Experiment Name: At_Drought_Reproduction_P Parameter: Timepoint (day) Value: 10
  misc_feature: MA Experiment 20001908 PARAMETER Experiment Name: At_Drought_Reproduction_P Parameter: Tissue Value: Siliques
  misc_feature: MA Experiment 20001908 PARAMETER Experiment Name: At_Drought_Reproduction_P Parameter: Treatment Value: Drought vs. No Drought
  misc_feature: MA Experiment ID: 20001911 Result: Up-regulated in Transcription
  misc_feature: MA Experiment 20001911 PARAMETER Experiment Name: At_Drought_Reproduction_P Parameter: Age (day) Value: 40
  misc_feature: MA Experiment 20001911 PARAMETER Experiment Name: At_Drought_Reproduction_P Parameter: Organism Value: A. thaliana
  misc_feature: MA Experiment 20001911 PARAMETER Experiment Name: At_Drought_Reproduction_P Parameter: Plant Line Value: WS
  misc_feature: MA Experiment 20001911 PARAMETER Experiment Name: At_Drought_Reproduction_P Parameter: Timepoint (day) Value: 10
  misc_feature: MA Experiment 20001911 PARAMETER Experiment Name: At_Drought_Reproduction_P Parameter: Tissue Value: Flowers
  misc_feature: MA Experiment 20001911 PARAMETER Experiment Name: At_Drought_Reproduction_P Parameter: Treatment Value: Drought vs. No Drought
gaaaagaagcaatcaacaagaaaatggacctcacccaaatcctactcctctcctttctctttctcactatctccatcaaactcttgctcacaaaatctaaccggaaacctaatcttcctccttctccggcttaccctttaccggttatcggccacctccacctcctcaagcaaccggtccaccgaacattccactccatctctaagtcccttggaaatgctccaatcttccacctccgcctgggaaaccgcctcgtttacgtcatctcctcacactccatagccgaagaatgtttcaccaaaaacgacgtcgttcttgcgaaccgtcctgatatcatcatggccaaacacgtcggctataactttaccaatatgattgcagcatcttacggcgaccactggaggaatctccgccgcatcgccgccgtcgagatattttcttctcatagaatcagtaccttttcttctatccgtaaagacgagatccgacggctcataacacatctctctagagactccttgcacggatttgttgaagtggagttgaaatcgttattaaccaacttggcattcaacaacatcatcatgatggtagccggaaaacgatattacggtaccggtacagaagacaatgatgaagccaagctcgtgagggaacttatagcggagataatggccggcgccggttctggaaatttggctgattatcttccgtccataaattgggtcacaaactttgagaaccagaccaaaatcttggggaatcgactcgatagagtcctgcaaaaactggttgatgagaaacgtgcagagaaagaaaagggtcaaactttgatcgatcatttgctttctttccaagaaaccgaacccgagtactatactgatgtcatcatcaaaggaatcatactggctttggttcttgcggggacagatacatcttcagtgacgttggaatgggcaatgtcaaatttgctgaaccatccagagatacttgagaaagcgagagcggagatcgatgataaaatcggttcagaccggttagttgaagaatcagatattgtaaatctccattatctccaaaacattgtgtcagaaacattacgtttgtatcctgcggttccactactactccctcatttctcatcggatgaatgtaaagtggcgggctacgatatgccacgtcgcacgttgttattaacaaacgtatgggcgatgcatagagatccaggtttatgggaagagccagagaggttcaagccggagaggttcgagaaagaaggagaggctcgaaagctaatgccgtttgggatgggacgacgagcttgtcctggagctgagcttgggaagcggttagtgagccttgctcttgggtgcttgattcagtctttcgagtgggagagagttggtgcagaacttgtggacatgactgaaggcgaagggatcactatgcctaaagctactccgttgcgagctatgtgcaaggcacgtgccattgttggtaaaacgatataattgacgtatgtaggatctattgtgtagaaac

SEQ ID NO: 50487 - protein, 502 aa, Arabidopsis thaliana
  peptide (1)..(502): Ceres Seq. ID no. 13592363
  misc_feature (15)..(502): Homolog of NCBI NO: 30692923 NR Description: cytochrome P450 91A1 [Arabidopsis thaliana]
  misc_feature (4)..(498): Homolog of NCBI NO: 15227792 NR Description: cytochrome P450, putative [Arabidopsis thaliana]
  misc_feature (4)..(500): Homolog of NCBI NO: 15227789 NR Description: cytochrome P450, putative [Arabidopsis thaliana]
  misc_feature (13)..(502): Homolog of NCBI NO: 15235535 NR Description: cytochrome P450 family [Arabidopsis thaliana]
  misc_feature (12)..(502): Homolog of NCBI NO: 15235534 NR Description: cytochrome P450 family [Arabidopsis thaliana]
  misc_feature (13)..(502): Homolog of NCBI NO: 15228472 NR Description: cytochrome P450 family [Arabidopsis thaliana]
  misc_feature (11)..(500): Homolog of NCBI NO: 21554381 NR Description: cytochrome P450-like protein [Arabidopsis
  misc_feature (11)..(500): Homolog of NCBI NO: 15235536 NR Description: cytochrome P450, putative [Arabidopsis thaliana]
  misc_feature (8)..(502): Homolog of NCBI NO: 15235533 NR Description: cytochrome P450 family [Arabidopsis thaliana]
  misc_feature (8)..(502): Homolog of NCBI NO: 15235517 NR Description: cytochrome P450 family [Arabidopsis thaliana]
KEAINKKMDLTQILLLSFLFLTISIKLLLTKSNRKPNLPPSPAYPLPVIGHLHLLKQPVHRTFHSISKSLGNAPIFHLRLGNRLVYVISSHSIAEECFTKNDVVLANRPDIIMAKHVGYNFTNMIAASYGDHWRNLRRIAAVEIFSSHRISTFSSIRKDEIRRLITHLSRDSLHGFVEVELKSLLTNLAFNNIIMMVAGKRYYGTGTEDNDEAKLVRELIAEIMAGAGSGNLADYLPSINWVTNFENQTKILGNRLDRVLQKLVDEKRAEKEKGQTLIDHLLSFQETEPEYYTDVIIKGIILALVLAGTDTSSVTLEWAMSNLLNHPEILEKARAEIDDKIGSDRLVEESDIVNLHYLQNIVSETLRLYPAVPLLLPHFSSDECKVAGYDMPRRTLLLTNVWAMHRDPGLWEEPERFKPERFEKEGEARKLMPFGMGRRACPGAELGKRLVSLALGCLIQSFEWERVGAELVDMTEGEGITMPKATPLRAMCKARAIVGKTI

SEQ ID NO: 50488 - protein, 495 aa, Arabidopsis thaliana
  peptide (1)..(495): Ceres Seq. ID no. 13592364
  misc_feature (8)..(495): Homolog of NCBI NO: 30692923 NR Description: cytochrome P450 91A1 [Arabidopsis thaliana]
  misc_feature (1)..(491): Homolog of NCBI NO: 15227792 NR Description: cytochrome P450, putative [Arabidopsis thaliana]
  misc_feature (1)..(493): Homolog of NCBI NO: 15227789 NR Description: cytochrome P450, putative [Arabidopsis thaliana]
  misc_feature (6)..(495): Homolog of NCBI NO: 15235535 NR Description: cytochrome P450 family [Arabidopsis thaliana]
  misc_feature (5)..(495): Homolog of NCBI NO: 15235534 NR Description: cytochrome P450 family [Arabidopsis thaliana]
  misc_feature (6)..(495): Homolog of NCBI NO: 15228472 NR Description: cytochrome P450 family [Arabidopsis thaliana]
  misc_feature (4)..(493): Homolog of NCBI NO: 21554381 NR Description: cytochrome P450-like protein [Arabidopsis
  misc_feature (4)..(493): Homolog of NCBI NO: 15235536 NR Description: cytochrome P450, putative [Arabidopsis thaliana]
  misc_feature (1)..(495): Homolog of NCBI NO: 15235533 NR Description: cytochrome P450 family [Arabidopsis thaliana]
  misc_feature (1)..(495): Homolog of NCBI NO: 15235517 NR Description: cytochrome P450 family [Arabidopsis thaliana]
MDLTQILLLSFLFLTISIKLLLTKSNRKPNLPPSPAYPLPVIGHLHLLKQPVHRTFHSISKSLGNAPIFHLRLGNRLVYVISSHSIAEECFTKNDVVLANRPDIIMAKHVGYNFTNMIAASYGDHWRNLRRIAAVEIFSSHRISTFSSIRKDEIRRLITHLSRDSLHGFVEVELKSLLTNLAFNNIIMMVAGKRYYGTGTEDNDEAKLVRELIAEIMAGAGSGNLADYLPSINWVTNFENQTKILGNRLDRVLQKLVDEKRAEKEKGQTLIDHLLSFQETEPEYYTDVIIKGIILALVLAGTDTSSVTLEWAMSNLLNHPEILEKARAEIDDKIGSDRLVEESDIVNLHYLQNIVSETLRLYPAVPLLLPHFSSDECKVAGYDMPRRTLLLTNVWAMHRDPGLWEEPERFKPERFEKEGEARKLMPFGMGRRACPGAELGKRLVSLALGCLIQSFEWERVGAELVDMTEGEGITMPKATPLRAMCKARAIVGKTI

SEQ ID NO: 50489 - protein, 390 aa, Arabidopsis thaliana
  peptide (1)..(390): Ceres Seq. ID no. 13592365
  misc_feature (1)..(390): Homolog of NCBI NO: 30692923 NR Description: cytochrome P450 91A1 [Arabidopsis thaliana]
  misc_feature (1)..(386): Homolog of NCBI NO: 15227792 NR Description: cytochrome P450, putative [Arabidopsis thaliana]
  misc_feature (1)..(388): Homolog of NCBI NO: 15227789 NR Description: cytochrome P450, putative [Arabidopsis thaliana]
  misc_feature (1)..(390): Homolog of NCBI NO: 15235535 NR Description: cytochrome P450 family [Arabidopsis thaliana]
  misc_feature (1)..(390): Homolog of NCBI NO: 15235534 NR Description: cytochrome P450 family [Arabidopsis thaliana]
  misc_feature (1)..(390): Homolog of NCBI NO: 15228472 NR Description: cytochrome P450 family [Arabidopsis thaliana]
  misc_feature (1)..(388): Homolog of NCBI NO: 21554381 NR Description: cytochrome P450-like protein [Arabidopsis
  misc_feature (1)..(388): Homolog of NCBI NO: 15235536 NR Description: cytochrome P450, putative [Arabidopsis thaliana]
  misc_feature (1)..(390): Homolog of NCBI NO: 15235533 NR Description: cytochrome P450 family [Arabidopsis thaliana]
  misc_feature (1)..(390): Homolog of NCBI NO: 15235517 NR Description: cytochrome P450 family [Arabidopsis thaliana]
MAKHVGYNFTNMIAASYGDHWRNLRRIAAVEIFSSHRISTFSSIRKDEIRRLITHLSRDSLHGFVEVELKSLLTNLAFNNIIMMVAGKRYYGTGTEDNDEAKLVRELIAEIMAGAGSGNLADYLPSINWVTNFENQTKILGNRLDRVLQKLVDEKRAEKEKGQTLIDHLLSFQETEPEYYTDVIIKGIILALVLAGTDTSSVTLEWAMSNLLNHPEILEKARAEIDDKIGSDRLVEESDIVNLHYLQNIVSETLRLYPAVPLLLPHFSSDECKVAGYDMPRRTLLLTNVWAMHRDPGLWEEPERFKPERFEKEGEARKLMPFGMGRRACPGAELGKRLVSLALGCLIQSFEWERVGAELVDMTEGEGITMPKATPLRAMCKARAIVGKTI

SEQ ID NO: 50490 - DNA, 1278 bp, Arabidopsis thaliana
  misc_feature (1)..(1278): Ceres Seq. ID no. 13648210
  misc_feature: MA Experiment ID: 20000185 Result: Up-regulated in Transcription
  misc_feature: MA Experiment 20000185 PARAMETER Experiment Name: At_Roots__P Parameter: Age (day) Value: 7 vs. 21
  misc_feature: MA Experiment 20000185 PARAMETER Experiment Name: At_Roots__P Parameter: Organism Value: A. thaliana
  misc_feature: MA Experiment 20000185 PARAMETER Experiment Name: At_Roots__P Parameter: Tissue Value: Roots vs. Whole Plant
atcctcacgtcactctttctctctaaaactccataaagctcaaactttttctcattctctctctaaagctaaaatctttttcacactcttcttcatgttcaagcaatgggaaacctctgttctttgtttactccgccaaaacccgtgaagaaaagaaaacccatcacaaaaagacaatcttctatcggagcttcttcttccgggtcgggtcttaatagtaaccgttggaacaaccgggtcagatcatcttcttctagaagagacaacaagttcgaagatgctttgattcaagaacatgctcttgctgctgctgctgttttgttccgacagcaaaacggtggtggaggatcgttgccgtttgatcggtcggcttcacaacgttatcaaggttcttgttcgaagaagaaccagttgcctcgaagctcgagttcgaggtcaaggtcttctacagatcctctgttacaacctcatcagtttcttaatcagggtataaagctagatgacttggaaacaaaccattttgtccttgttcatggaggtagttttggcgcttggtgttggtataaaaccattgcacttcttgaggaagatggttttaaagttaccgctatagacttagcaggttgcggtattaactcgattaatataaatggcatcgctagtttgtcacaatatgtcaagccacttaccgatattcttgaaaagcttcccataggagagaaggtgatattggtcggtcacgattttggtggagcatgtatatcttatgctatggaactctttccttcaaagatttcgaaagcggttttcctcgctgcagcgatgttaacaaatggtcaaagtacactcgatatgttctccttgaaggccggtcagaacgatttaatgagaaaagctcagatatttatctacacaaatggtaatgaaaaccctccaaccgcaattgacttagacaaatctcttctcaaagaccttttgttcaaccaaagcccttcgaaggacgttgcattggcttctgtatcaatgaggtcaattccatttgcgccggttcttgaaaaactctctctttcggatgctaactacggatcagttagacggtactatatagagacgttagaagacaatgctataccagtgactcttcaagaaaacatgatcaatagtagtcctcctgaaaaggtttatcggttaaaaggcgccgaccatgctcctttcttttccaaaccacaagctttgcataaacttctgcttgagatcgccagaattagccctgcttaa

SEQ ID NO: 50491 - protein, 390 aa, Arabidopsis thaliana
  peptide (1)..(390): Ceres Seq. ID no. 15219531
  misc_feature (164)..(383): Pfam Name: alpha/beta hydrolase fold Pfam Description: alpha/beta hydrolase fold
  misc_feature (139)..(387): Homolog of NCBI NO: 7485010 NR Description: host response protein homolog T5L19.30 -
  misc_feature (105)..(143): Homolog of NCBI NO: 25518436 NR Description: hypothetical protein T1K7.26 - Arabidopsis
  misc_feature (176)..(369): Homolog of NCBI NO: 25518436 NR Description: hypothetical protein T1K7.26 - Arabidopsis
  misc_feature (90)..(387): Homolog of NCBI NO: 30681236 NR Description: hydrolase family [Arabidopsis thaliana]
  misc_feature (90)..(387): Homolog of NCBI NO: 21595837 NR Description: polyneuridine aldehyde esterase, putative
  misc_feature (90)..(387): Homolog of NCBI NO: 15218463 NR Description: hydrolase, alpha/beta fold family [Arabidopsis
  misc_feature (105)..(389): Homolog of NCBI NO: 15222256 NR Description: hydrolase, alpha/beta fold family [Arabidopsis
  misc_feature (25)..(389): Homolog of NCBI NO: 25404802 NR Description: probable alpha/beta hydrolase F23O10.18
  misc_feature (105)..(387): Homolog of NCBI NO: 15222699 NR Description: hydrolase, alpha/beta fold family [Arabidopsis
  misc_feature (1)..(390): Homolog of NCBI NO: 15230077 NR Description: hydrolase, alpha/beta fold family [Arabidopsis
MGNLCSLFTPPKPVKKRKPITKRQSSIGASSSGSGLNSNRWNNRVRSSSSRRDNKFEDALIQEHALAAAAVLFRQQNGGGGSLPFDRSASQRYQGSCSKKNQLPRSSSSRSRSSTDPLLQPHQFLNQGIKLDDLETNHFVLVHGGSFGAWCWYKTIALLEEDGFKVTAIDLAGCGINSININGIASLSQYVKPLTDILEKLPIGEKVILVGHDFGGACISYAMELFPSKISKAVFLAAAMLTNGQSTLDMFSLKAGQNDLMRKAQIFIYTNGNENPPTAIDLDKSLLKDLLFNQSPSKDVALASVSMRSIPFAPVLEKLSLSDANYGSVRRYYIETLEDNAIPVTLQENMINSSPPEKVYRLKGADHAPFFSKPQALHKLLLEIARISPA

SEQ ID NO: 50492 - DNA, 1678 bp, Arabidopsis thaliana
  misc_feature (1)..(1678): Ceres Seq. ID no. 12602001
  misc_feature: MA Experiment ID: 20000179 Result: Up-regulated in Transcription
  misc_feature: MA Experiment 20000179 PARAMETER Experiment Name: At_Germinating_Seeds_P Parameter: Age (hr) Value: 6 vs. 0
  misc_feature: MA Experiment 20000179 PARAMETER Experiment Name: At_Germinating_Seeds_P Parameter: Tissue Value: Germinating Seeds
  misc_feature: MA Experiment ID: 20000265 Result: Up-regulated in Transcription
  misc_feature: MA Experiment 20000265 PARAMETER Experiment Name: At_Open_Flower_P Parameter: Age (day) Value: 21
  misc_feature: MA Experiment 20000265 PARAMETER Experiment Name: At_Open_Flower_P Parameter: Plant Line Value: WS
  misc_feature: MA Experiment 20000265 PARAMETER Experiment Name: At_Open_Flower_P Parameter: Tissue Value: Closed Flower vs. Whole Plant
  misc_feature: MA Experiment ID: 20000794 Result: Up-regulated in Transcription
  misc_feature: MA Experiment 20000794 PARAMETER Experiment Name: At_Petals_P Parameter: Age (day) Value: 23-25 days
  misc_feature: MA Experiment 20000794 PARAMETER Experiment Name: At_Petals_P Parameter: Plant Line Value: WS
  misc_feature: MA Experiment 20000794 PARAMETER Experiment Name: At_Petals_P Parameter: Tissue Value: Petals vs. Whole plant
acattttcacatcaaaatcacattccttccatggccttcttctccatgatctccattctccttggctttgttatctcctccttcatcttcatcttcttcttcaagaaacttctctccttctccagaaagaacatgtctgaagtctccactctcccctctgttccagtggtaccagggtttcctgttattgggaacttgctgcaactaaaagagaagaaacctcacaagactttcactagatggtcagagatttatggtcctatttactctataaagatgggttcttcttctcttattgtcctcaattctactgagactgccaaagaggccatggtgacgcggttttcgtctatctcaacgaggaagttgtcaaatgcgttgacagtccttacttgtgacaaatctatggttgctactagtgattatgatgatttccacaagttggtgaaacggtgtctcttgaacggtcttttgggtgctaatgcacagaaacgaaaaagacattacagagatgcactcattgaaaatgtgtcttccaagttgcatgcccatcctagggaccatccacaagaacctgtaaacttcagagctatatttgagcatgagcttttcggtgtagcattgaagcaagcttttgggaaagatgtggaatccatttatgttaaagaactcggtgtgactttgtcgaaagacgagatcttcaaggttttagtacatgacatgatggaaggtgcaattgatgttgattggagagacttcttcccatacttgaaatggattccaaataaaagttttgaagcaagaatccagcaaaagcataaacgtagactcgcggtgatgaatgctctgattcaagatcgactgaagcagaatggttcagaatcggatgatgattgctatctcaacttcttgatgtcggaagcgaaaacactaaccaaggagcaaattgctatcttggtttgggagacgattatcgagacagctgacactactttggttacaactgaatgggccatctatgagctcgctaagcatccaagtgtccaagatcgtctgtgcaaagaaatccaaaatgtctgcggaggagaaaagttcaaagaagagcaattgtctcaagttccttatctcaatggagtctttcatgaaacgcttaggaaatacagtcctgctcctctagttcccattcgctacgcccacgaggatacgcaaatcggaggctatcatgtccctgcaggaagtgagattgcaataaacatatatggatgcaacatggataagaagcgttgggagagaccagaggactggtggccggagcggtttcttgatgatggcaaatatgaaacgtcagatcttcacaagacaatggcgtttggagcgggaaagagggtttgtgctggtgctcttcaagcatctctcatggcaggcattgctattggaagattagtgcaagaattcgagtggaagcttagagatggcgaagaagagaatgtggatacatatggcttgacctctcagaagctttatcctcttatggctattatcaatccaaggcgttcttaagacagaaatctcttctttcttttgttagtttttaaccttgtatcaacttttatttgtaacaaatgctgttttgtagtactatttatgttttactgtgttatattttactatcctctga

SEQ ID NO: 50493 - protein, 519 aa, Arabidopsis thaliana
  peptide (1)..(519): Ceres Seq. ID no. 12602002
  misc_feature (11)..(519): Homolog of NCBI NO: 3342253 NR Description: GA3 [Arabidopsis thaliana]
  misc_feature (11)..(519): Homolog of NCBI NO: 15239520 NR Description: cytochrome P450 GA3
TFSHQNHIPSMAFFSMISILLGFVISSFIFIFFFKKLLSFSRKNMSEVSTLPSVPVVPGFPVIGNLLQLKEKKPHKTFTRWSEIYGPIYSIKMGSSSLIVLNSTETAKEAMVTRFSSISTRKLSNALTVLTCDKSMVATSDYDDFHKLVKRCLLNGLLGANAQKRKRHYRDALIENVSSKLHAHPRDHPQEPVNFRAIFEHELFGVALKQAFGKDVESIYVKELGVTLSKDEIFKVLVHDMMEGAIDVDWRDFFPYLKWIPNKSFEARIQQKHKRRLAVMNALIQDRLKQNGSESDDDCYLNFLMSEAKTLTKEQIAILVWETIIETADTTLVTTEWAIYELAKHPSVQDRLCKEIQNVCGGEKFKEEQLSQVPYLNGVFHETLRKYSPAPLVPIRYAHEDTQIGGYHVPAGSEIAINIYGCNMDKKRWERPEDWWPERFLDDGKYETSDLHKTMAFGAGKRVCAGALQASLMAGIAIGRLVQEFEWKLRDGEEENVDTYGLTSQKLYPLMAIINPRRS

SEQ ID NO: 50494 - protein, 509 aa, Arabidopsis thaliana
  peptide (1)..(509): Ceres Seq. ID no. 12602003
  misc_feature (1)..(509): Homolog of NCBI NO: 3342253 NR Description: GA3 [Arabidopsis thaliana]
  misc_feature (1)..(509): Homolog of NCBI NO: 15239520 NR Description: cytochrome P450 GA3
MAFFSMISILLGFVISSFIFIFFFKKLLSFSRKNMSEVSTLPSVPVVPGFPVIGNLLQLKEKKPHKTFTRWSEIYGPIYSIKMGSSSLIVLNSTETAKEAMVTRFSSISTRKLSNALTVLTCDKSMVATSDYDDFHKLVKRCLLNGLLGANAQKRKRHYRDALIENVSSKLHAHPRDHPQEPVNFRAIFEHELFGVALKQAFGKDVESIYVKELGVTLSKDEIFKVLVHDMMEGAIDVDWRDFFPYLKWIPNKSFEARIQQKHKRRLAVMNALIQDRLKQNGSESDDDCYLNFLMSEAKTLTKEQIAILVWETIIETADTTLVTTEWAIYELAKHPSVQDRLCKEIQNVCGGEKFKEEQLSQVPYLNGVFHETLRKYSPAPLVPIRYAHEDTQIGGYHVPAGSEIAINIYGCNMDKKRWERPEDWWPERFLDDGKYETSDLHKTMAFGAGKRVCAGALQASLMAGIAIGRLVQEFEWKLRDGEEENVDTYGLTSQKLYPLMAIINPRRS

SEQ ID NO: 50495 - protein, 504 aa, Arabidopsis thaliana
  peptide (1)..(504): Ceres Seq. ID no. 12602004
  misc_feature (1)..(504): Homolog of NCBI NO: 3342253 NR Description: GA3 [Arabidopsis thaliana]
  misc_feature (1)..(504): Homolog of NCBI NO: 15239520 NR Description: cytochrome P450 GA3
MISILLGFVISSFIFIFFFKKLLSFSRKNMSEVSTLPSVPVVPGFPVIGNLLQLKEKKPHKTFTRWSEIYGPIYSIKMGSSSLIVLNSTETAKEAMVTRFSSISTRKLSNALTVLTCDKSMVATSDYDDFHKLVKRCLLNGLLGANAQKRKRHYRDALIENVSSKLHAHPRDHPQEPVNFRAIFEHELFGVALKQAFGKDVESIYVKELGVTLSKDEIFKVLVHDMMEGAIDVDWRDFFPYLKWIPNKSFEARIQQKHKRRLAVMNALIQDRLKQNGSESDDDCYLNFLMSEAKTLTKEQIAILVWETIIETADTTLVTTEWAIYELAKHPSVQDRLCKEIQNVCGGEKFKEEQLSQVPYLNGVFHETLRKYSPAPLVPIRYAHEDTQIGGYHVPAGSEIAINIYGCNMDKKRWERPEDWWPERFLDDGKYETSDLHKTMAFGAGKRVCAGALQASLMAGIAIGRLVQEFEWKLRDGEEENVDTYGLTSQKLYPLMAIINPRRS

SEQ ID NO: 50496 - DNA, 3416 bp, Arabidopsis thaliana
  misc_feature (1)..(3416): Ceres Seq. ID no. 13578878
  misc_feature: MA Experiment ID: 20000355 Result: Up-regulated in Transcription
  misc_feature: MA Experiment 20000355 PARAMETER Experiment Name: At_Siliques_Sub_P Parameter: Age (day) Value: 21
  misc_feature: MA Experiment 20000355 PARAMETER Experiment Name: At_Siliques_Sub_P Parameter: Organism Value: A. thaliana
  misc_feature: MA Experiment 20000355 PARAMETER Experiment Name: At_Siliques_Sub_P Parameter: Plant Line Value: WS
  misc_feature: MA Experiment 20000355 PARAMETER Experiment Name: At_Siliques_Sub_P Parameter: Tissue Value: Less Than 5mm Siliques vs. Whole Plant
cgtcttcacttaccttctctctacactcacaccatctcacaaccctaatctctcccacacaagagagatagagagaaacaatgaaactttttcttctccttctttttcttctccacatttctcataccttcaccgcaagccgaccaatctccgagttccgtgctctcctctcactcaaaacctctctcaccggcgccggagatgacaaaaactcgcctctctcttcctggaaagtctcaacaagcttctgtacatggattggtgtcacgtgcgatgtatctcgccgtcacgtgacttctcttgatctctccggtctcaacctctccggtactctttccccagatgtttctcatttacgtcttcttcagaatctatcactcgctgaaaatctaatctccggtccgattccgccggaaatctcgagcctttccggtcttcgtcacttaaatctctcgaacaatgtcttcaacggttcgtttcccgatgagatttcttctggattggtgaatctccgagttcttgatgtctacaacaacaatctaaccggagatttaccggtttccgtcaccaatctgactcagctccggcaccttcacctcggtggtaactacttcgctggaaagatcccgccttcgtacggaagctggccagttattgagtatctagcggtttccggcaacgagcttgtcgggaaaatccctccagagatcggaaacctaacgactctccgggagctttacatcggctactacaacgctttcgaagacggtcttcctccagagatcggaaatctatcggagctagtcagattcgacggagctaattgcggattaaccggtgagattccgccggagattgggaagcttcagaaactcgatacgcttttcttgcaagtgaatgtcttctccggtccattaacttgggagctaggaacgctatcgagtttaaaatcaatggatttgtctaacaacatgttcaccggagagattccagcgagtttcgcagagttgaagaatctcacgcttttgaatctcttccgtaacaaacttcacggcgagataccggagttcatcggagatttgccggagcttgaagtgttacagctttgggagaacaatttcaccggaagcatcccgcagaaattaggagaaaacggtaaactaaatctcgtcgatctctcttccaataagctgaccggaactttaccgccgaacatgtgctccggtaacaagttagaaactttaatcactcttggaaactttctctttggttcaatccctgattctcttggtaaatgtgagtctttgacccggatccgaatgggtgagaatttcctgaacgggtcaatcccaaaaggactattcggattacccaaattaactcaagtggagctccaagataattatctctccggagagttaccagtcgccggaggtgtctctgttaatcttggtcagatcagtttatcaaacaaccagctctcaggtccattacctccggcgatcgggaacttcaccggcgttcagaaacttcttcttgatggaaacaagttccaaggtcctattccttcagaggtagggaagcttcagcagctctcgaagattgatttcagccacaacttgttctccggtcgaatcgcgccggagattagtcgttgcaagctcttaacgtttgttgatctgagcagaaacgagctctccggtgaaatcccaaatgagatcactgctatgaagatattgaattacttgaacctgtcgagaaaccatctggttggatcaatccctggttcaatctcgtcaatgcagagcttaacatctcttgatttctcttacaacaacctctccggtttagttccgggaacaggacaattcagttacttcaactacacatcgttcttgggtaatcctgatctctgtggtccttatcttggtccttgtaaagacggtgttgctaaaggaggtcaccagagtcatagtaaaggacctttatcagcttctatgaagttattgcttgttcttggactacttgtttgttcgattgcgttcgcggtagtagccataatcaaagctagatcattgaaaaaggcgagtgagtcacgggcttggaggttaacagctttccagagactagacttcacgtgtgacgatgtcttggattctctcaaagaagacaacattataggcaaaggaggagctggtattgtctataaaggcgtaatgcctaatggtgatctagtcgcggttaaaagactcgctgcaatgtctcgtggatcttcccatgatcacggcttcaacgcagagattcaaaccttaggaaggataagacacagacacatagtgaggcttctcggattttgctcaaaccacgagacgaatctacttgtctatgagtacatgcctaatggtagtctcggtgaggtgcttcacggtaagaaaggaggacacttgcattgggacacacgttacaagattgctcttgaagctgctaaaggactctgttaccttcatcacgattgttctccattgatcgttcacagagatgtcaaatcaaacaacatcctccttgattcaaactttgaagctcatgttgctgactttggtctcgctaaattccttcaagattccggtacttctgaatgtatgtctgcaatcgctggctcttacggctacatagctccagagtatgcgtatacgttgaaggtagatgagaagagcgatgtgtatagtttcggtgtggttcttttggaactcgtcaccggaagaaaacctgtcggagaatttggagacggtgtcgatatagtgcaatgggttcgtaaaatgactgattcgaacaaggattcggttctgaaagtattggatccgagactttcttcgattccgattcatgaagtgacgcacgtcttctatgtagcgatgctctgtgtagaagaacaagctgttgagaggccgactatgagagaagttgttcagattctcactgagatcccgaagttgccaccgtcgaaggatcagccgatgacggaatcagcgccggagagtgagctttcgccgaagtctggtgttcaaagtccgccggatctactcaatctatgagagttttctgattcacggcggttaatttagggtaccggtataaggggtaaatttgtcttttcataaatgttattagcgatgagatttggttgttaatttactttaatccctcttagtacggtttgtgctttggtccggtttagtaggtttttttttgaaagaaggttgtttaaactctttttaagtgtgtttcattttccttttttatgtttttaatcggtattcggctttatttagtttgtaatttgtgttaatgaaaatgtacagttttttttttttgaaggaatttcaaaatatcttgaaaagagtgaaatgtgtaatgtg

SEQ ID NO: 50497 - protein, 1003 aa, Arabidopsis thaliana
  peptide (1)..(1003): Ceres Seq. ID no. 13578879
  misc_feature (694)..(896): Pfam Name: Protein kinase domain Pfam Description: Protein kinase domain
  misc_feature (73)..(965): Homolog of NCBI NO: 15528705 NR Description: putative receptor protein kinase
  misc_feature (69)..(968): Homolog of NCBI NO: 29119651 NR Description: LRR receptor-like kinase 1 [Arabidopsis thaliana]
  misc_feature (62)..(968): Homolog of NCBI NO: 12054894 NR Description: receptor protein kinase [Pinus sylvestris]
  misc_feature (69)..(968): Homolog of NCBI NO: 15229457 NR Description: leucine-rich repeat transmembrane protein kinase,
  misc_feature (74)..(975): Homolog of NCBI NO: 25403209 NR Description: probable Protein kinase [imported] - Arabidopsis
  misc_feature (1)..(970): Homolog of NCBI NO: 24940244 NR Description: serine-threonine protein kinase [Pisum sativum]
  misc_feature (1)..(970): Homolog of NCBI NO: 25287710 NR Description: protein T4O12.5 [imported] - Arabidopsis thaliana
  misc_feature (1)..(970): Homolog of NCBI NO: 15222877 NR Description: CLAVATA1 receptor kinase (CLV1) [Arabidopsis
  misc_feature (2)..(967): Homolog of NCBI NO: 15235366 NR Description: leucine-rich repeat transmembrane protein kinase,
  misc_feature (5)..(889): Homolog of NCBI NO: 8132685 NR Description: LRK1 protein [Oryza sativa]
MKLFLLLLFLLHISHTFTASRPISEFRALLSLKTSLTGAGDDKNSPLSSWKVSTSFCTWIGVTCDVSRRHVTSLDLSGLNLSGTLSPDVSHLRLLQNLSLAENLISGPIPPEISSLSGLRHLNLSNNVFNGSFPDEISSGLVNLRVLDVYNNNLTGDLPVSVTNLTQLRHLHLGGNYFAGKIPPSYGSWPVIEYLAVSGNELVGKIPPEIGNLTTLRELYIGYYNAFEDGLPPEIGNLSELVRFDGANCGLTGEIPPEIGKLQKLDTLFLQVNVFSGPLTWELGTLSSLKSMDLSNNMFTGEIPASFAELKNLTLLNLFRNKLHGEIPEFIGDLPELEVLQLWENNFTGSIPQKLGENGKLNLVDLSSNKLTGTLPPNMCSGNKLETLITLGNFLFGSIPDSLGKCESLTRIRMGENFLNGSIPKGLFGLPKLTQVELQDNYLSGELPVAGGVSVNLGQISLSNNQLSGPLPPAIGNFTGVQKLLLDGNKFQGPIPSEVGKLQQLSKIDFSHNLFSGRIAPEISRCKLLTFVDLSRNELSGEIPNEITAMKILNYLNLSRNHLVGSIPGSISSMQSLTSLDFSYNNLSGLVPGTGQFSYFNYTSFLGNPDLCGPYLGPCKDGVAKGGHQSHSKGPLSASMKLLLVLGLLVCSIAFAVVAIIKARSLKKASESRAWRLTAFQRLDFTCDDVLDSLKEDNIIGKGGAGIVYKGVMPNGDLVAVKRLAAMSRGSSHDHGFNAEIQTLGRIRHRHIVRLLGFCSNHETNLLVYEYMPNGSLGEVLHGKKGGHLHWDTRYKIALEAAKGLCYLHHDCSPLIVHRDVKSNNILLDSNFEAHVADFGLAKFLQDSGTSECMSAIAGSYGYIAPEYAYTLKVDEKSDVYSFGVVLLELVTGRKPVGEFGDGVDIVQWVRKMTDSNKDSVLKVLDPRLSSIPIHEVTHVFYVAMLCVEEQAVERPTMREVVQILTEIPKLPPSKDQPMTESAPESELSPKSGVQSPPDLLNL

SEQ ID NO: 50498 - protein, 712 aa, Arabidopsis thaliana
  peptide (1)..(712): Ceres Seq. ID no. 13578880
  misc_feature (403)..(605): Pfam Name: Protein kinase domain Pfam Description: Protein kinase domain
  misc_feature (1)..(674): Homolog of NCBI NO: 15528705 NR Description: putative receptor protein kinase
  misc_feature (1)..(677): Homolog of NCBI NO: 29119651 NR Description: LRR receptor-like kinase 1 [Arabidopsis thaliana]
  misc_feature (1)..(677): Homolog of NCBI NO: 12054894 NR Description: receptor protein kinase [Pinus sylvestris]
  misc_feature (1)..(677): Homolog of NCBI NO: 15229457 NR Description: leucine-rich repeat transmembrane protein kinase,
  misc_feature (1)..(684): Homolog of NCBI NO: 25403209 NR Description: probable Protein kinase [imported] - Arabidopsis
  misc_feature (1)..(679): Homolog of NCBI NO: 24940244 NR Description: serine-threonine protein kinase [Pisum sativum]
  misc_feature (1)..(679): Homolog of NCBI NO: 25287710 NR Description: protein T4O12.5 [imported] - Arabidopsis thaliana
  misc_feature (1)..(679): Homolog of NCBI NO: 15222877 NR Description: CLAVATA1 receptor kinase (CLV1) [Arabidopsis
  misc_feature (1)..(676): Homolog of NCBI NO: 15235366 NR Description: leucine-rich repeat transmembrane protein kinase,
  misc_feature (1)..(598): Homolog of NCBI NO: 8132685 NR Description: LRK1 protein [Oryza sativa]
MDLSNNMFTGEIPASFAELKNLTLLNLFRNKLHGEIPEFIGDLPELEVLQLWENNFTGSIPQKLGENGKLNLVDLSSNKLTGTLPPNMCSGNKLETLITLGNFLFGSIPDSLGKCESLTRIRMGENFLNGSIPKGLFGLPKLTQVELQDNYLSGELPVAGGVSVNLGQISLSNNQLSGPLPPAIGNFTGVQKLLLDGNKFQGPIPSEVGKLQQLSKIDFSHNLFSGRIAPEISRCKLLTFVDLSRNELSGEIPNEITAMKILNYLNLSRNHLVGSIPGSISSMQSLTSLDFSYNNLSGLVPGTGQFSYFNYTSFLGNPDLCGPYLGPCKDGVAKGGHQSHSKGPLSASMKLLLVLGLLVCSIAFAVVAIIKARSLKKASESRAWRLTAFQRLDFTCDDVLDSLKEDNIIGKGGAGIVYKGVMPNGDLVAVKRLAAMSRGSSHDHGFNAEIQTLGRIRHRHIVRLLGFCSNHETNLLVYEYMPNGSLGEVLHGKKGGHLHWDTRYKIALEAAKGLCYLHHDCSPLIVHRDVKSNNILLDSNFEAHVADFGLAKFLQDSGTSECMSAIAGSYGYIAPEYAYTLKVDEKSDVYSFGVVLLELVTGRKPVGEFGDGVDIVQWVRKMTDSNKDSVLKVLDPRLSSIPIHEVTHVFYVAMLCVEEQAVERPTMREVVQILTEIPKLPPSKDQPMTESAPESELSPKSGVQSPPDLLNL

SEQ ID NO: 50499 - protein, 706 aa, Arabidopsis thaliana
  peptide (1)..(706): Ceres Seq. ID no. 13578881
  misc_feature (397)..(599): Pfam Name: Protein kinase domain Pfam Description: Protein kinase domain
  misc_feature (1)..(668): Homolog of NCBI NO: 15528705 NR Description: putative receptor protein kinase
  misc_feature (1)..(671): Homolog of NCBI NO: 29119651 NR Description: LRR receptor-like kinase 1 [Arabidopsis thaliana]
  misc_feature (1)..(671): Homolog of NCBI NO: 12054894 NR Description: receptor protein kinase [Pinus sylvestris]
  misc_feature (1)..(671): Homolog of NCBI NO: 15229457 NR Description: leucine-rich repeat transmembrane protein kinase,
  misc_feature (1)..(678): Homolog of NCBI NO: 25403209 NR Description: probable Protein kinase [imported] - Arabidopsis
  misc_feature (1)..(673): Homolog of NCBI NO: 24940244 NR Description: serine-threonine protein kinase [Pisum sativum]
  misc_feature (1)..(673): Homolog of NCBI NO: 25287710 NR Description: protein T4O12.5 [imported] - Arabidopsis thaliana
  misc_feature (1)..(673): Homolog of NCBI NO: 15222877 NR Description: CLAVATA1 receptor kinase (CLV1) [Arabidopsis
  misc_feature (1)..(670): Homolog of NCBI NO: 15235366 NR Description: leucine-rich repeat transmembrane protein kinase,
  misc_feature (1)..(592): Homolog of NCBI NO: 8132685 NR Description: LRK1 protein [Oryza sativa]
MFTGEIPASFAELKNLTLLNLFRNKLHGEIPEFIGDLPELEVLQLWENNFTGSIPQKLGENGKLNLVDLSSNKLTGTLPPNMCSGNKLETLITLGNFLFGSIPDSLGKCESLTRIRMGENFLNGSIPKGLFGLPKLTQVELQDNYLSGELPVAGGVSVNLGQISLSNNQLSGPLPPAIGNFTGVQKLLLDGNKFQGPIPSEVGKLQQLSKIDFSHNLFSGRIAPEISRCKLLTFVDLSRNELSGEIPNEITAMKILNYLNLSRNHLVGSIPGSISSMQSLTSLDFSYNNLSGLVPGTGQFSYFNYTSFLGNPDLCGPYLGPCKDGVAKGGHQSHSKGPLSASMKLLLVLGLLVCSIAFAVVAIIKARSLKKASESRAWRLTAFQRLDFTCDDVLDSLKEDNIIGKGGAGIVYKGVMPNGDLVAVKRLAAMSRGSSHDHGFNAEIQTLGRIRHRHIVRLLGFCSNHETNLLVYEYMPNGSLGEVLHGKKGGHLHWDTRYKIALEAAKGLCYLHHDCSPLIVHRDVKSNNILLDSNFEAHVADFGLAKFLQDSGTSECMSAIAGSYGYIAPEYAYTLKVDEKSDVYSFGVVLLELVTGRKPVGEFGDGVDIVQWVRKMTDSNKDSVLKVLDPRLSSIPIHEVTHVFYVAMLCVEEQAVERPTMREVVQILTEIPKLPPSKDQPMTESAPESELSPKSGVQSPPDLLNL

SEQ ID NO: 50500 - DNA, 1444 bp, Arabidopsis thaliana; identical to SEQ ID NO: 50085
  misc_feature (1)..(1444): Ceres Seq. ID no. 13592512
  misc_feature: MA Experiment ID: 20000227 Result: Up-regulated in Transcription
  misc_feature: MA Experiment 20000227 PARAMETER Experiment Name: At_Root-Tips-vs-Tops_P Parameter: Tissue Value: Root Tips vs. Root Tops
  misc_feature: MA Experiment ID: 20000437 Result: Down-regulated in Transcription
  misc_feature: MA Experiment 20000437 PARAMETER Experiment Name: At_Drought_P Parameter: Age (day) Value: 8
  misc_feature: MA Experiment 20000437 PARAMETER Experiment Name: At_Drought_P Parameter: Organism Value: A. thaliana
  misc_feature: MA Experiment 20000437 PARAMETER Experiment Name: At_Drought_P Parameter: Plant Line Value: WS
  misc_feature: MA Experiment 20000437 PARAMETER Experiment Name: At_Drought_P Parameter: Timepoint (hr) Value: 24
  misc_feature: MA Experiment 20000437 PARAMETER Experiment Name: At_Drought_P Parameter: Tissue Value: Whole Plant
  misc_feature: MA Experiment 20000437 PARAMETER Experiment Name: At_Drought_P Parameter: Treatment Value: Drought vs. No Drought
  misc_feature: MA Experiment ID: 20000495 Result: Down-regulated in Transcription
  misc_feature: MA Experiment 20000495 PARAMETER Experiment Name: At_Guard_Cells_P Parameter: Harvest Date Value: 8/2/2002
  misc_feature: MA Experiment 20000495 PARAMETER Experiment Name: At_Guard_Cells_P Parameter: Organism Value: A. thaliana
  misc_feature: MA Experiment 20000495 PARAMETER Experiment Name: At_Guard_Cells_P Parameter: Tissue Value: Guard Cells vs. Leaves
  misc_feature: MA Experiment ID: 20001248 Result: Down-regulated in Transcription
  misc_feature: MA Experiment 20001248 PARAMETER Experiment Name: At_Far-red-induction_P Parameter: Age (day) Value: 7
  misc_feature: MA Experiment 20001248 PARAMETER Experiment Name: At_Far-red-induction_P Parameter: Light Value: Far-red vs. White
  misc_feature: MA Experiment 20001248 PARAMETER Experiment Name: At_Far-red-induction_P Parameter: Organism Value: A. thaliana
  misc_feature: MA Experiment 20001248 PARAMETER Experiment Name: At_Far-red-induction_P Parameter: Plant Line Value: Columbia
  misc_feature: MA Experiment 20001248 PARAMETER Experiment Name: At_Far-red-induction_P Parameter: Timepoint (hr) Value: 4
  misc_feature: MA Experiment 20001248 PARAMETER Experiment Name: At_Far-red-induction_P Parameter: Tissue Value: Whole Plant
  misc_feature: MA Experiment ID: 20001450 Result: Down-regulated in Transcription
  misc_feature: MA Experiment 20001450 PARAMETER Experiment Name: At_Far-red-induction_P Parameter: Age (day) Value: 7
  misc_feature: MA Experiment 20001450 PARAMETER Experiment Name: At_Far-red-induction_P Parameter: Light Value: Far-red vs. White
  misc_feature: MA Experiment 20001450 PARAMETER Experiment Name: At_Far-red-induction_P Parameter: Organism Value: A. thaliana
  misc_feature: MA Experiment 20001450 PARAMETER Experiment Name: At_Far-red-induction_P Parameter: Plant Line Value: Columbia
  misc_feature: MA Experiment 20001450 PARAMETER Experiment Name: At_Far-red-induction_P Parameter: Timepoint (hr) Value: 8
  misc_feature: MA Experiment 20001450 PARAMETER Experiment Name: At_Far-red-induction_P Parameter: Tissue Value: Whole Plant
  misc_feature: MA Experiment ID: 20001451 Result: Down-regulated in Transcription
  misc_feature: MA Experiment 20001451 PARAMETER Experiment Name: At_Far-red-induction_P Parameter: Age (day) Value: 7
  misc_feature: MA Experiment 20001451 PARAMETER Experiment Name: At_Far-red-induction_P Parameter: Light Value: Far-red vs. White
  misc_feature: MA Experiment 20001451 PARAMETER Experiment Name: At_Far-red-induction_P Parameter: Organism Value: A. thaliana
  misc_feature: MA Experiment 20001451 PARAMETER Experiment Name: At_Far-red-induction_P Parameter: Plant Line Value: Columbia
  misc_feature: MA Experiment 20001451 PARAMETER Experiment Name: At_Far-red-induction_P Parameter: Timepoint (hr) Value: 24
  misc_feature: MA Experiment 20001451 PARAMETER Experiment Name: At_Far-red-induction_P Parameter: Tissue Value: Whole Plant

SEQ ID NO: 50501 - protein, 342 aa, Arabidopsis thaliana; identical to SEQ ID NO: 50086
  peptide (1)..(342): Ceres Seq. ID no. 13592513
  misc_feature (97)..(342): Pfam Name: Domain of unknown function DUF28 Pfam Description: Domain of unknown function DUF28
  misc_feature (97)..(342): Pfam Name: Domain of unknown function DUF28 Pfam Description: Domain of unknown function DUF28
  misc_feature (100)..(338): Homolog of NCBI NO: 19704982 NR Description: Hypothetical cytosolic protein
  misc_feature (100)..(338): Homolog of NCBI NO: 23020845 NR Description: hypothetical protein [Clostridium thermocellum
  misc_feature (105)..(338): Homolog of NCBI NO: 29839936 NR Description: conserved hypothetical protein TIGR01033
  misc_feature (105)..(338): Homolog of NCBI NO: 15605184 NR Description: YebC family [Chlamydia trachomatis]
  misc_feature (102)..(338): Homolog of NCBI NO: 18310936 NR Description: conserved hypothetical protein [Clostridium
  misc_feature (100)..(338): Homolog of NCBI NO: 19704982 NR Description: Hypothetical cytosolic protein
  misc_feature (105)..(338): Homolog of NCBI NO: 29839936 NR Description: conserved hypothetical protein TIGR01033
  misc_feature (102)..(338): Homolog of NCBI NO: 18310936 NR Description: conserved hypothetical protein [Clostridium
  misc_feature (12)..(342): Homolog of NCBI NO: 18400953 NR Description: expressed protein [Arabidopsis thaliana]
  misc_feature (12)..(342): Homolog of NCBI NO: 15810383 NR Description: unknown protein [Arabidopsis thaliana]
  misc_feature (12)..(342): Homolog of NCBI NO: 25407817 NR Description: hypothetical protein At2g25830 [imported] -
  misc_feature (105)..(338): Homolog of NCBI NO: 15618484 NR Description: YebC family hypothetical protein
  misc_feature (105)..(338): Homolog of NCBI NO: 15835357 NR Description: conserved hypothetical protein [Chlamydia
  misc_feature (105)..(338): Homolog of NCBI NO: 15605184 NR Description: YebC family [Chlamydia trachomatis]
  misc_feature (100)..(338): Homolog of NCBI NO: 23020845 NR Description: hypothetical protein [Clostridium thermocellum
  misc_feature (105)..(338): Homolog of NCBI NO: 15835357 NR Description: conserved hypothetical protein [Chlamydia
  misc_feature (105)..(338): Homolog of NCBI NO: 15618484 NR Description: YebC family hypothetical protein
  misc_feature (12)..(342): Homolog of NCBI NO: 25407817 NR Description: hypothetical protein At2g25830 [imported] -
  misc_feature (12)..(342): Homolog of NCBI NO: 15810383 NR Description: unknown protein [Arabidopsis thaliana]
  misc_feature (12)..(342): Homolog of NCBI NO: 18400953 NR Description: expressed protein [Arabidopsis thaliana]

SEQ ID NO: 50502 - protein, 331 aa, Arabidopsis thaliana; identical to SEQ ID NO: 50087
  peptide (1)..(331): Ceres Seq. ID no. 13592514
  misc_feature (86)..(331): Pfam Name: Domain of unknown function DUF28 Pfam Description: Domain of unknown function DUF28
  misc_feature (86)..(331): Pfam Name: Domain of unknown function DUF28 Pfam Description: Domain of unknown function DUF28
  misc_feature (89)..(327): Homolog of NCBI NO: 19704982 NR Description: Hypothetical cytosolic protein
  misc_feature (89)..(327): Homolog of NCBI NO: 23020845 NR Description: hypothetical protein [Clostridium thermocellum
  misc_feature (94)..(327): Homolog of NCBI NO: 29839936 NR Description: conserved hypothetical protein TIGR01033
  misc_feature (94)..(327): Homolog of NCBI NO: 15605184 NR Description: YebC family [Chlamydia trachomatis]
  misc_feature (91)..(327): Homolog of NCBI NO: 18310936 NR Description: conserved hypothetical protein [Clostridium
  misc_feature (89)..(327): Homolog of NCBI NO: 19704982 NR Description: Hypothetical cytosolic protein
  misc_feature (94)..(327): Homolog of NCBI NO: 29839936 NR Description: conserved hypothetical protein TIGR01033
  misc_feature (91)..(327): Homolog of NCBI NO: 18310936 NR Description: conserved hypothetical protein [Clostridium
  misc_feature (1)..(331): Homolog of NCBI NO: 18400953 NR Description: expressed protein [Arabidopsis thaliana]
  misc_feature (1)..(331): Homolog of NCBI NO: 15810383 NR Description: unknown protein [Arabidopsis thaliana]
  misc_feature (1)..(331): Homolog of NCBI NO: 25407817 NR Description: hypothetical protein At2g25830 [imported] -
  misc_feature (94)..(327): Homolog of NCBI NO: 15618484 NR Description: YebC family hypothetical protein
  misc_feature (94)..(327): Homolog of NCBI NO: 15835357 NR Description: conserved hypothetical protein [Chlamydia
  misc_feature (94)..(327): Homolog of NCBI NO: 15605184 NR Description: YebC family [Chlamydia trachomatis]
  misc_feature (89)..(327): Homolog of NCBI NO: 23020845 NR Description: hypothetical protein [Clostridium thermocellum
  misc_feature (94)..(327): Homolog of NCBI NO: 15835357 NR Description: conserved hypothetical protein [Chlamydia
  misc_feature (94)..(327): Homolog of NCBI NO: 15618484 NR Description: YebC family hypothetical protein
  misc_feature (1)..(331): Homolog of NCBI NO: 25407817 NR Description: hypothetical protein At2g25830 [imported] -
  misc_feature (1)..(331): Homolog of NCBI NO: 15810383 NR Description: unknown protein [Arabidopsis thaliana]
  misc_feature (1)..(331): Homolog of NCBI NO: 18400953 NR Description: expressed protein [Arabidopsis thaliana]

SEQ ID NO: 50503 - protein, 325 aa, Arabidopsis thaliana; identical to SEQ ID NO: 50088
  peptide (1)..(325): Ceres Seq. ID no. 13592515
  misc_feature (80)..(325): Pfam Name: Domain of unknown function DUF28 Pfam Description: Domain of unknown function DUF28
  misc_feature (80)..(325): Pfam Name: Domain of unknown function DUF28 Pfam Description: Domain of unknown function DUF28
  misc_feature (83)..(321): Homolog of NCBI NO: 19704982 NR Description: Hypothetical cytosolic protein
  misc_feature (83)..(321): Homolog of NCBI NO: 23020845 NR Description: hypothetical protein [Clostridium thermocellum
  misc_feature (88)..(321): Homolog of NCBI NO: 29839936 NR Description: conserved hypothetical protein TIGR01033
  misc_feature (88)..(321): Homolog of NCBI NO: 15605184 NR Description: YebC family [Chlamydia trachomatis]
  misc_feature (85)..(321): Homolog of NCBI NO: 18310936 NR Description: conserved hypothetical protein [Clostridium
  misc_feature (83)..(321): Homolog of NCBI NO: 19704982 NR Description: Hypothetical cytosolic protein
  misc_feature (88)..(321): Homolog of NCBI NO: 29839936 NR Description: conserved hypothetical protein TIGR01033
  misc_feature (85)..(321): Homolog of NCBI NO: 18310936 NR Description: conserved hypothetical protein [Clostridium
  misc_feature (1)..(325): Homolog of NCBI NO: 18400953 NR Description: expressed protein [Arabidopsis thaliana]
  misc_feature (1)..(325): Homolog of NCBI NO: 15810383 NR Description: unknown protein [Arabidopsis thaliana]
  misc_feature (1)..(325): Homolog of NCBI NO: 25407817 NR Description: hypothetical protein At2g25830 [imported] -
  misc_feature (88)..(321): Homolog of NCBI NO: 15618484 NR Description: YebC family hypothetical protein
  misc_feature (88)..(321): Homolog of NCBI NO: 15835357 NR Description: conserved hypothetical protein [Chlamydia
  misc_feature (88)..(321): Homolog of NCBI NO: 15605184 NR Description: YebC family [Chlamydia trachomatis]
  misc_feature (83)..(321): Homolog of NCBI NO: 23020845 NR Description: hypothetical protein [Clostridium thermocellum
  misc_feature (88)..(321): Homolog of NCBI NO: 15835357 NR Description: conserved hypothetical protein [Chlamydia
  misc_feature (88)..(321): Homolog of NCBI NO: 15618484 NR Description: YebC family hypothetical protein
  misc_feature (1)..(325): Homolog of NCBI NO: 25407817 NR Description: hypothetical protein At2g25830 [imported] -
  misc_feature (1)..(325): Homolog of NCBI NO: 15810383 NR Description: unknown protein [Arabidopsis thaliana]
  misc_feature (1)..(325): Homolog of NCBI NO: 18400953 NR Description: expressed protein [Arabidopsis thaliana]

SEQ ID NO: 50504 - DNA, 1843 bp, Arabidopsis thaliana
  misc_feature (1)..(1843): Ceres Seq. ID no. 12639038
  misc_feature: MA Experiment ID: 20000438 Result: Up-regulated in Transcription
  misc_feature: MA Experiment 20000438 PARAMETER Experiment Name: At_Shoots__P Parameter: Age (day) Value: 14
  misc_feature: MA Experiment 20000438 PARAMETER Experiment Name: At_Shoots__P Parameter: Tissue Value: Shoots vs. Whole Plant
gacgacggttctccgagagagagattttttaaaaatcaaattgcaacagaagagagataaaaggaagaaccctaatcgatttcgcgctctgattcgttctactttttccactgattaatctcaaaaaatggcgagtgagagttcgcaatcttcctcgccgtcgtcatctcaacctccgtcatctgtaccttctccgtcgccgggtaacaacgtcggcgatacgtttataggaagtttcatcagtctaatttctaagtacgagatccgttacgaaggcattctctaccatctcaacgttcaggactcgacgctaggtctaaaaaacgtaagatcatgtggaacggaggggaggaagaaagatgggccgcaaattccgccatgtgataaagtttacgattacattctttttcgtggaagtgacatcaaggatctccaagttaacccatctccatctgctcaatcaagacaagagattcaaagtgaacaagacgtcaatcagtcccctcactctaggccagctatgactatgagctctccgatttctggctatgatagcggttatggtttggggagaggatcacaatggatcaatacacctgctttgagtagtaaaccggttcctgtcacacaacattcatcagtccctttaagcttccagcctccttcagctaatgctggaagtttgacagaatcaccagtgagcttaattgattcaactcaaagtaatgctggttcctcgatgcccattccttcttttgtgcaaggtaacaaatttgcttccagtggtgtccctcttggtatgatgcagaagccagtttcatcctcctcgaccatacccaatggtccgcagattattgattatttttcttcaccaatcatggggttagtggatgattcatcacaggttgttactcgttcacctgacgtctcttccaatcaatcatactcttccaacccttctcctcttggtcaaacacaactccatactccacctggccttgcttcagtatcctctaacctttctccaccttctgaagcgcagctttctgctccaaatattcagaaaatttaccccagtgcaccccaggctattggtaaagttgtctatgaccctcagtctaatcatcctcaccgatctatacctcatgagttacctgctgtggcttctaattcagctcctgtgattcctggtccattgtcaaaatcgcctgagtcatttttcgatatggatccgtcactgcaatctaggcagcagatggtatataggggtcaagagatgtttgctgcaactaacccggcatcagcgaatgtgccatcacaaagttttgctcccagaaatcatgcaccattgctgcctcttccagtttcagctcatcagtctcggatccctagttctagcattgagtacactgaagaatttgattttgaagcaatgaatgagaagttcaagaagagtgaactatggggttatcttggaagaaataaccagaggaatcaaaatgattatggggaagaaactgcgattgagccaaacgcagaagggaagcctgcatataacaaggatgacttttttgacacaatctcgtgcaatcaacttgaccgtgtggcaagaagcggacaacagcacaaccagtttcccgaacacatgagacaagttcctgaggcatttggtaataattttcaaaggccacctccactacaaccaggtcagggtgcatatctcgctgcacaaaccaattacagaggcggataccataataacaacaacaacaactactactcaaactcgggttatggttactactctggtgggagaggccgaggcagaaacacacatttctga

SEQ ID NO: 50505 - protein, 571 aa, Arabidopsis thaliana
  peptide (1)..(571): Ceres Seq. ID no. 12639039
  misc_feature (1)..(571): Homolog of NCBI NO: 15242378 NR Description: unknown protein; protein id: At5g45330.1
MASESSQSSSPSSSQPPSSVPSPSPGNNVGDTFIGSFISLISKYEIRYEGILYHLNVQDSTLGLKNVRSCGTEGRKKDGPQIPPCDKVYDYILFRGSDIKDLQVNPSPSAQSRQEIQSEQDVNQSPHSRPAMTMSSPISGYDSGYGLGRGSQWINTPALSSKPVPVTQHSSVPLSFQPPSANAGSLTESPVSLIDSTQSNAGSSMPIPSFVQGNKFASSGVPLGMMQKPVSSSSTIPNGPQIIDYFSSPIMGLVDDSSQVVTRSPDVSSNQSYSSNPSPLGQTQLHTPPGLASVSSNLSPPSEAQLSAPNIQKIYPSAPQAIGKVVYDPQSNHPHRSIPHELPAVASNSAPVIPGPLSKSPESFFDMDPSLQSRQQMVYRGQEMFAATNPASANVPSQSFAPRNHAPLLPLPVSAHQSRIPSSSIEYTEEFDFEAMNEKFKKSELWGYLGRNNQRNQNDYGEETAIEPNAEGKPAYNKDDFFDTISCNQLDRVARSGQQHNQFPEHMRQVPEAFGNNFQRPPPLQPGQGAYLAAQTNYRGGYHNNNNNNYYSNSGYGYYSGGRGRGRNTHF

SEQ ID NO: 50506 - protein, 440 aa, Arabidopsis thaliana
  peptide (1)..(440): Ceres Seq. ID no. 12639040
  misc_feature (1)..(440): Homolog of NCBI NO: 15242378 NR Description: unknown protein; protein id: At5g45330.1
MTMSSPISGYDSGYGLGRGSQWINTPALSSKPVPVTQHSSVPLSFQPPSANAGSLTESPVSLIDSTQSNAGSSMPIPSFVQGNKFASSGVPLGMMQKPVSSSSTIPNGPQIIDYFSSPIMGLVDDSSQVVTRSPDVSSNQSYSSNPSPLGQTQLHTPPGLASVSSNLSPPSEAQLSAPNIQKIYPSAPQAIGKVVYDPQSNHPHRSIPHELPAVASNSAPVIPGPLSKSPESFFDMDPSLQSRQQMVYRGQEMFAATNPASANVPSQSFAPRNHAPLLPLPVSAHQSRIPSSSIEYTEEFDFEAMNEKFKKSELWGYLGRNNQRNQNDYGEETAIEPNAEGKPAYNKDDFFDTISCNQLDRVARSGQQHNQFPEHMRQVPEAFGNNFQRPPPLQPGQGAYLAAQTNYRGGYHNNNNNNYYSNSGYGYYSGGRGRGRNTHF

SEQ ID NO: 50507 - protein, 438 aa, Arabidopsis thaliana
  peptide (1)..(438): Ceres Seq. ID no. 12639041
  misc_feature (1)..(438): Homolog of NCBI NO: 15242378 NR Description: unknown protein; protein id: At5g45330.1
MSSPISGYDSGYGLGRGSQWINTPALSSKPVPVTQHSSVPLSFQPPSANAGSLTESPVSLIDSTQSNAGSSMPIPSFVQGNKFASSGVPLGMMQKPVSSSSTIPNGPQIIDYFSSPIMGLVDDSSQVVTRSPDVSSNQSYSSNPSPLGQTQLHTPPGLASVSSNLSPPSEAQLSAPNIQKIYPSAPQAIGKVVYDPQSNHPHRSIPHELPAVASNSAPVIPGPLSKSPESFFDMDPSLQSRQQMVYRGQEMFAATNPASANVPSQSFAPRNHAPLLPLPVSAHQSRIPSSSIEYTEEFDFEAMNEKFKKSELWGYLGRNNQRNQNDYGEETAIEPNAEGKPAYNKDDFFDTISCNQLDRVARSGQQHNQFPEHMRQVPEAFGNNFQRPPPLQPGQGAYLAAQTNYRGGYHNNNNNNYYSNSGYGYYSGGRGRGRNTHF

SEQ ID NO: 50508 - DNA, 1461 bp, Arabidopsis thaliana
  misc_feature (1)..(1461): Ceres Seq. ID no. 13647758
  misc_feature: MA Experiment ID: 20000227 Result: Down-regulated in Transcription
  misc_feature: MA Experiment 20000227 PARAMETER Experiment Name: At_Root-Tips-vs-Tops_P Parameter: Tissue Value: Root Tips vs. Root Tops
  misc_feature: MA Experiment ID: 20000436 Result: Down-regulated in Transcription
  misc_feature: MA Experiment 20000436 PARAMETER Experiment Name: At_Drought_P Parameter: Age (day) Value: 7
  misc_feature: MA Experiment 20000436 PARAMETER Experiment Name: At_Drought_P Parameter: Organism Value: A. thaliana
  misc_feature: MA Experiment 20000436 PARAMETER Experiment Name: At_Drought_P Parameter: Plant Line Value: WS
  misc_feature: MA Experiment 20000436 PARAMETER Experiment Name: At_Drought_P Parameter: Timepoint (hr) Value: 12
  misc_feature: MA Experiment 20000436 PARAMETER Experiment Name: At_Drought_P Parameter: Tissue Value: Whole Plant
  misc_feature: MA Experiment 20000436 PARAMETER Experiment Name: At_Drought_P Parameter: Treatment Value: Drought vs. No Drought
  misc_feature: MA Experiment ID: 20000495 Result: Down-regulated in Transcription
  misc_feature: MA Experiment 20000495 PARAMETER Experiment Name: At_Guard_Cells_P Parameter: Harvest Date Value: 8/2/2002
  misc_feature: MA Experiment 20000495 PARAMETER Experiment Name: At_Guard_Cells_P Parameter: Organism Value: A. thaliana
  misc_feature: MA Experiment 20000495 PARAMETER Experiment Name: At_Guard_Cells_P Parameter: Tissue Value: Guard Cells vs. Leaves
  misc_feature: MA Experiment ID: 20000496 Result: Down-regulated in Transcription
  misc_feature: MA Experiment 20000496 PARAMETER Experiment Name: At_Guard_Cells_P Parameter: Harvest Date Value: 7/19/2002
  misc_feature: MA Experiment 20000496 PARAMETER Experiment Name: At_Guard_Cells_P Parameter: Organism Value: Canola
  misc_feature: MA Experiment 20000496 PARAMETER Experiment Name: At_Guard_Cells_P Parameter: Tissue Value: Guard Cells vs. Leaves
  misc_feature: MA Experiment ID: 20001248 Result: Up-regulated in Transcription
  misc_feature: MA Experiment 20001248 PARAMETER Experiment Name: At_Far-red-induction_P Parameter: Age (day) Value: 7
  misc_feature: MA Experiment 20001248 PARAMETER Experiment Name: At_Far-red-induction_P Parameter: Light Value: Far-red vs. White
  misc_feature: MA Experiment 20001248 PARAMETER Experiment Name: At_Far-red-induction_P Parameter: Organism Value: A. thaliana
  misc_feature: MA Experiment 20001248 PARAMETER Experiment Name: At_Far-red-induction_P Parameter: Plant Line Value: Columbia
  misc_feature: MA Experiment 20001248 PARAMETER Experiment Name: At_Far-red-induction_P Parameter: Timepoint (hr) Value: 4
  misc_feature: MA Experiment 20001248 PARAMETER Experiment Name: At_Far-red-induction_P Parameter: Tissue Value: Whole Plant
  misc_feature: MA Experiment ID: 20001450 Result: Up-regulated in Transcription
  misc_feature: MA Experiment 20001450 PARAMETER Experiment Name: At_Far-red-induction_P Parameter: Age (day) Value: 7
  misc_feature: MA Experiment 20001450 PARAMETER Experiment Name: At_Far-red-induction_P Parameter: Light Value: Far-red vs. White
  misc_feature: MA Experiment 20001450 PARAMETER Experiment Name: At_Far-red-induction_P Parameter: Organism Value: A. thaliana
  misc_feature: MA Experiment 20001450 PARAMETER Experiment Name: At_Far-red-induction_P Parameter: Plant Line Value: Columbia
  misc_feature: MA Experiment 20001450 PARAMETER Experiment Name: At_Far-red-induction_P Parameter: Timepoint (hr) Value: 8
  misc_feature: MA Experiment 20001450 PARAMETER Experiment Name: At_Far-red-induction_P Parameter: Tissue Value: Whole Plant
  misc_feature: MA Experiment ID: 20001555 Result: Down-regulated in Transcription
  misc_feature: MA Experiment 20001555 PARAMETER Experiment Name: At_Drought_Soil_Dry_P Parameter: Age (day) Value: 24
  misc_feature: MA Experiment 20001555 PARAMETER Experiment Name: At_Drought_Soil_Dry_P Parameter: Organism Value: A. thaliana
  misc_feature: MA Experiment 20001555 PARAMETER Experiment Name: At_Drought_Soil_Dry_P Parameter: Plant Line Value: WS
  misc_feature: MA Experiment 20001555 PARAMETER Experiment Name: At_Drought_Soil_Dry_P Parameter: Post Timepoint (hr) Value: None
  misc_feature: MA Experiment 20001555 PARAMETER Experiment Name: At_Drought_Soil_Dry_P Parameter: Post-Treatment Value: None
  misc_feature: MA Experiment 20001555 PARAMETER Experiment Name: At_Drought_Soil_Dry_P Parameter: Timepoint (day) Value: 10
  misc_feature: MA Experiment 20001555 PARAMETER Experiment Name: At_Drought_Soil_Dry_P Parameter: Treatment Value: Drought vs. No Drought
gaagctaacaacattcacaaggagagagaaacaataaagggcaaggaaaaagatcaaacctttttctttctttctttctcctgctctctgcaatttagaagaagatcgaagaatttgtttgttgtttatcttcttctataaaaacaaaccgtggggtctgttttcatttctggccttgcgattccgataaaactctcagcttctcattcaatccacaatccaaatccacttctcgaacatatatataattctatatttttgagagacagtttactttttctccttctctctccctctttctctttctctgtctctttggcttttctcctcctgttctcatggaagcttcacccaatgatcgacttcattttggcaaaatgggtttcgggtgtaagcattacaagaggagatgccaaatcagagctccatgttgcaacgaagtcttcgattgtcgccattgtcacaacgagagcactagcacattgcgcaatatctacgaccgtcacgatcttgttcgtcaagacgttaaacaagtgatttgttctgtttgcgatacagagcagccggcagctcaagtttgttcgaattgtggtgtcaacatgggagaatattttgcagcatctgcatattctatgatgatgatactgaaaaacaacagtttcattgcgatgactgtggaatttgcagagttggtgggcgtgagaatttcttccattgcaagaagtgtggatcttgttatgcggttggtctgcgcaacaaccatcgctgcgttgagaattcaatgcgtcatcactgtcccatttgttacgagtacctttttgactctctaaaggacacaaatgtgatgaaatgcgggcacacaatgcacgtagaatgctacaacgagatgatcaaacgtgacaagttttgttgtccaatttgctcgaggtcagtgattgatatgtctaaaacatggcagagactcgatgaagagatcgaagccactgctatgccttcagattaccgtgacaagaaggtttggatactttgcaacgattgtaacgacacaacagaagtgcacttccacataatcggacagaaatgtggacattgcagatcatacaacacacgagcgattgcgcctcctgttcttcctcaatgacaaaaccaagatcttcccatgtattgcctccagaaagcaagcaagaactttttgttgctaaaaaaactgaggcatagattgatgatcataacaaagaaagaaaaagaaaaagattgatgatcaatttgatcattggtcacaaaagcaaaacacacatttgtcttcttcatttgatttgttgttgttcttatactgttacatttttccatttgtgtttgggtgttggaaatgcgaggattatgtataatatactctatattcttgatccaggaaaagttacctggataataaaaaaaaaaaagaaaaaaaaaaaaaaaaaa

SEQ ID NO: 50509 - protein, 163 aa, Arabidopsis thaliana
  peptide (1)..(163): Ceres Seq. ID no. 13647759
  misc_feature (18)..(94): Pfam Name: CHY zinc finger Pfam Description: CHY zinc finger
  misc_feature (17)..(94): Homolog of NCBI NO: 18606337 NR Description: Zfp363 protein [Mus musculus]
  misc_feature (17)..(92): Homolog of NCBI NO: 37535002 NR Description: putative PGPD14 protein (pollen germination
  misc_feature (12)..(94): Homolog of NCBI NO: 4105798 NR Description: PGPD14 [Petunia x hybrida]
  misc_feature (9)..(94): Homolog of NCBI NO: 21593716 NR Description: PGPD14 protein [Arabidopsis thaliana]
  misc_feature (9)..(94): Homolog of NCBI NO: 15237169 NR Description: PGPD14 protein [Arabidopsis thaliana]
  misc_feature (2)..(92): Homolog of NCBI NO: 34910658 NR Description: putative PGPD14 protein (pollen germination
  misc_feature (5)..(92): Homolog of NCBI NO: 11358168 NR Description: hypothetical protein T20O10.70 - Arabidopsis
  misc_feature (5)..(92): Homolog of NCBI NO: 30695702 NR Description: expressed protein [Arabidopsis thaliana]
  misc_feature (5)..(92): Homolog of NCBI NO: 30102616 NR Description: At3g62970 [Arabidopsis thaliana]
  misc_feature (1)..(94): Homolog of NCBI NO: 15238890 NR Description: expressed protein [Arabidopsis thaliana]
MEASPNDRLHFGKMGFGCKHYKRRCQIRAPCCNEVFDCRHCHNESTSTLRNIYDRHDLVRQDVKQVICSVCDTEQPAAQVCSNCGVNMGEYFAASAYSMMMILKNNSFIAMTVEFAELVGVRISSIARSVDLVMRLVCATTIAALRIQCVITVPFVTSTFLTL

SEQ ID NO: 50510 - protein, 150 aa, Arabidopsis thaliana
  peptide (1)..(150): Ceres Seq. ID no. 13647760
  misc_feature (5)..(81): Pfam Name: CHY zinc finger Pfam Description: CHY zinc finger
  misc_feature (4)..(81): Homolog of NCBI NO: 18606337 NR Description: Zfp363 protein [Mus musculus]
  misc_feature (4)..(79): Homolog of NCBI NO: 37535002 NR Description: putative PGPD14 protein (pollen germination
  misc_feature (1)..(81): Homolog of NCBI NO: 4105798 NR Description: PGPD14 [Petunia x hybrida]
  misc_feature (1)..(81): Homolog of NCBI NO: 21593716 NR Description: PGPD14 protein [Arabidopsis thaliana]
  misc_feature (1)..(81): Homolog of NCBI NO: 15237169 NR Description: PGPD14 protein [Arabidopsis thaliana]
  misc_feature (1)..(79): Homolog of NCBI NO: 34910658 NR Description: putative PGPD14 protein (pollen germination
  misc_feature (1)..(79): Homolog of NCBI NO: 11358168 NR Description: hypothetical protein T20O10.70 - Arabidopsis
  misc_feature (1)..(79): Homolog of NCBI NO: 30695702 NR Description: expressed protein [Arabidopsis thaliana]
  misc_feature (1)..(79): Homolog of NCBI NO: 30102616 NR Description: At3g62970 [Arabidopsis thaliana]
  misc_feature (1)..(81): Homolog of NCBI NO: 15238890 NR Description: expressed protein [Arabidopsis thaliana]
MGFGCKHYKRRCQIRAPCCNEVFDCRHCHNESTSTLRNIYDRHDLVRQDVKQVICSVCDTEQPAAQVCSNCGVNMGEYFAASAYSMMMILKNNSFIAMTVEFAELVGVRISSIARSVDLVMRLVCATTIAALRIQCVITVPFVTSTFLTL

SEQ ID NO: 50511 - protein, 119 aa, Arabidopsis thaliana
  peptide (1)..(119): Ceres Seq. ID no. 13647761
  misc_feature (5)..(47): Pfam Name: Zinc finger, C3HC4 type (RING finger) Pfam Description: Zinc finger, C3HC4 type (RING finger)
  misc_feature (1)..(109): Homolog of NCBI NO: 18606337 NR Description: Zfp363 protein [Mus musculus]
  misc_feature (1)..(110): Homolog of NCBI NO: 37535002 NR Description: putative PGPD14 protein (pollen germination
  misc_feature (1)..(110): Homolog of NCBI NO: 4105798 NR Description: PGPD14 [Petunia x hybrida]
  misc_feature (1)..(110): Homolog of NCBI NO: 21593716 NR Description: PGPD14 protein [Arabidopsis thaliana]
  misc_feature (1)..(110): Homolog of NCBI NO: 15237169 NR Description: PGPD14 protein [Arabidopsis thaliana]
  misc_feature (1)..(112): Homolog of NCBI NO: 34910658 NR Description: putative PGPD14 protein (pollen germination
  misc_feature (1)..(118): Homolog of NCBI NO: 11358168 NR Description: hypothetical protein T20O10.70 - Arabidopsis
  misc_feature (1)..(118): Homolog of NCBI NO: 30695702 NR Description: expressed protein [Arabidopsis thaliana]
  misc_feature (1)..(118): Homolog of NCBI NO: 30102616 NR Description: At3g62970 [Arabidopsis thaliana]
  misc_feature (1)..(119): Homolog of NCBI NO: 15238890 NR Description: expressed protein [Arabidopsis thaliana]
MRHHCPICYEYLFDSLKDTNVMKCGHTMHVECYNEMIKRDKFCCPICSRSVIDMSKTWQRLDEEIEATAMPSDYRDKKVWILCNDCNDTTEVHFHIIGQKCGHCRSYNTRAIAPPVLPQ

SEQ ID NO: 50512 - DNA, 3293 bp, Arabidopsis thaliana; identical to SEQ ID NO: 50448
  misc_feature (1)..(3293): Ceres Seq. ID no. 13647822
  misc_feature: MA Experiment ID: 20000185 Result: Up-regulated in Transcription
  misc_feature: MA Experiment 20000185 PARAMETER Experiment Name: At_Roots__P Parameter: Age (day) Value: 7 vs. 21
  misc_feature: MA Experiment 20000185 PARAMETER Experiment Name: At_Roots__P Parameter: Organism Value: A. thaliana
  misc_feature: MA Experiment 20000185 PARAMETER Experiment Name: At_Roots__P Parameter: Tissue Value: Roots vs. Whole Plant
  misc_feature: MA Experiment ID: 20000227 Result: Down-regulated in Transcription
  misc_feature: MA Experiment 20000227 PARAMETER Experiment Name: At_Root-Tips-vs-Tops_P Parameter: Tissue Value: Root Tips vs. Root Tops
  misc_feature: MA Experiment ID: 20000437 Result: Down-regulated in Transcription
  misc_feature: MA Experiment 20000437 PARAMETER Experiment Name: At_Drought_P Parameter: Age (day) Value: 8
  misc_feature: MA Experiment 20000437 PARAMETER Experiment Name: At_Drought_P Parameter: Organism Value: A. thaliana
  misc_feature: MA Experiment 20000437 PARAMETER Experiment Name: At_Drought_P Parameter: Plant Line Value: WS
  misc_feature: MA Experiment 20000437 PARAMETER Experiment Name: At_Drought_P Parameter: Timepoint (hr) Value: 24
  misc_feature: MA Experiment 20000437 PARAMETER Experiment Name: At_Drought_P Parameter: Tissue Value: Whole Plant
  misc_feature: MA Experiment 20000437 PARAMETER Experiment Name: At_Drought_P Parameter: Treatment Value: Drought vs. No Drought
  misc_feature: MA Experiment ID: 20000439 Result: Up-regulated in Transcription
  misc_feature: MA Experiment 20000439 PARAMETER Experiment Name: At_Roots__P Parameter: Age (day) Value: 14 vs. 21
  misc_feature: MA Experiment 20000439 PARAMETER Experiment Name: At_Roots__P Parameter: Organism Value: A. thaliana
  misc_feature: MA Experiment 20000439 PARAMETER Experiment Name: At_Roots__P Parameter: Tissue Value: Roots vs. Whole Plant
  misc_feature: MA Experiment ID: 20000794 Result: Up-regulated in Transcription
  misc_feature: MA Experiment 20000794 PARAMETER Experiment Name: At_Petals_P Parameter: Age (day) Value: 23-25 days
  misc_feature: MA Experiment 20000794 PARAMETER Experiment Name: At_Petals_P Parameter: Plant Line Value: WS
  misc_feature: MA Experiment 20000794 PARAMETER Experiment Name: At_Petals_P Parameter: Tissue Value: Petals vs. Whole plant
  misc_feature: MA Experiment ID: 20001557 Result: Up-regulated in Transcription
  misc_feature: MA Experiment 20001557 PARAMETER Experiment Name: At_Drought_Soil_Dry_P Parameter: Age (day) Value: 27
  misc_feature: MA Experiment 20001557 PARAMETER Experiment Name: At_Drought_Soil_Dry_P Parameter: Organism Value: A. thaliana
  misc_feature: MA Experiment 20001557 PARAMETER Experiment Name: At_Drought_Soil_Dry_P Parameter: Plant Line Value: WS
  misc_feature: MA Experiment 20001557 PARAMETER Experiment Name: At_Drought_Soil_Dry_P Parameter: Post Timepoint (hr) Value: 3
  misc_feature: MA Experiment 20001557 PARAMETER Experiment Name: At_Drought_Soil_Dry_P Parameter: Post-Treatment Value: Re-Water vs. No Drought
  misc_feature: MA Experiment 20001557 PARAMETER Experiment Name: At_Drought_Soil_Dry_P Parameter: Timepoint (day) Value: 13
  misc_feature: MA Experiment 20001557 PARAMETER Experiment Name: At_Drought_Soil_Dry_P Parameter: Treatment Value: Drought vs. No Drought
  misc_feature: MA Experiment ID: 20001558 Result: Up-regulated in Transcription
  misc_feature: MA Experiment 20001558 PARAMETER Experiment Name: At_Drought_Soil_Dry_P Parameter: Age (day) Value: 27
  misc_feature: MA Experiment 20001558 PARAMETER Experiment Name: At_Drought_Soil_Dry_P Parameter: Organism Value: A. thaliana
  misc_feature: MA Experiment 20001558 PARAMETER Experiment Name: At_Drought_Soil_Dry_P Parameter: Plant Line Value: WS
  misc_feature: MA Experiment 20001558 PARAMETER Experiment Name: At_Drought_Soil_Dry_P Parameter: Post Timepoint (hr) Value: 6
  misc_feature: MA Experiment 20001558 PARAMETER Experiment Name: At_Drought_Soil_Dry_P Parameter: Post-Treatment Value: Re-Water vs. No Drought
  misc_feature: MA Experiment 20001558 PARAMETER Experiment Name: At_Drought_Soil_Dry_P Parameter: Timepoint (day) Value: 13
  misc_feature: MA Experiment 20001558 PARAMETER Experiment Name: At_Drought_Soil_Dry_P Parameter: Treatment Value: Drought vs. No Drought
  misc_feature: MA Experiment ID: 20001560 Result: Up-regulated in Transcription
  misc_feature: MA Experiment 20001560 PARAMETER Experiment Name: At_Drought_Soil_Dry_P Parameter: Age (day) Value: 28
  misc_feature: MA Experiment 20001560 PARAMETER Experiment Name: At_Drought_Soil_Dry_P Parameter: Organism Value: A. thaliana
  misc_feature: MA Experiment 20001560 PARAMETER Experiment Name: At_Drought_Soil_Dry_P Parameter: Plant Line Value: WS
  misc_feature: MA Experiment 20001560 PARAMETER Experiment Name: At_Drought_Soil_Dry_P Parameter: Post Timepoint (hr) Value: None
  misc_feature: MA Experiment 20001560 PARAMETER Experiment Name: At_Drought_Soil_Dry_P Parameter: Post-Treatment Value: None
  misc_feature: MA Experiment 20001560 PARAMETER Experiment Name: At_Drought_Soil_Dry_P Parameter: Timepoint (day) Value: 14
  misc_feature: MA Experiment 20001560 PARAMETER Experiment Name: At_Drought_Soil_Dry_P Parameter: Treatment Value: Drought vs. No Drought

SEQ ID NO: 50513 - protein, 948 aa, Arabidopsis thaliana; identical to SEQ ID NO: 50449
  peptide (1)..(948): Ceres Seq. ID no. 13647823
  misc_feature (323)..(609): Pfam Name: haloacid dehalogenase-like hydrolase Pfam Description: haloacid dehalogenase-like hydrolase
  misc_feature (323)..(609): Pfam Name: haloacid dehalogenase-like hydrolase Pfam Description: haloacid dehalogenase-like hydrolase
  misc_feature (323)..(609): Pfam Name: haloacid dehalogenase-like hydrolase Pfam Description: haloacid dehalogenase-like hydrolase
  misc_feature (753)..(804): Homolog of NCBI NO: 16751320 NR Description: putative plasma membrane-type proton ATPase
  misc_feature (10)..(751): Homolog of NCBI NO: 16751320 NR Description: putative plasma membrane-type proton ATPase
  misc_feature (744)..(813): Homolog of NCBI NO: 1709665 NR Description: Plasma membrane ATPase (Proton pump)
  misc_feature (10)..(736): Homolog of NCBI NO: 1709665 NR Description: Plasma membrane ATPase (Proton pump)
  misc_feature (757)..(813): Homolog of NCBI NO: 1709666 NR Description: Plasma membrane ATPase (Proton pump)
  misc_feature (753)..(804): Homolog of NCBI NO: 16751320 NR Description: putative plasma membrane-type proton ATPase
  misc_feature (744)..(813): Homolog of NCBI NO: 1709665 NR Description: Plasma membrane ATPase (Proton pump)
  misc_feature (757)..(813): Homolog of NCBI NO: 1709666 NR Description: Plasma membrane ATPase (Proton pump)
  misc_feature (10)..(736): Homolog of NCBI NO: 1709665 NR Description: Plasma membrane ATPase (Proton pump)
  misc_feature (744)..(813): Homolog of NCBI NO: 1709665 NR Description: Plasma membrane ATPase (Proton pump)
  misc_feature (10)..(751): Homolog of NCBI NO: 16751320 NR Description: putative plasma membrane-type proton ATPase
  misc_feature (753)..(804): Homolog of NCBI NO: 16751320 NR Description: putative plasma membrane-type proton ATPase
  misc_feature (10)..(842): Homolog of NCBI NO: 6691153 NR Description: plasma membrane H(+)-ATPase [Filobasidiella
  misc_feature (10)..(842): Homolog of NCBI NO: 3348073 NR Description: plasma membrane H(+)-ATPase 1 [Filobasidiella
  misc_feature (5)..(845): Homolog of NCBI NO: 2652922 NR Description: plasma membrane (H+) ATPase [Uromyces fabae]
  misc_feature (10)..(867): Homolog of NCBI NO: 1709664 NR Description: Probable plasma membrane ATPase (Proton pump)
  misc_feature (10)..(748): Homolog of NCBI NO: 1709666 NR Description: Plasma membrane ATPase (Proton pump)
  misc_feature (10)..(842): Homolog of NCBI NO: 6691153 NR Description: plasma membrane H(+)-ATPase [Filobasidiella
  misc_feature (10)..(842): Homolog of NCBI NO: 3348073 NR Description: plasma membrane H(+)-ATPase 1 [Filobasidiella
  misc_feature (5)..(845): Homolog of NCBI NO: 2652922 NR Description: plasma membrane (H+) ATPase [Uromyces fabae]
  misc_feature (10)..(867): Homolog of NCBI NO: 1709664 NR Description: Probable plasma membrane ATPase (Proton pump)
  misc_feature (10)..(748): Homolog of NCBI NO: 1709666 NR Description: Plasma membrane ATPase (Proton pump)
  misc_feature (757)..(813): Homolog of NCBI NO: 1709666 NR Description: Plasma membrane ATPase (Proton pump)
  misc_feature (10)..(736): Homolog of NCBI NO: 1709665 NR Description: Plasma membrane ATPase (Proton pump)
  misc_feature (10)..(751): Homolog of NCBI NO: 16751320 NR Description: putative plasma membrane-type proton ATPase
  misc_feature (10)..(748): Homolog of NCBI NO: 1709666 NR Description: Plasma membrane ATPase (Proton pump)
  misc_feature (10)..(867): Homolog of NCBI NO: 1709664 NR Description: Probable plasma membrane ATPase (Proton pump)
  misc_feature (5)..(845): Homolog of NCBI NO: 2652922 NR Description: plasma membrane (H+) ATPase [Uromyces fabae]
  misc_feature (10)..(842): Homolog of NCBI NO: 3348073 NR Description: plasma membrane H(+)-ATPase 1 [Filobasidiella
  misc_feature (10)..(842): Homolog of NCBI NO: 6691153 NR Description: plasma membrane H(+)-ATPase [Filobasidiella

SEQ ID NO: 50514 - protein, 884 aa, Arabidopsis thaliana; identical to SEQ ID NO: 50450
  peptide (1)..(884): Ceres Seq. ID no. 13647824
  misc_feature (259)..(545): Pfam Name: haloacid dehalogenase-like hydrolase Pfam Description: haloacid dehalogenase-like hydrolase
  misc_feature (259)..(545): Pfam Name: haloacid dehalogenase-like hydrolase Pfam Description: haloacid dehalogenase-like hydrolase
  misc_feature (259)..(545): Pfam Name: haloacid dehalogenase-like hydrolase Pfam Description: haloacid dehalogenase-like hydrolase
  misc_feature (689)..(740): Homolog of NCBI NO: 16751320 NR Description: putative plasma membrane-type proton ATPase
  misc_feature (1)..(687): Homolog of NCBI NO: 16751320 NR Description: putative plasma membrane-type proton ATPase
  misc_feature (680)..(749): Homolog of NCBI NO: 1709665 NR Description: Plasma membrane ATPase (Proton pump)
  misc_feature (1)..(672): Homolog of NCBI NO: 1709665 NR Description: Plasma membrane ATPase (Proton pump)
  misc_feature (693)..(749): Homolog of NCBI NO: 1709666 NR Description: Plasma membrane ATPase (Proton pump)
  misc_feature (689)..(740): Homolog of NCBI NO: 16751320 NR Description: putative plasma membrane-type proton ATPase
  misc_feature (680)..(749): Homolog of NCBI NO: 1709665 NR Description: Plasma membrane ATPase (Proton pump)
  misc_feature (693)..(749): Homolog of NCBI NO: 1709666 NR Description: Plasma membrane ATPase (Proton pump)
  misc_feature (1)..(672): Homolog of NCBI NO: 1709665 NR Description: Plasma membrane ATPase (Proton pump)
  misc_feature (680)..(749): Homolog of NCBI NO: 1709665 NR Description: Plasma membrane ATPase (Proton pump)
  misc_feature (1)..(687): Homolog of NCBI NO: 16751320 NR Description: putative plasma membrane-type proton ATPase
  misc_feature (689)..(740): Homolog of NCBI NO: 16751320 NR Description: putative plasma membrane-type proton ATPase
  misc_feature (1)..(778): Homolog of NCBI NO: 6691153 NR Description: plasma membrane H(+)-ATPase [Filobasidiella
  misc_feature (1)..(778): Homolog of NCBI NO: 3348073 NR Description: plasma membrane H(+)-ATPase 1 [Filobasidiella
  misc_feature (1)..(781): Homolog of NCBI NO: 2652922 NR Description: plasma membrane (H+) ATPase [Uromyces fabae]
  misc_feature (1)..(803): Homolog of NCBI NO: 1709664 NR Description: Probable plasma membrane ATPase (Proton pump)
  misc_feature (1)..(684): Homolog of NCBI NO: 1709666 NR Description: Plasma membrane ATPase (Proton pump)
  misc_feature (1)..(778): Homolog of NCBI NO: 6691153 NR Description: plasma membrane H(+)-ATPase [Filobasidiella
  misc_feature (1)..(778): Homolog of NCBI NO: 3348073 NR Description: plasma membrane H(+)-ATPase 1 [Filobasidiella
  misc_feature (1)..(781): Homolog of NCBI NO: 2652922 NR Description: plasma membrane (H+) ATPase [Uromyces fabae]
  misc_feature (1)..(803): Homolog of NCBI NO: 1709664 NR Description: Probable plasma membrane ATPase (Proton pump)
  misc_feature (1)..(684): Homolog of NCBI NO: 1709666 NR Description: Plasma membrane ATPase (Proton pump)
  misc_feature (693)..(749): Homolog of NCBI NO: 1709666 NR Description: Plasma membrane ATPase (Proton pump)
  misc_feature (1)..(672): Homolog of NCBI NO: 1709665 NR Description: Plasma membrane ATPase (Proton pump)
  misc_feature (1)..(687): Homolog of NCBI NO: 16751320 NR Description: putative plasma membrane-type proton ATPase
  misc_feature (1)..(684): Homolog of NCBI NO: 1709666 NR Description: Plasma membrane ATPase (Proton pump)
  misc_feature (1)..(803): Homolog of NCBI NO: 1709664 NR Description: Probable plasma membrane ATPase (Proton pump)
  misc_feature (1)..(781): Homolog of NCBI NO: 2652922 NR Description: plasma membrane (H+) ATPase [Uromyces fabae]
  misc_feature (1)..(778): Homolog of NCBI NO: 3348073 NR Description: plasma membrane H(+)-ATPase 1 [Filobasidiella
  misc_feature (1)..(778): Homolog of NCBI NO: 6691153 NR Description: plasma membrane H(+)-ATPase [Filobasidiella

SEQ ID NO: 50515 - protein, 876 aa, Arabidopsis thaliana; identical to SEQ ID NO: 50451
  peptide (1)..(876): Ceres Seq. ID no. 13647825
  misc_feature (251)..(537): Pfam Name: haloacid dehalogenase-like hydrolase Pfam Description: haloacid dehalogenase-like hydrolase
  misc_feature (251)..(537): Pfam Name: haloacid dehalogenase-like hydrolase Pfam Description: haloacid dehalogenase-like hydrolase
  misc_feature (251)..(537): Pfam Name: haloacid dehalogenase-like hydrolase Pfam Description: haloacid dehalogenase-like hydrolase
  misc_feature (681)..(732): Homolog of NCBI NO: 16751320 NR Description: putative plasma membrane-type proton ATPase
  misc_feature (1)..(679): Homolog of NCBI NO: 16751320 NR Description: putative plasma membrane-type proton ATPase
  misc_feature (672)..(741): Homolog of NCBI NO: 1709665 NR Description: Plasma membrane ATPase (Proton pump)
  misc_feature (1)..(664): Homolog of NCBI NO: 1709665 NR Description: Plasma membrane ATPase (Proton pump)
  misc_feature (685)..(741): Homolog of NCBI NO: 1709666 NR Description: Plasma membrane ATPase (Proton pump)
  misc_feature (681)..(732): Homolog of NCBI NO: 16751320 NR Description: putative plasma membrane-type proton ATPase
  misc_feature (672)..(741): Homolog of NCBI NO: 1709665 NR Description: Plasma membrane ATPase (Proton pump)
  misc_feature (685)..(741): Homolog of NCBI NO: 1709666 NR Description: Plasma membrane ATPase (Proton pump)
  misc_feature (1)..(664): Homolog of NCBI NO: 1709665 NR Description: Plasma membrane ATPase (Proton pump)
  misc_feature (672)..(741): Homolog of NCBI NO: 1709665 NR Description: Plasma membrane ATPase (Proton pump)
  misc_feature (1)..(679): Homolog of NCBI NO: 16751320 NR Description: putative plasma membrane-type proton ATPase
  misc_feature (681)..(732): Homolog of NCBI NO: 16751320 NR Description: putative plasma membrane-type proton ATPase
  misc_feature (1)..(770): Homolog of NCBI NO: 6691153 NR Description: plasma membrane H(+)-ATPase [Filobasidiella
  misc_feature (1)..(770): Homolog of NCBI NO: 3348073 NR Description: plasma membrane H(+)-ATPase 1 [Filobasidiella
  misc_feature (1)..(773): Homolog of NCBI NO: 2652922 NR Description: plasma membrane (H+) ATPase [Uromyces fabae]
  misc_feature (1)..(795): Homolog of NCBI NO: 1709664 NR Description: Probable plasma membrane ATPase (Proton pump)
  misc_feature (1)..(676): Homolog of NCBI NO: 1709666 NR Description: Plasma membrane ATPase (Proton pump)
  misc_feature (1)..(770): Homolog of NCBI NO: 6691153 NR Description: plasma membrane H(+)-ATPase [Filobasidiella
  misc_feature (1)..(770): Homolog of NCBI NO: 3348073 NR Description: plasma membrane H(+)-ATPase 1 [Filobasidiella
  misc_feature (1)..(773): Homolog of NCBI NO: 2652922 NR Description: plasma membrane (H+) ATPase [Uromyces fabae]
  misc_feature (1)..(795): Homolog of NCBI NO: 1709664 NR Description: Probable plasma membrane ATPase (Proton pump)
  misc_feature (1)..(676): Homolog of NCBI NO: 1709666 NR Description: Plasma membrane ATPase (Proton pump)
  misc_feature (685)..(741): Homolog of NCBI NO: 1709666 NR Description: Plasma membrane ATPase (Proton pump)
  misc_feature (1)..(664): Homolog of NCBI NO: 1709665 NR Description: Plasma membrane ATPase (Proton pump)
  misc_feature (1)..(679): Homolog of NCBI NO: 16751320 NR Description: putative plasma membrane-type proton ATPase
  misc_feature (1)..(676): Homolog of NCBI NO: 1709666 NR Description: Plasma membrane ATPase (Proton pump)
  misc_feature (1)..(795): Homolog of NCBI NO: 1709664 NR Description: Probable plasma membrane ATPase (Proton pump)
  misc_feature (1)..(773): Homolog of NCBI NO: 2652922 NR Description: plasma membrane (H+) ATPase [Uromyces fabae]
  misc_feature (1)..(770): Homolog of NCBI NO: 3348073 NR Description: plasma membrane H(+)-ATPase 1 [Filobasidiella
  misc_feature (1)..(770): Homolog of NCBI NO: 6691153 NR Description: plasma membrane H(+)-ATPase [Filobasidiella

SEQ ID NO: 50516 - DNA, 1687 bp, Arabidopsis thaliana
  misc_feature (1)..(1687): Ceres Seq. ID no. 13592394
  misc_feature: MA Experiment ID: 20000171 Result: Down-regulated in Transcription
  misc_feature: MA Experiment 20000171 PARAMETER Experiment Name: At_42deg_Heat_P Parameter: Age (day) Value: 14
  misc_feature: MA Experiment 20000171 PARAMETER Experiment Name: At_42deg_Heat_P Parameter: Organism Value: A. thaliana
  misc_feature: MA Experiment 20000171 PARAMETER Experiment Name: At_42deg_Heat_P Parameter: Plant Line Value: WS
  misc_feature: MA Experiment 20000171 PARAMETER Experiment Name: At_42deg_Heat_P Parameter: Temperature (deg C) Value: 42 vs. 22
  misc_feature: MA Experiment 20000171 PARAMETER Experiment Name: At_42deg_Heat_P Parameter: Timepoint (hr) Value: 1
  misc_feature: MA Experiment 20000171 PARAMETER Experiment Name: At_42deg_Heat_P Parameter: Tissue Value: Aerial
  misc_feature: MA Experiment ID: 20000173 Result: Down-regulated in Transcription
  misc_feature: MA Experiment 20000173 PARAMETER Experiment Name: At_42deg_Heat_P Parameter: Age (day) Value: 14
  misc_feature: MA Experiment 20000173 PARAMETER Experiment Name: At_42deg_Heat_P Parameter: Organism Value: A. thaliana
  misc_feature: MA Experiment 20000173 PARAMETER Experiment Name: At_42deg_Heat_P Parameter: Plant Line Value: WS
  misc_feature: MA Experiment 20000173 PARAMETER Experiment Name: At_42deg_Heat_P Parameter: Temperature (deg C) Value: 42 vs. 22
  misc_feature: MA Experiment 20000173 PARAMETER Experiment Name: At_42deg_Heat_P Parameter: Timepoint (hr) Value: 6
  misc_feature: MA Experiment 20000173 PARAMETER Experiment Name: At_42deg_Heat_P Parameter: Tissue Value: Aerial
  misc_feature: MA Experiment ID: 20000184 Result: Down-regulated in Transcription
  misc_feature: MA Experiment 20000184 PARAMETER Experiment Name: At_Shoots__P Parameter: Age (day) Value: 7
  misc_feature: MA Experiment 20000184 PARAMETER Experiment Name: At_Shoots__P Parameter: Tissue Value: Shoots vs. Whole Plant
  misc_feature: MA Experiment ID: 20000185 Result: Down-regulated in Transcription
  misc_feature: MA Experiment 20000185 PARAMETER Experiment Name: At_Roots__P Parameter: Age (day) Value: 7 vs. 21
  misc_feature: MA Experiment 20000185 PARAMETER Experiment Name: At_Roots__P Parameter: Organism Value: A. thaliana
  misc_feature: MA Experiment 20000185 PARAMETER Experiment Name: At_Roots__P Parameter: Tissue Value: Roots vs. Whole Plant
  misc_feature: MA Experiment ID: 20000234 Result: Down-regulated in Transcription
  misc_feature: MA Experiment 20000234 PARAMETER Experiment Name: At_Siliques_P Parameter: Age (day) Value: 21
  misc_feature: MA Experiment 20000234 PARAMETER Experiment Name: At_Siliques_P Parameter: Organism Value: A. thaliana
  misc_feature: MA Experiment 20000234 PARAMETER Experiment Name: At_Siliques_P Parameter: Plant Line Value: WS
  misc_feature: MA Experiment 20000234 PARAMETER Experiment Name: At_Siliques_P Parameter: Tissue Value: Less Than 5mm Siliques vs. Whole Plant
  misc_feature: MA Experiment ID: 20000235 Result: Down-regulated in Transcription
  misc_feature: MA Experiment 20000235 PARAMETER Experiment Name: At_Siliques_P Parameter: Age (day) Value: 21
  misc_feature: MA Experiment 20000235 PARAMETER Experiment Name: At_Siliques_P Parameter: Organism Value: A. thaliana
  misc_feature: MA Experiment 20000235 PARAMETER Experiment Name: At_Siliques_P Parameter: Plant Line Value: WS
  misc_feature: MA Experiment 20000235 PARAMETER Experiment Name: At_Siliques_P Parameter: Tissue Value: 5-10mm Siliques vs. Whole Plant
  misc_feature: MA Experiment ID: 20000265 Result: Down-regulated in Transcription
  misc_feature: MA Experiment 20000265 PARAMETER Experiment Name: At_Open_Flower_P Parameter: Age (day) Value: 21
  misc_feature: MA Experiment 20000265 PARAMETER Experiment Name: At_Open_Flower_P Parameter: Plant Line Value: WS
  misc_feature: MA Experiment 20000265 PARAMETER Experiment Name: At_Open_Flower_P Parameter: Tissue Value: Closed Flower vs. Whole Plant
  misc_feature: MA Experiment ID: 20000286 Result: Down-regulated in Transcription
  misc_feature: MA Experiment 20000286 PARAMETER Experiment Name: At_Open_Flower_P Parameter: Age (day) Value: 21
  misc_feature: MA Experiment 20000286 PARAMETER Experiment Name: At_Open_Flower_P Parameter: Plant Line Value: WS
  misc_feature: MA Experiment 20000286 PARAMETER Experiment Name: At_Open_Flower_P Parameter: Tissue Value: Half Open vs. Whole Plant
  misc_feature: MA Experiment ID: 20001557 Result: Down-regulated in Transcription
  misc_feature: MA Experiment 20001557 PARAMETER Experiment Name: At_Drought_Soil_Dry_P Parameter: Age (day) Value: 27
  misc_feature: MA Experiment 20001557 PARAMETER Experiment Name: At_Drought_Soil_Dry_P Parameter: Organism Value: A. thaliana
  misc_feature: MA Experiment 20001557 PARAMETER Experiment Name: At_Drought_Soil_Dry_P Parameter: Plant Line Value: WS
  misc_feature: MA Experiment 20001557 PARAMETER Experiment Name: At_Drought_Soil_Dry_P Parameter: Post Timepoint (hr) Value: 3
  misc_feature: MA Experiment 20001557 PARAMETER Experiment Name: At_Drought_Soil_Dry_P Parameter: Post-Treatment Value: Re-Water vs. No Drought
  misc_feature: MA Experiment 20001557 PARAMETER Experiment Name: At_Drought_Soil_Dry_P Parameter: Timepoint (day) Value: 13
  misc_feature: MA Experiment 20001557 PARAMETER Experiment Name: At_Drought_Soil_Dry_P Parameter: Treatment Value: Drought vs. No Drought
gaaacagagcatttatccattagaaaaaaaaaaaaaagaaaaaaagaatggcaatctctttactcttgtctttttctcatcgcctttgcttcgttaatcttcctcggaaaaaagatccaacgatctaaatggaattttcctcccagccctcctaagtttccggtcatcggaaacttacatcaacttggagaattgcctcacaggtcacttcaacgtctagccgaaaaaatcggagatgttatgcttattcacttagggtttgtccctgtaactgttatctcatcgaaagaagcagctgaagaagtgcttagaactcatgacctaaactgttgcagcaggcctaatcttgttgggacgaggctactttctcggggttttaaagatgttggttttactccatacggtgaagagtggaaggagcggcgtaagttcttggtgcgtgagtttttctctttgaaaaaggttcagtctttcggttatatcagagaggaagaatgtaactttcttgtcaagaaactgttggaatcagccgtggatcaatctccggttgatttgagcaaaacccttttttggctaaccgcgagtgtcatgtttagagttgcttttggacagagtttccacgagagcgagttcatcgataaagacaaggtcgatgagcttgtgtttgaagccgagaccgctcaagctagtttcacttgctctgatttcttccctattgctggacttggttggctcgttgactgtatttccgggcaacacaagaggctcaaagatgttttcttcaagctggatgctctgtttcaatgttggatgtcatgcagaaacaacgtaaagatgattccttgaagctcacaatcaataacatcaaaggaattctaacgaatatatttctcggagggatagacaccggagctcttactatgatatgggcaatgacggagctcgctagaaacccggaagtgatgaagaaagttcaaggcgagatccgagaccgccttggcagaaataaagagagaatcaccgaagaagatatcaataaagttccttacttgaacctagtgatcaaggaaacattcagattacaccatccagttcctcttcttctcccaagggaaacaatggctcacatcaaggttcaaggctatgatattcctcccaagagacggatcttggtcaacgcttgggcgataggaagagatccaaaactctggactaacccggaagagtttaaccccgagagatttatcaatagtcctgtggattataggggacaacatttcgagctcttaccgtttgggtctggacgaaggatatgtcccgggatatcgatgggtatggctactgtagaattgggactcttgaacttactttacttcttcgactggaagttgcctgatgggatgacacataaagatatcgatactgaagaagttggcactcttacaatcgtcaagaaagtaccactaaaacttcttccagttcgatttcagtgatcaaaccaaactccaaactttgaagatgttttgaataaaaatactatgcaaagtatgtaaccctagcttctctaatgtatgtgaagtacgttttccagtaaaatactaagttaaaatttcatatctttactaaaacatgtactgtgtttcctgtgtttcatatctttggaaaataattataaataaatttttct

SEQ ID NO: 50517 - protein, 281 aa, Arabidopsis thaliana
  peptide (1)..(281): Ceres Seq. ID no. 13592395
  misc_feature (50)..(276): Pfam Name: Cytochrome P450 Pfam Description: Cytochrome P450
  misc_feature (18)..(268): Homolog of NCBI NO: 13878369 NR Description: CYTOCHROME P450 71B8
  misc_feature (19)..(267): Homolog of NCBI NO: 15231536 NR Description: cytochrome P450 family [Arabidopsis thaliana]
  misc_feature (23)..(268): Homolog of NCBI NO: 15222174 NR Description: cytochrome P450 family [Arabidopsis thaliana]
  misc_feature (21)..(268): Homolog of NCBI NO: 16226474 NR Description: AT3g26180/MTC11_8 [Arabidopsis thaliana]
  misc_feature (21)..(268): Homolog of NCBI NO: 15231522 NR Description: cytochrome P450 71B20 [Arabidopsis thaliana]
  misc_feature (23)..(268): Homolog of NCBI NO: 15231516 NR Description: cytochrome P450 71B16 [Arabidopsis thaliana]
  misc_feature (21)..(268): Homolog of NCBI NO: 21554748 NR Description: cytochrome P450, putative [Arabidopsis thaliana]
  misc_feature (21)..(268): Homolog of NCBI NO: 15231520 NR Description: cytochrome P450 71B19 [Arabidopsis thaliana]
  misc_feature (23)..(268): Homolog of NCBI NO: 15231517 NR Description: cytochrome p450 family [Arabidopsis thaliana]
  misc_feature (50)..(276): Homolog of NCBI NO: 11994435 NR Description: cytochrome P450 [Arabidopsis thaliana]
ETEHLSIRKKKKRKKEWQSLYSCLFLIAFASLIFLGKKIQRSKWNFPPSPPKFPVIGNLHQLGELPHRSLQRLAEKIGDVMLIHLGFVPVTVISSKEAAEEVLRTHDLNCCSRPNLVGTRLLSRGFKDVGFTPYGEEWKERRKFLVREFFSLKKVQSFGYIREEECNFLVKKLLESAVDQSPVDLSKTLFWLTASVMFRVAFGQSFHESEFIDKDKVDELVFEAETAQASFTCSDFFPIAGLGWLVDCISGQHKRLKDVFFKLDALFQCWMSCRNNVKMIP

SEQ ID NO: 50518 - protein, 229 aa, Arabidopsis thaliana
  peptide (1)..(229): Ceres Seq. ID no. 13592396
  misc_feature (27)..(223): Pfam Name: Cytochrome P450 Pfam Description: Cytochrome P450
  misc_feature (1)..(225): Homolog of NCBI NO: 13878369 NR Description: CYTOCHROME P450 71B8
  misc_feature (1)..(226): Homolog of NCBI NO: 15231536 NR Description: cytochrome P450 family [Arabidopsis thaliana]
  misc_feature (1)..(227): Homolog of NCBI NO: 15222174 NR Description: cytochrome P450 family [Arabidopsis thaliana]
  misc_feature (1)..(229): Homolog of NCBI NO: 16226474 NR Description: AT3g26180/MTC11_8 [Arabidopsis thaliana]
  misc_feature (1)..(229): Homolog of NCBI NO: 15231522 NR Description: cytochrome P450 71B20 [Arabidopsis thaliana]
  misc_feature (1)..(229): Homolog of NCBI NO: 15231516 NR Description: cytochrome P450 71B16 [Arabidopsis thaliana]
  misc_feature (1)..(229): Homolog of NCBI NO: 21554748 NR Description: cytochrome P450, putative [Arabidopsis thaliana]
  misc_feature (1)..(229): Homolog of NCBI NO: 15231520 NR Description: cytochrome P450 71B19 [Arabidopsis thaliana]
  misc_feature (1)..(227): Homolog of NCBI NO: 15231517 NR Description: cytochrome p450 family [Arabidopsis thaliana]
  misc_feature (27)..(229): Homolog of NCBI NO: 11994435 NR Description: cytochrome P450 [Arabidopsis thaliana]
MLDVMQKQRKDDSLKLTINNIKGILTNIFLGGIDTGALTMIWAMTELARNPEVMKKVQGEIRDRLGRNKERITEEDINKVPYLNLVIKETFRLHHPVPLLLPRETMAHIKVQGYDIPPKRRILVNAWAIGRDPKLWTNPEEFNPERFINSPVDYRGQHFELLPFGSGRRICPGISMGMATVELGLLNLLYFFDWKLPDGMTHKDIDTEEVGTLTIVKKVPLKLLPVRFQ

SEQ ID NO: 50519 - protein, 225 aa, Arabidopsis thaliana
  peptide (1)..(225): Ceres Seq. ID no. 13592397
  misc_feature (23)..(219): Pfam Name: Cytochrome P450 Pfam Description: Cytochrome P450
  misc_feature (1)..(221): Homolog of NCBI NO: 13878369 NR Description: CYTOCHROME P450 71B8
  misc_feature (1)..(222): Homolog of NCBI NO: 15231536 NR Description: cytochrome P450 family [Arabidopsis thaliana]
  misc_feature (1)..(223): Homolog of NCBI NO: 15222174 NR Description: cytochrome P450 family [Arabidopsis thaliana]
  misc_feature (1)..(225): Homolog of NCBI NO: 16226474 NR Description: AT3g26180/MTC11_8 [Arabidopsis thaliana]
  misc_feature (1)..(225): Homolog of NCBI NO: 15231522 NR Description: cytochrome P450 71B20 [Arabidopsis thaliana]
  misc_feature (1)..(225): Homolog of NCBI NO: 15231516 NR Description: cytochrome P450 71B16 [Arabidopsis thaliana]
  misc_feature (1)..(225): Homolog of NCBI NO: 21554748 NR Description: cytochrome P450, putative [Arabidopsis thaliana]
  misc_feature (1)..(225): Homolog of NCBI NO: 15231520 NR Description: cytochrome P450 71B19 [Arabidopsis thaliana]
  misc_feature (1)..(223): Homolog of NCBI NO: 15231517 NR Description: cytochrome p450 family [Arabidopsis thaliana]
  misc_feature (23)..(225): Homolog of NCBI NO: 11994435 NR Description: cytochrome P450 [Arabidopsis thaliana]
MQKQRKDDSLKLTINNIKGILTNIFLGGIDTGALTMIWAMTELARNPEVMKKVQGEIRDRLGRNKERITEEDINKVPYLNLVIKETFRLHHPVPLLLPRETMAHIKVQGYDIPPKRRILVNAWAIGRDPKLWTNPEEFNPERFINSPVDYRGQHFELLPFGSGRRICPGISMGMATVELGLLNLLYFFDWKLPDGMTHKDIDTEEVGTLTIVKKVPLKLLPVRFQ

SEQ ID NO: 50520 - DNA, 1055 bp, Arabidopsis thaliana
  misc_feature (1)..(1055): Ceres Seq. ID no. 13592398
  misc_feature: MA Experiment ID: 20000184 Result: Down-regulated in Transcription
  misc_feature: MA Experiment 20000184 PARAMETER Experiment Name: At_Shoots__P Parameter: Age (day) Value: 7
  misc_feature: MA Experiment 20000184 PARAMETER Experiment Name: At_Shoots__P Parameter: Tissue Value: Shoots vs. Whole Plant
  misc_feature: MA Experiment ID: 20000234 Result: Down-regulated in Transcription
  misc_feature: MA Experiment 20000234 PARAMETER Experiment Name: At_Siliques_P Parameter: Age (day) Value: 21
  misc_feature: MA Experiment 20000234 PARAMETER Experiment Name: At_Siliques_P Parameter: Organism Value: A. thaliana
  misc_feature: MA Experiment 20000234 PARAMETER Experiment Name: At_Siliques_P Parameter: Plant Line Value: WS
  misc_feature: MA Experiment 20000234 PARAMETER Experiment Name: At_Siliques_P Parameter: Tissue Value: Less Than 5mm Siliques vs. Whole Plant
  misc_feature: MA Experiment ID: 20000235 Result: Down-regulated in Transcription
  misc_feature: MA Experiment 20000235 PARAMETER Experiment Name: At_Siliques_P Parameter: Age (day) Value: 21
  misc_feature: MA Experiment 20000235 PARAMETER Experiment Name: At_Siliques_P Parameter: Organism Value: A. thaliana
  misc_feature: MA Experiment 20000235 PARAMETER Experiment Name: At_Siliques_P Parameter: Plant Line Value: WS
  misc_feature: MA Experiment 20000235 PARAMETER Experiment Name: At_Siliques_P Parameter: Tissue Value: 5-10mm Siliques vs. Whole Plant
  misc_feature: MA Experiment ID: 20000265 Result: Up-regulated in Transcription
  misc_feature: MA Experiment 20000265 PARAMETER Experiment Name: At_Open_Flower_P Parameter: Age (day) Value: 21
  misc_feature: MA Experiment 20000265 PARAMETER Experiment Name: At_Open_Flower_P Parameter: Plant Line Value: WS
  misc_feature: MA Experiment 20000265 PARAMETER Experiment Name: At_Open_Flower_P Parameter: Tissue Value: Closed Flower vs. Whole Plant
  misc_feature: MA Experiment ID: 20000286 Result: Up-regulated in Transcription
  misc_feature: MA Experiment 20000286 PARAMETER Experiment Name: At_Open_Flower_P Parameter: Age (day) Value: 21
  misc_feature: MA Experiment 20000286 PARAMETER Experiment Name: At_Open_Flower_P Parameter: Plant Line Value: WS
  misc_feature: MA Experiment 20000286 PARAMETER Experiment Name: At_Open_Flower_P Parameter: Tissue Value: Half Open vs. Whole Plant
  misc_feature: MA Experiment ID: 20000438 Result: Down-regulated in Transcription
  misc_feature: MA Experiment 20000438 PARAMETER Experiment Name: At_Shoots__P Parameter: Age (day) Value: 14
  misc_feature: MA Experiment 20000438 PARAMETER Experiment Name: At_Shoots__P Parameter: Tissue Value: Shoots vs. Whole Plant
  misc_feature: MA Experiment ID: 20000439 Result: Down-regulated in Transcription
  misc_feature: MA Experiment 20000439 PARAMETER Experiment Name: At_Roots__P Parameter: Age (day) Value: 14 vs. 21
  misc_feature: MA Experiment 20000439 PARAMETER Experiment Name: At_Roots__P Parameter: Organism Value: A. thaliana
  misc_feature: MA Experiment 20000439 PARAMETER Experiment Name: At_Roots__P Parameter: Tissue Value: Roots vs. Whole Plant
  misc_feature: MA Experiment ID: 20001451 Result: Up-regulated in Transcription
  misc_feature: MA Experiment 20001451 PARAMETER Experiment Name: At_Far-red-induction_P Parameter: Age (day) Value: 7
  misc_feature: MA Experiment 20001451 PARAMETER Experiment Name: At_Far-red-induction_P Parameter: Light Value: Far-red vs. White
  misc_feature: MA Experiment 20001451 PARAMETER Experiment Name: At_Far-red-induction_P Parameter: Organism Value: A. thaliana
  misc_feature: MA Experiment 20001451 PARAMETER Experiment Name: At_Far-red-induction_P Parameter: Plant Line Value: Columbia
  misc_feature: MA Experiment 20001451 PARAMETER Experiment Name: At_Far-red-induction_P Parameter: Timepoint (hr) Value: 24
  misc_feature: MA Experiment 20001451 PARAMETER Experiment Name: At_Far-red-induction_P Parameter: Tissue Value: Whole Plant
  misc_feature: MA Experiment ID: 20001771 Result: Up-regulated in Transcription
  misc_feature: MA Experiment 20001771 PARAMETER Experiment Name: At_Far-red-enriched-adult_P Parameter: Age (day) Value: 28
  misc_feature: MA Experiment 20001771 PARAMETER Experiment Name: At_Far-red-enriched-adult_P Parameter: Light Value: Far-red enriched vs. White
  misc_feature: MA Experiment 20001771 PARAMETER Experiment Name: At_Far-red-enriched-adult_P Parameter: Organism Value: A. thaliana
  misc_feature: MA Experiment 20001771 PARAMETER Experiment Name: At_Far-red-enriched-adult_P Parameter: Plant Line Value: Columbia
  misc_feature: MA Experiment 20001771 PARAMETER Experiment Name: At_Far-red-enriched-adult_P Parameter: Timepoint (hr) Value: 16
  misc_feature: MA Experiment 20001771 PARAMETER Experiment Name: At_Far-red-enriched-adult_P Parameter: Tissue Value: Aerial
  misc_feature: MA Experiment ID: 20001911 Result: Down-regulated in Transcription
  misc_feature: MA Experiment 20001911 PARAMETER Experiment Name: At_Drought_Reproduction_P Parameter: Age (day) Value: 40
  misc_feature: MA Experiment 20001911 PARAMETER Experiment Name: At_Drought_Reproduction_P Parameter: Organism Value: A. thaliana
  misc_feature: MA Experiment 20001911 PARAMETER Experiment Name: At_Drought_Reproduction_P Parameter: Plant Line Value: WS
  misc_feature: MA Experiment 20001911 PARAMETER Experiment Name: At_Drought_Reproduction_P Parameter: Timepoint (day) Value: 10
  misc_feature: MA Experiment 20001911 PARAMETER Experiment Name: At_Drought_Reproduction_P Parameter: Tissue Value: Flowers
  misc_feature: MA Experiment 20001911 PARAMETER Experiment Name: At_Drought_Reproduction_P Parameter: Treatment Value: Drought vs. No Drought
gtccaacttttaaaccaacaaaaatgctgaatgtacttcgaaattctaacctgacccttgccgttttgatttgctttgtcttgatagcttcaaagctatgttccgtcgattcctctgtgtatgacccacacaaaaccctgaagcagcggttcgagaagtggcttaaaacccacagcaaattatatggaggaagggatgagtggatgctacggtttgggatatatcagtctaacgtccagttgattgactacatcaactccctccacttgccctttaagctaacggataatagatttgcagatatgaccaattctgagtttaaggcccattttctcgggttgaacacgtcttccttgaggttacacaagaagcagagaccagtttgtgacccagcaggcaatgtcccggacgctgtggactggaggactcaaggtgctgtgactcctatcagaaatcaaggaaaatgcggaggttgctgggcattctctgcagtagcagctattgaaggcatcaacaagattaaaacagggaatttagtgtctctctcagaacaacaactcatagattgtgatgtcggcacttacaacaaaggctgtagtggcggattaatggaaacagcatttgaattcatcaaaaccaatggtggactcgccacggagaccgactacccatacacaggcatagagggtacctgcgaccaagaaaaatccaaaaataaggtagttacgatacaaggataccaaaaggtagcccaaaacgaggcgagcctacaaatcgctgcagctcaacagccagtatcagttggaatcgatgctggtgggtttatctttcagctctactcctccggtgttttcacaaattactgtggaacaaatctcaaccatggagtgactgttgttggatatggagtagaaggcgatcaaaagtactggatcgtaaagaattcatggggaactggctggggtgaagaaggctacatacggatggagcgtggtgtaagtgaagacacgggtaaatgtggtattgctatgatggcaagctatcccttgcagtga

SEQ ID NO: 50521 - protein, 350 aa, Arabidopsis thaliana
  peptide (1)..(350): Ceres Seq. ID no. 13592399
  misc_feature (134)..(349): Pfam Name: Papain family cysteine protease Pfam Description: Papain family cysteine protease
  misc_feature (17)..(350): Homolog of NCBI NO: 18141285 NR Description: senescence-associated cysteine protease [Brassica
  misc_feature (50)..(348): Homolog of NCBI NO: 13897890 NR Description: putative cysteine protease [Ipomoea batatas]
  misc_feature (50)..(350): Homolog of NCBI NO: 7435794 NR Description: cysteine proteinase (EC 3.4.22.-) 1 precursor -
  misc_feature (36)..(350): Homolog of NCBI NO: 7435791 NR Description: cysteine proteinase (EC 3.4.22.-) 3 precursor -
  misc_feature (19)..(350): Homolog of NCBI NO: 600111 NR Description: cysteine proteinase [Vicia sativa]
  misc_feature (14)..(348): Homolog of NCBI NO: 24285904 NR Description: cysteine proteinase precursor [Ipomoea batatas]
  misc_feature (19)..(348): Homolog of NCBI NO: 18141281 NR Description: senescence-associated cysteine protease [Brassica
  misc_feature (17)..(350): Homolog of NCBI NO: 3688528 NR Description: pre-pro-TPE4A protein [Pisum sativum]
  misc_feature (16)..(348): Homolog of NCBI NO: 18402225 NR Description: cysteine proteinase [Arabidopsis thaliana]
  misc_feature (8)..(350): Homolog of NCBI NO: 18390634 NR Description: cysteine proteinase [Arabidopsis thaliana]
PTFKPTKMLNVLRNSNLTLAVLICFVLIASKLCSVDSSVYDPHKTLKQRFEKWLKTHSKLYGGRDEWMLRFGIYQSNVQLIDYINSLHLPFKLTDNRFADMTNSEFKAHFLGLNTSSLRLHKKQRPVCDPAGNVPDAVDWRTQGAVTPIRNQGKCGGCWAFSAVAAIEGINKIKTGNLVSLSEQQLIDCDVGTYNKGCSGGLMETAFEFIKTNGGLATETDYPYTGIEGTCDQEKSKNKVVTIQGYQKVAQNEASLQIAAAQQPVSVGIDAGGFIFQLYSSGVFTNYCGTNLNHGVTVVGYGVEGDQKYWIVKNSWGTGWGEEGYIRMERGVSEDTGKCGIAMMASYPLQ

SEQ ID NO: 50522 - protein, 343 aa, Arabidopsis thaliana
  peptide (1)..(343): Ceres Seq. ID no. 13592400
  misc_feature (127)..(342): Pfam Name: Papain family cysteine protease Pfam Description: Papain family cysteine protease
  misc_feature (10)..(343): Homolog of NCBI NO: 18141285 NR Description: senescence-associated cysteine protease [Brassica
  misc_feature (43)..(341): Homolog of NCBI NO: 13897890 NR Description: putative cysteine protease [Ipomoea batatas]
  misc_feature (43)..(343): Homolog of NCBI NO: 7435794 NR Description: cysteine proteinase (EC 3.4.22.-) 1 precursor -
  misc_feature (29)..(343): Homolog of NCBI NO: 7435791 NR Description: cysteine proteinase (EC 3.4.22.-) 3 precursor -
  misc_feature (12)..(343): Homolog of NCBI NO: 600111 NR Description: cysteine proteinase [Vicia sativa]
  misc_feature (7)..(341): Homolog of NCBI NO: 24285904 NR Description: cysteine proteinase precursor [Ipomoea batatas]
  misc_feature (12)..(341): Homolog of NCBI NO: 18141281 NR Description: senescence-associated cysteine protease [Brassica
  misc_feature (10)..(343): Homolog of NCBI NO: 3688528 NR Description: pre-pro-TPE4A protein [Pisum sativum]
  misc_feature (9)..(341): Homolog of NCBI NO: 18402225 NR Description: cysteine proteinase [Arabidopsis thaliana]
  misc_feature (1)..(343): Homolog of NCBI NO: 18390634 NR Description: cysteine proteinase [Arabidopsis thaliana]
MLNVLRNSNLTLAVLICFVLIASKLCSVDSSVYDPHKTLKQRFEKWLKTHSKLYGGRDEWMLRFGIYQSNVQLIDYINSLHLPFKLTDNRFADMTNSEFKAHFLGLNTSSLRLHKKQRPVCDPAGNVPDAVDWRTQGAVTPIRNQGKCGGCWAFSAVAAIEGINKIKTGNLVSLSEQQLIDCDVGTYNKGCSGGLMETAFEFIKTNGGLATETDYPYTGIEGTCDQEKSKNKVVTIQGYQKVAQNEASLQIAAAQQPVSVGIDAGGFIFQLYSSGVFTNYCGTNLNHGVTVVGYGVEGDQKYWIVKNSWGTGWGEEGYIRMERGVSEDTGKCGIAMMASYPLQ

SEQ ID NO: 50523 - protein, 283 aa, Arabidopsis thaliana
  peptide (1)..(283): Ceres Seq. ID no. 13592401
  misc_feature (67)..(282): Pfam Name: Papain family cysteine protease Pfam Description: Papain family cysteine protease
  misc_feature (1)..(283): Homolog of NCBI NO: 18141285 NR Description: senescence-associated cysteine protease [Brassica
  misc_feature (1)..(281): Homolog of NCBI NO: 13897890 NR Description: putative cysteine protease [Ipomoea batatas]
  misc_feature (1)..(283): Homolog of NCBI NO: 7435794 NR Description: cysteine proteinase (EC 3.4.22.-) 1 precursor -
  misc_feature (1)..(283): Homolog of NCBI NO: 7435791 NR Description: cysteine proteinase (EC 3.4.22.-) 3 precursor -
  misc_feature (1)..(283): Homolog of NCBI NO: 600111 NR Description: cysteine proteinase [Vicia sativa]
  misc_feature (1)..(281): Homolog of NCBI NO: 24285904 NR Description: cysteine proteinase precursor [Ipomoea batatas]
  misc_feature (1)..(281): Homolog of NCBI NO: 18141281 NR Description: senescence-associated cysteine protease [Brassica
  misc_feature (1)..(283): Homolog of NCBI NO: 3688528 NR Description: pre-pro-TPE4A protein [Pisum sativum]
  misc_feature (1)..(281): Homolog of NCBI NO: 18402225 NR Description: cysteine proteinase [Arabidopsis thaliana]
  misc_feature (1)..(283): Homolog of NCBI NO: 18390634 NR Description: cysteine proteinase [Arabidopsis thaliana]
MLRFGIYQSNVQLIDYINSLHLPFKLTDNRFADMTNSEFKAHFLGLNTSSLRLHKKQRPVCDPAGNVPDAVDWRTQGAVTPIRNQGKCGGCWAFSAVAAIEGINKIKTGNLVSLSEQQLIDCDVGTYNKGCSGGLMETAFEFIKTNGGLATETDYPYTGIEGTCDQEKSKNKVVTIQGYQKVAQNEASLQIAAAQQPVSVGIDAGGFIFQLYSSGVFTNYCGTNLNHGVTVVGYGVEGDQKYWIVKNSWGTGWGEEGYIRMERGVSEDTGKCGIAMMASYPLQ

SEQ ID NO: 50524 - DNA, 2278 bp, Arabidopsis thaliana
  misc_feature (1)..(2278): Ceres Seq. ID no. 13588547
  misc_feature: MA Experiment ID: 20000184 Result: Down-regulated in Transcription
  misc_feature: MA Experiment 20000184 PARAMETER Experiment Name: At_Shoots__P Parameter: Age (day) Value: 7
  misc_feature: MA Experiment 20000184 PARAMETER Experiment Name: At_Shoots__P Parameter: Tissue Value: Shoots vs. Whole Plant
  misc_feature: MA Experiment ID: 20000235 Result: Up-regulated in Transcription
  misc_feature: MA Experiment 20000235 PARAMETER Experiment Name: At_Siliques_P Parameter: Age (day) Value: 21
  misc_feature: MA Experiment 20000235 PARAMETER Experiment Name: At_Siliques_P Parameter: Organism Value: A. thaliana
  misc_feature: MA Experiment 20000235 PARAMETER Experiment Name: At_Siliques_P Parameter: Plant Line Value: WS
  misc_feature: MA Experiment 20000235 PARAMETER Experiment Name: At_Siliques_P Parameter: Tissue Value: 5-10mm Siliques vs. Whole Plant
  misc_feature: MA Experiment ID: 20000265 Result: Down-regulated in Transcription
  misc_feature: MA Experiment 20000265 PARAMETER Experiment Name: At_Open_Flower_P Parameter: Age (day) Value: 21
  misc_feature: MA Experiment 20000265 PARAMETER Experiment Name: At_Open_Flower_P Parameter: Plant Line Value: WS
  misc_feature: MA Experiment 20000265 PARAMETER Experiment Name: At_Open_Flower_P Parameter: Tissue Value: Closed Flower vs. Whole Plant
  misc_feature: MA Experiment ID: 20000439 Result: Down-regulated in Transcription
  misc_feature: MA Experiment 20000439 PARAMETER Experiment Name: At_Roots__P Parameter: Age (day) Value: 14 vs. 21
  misc_feature: MA Experiment 20000439 PARAMETER Experiment Name: At_Roots__P Parameter: Organism Value: A. thaliana
  misc_feature: MA Experiment 20000439 PARAMETER Experiment Name: At_Roots__P Parameter: Tissue Value: Roots vs. Whole Plant
  misc_feature: MA Experiment ID: 20000573 Result: Down-regulated in Transcription
  misc_feature: MA Experiment 20000573 PARAMETER Experiment Name: At_100uM_ABA_Mutants__P Parameter: Organism Value: A. thaliana
  misc_feature: MA Experiment 20000573 PARAMETER Experiment Name: At_100uM_ABA_Mutants__P Parameter: Plant Line Value: CS22 vs. Ler wt
  misc_feature: MA Experiment 20000573 PARAMETER Experiment Name: At_100uM_ABA_Mutants__P Parameter: Timepoint (hr) Value: N/A
  misc_feature: MA Experiment 20000573 PARAMETER Experiment Name: At_100uM_ABA_Mutants__P Parameter: Tissue Value: Whole Plant
  misc_feature: MA Experiment 20000573 PARAMETER Experiment Name: At_100uM_ABA_Mutants__P Parameter: Treatment Value: None
  misc_feature: MA Experiment ID: 20000794 Result: Up-regulated in Transcription
  misc_feature: MA Experiment 20000794 PARAMETER Experiment Name: At_Petals_P Parameter: Age (day) Value: 23-25 days
  misc_feature: MA Experiment 20000794 PARAMETER Experiment Name: At_Petals_P Parameter: Plant Line Value: WS
  misc_feature: MA Experiment 20000794 PARAMETER Experiment Name: At_Petals_P Parameter: Tissue Value: Petals vs. Whole plant
  misc_feature: MA Experiment ID: 20001248 Result: Down-regulated in Transcription
  misc_feature: MA Experiment 20001248 PARAMETER Experiment Name: At_Far-red-induction_P Parameter: Age (day) Value: 7
  misc_feature: MA Experiment 20001248 PARAMETER Experiment Name: At_Far-red-induction_P Parameter: Light Value: Far-red vs. White
  misc_feature: MA Experiment 20001248 PARAMETER Experiment Name: At_Far-red-induction_P Parameter: Organism Value: A. thaliana
  misc_feature: MA Experiment 20001248 PARAMETER Experiment Name: At_Far-red-induction_P Parameter: Plant Line Value: Columbia
  misc_feature: MA Experiment 20001248 PARAMETER Experiment Name: At_Far-red-induction_P Parameter: Timepoint (hr) Value: 4
  misc_feature: MA Experiment 20001248 PARAMETER Experiment Name: At_Far-red-induction_P Parameter: Tissue Value: Whole Plant
  misc_feature: MA Experiment ID: 20001451 Result: Up-regulated in Transcription
  misc_feature: MA Experiment 20001451 PARAMETER Experiment Name: At_Far-red-induction_P Parameter: Age (day) Value: 7
  misc_feature: MA Experiment 20001451 PARAMETER Experiment Name: At_Far-red-induction_P Parameter: Light Value: Far-red vs. White
  misc_feature: MA Experiment 20001451 PARAMETER Experiment Name: At_Far-red-induction_P Parameter: Organism Value: A. thaliana
  misc_feature: MA Experiment 20001451 PARAMETER Experiment Name: At_Far-red-induction_P Parameter: Plant Line Value: Columbia
  misc_feature: MA Experiment 20001451 PARAMETER Experiment Name: At_Far-red-induction_P Parameter: Timepoint (hr) Value: 24
  misc_feature: MA Experiment 20001451 PARAMETER Experiment Name: At_Far-red-induction_P Parameter: Tissue Value: Whole Plant
  misc_feature: MA Experiment ID: 20001906 Result: Down-regulated in Transcription
  misc_feature: MA Experiment 20001906 PARAMETER Experiment Name: At_Drought_Reproduction_P Parameter: Age (day) Value: 35
  misc_feature: MA Experiment 20001906 PARAMETER Experiment Name: At_Drought_Reproduction_P Parameter: Organism Value: A. thaliana
  misc_feature: MA Experiment 20001906 PARAMETER Experiment Name: At_Drought_Reproduction_P Parameter: Plant Line Value: WS
  misc_feature: MA Experiment 20001906 PARAMETER Experiment Name: At_Drought_Reproduction_P Parameter: Timepoint (day) Value: 5
  misc_feature: MA Experiment 20001906 PARAMETER Experiment Name: At_Drought_Reproduction_P Parameter: Tissue Value: Siliques
  misc_feature: MA Experiment 20001906 PARAMETER Experiment Name: At_Drought_Reproduction_P Parameter: Treatment Value: Drought vs. No Drought
  misc_feature: MA Experiment ID: 20001911 Result: Down-regulated in Transcription
  misc_feature: MA Experiment 20001911 PARAMETER Experiment Name: At_Drought_Reproduction_P Parameter: Age (day) Value: 40
  misc_feature: MA Experiment 20001911 PARAMETER Experiment Name: At_Drought_Reproduction_P Parameter: Organism Value: A. thaliana
  misc_feature: MA Experiment 20001911 PARAMETER Experiment Name: At_Drought_Reproduction_P Parameter: Plant Line Value: WS
  misc_feature: MA Experiment 20001911 PARAMETER Experiment Name: At_Drought_Reproduction_P Parameter: Timepoint (day) Value: 10
  misc_feature: MA Experiment 20001911 PARAMETER Experiment Name: At_Drought_Reproduction_P Parameter: Tissue Value: Flowers
  misc_feature: MA Experiment 20001911 PARAMETER Experiment Name: At_Drought_Reproduction_P Parameter: Treatment Value: Drought vs. No Drought
tacttgctccttttacatttcaacgaacaaaacacatgtatacatagaaagaaacgcaaatacgcagatataataaatggcgactggtcgatacatcgttgaggttgagaagggaaagcaaggcgttgatggaggaagtccatcggtcggtccagtgtaccggagtatctatgctaaagacggttttcctgaaccgcctgatgatctcgtcagtgcatgggatattttccgtttatctgtggagaaatctccaaataatcctatgcttggtcgtagagaaatagttgatggaaaagctgggaaatatgtatggcaaacttacaaagaagtacataatgtagtgattaagcttggaaactctatcagaactattggagttggaaaaggagataaatgcggtatttatggcgccaatagtcctgaatggattataagcatggaggcttgcaatgctcatggactctactgtgtacctttatatgacactctaggtgctggagcaatagaattcatcatttgtcatgctgaggtctcacttgcttttgctgaggagaacaagatttctgagttattgaagacagctccaaaatcaactaaatatttgaagtatattgtgagctttggtgaggttacaaataatcagagagtagaagctgagaggcacagattaacaatatattcatgggaccaattcttgaagctaggcgagggtaaacattatgaattaccagagaagaggagaagcgatgtttgcaccataatgtatacaagtggcacaactggtgatcctaaaggagtattgcttacaaatgagagcattattcatctccttgaaggtgttaaaaaattgcttaaaactattgatgaagagttaaccagtaaagatgtatatctctcatatctacctctggctcatatcttcgatcgtgtgattgaggagctgtgtatttatgaagcagcctctatcggattctggcgaggggatgttaagatattgatagaagacattgctgcattgaaaccgactgttttctgcgctgttcctcgcgttctagagagaatatacaccggtcttcagcagaaactttctgatggtggttttgtaaagaagaaattattcaactttgcattcaaatacaaacataaaaacatggagaaagggcagcctcatgaacaagcatctccaatagctgacaaaattgtatttaaaaaggtaaaagaagggttgggaggaaacgtgcgtcttatcctctcaggagcagctcctcttgcagctcacatcgaatctttccttcgagttgtcgcgtgtgctcatgttttgcaaggatacggtctaacagagagttgtggtgggacttttgtgtccattccaaacgagctttcaatgcttggaacggttggtccaccggttccaaacgttgacataaggctagagtcagttccagagatgggttatgacgctcttgcaagcaatccacgtggagagatttgcatcaggggaaagactttgttctctggatactacaaacgtgaagatctcactcaagaagtcttcattgatggatggcttcacactggtgatgtcggtgagtggcaaccagatggagccatgaagatcatcgaccgtaagaagaacatctttaaactgtctcaaggagaatacgttgccgttgagaacttggagaacatatacagtcatgtcgccgccattgaatcgatatgggtatatggaaacagctatgagtcttacttagtggctgtggtatgtccaagcaagatccagatcgagcattgggccaaagaacacaaagtttcaggagactttgagtctatctgccgaaaccaaaagactaaagagtttgtccttggagagttcaacagagtagccaaagacaaaaagctgaagggatttgagctgatcaaaggtgttcatttggacacagtcccgttcgacatggaaagagatctcatcactccttcttacaagatgaaaagacctcagcttctcaagtactatcagaaagagattgatgaaatgtataagaaaaacagagaagtgcagctacgagtgtaaagaaaggaagttgttggacaaatctctcaggtttatatgtttctcttatcactctaattcatattgttatatgtctctatgctgtgttaatatcgaagggtttttttctttctttgcttgtaaacaaccaaatcttttattgttcttaacattctcctgttttatgtatttgtattgatattttaataaagttctctgtccact

SEQ ID NO: 50525 - protein, 665 aa, Arabidopsis thaliana
  peptide (1)..(665): Ceres Seq. ID no. 13588548
  misc_feature (6)..(657): Homolog of NCBI NO: 15226536 NR Description: long-chain-fatty-acid--CoA ligase (acyl-CoA
  misc_feature (7)..(657): Homolog of NCBI NO: 22330132 NR Description: long-chain-fatty-acid--CoA ligase (acyl CoA
  misc_feature (2)..(655): Homolog of NCBI NO: 7437844 NR Description: probable long-chain-fatty-acid-CoA ligase (EC
  misc_feature (5)..(147): Homolog of NCBI NO: 7437841 NR Description: probable long-chain-fatty-acid-CoA ligase (EC
  misc_feature (266)..(648): Homolog of NCBI NO: 7437841 NR Description: probable long-chain-fatty-acid-CoA ligase (EC
  misc_feature (5)..(656): Homolog of NCBI NO: 34898260 NR Description: similar to long-chain-fatty-acid--CoA ligase 1
  misc_feature (5)..(660): Homolog of NCBI NO: 20805871 NR Description: long chain acyl-CoA synthetase 5 [Arabidopsis
  misc_feature (5)..(660): Homolog of NCBI NO: 15237023 NR Description: long-chain-fatty-acid--CoA ligase (acyl CoA
  misc_feature (5)..(660): Homolog of NCBI NO: 7437845 NR Description: probable long-chain-fatty-acid-CoA ligase (EC
  misc_feature (5)..(656): Homolog of NCBI NO: 15236634 NR Description: long-chain-fatty-acid--CoA ligase (acyl-CoA
MATGRYIVEVEKGKQGVDGGSPSVGPVYRSIYAKDGFPEPPDDLVSAWDIFRLSVEKSPNNPMLGRREIVDGKAGKYVWQTYKEVHNVVIKLGNSIRTIGVGKGDKCGIYGANSPEWIISMEACNAHGLYCVPLYDTLGAGAIEFIICHAEVSLAFAEENKISELLKTAPKSTKYLKYIVSFGEVTNNQRVEAERHRLTIYSWDQFLKLGEGKHYELPEKRRSDVCTIMYTSGTTGDPKGVLLTNESIIHLLEGVKKLLKTIDEELTSKDVYLSYLPLAHIFDRVIEELCIYEAASIGFWRGDVKILIEDIAALKPTVFCAVPRVLERIYTGLQQKLSDGGFVKKKLFNFAFKYKHKNMEKGQPHEQASPIADKIVFKKVKEGLGGNVRLILSGAAPLAAHIESFLRVVACAHVLQGYGLTESCGGTFVSIPNELSMLGTVGPPVPNVDIRLESVPEMGYDALASNPRGEICIRGKTLFSGYYKREDLTQEVFIDGWLHTGDVGEWQPDGAMKIIDRKKNIFKLSQGEYVAVENLENIYSHVAAIESIWVYGNSYESYLVAVVCPSKIQIEHWAKEHKVSGDFESICRNQKTKEFVLGEFNRVAKDKKLKGFELIKGVHLDTVPFDMERDLITPSYKMKRPQLLKYYQKEIDEMYKKNREVQLRV

SEQ ID NO: 50526 - protein, 603 aa, Arabidopsis thaliana
  peptide (1)..(603): Ceres Seq. ID no. 13588549
  misc_feature (1)..(595): Homolog of NCBI NO: 15226536 NR Description: long-chain-fatty-acid--CoA ligase (acyl-CoA
  misc_feature (1)..(595): Homolog of NCBI NO: 22330132 NR Description: long-chain-fatty-acid--CoA ligase (acyl CoA
  misc_feature (1)..(593): Homolog of NCBI NO: 7437844 NR Description: probable long-chain-fatty-acid-CoA ligase (EC
  misc_feature (1)..(85): Homolog of NCBI NO: 7437841 NR Description: probable long-chain-fatty-acid-CoA ligase (EC
  misc_feature (204)..(586): Homolog of NCBI NO: 7437841 NR Description: probable long-chain-fatty-acid-CoA ligase (EC
  misc_feature (1)..(594): Homolog of NCBI NO: 34898260 NR Description: similar to long-chain-fatty-acid--CoA ligase 1
  misc_feature (1)..(598): Homolog of NCBI NO: 20805871 NR Description: long chain acyl-CoA synthetase 5 [Arabidopsis
  misc_feature (1)..(598): Homolog of NCBI NO: 15237023 NR Description: long-chain-fatty-acid--CoA ligase (acyl CoA
  misc_feature (1)..(598): Homolog of NCBI NO: 7437845 NR Description: probable long-chain-fatty-acid-CoA ligase (EC
  misc_feature (1)..(594): Homolog of NCBI NO: 15236634 NR Description: long-chain-fatty-acid--CoA ligase (acyl-CoA
MLGRREIVDGKAGKYVWQTYKEVHNVVIKLGNSIRTIGVGKGDKCGIYGANSPEWIISMEACNAHGLYCVPLYDTLGAGAIEFIICHAEVSLAFAEENKISELLKTAPKSTKYLKYIVSFGEVTNNQRVEAERHRLTIYSWDQFLKLGEGKHYELPEKRRSDVCTIMYTSGTTGDPKGVLLTNESIIHLLEGVKKLLKTIDEELTSKDVYLSYLPLAHIFDRVIEELCIYEAASIGFWRGDVKILIEDIAALKPTVFCAVPRVLERIYTGLQQKLSDGGFVKKKLFNFAFKYKHKNMEKGQPHEQASPIADKIVFKKVKEGLGGNVRLILSGAAPLAAHIESFLRVVACAHVLQGYGLTESCGGTFVSIPNELSMLGTVGPPVPNVDIRLESVPEMGYDALASNPRGEICIRGKTLFSGYYKREDLTQEVFIDGWLHTGDVGEWQPDGAMKIIDRKKNIFKLSQGEYVAVENLENIYSHVAAIESIWVYGNSYESYLVAVVCPSKIQIEHWAKEHKVSGDFESICRNQKTKEFVLGEFNRVAKDKKLKGFELIKGVHLDTVPFDMERDLITPSYKMKRPQLLKYYQKEIDEMYKKNREVQLRV

SEQ ID NO: 50527 - protein, 545 aa, Arabidopsis thaliana
  peptide (1)..(545): Ceres Seq. ID no. 13588550
  misc_feature (1)..(537): Homolog of NCBI NO: 15226536 NR Description: long-chain-fatty-acid--CoA ligase (acyl-CoA
  misc_feature (1)..(537): Homolog of NCBI NO: 22330132 NR Description: long-chain-fatty-acid--CoA ligase (acyl CoA
  misc_feature (1)..(535): Homolog of NCBI NO: 7437844 NR Description: probable long-chain-fatty-acid-CoA ligase (EC
  misc_feature (1)..(27): Homolog of NCBI NO: 7437841 NR Description: probable long-chain-fatty-acid-CoA ligase (EC
  misc_feature (146)..(528): Homolog of NCBI NO: 7437841 NR Description: probable long-chain-fatty-acid-CoA ligase (EC
  misc_feature (1)..(536): Homolog of NCBI NO: 34898260 NR Description: similar to long-chain-fatty-acid--CoA ligase 1
  misc_feature (1)..(540): Homolog of NCBI NO: 20805871 NR Description: long chain acyl-CoA synthetase 5 [Arabidopsis
  misc_feature (1)..(540): Homolog of NCBI NO: 15237023 NR Description: long-chain-fatty-acid--CoA ligase (acyl CoA
  misc_feature (1)..(540): Homolog of NCBI NO: 7437845 NR Description: probable long-chain-fatty-acid-CoA ligase (EC
  misc_feature (1)..(536): Homolog of NCBI NO: 15236634 NR Description: long-chain-fatty-acid--CoA ligase (acyl-CoA
MEACNAHGLYCVPLYDTLGAGAIEFIICHAEVSLAFAEENKISELLKTAPKSTKYLKYIVSFGEVTNNQRVEAERHRLTIYSWDQFLKLGEGKHYELPEKRRSDVCTIMYTSGTTGDPKGVLLTNESIIHLLEGVKKLLKTIDEELTSKDVYLSYLPLAHIFDRVIEELCIYEAASIGFWRGDVKILIEDIAALKPTVFCAVPRVLERIYTGLQQKLSDGGFVKKKLFNFAFKYKHKNMEKGQPHEQASPIADKIVFKKVKEGLGGNVRLILSGAAPLAAHIESFLRVVACAHVLQGYGLTESCGGTFVSIPNELSMLGTVGPPVPNVDIRLESVPEMGYDALASNPRGEICIRGKTLFSGYYKREDLTQEVFIDGWLHTGDVGEWQPDGAMKIIDRKKNIFKLSQGEYVAVENLENIYSHVAAIESIWVYGNSYESYLVAVVCPSKIQIEHWAKEHKVSGDFESICRNQKTKEFVLGEFNRVAKDKKLKGFELIKGVHLDTVPFDMERDLITPSYKMKRPQLLKYYQKEIDEMYKKNREVQLRV

SEQ ID NO: 50528 - DNA, 1754 bp, Arabidopsis thaliana
  misc_feature (1)..(1754): Ceres Seq. ID no. 12602207
  misc_feature: MA Experiment ID: 20000173 Result: Down-regulated in Transcription
  misc_feature: MA Experiment 20000173 PARAMETER Experiment Name: At_42deg_Heat_P Parameter: Age (day) Value: 14
  misc_feature: MA Experiment 20000173 PARAMETER Experiment Name: At_42deg_Heat_P Parameter: Organism Value: A. thaliana
  misc_feature: MA Experiment 20000173 PARAMETER Experiment Name: At_42deg_Heat_P Parameter: Plant Line Value: WS
  misc_feature: MA Experiment 20000173 PARAMETER Experiment Name: At_42deg_Heat_P Parameter: Temperature (deg C) Value: 42 vs. 22
  misc_feature: MA Experiment 20000173 PARAMETER Experiment Name: At_42deg_Heat_P Parameter: Timepoint (hr) Value: 6
  misc_feature: MA Experiment 20000173 PARAMETER Experiment Name: At_42deg_Heat_P Parameter: Tissue Value: Aerial
  misc_feature: MA Experiment ID: 20000179 Result: Up-regulated in Transcription
  misc_feature: MA Experiment 20000179 PARAMETER Experiment Name: At_Germinating_Seeds_P Parameter: Age (hr) Value: 6 vs. 0
  misc_feature: MA Experiment 20000179 PARAMETER Experiment Name: At_Germinating_Seeds_P Parameter: Tissue Value: Germinating Seeds
  misc_feature: MA Experiment ID: 20000180 Result: Up-regulated in Transcription
  misc_feature: MA Experiment 20000180 PARAMETER Experiment Name: At_Germinating_Seeds_P Parameter: Age (hr) Value: 24 vs. 0
  misc_feature: MA Experiment 20000180 PARAMETER Experiment Name: At_Germinating_Seeds_P Parameter: Tissue Value: Germinating Seeds
  misc_feature: MA Experiment ID: 20001557 Result: Down-regulated in Transcription
  misc_feature: MA Experiment 20001557 PARAMETER Experiment Name: At_Drought_Soil_Dry_P Parameter: Age (day) Value: 27
  misc_feature: MA Experiment 20001557 PARAMETER Experiment Name: At_Drought_Soil_Dry_P Parameter: Organism Value: A. thaliana
  misc_feature: MA Experiment 20001557 PARAMETER Experiment Name: At_Drought_Soil_Dry_P Parameter: Plant Line Value: WS
  misc_feature: MA Experiment 20001557 PARAMETER Experiment Name: At_Drought_Soil_Dry_P Parameter: Post Timepoint (hr) Value: 3
  misc_feature: MA Experiment 20001557 PARAMETER Experiment Name: At_Drought_Soil_Dry_P Parameter: Post-Treatment Value: Re-Water vs. No Drought
  misc_feature: MA Experiment 20001557 PARAMETER Experiment Name: At_Drought_Soil_Dry_P Parameter: Timepoint (day) Value: 13
  misc_feature: MA Experiment 20001557 PARAMETER Experiment Name: At_Drought_Soil_Dry_P Parameter: Treatment Value: Drought vs. No Drought
  misc_feature: MA Experiment ID: 20001558 Result: Down-regulated in Transcription
  misc_feature: MA Experiment 20001558 PARAMETER Experiment Name: At_Drought_Soil_Dry_P Parameter: Age (day) Value: 27
  misc_feature: MA Experiment 20001558 PARAMETER Experiment Name: At_Drought_Soil_Dry_P Parameter: Organism Value: A. thaliana
  misc_feature: MA Experiment 20001558 PARAMETER Experiment Name: At_Drought_Soil_Dry_P Parameter: Plant Line Value: WS
  misc_feature: MA Experiment 20001558 PARAMETER Experiment Name: At_Drought_Soil_Dry_P Parameter: Post Timepoint (hr) Value: 6
  misc_feature: MA Experiment 20001558 PARAMETER Experiment Name: At_Drought_Soil_Dry_P Parameter: Post-Treatment Value: Re-Water vs. No Drought
  misc_feature: MA Experiment 20001558 PARAMETER Experiment Name: At_Drought_Soil_Dry_P Parameter: Timepoint (day) Value: 13
  misc_feature: MA Experiment 20001558 PARAMETER Experiment Name: At_Drought_Soil_Dry_P Parameter: Treatment Value: Drought vs. No Drought
  misc_feature: MA Experiment ID: 20001905 Result: Down-regulated in Transcription
  misc_feature: MA Experiment 20001905 PARAMETER Experiment Name: At_Drought_Reproduction_P Parameter: Age (day) Value: 40
  misc_feature: MA Experiment 20001905 PARAMETER Experiment Name: At_Drought_Reproduction_P Parameter: Organism Value: A. thaliana
  misc_feature: MA Experiment 20001905 PARAMETER Experiment Name: At_Drought_Reproduction_P Parameter: Plant Line Value: WS
  misc_feature: MA Experiment 20001905 PARAMETER Experiment Name: At_Drought_Reproduction_P Parameter: Timepoint (day) Value: 10
  misc_feature: MA Experiment 20001905 PARAMETER Experiment Name: At_Drought_Reproduction_P Parameter: Tissue Value: Rosettes
  misc_feature: MA Experiment 20001905 PARAMETER Experiment Name: At_Drought_Reproduction_P Parameter: Treatment Value: Drought vs. No Drought
gtcaaaagaatctgcgaaaaataagagagagagagagagaaacaggatcattcattatgcccgccttatctcactacagatcagtatcatctctaccgtccgttgaccgatcattccttctcatccaacgactcaggatccacggcagctcttcttccttccctgaatcttctccttctgcgtctattctctccggcgcagatccgttgaagtgtacggtctctggtggatctcttgctaaatggatcaccgggatttcagctggatccgccttagggtttctctattggtcctctggttcttctgattccatctctggtttgtttggtgggagtaatttattgtccttcgctgatagttcaacgccttctgtttgtggtgtaaaagtcggcgatctgaaaccgagatcgtttattccgaaattgtcgttgcctggttacagctctggattcatcttcggagatgcgtatagaaggaagatcttcttcaattacgagaaacgtttgagattacaaagtcctcctgaaaaggttttcgagtactttgcatctgttcgaacagataaaggagaaatactaatgaaaccggcagatttgatgagggcaattgtccccgtgtttcctccatcagaatctcatctagtaagagaaggatatttgactggggagagaaatcctggtgaacttagatgctctccttccgagttcttcatgctctttgatgttgataatgatggtcttatatccttcaaagagtatatattctttgtgacattactcagcattcctgaatcaagcttcgcagtggctttcaaaatgtttgatactgacaacaacggggagattgacaaagaagagtttaagacagtgatgagtctgatgcgatctcagcatagacaaggagttggccacagagatggccttcgaacagggttacatatgaccggttctgtcgaggatggaggattggtagaatacttctttgggaaagatggcagtcaaaaactgaaacacgacaaattcactaagtttatgaaagatctaactgaagagatgctgaggctggagtttgcacattatgactataaacgaagaggaagtatatcggccaaagattttgcattgtcgatggttgcagcggctgatgcaagccatttgagcaagctgcttgatagagttgagagtctgagcgaacacccgcatctccgggacatgcgtatctcactgaaggaattcaaacagtttgatgagctacgtagtaaacttggaccattctctctagcgctttttgcttatggcaaagctaatggtttacttacaatgaaagatttcaaacgagccgcctctcaggtatgtggaataacattgtcagacaatgtgatagaaattgcgtttcatgtgtttgactcgaatcaagatgggaatttgagtgtggatgagtttttgcgggttctgcatcgaagagagagggacgtggcacagccaattgcaaaaggattgtctcggtacttctcagatggatggaagggttctaagaactgttcctcatcgtgaagactcttcttcctctttggggcttaccgatgaaactcgaagactattttttgaggctcttgggttcatacgagtgagcccagagattttatgattactccacgctggcattgtaagaaagaaatctgaataaatctgtgtatagtttgatcgacctatgaacttttttgttttgttttgttaatgataaatggtaattgc

SEQ ID NO: 50529 - protein, 516 aa, Arabidopsis thaliana
  peptide (1)..(516): Ceres Seq. ID no. 12602208
  misc_feature (231)..(259): Pfam Name: EF hand Pfam Description: EF hand
  misc_feature (158)..(508): Homolog of NCBI NO: 11386185 NR Description: calcium binding atopy-related autoantigen 1
  misc_feature (156)..(511): Homolog of NCBI NO: 19920872 NR Description: CG4495-PA [Drosophila melanogaster]
  misc_feature (158)..(508): Homolog of NCBI NO: 13278855 NR Description: calcium binding atopy-related autoantigen 1 [Homo
  misc_feature (158)..(508): Homolog of NCBI NO: 40786511 NR Description: calcium binding atopy-related autoantigen 1
  misc_feature (158)..(508): Homolog of NCBI NO: 26346488 NR Description: unnamed protein product [Mus musculus]
  misc_feature (158)..(508): Homolog of NCBI NO: 21450201 NR Description: calcium binding atopy-related autoantigen 1 [Mus
  misc_feature (156)..(503): Homolog of NCBI NO: 39587689 NR Description: Hypothetical protein CBG01795 [Caenorhabditis
  misc_feature (156)..(503): Homolog of NCBI NO: 17543982 NR Description: EF hand calcium binding protein (65.2 kD)
  misc_feature (145)..(515): Homolog of NCBI NO: 38345151 NR Description: OSJNBa0014K14.5 [Oryza sativa (japonica
  misc_feature (19)..(516): Homolog of NCBI NO: 15236653 NR Description: putative protein
QKNLRKIRERERETGSFIMPALSHYRSVSSLPSVDRSFLLIQRLRIHGSSSSFPESSPSASILSGADPLKCTVSGGSLAKWITGISAGSALGFLYWSSGSSDSISGLFGGSNLLSFADSSTPSVCGVKVGDLKPRSFIPKLSLPGYSSGFIFGDAYRRKIFFNYEKRLRLQSPPEKVFEYFASVRTDKGEILMKPADLMRAIVPVFPPSESHLVREGYLTGERNPGELRCSPSEFFMLFDVDNDGLISFKEYIFFVTLLSIPESSFAVAFKMFDTDNNGEIDKEEFKTVMSLMRSQHRQGVGHRDGLRTGLHMTGSVEDGGLVEYFFGKDGSQKLKHDKFTKFMKDLTEEMLRLEFAHYDYKRRGSISAKDFALSMVAAADASHLSKLLDRVESLSEHPHLRDMRISLKEFKQFDELRSKLGPFSLALFAYGKANGLLTMKDFKRAASQVCGITLSDNVIEIAFHVFDSNQDGNLSVDEFLRVLHRRERDVAQPIAKGLSRYFSDGWKGSKNCSSS

SEQ ID NO: 50530 - protein, 498 aa, Arabidopsis thaliana
  peptide (1)..(498): Ceres Seq. ID no. 12602209
  misc_feature (213)..(241): Pfam Name: EF hand Pfam Description: EF hand
  misc_feature (140)..(490): Homolog of NCBI NO: 11386185 NR Description: calcium binding atopy-related autoantigen 1
  misc_feature (138)..(493): Homolog of NCBI NO: 19920872 NR Description: CG4495-PA [Drosophila melanogaster]
  misc_feature (140)..(490): Homolog of NCBI NO: 13278855 NR Description: calcium binding atopy-related autoantigen 1 [Homo
  misc_feature (140)..(490): Homolog of NCBI NO: 40786511 NR Description: calcium binding atopy-related autoantigen 1
  misc_feature (140)..(490): Homolog of NCBI NO: 26346488 NR Description: unnamed protein product [Mus musculus]
  misc_feature (140)..(490): Homolog of NCBI NO: 21450201 NR Description: calcium binding atopy-related autoantigen 1 [Mus
  misc_feature (138)..(485): Homolog of NCBI NO: 39587689 NR Description: Hypothetical protein CBG01795 [Caenorhabditis
  misc_feature (138)..(485): Homolog of NCBI NO: 17543982 NR Description: EF hand calcium binding protein (65.2 kD)
  misc_feature (127)..(497): Homolog of NCBI NO: 38345151 NR Description: OSJNBa0014K14.5 [Oryza sativa (japonica
  misc_feature (1)..(498): Homolog of NCBI NO: 15236653 NR Description: putative protein
MPALSHYRSVSSLPSVDRSFLLIQRLRIHGSSSSFPESSPSASILSGADPLKCTVSGGSLAKWITGISAGSALGFLYWSSGSSDSISGLFGGSNLLSFADSSTPSVCGVKVGDLKPRSFIPKLSLPGYSSGFIFGDAYRRKIFFNYEKRLRLQSPPEKVFEYFASVRTDKGEILMKPADLMRAIVPVFPPSESHLVREGYLTGERNPGELRCSPSEFFMLFDVDNDGLISFKEYIFFVTLLSIPESSFAVAFKMFDTDNNGEIDKEEFKTVMSLMRSQHRQGVGHRDGLRTGLHMTGSVEDGGLVEYFFGKDGSQKLKHDKFTKFMKDLTEEMLRLEFAHYDYKRRGSISAKDFALSMVAAADASHLSKLLDRVESLSEHPHLRDMRISLKEFKQFDELRSKLGPFSLALFAYGKANGLLTMKDFKRAASQVCGITLSDNVIEIAFHVFDSNQDGNLSVDEFLRVLHRRERDVAQPIAKGLSRYFSDGWKGSKNCSSS

SEQ ID NO: 50531 - protein, 324 aa, Arabidopsis thaliana
  peptide (1)..(324): Ceres Seq. ID no. 12602210
  misc_feature (39)..(67): Pfam Name: EF hand Pfam Description: EF hand
  misc_feature (1)..(316): Homolog of NCBI NO: 11386185 NR Description: calcium binding atopy-related autoantigen 1
  misc_feature (1)..(319): Homolog of NCBI NO: 19920872 NR Description: CG4495-PA [Drosophila melanogaster]
  misc_feature (1)..(316): Homolog of NCBI NO: 13278855 NR Description: calcium binding atopy-related autoantigen 1 [Homo
  misc_feature (1)..(316): Homolog of NCBI NO: 40786511 NR Description: calcium binding atopy-related autoantigen 1
  misc_feature (1)..(316): Homolog of NCBI NO: 26346488 NR Description: unnamed protein product [Mus musculus]
  misc_feature (1)..(316): Homolog of NCBI NO: 21450201 NR Description: calcium binding atopy-related autoantigen 1 [Mus
  misc_feature (1)..(311): Homolog of NCBI NO: 39587689 NR Description: Hypothetical protein CBG01795 [Caenorhabditis
  misc_feature (1)..(311): Homolog of NCBI NO: 17543982 NR Description: EF hand calcium binding protein (65.2 kD)
  misc_feature (1)..(323): Homolog of NCBI NO: 38345151 NR Description: OSJNBa0014K14.5 [Oryza sativa (japonica
  misc_feature (1)..(324): Homolog of NCBI NO: 15236653 NR Description: putative protein
MKPADLMRAIVPVFPPSESHLVREGYLTGERNPGELRCSPSEFFMLFDVDNDGLISFKEYIFFVTLLSIPESSFAVAFKMFDTDNNGEIDKEEFKTVMSLMRSQHRQGVGHRDGLRTGLHMTGSVEDGGLVEYFFGKDGSQKLKHDKFTKFMKDLTEEMLRLEFAHYDYKRRGSISAKDFALSMVAAADASHLSKLLDRVESLSEHPHLRDMRISLKEFKQFDELRSKLGPFSLALFAYGKANGLLTMKDFKRAASQVCGITLSDNVIEIAFHVFDSNQDGNLSVDEFLRVLHRRERDVAQPIAKGLSRYFSDGWKGSKNCSSS

SEQ ID NO: 50532 - DNA, 1426 bp, Arabidopsis thaliana
  misc_feature (1)..(1426): Ceres Seq. ID no. 13588381
  misc_feature: MA Experiment ID: 20000307 Result: Up-regulated in Transcription
  misc_feature: MA Experiment 20000307 PARAMETER Experiment Name: At_Germinating_Seeds_Sub_P Parameter: Age (hr) Value: 24 vs. 0
  misc_feature: MA Experiment 20000307 PARAMETER Experiment Name: At_Germinating_Seeds_Sub_P Parameter: Organism Value: A. thaliana
  misc_feature: MA Experiment 20000307 PARAMETER Experiment Name: At_Germinating_Seeds_Sub_P Parameter: Plant Line Value: WS
  misc_feature: MA Experiment 20000307 PARAMETER Experiment Name: At_Germinating_Seeds_Sub_P Parameter: Tissue Value: Germinating Seeds
  misc_feature: MA Experiment ID: 20000315 Result: Down-regulated in Transcription
  misc_feature: MA Experiment 20000315 PARAMETER Experiment Name: At_14day_Shoots-Roots_Sub_P Parameter: Age (day) Value: 14
  misc_feature: MA Experiment 20000315 PARAMETER Experiment Name: At_14day_Shoots-Roots_Sub_P Parameter: Organism Value: A. thaliana
  misc_feature: MA Experiment 20000315 PARAMETER Experiment Name: At_14day_Shoots-Roots_Sub_P Parameter: Plant Line Value: WS
  misc_feature: MA Experiment 20000315 PARAMETER Experiment Name: At_14day_Shoots-Roots_Sub_P Parameter: Tissue Value: Shoots vs. Whole Plant
atgaaaccttcatcaccaatttcactcactagttcttcaattgctagaaaagctcgtttttctccttacctcttcacactcttagccttcattcttttcgtctctgtcctctatggtgaagattttatgtgcatctttggacagctcgagcctaacttcgtcctcccgccttctcgaacacccgaaaagaataagaaatcggagaagcttgcgtttgctattggtaaaacagaggaaagctgtgacgttttcagcgggaaatgggtgagagatgaagtctcccgaccactgtatgaggaatgggagtgtccgtacattcaacctcagcttacatgtcaagaacacggccgtcccgacaaagactaccagttttggcggtggcagcctaatcactgcgatcttccctcgttcaacgcgtcactgatgctggagacattaagagggaagaggatgatgtatgtaggagactcgttaaaccgtggaatgtttgtatcaatgatttgtcttcttcatcgtcttattcctgaagatcagaaatcaattaaaaccaatggttccctcactgtcttcactgccaaggagtataacgcgacgatagagttctattgggcaccgtttcttctagaatcgaattcagacgatgcaattgtccatagaatatcggatagggttgtgagaaaaggatcaattaacaaacatggtcgtcactggaaaggagtcgatataatcatcttcaacacttatctgtggtggatgactggattgaagatgaacatcttagaggtttctgatattgggggtatatataggcaaggatcgtttgatgataaagagaagaatatcgtagaggtttcgactgaagatgcgtaccggatgggtatgaagagtatgttgagatgggtgaagaacaacatggatcgtaagaaaactagggtcttcttcactagcatgtctccaacgcatgccaaggggatagattggggaggtgaaccgggtcagaattgctataatcagacaacacttatagaagatccaagctactggggatcagattgtaggaaaagcataatgaaagtgattggagaagtgtttggaagatcgaaaacaccgataacgttactgaacataacgcaaatgtcgaattacaggaaagatgcacatacgtcgatatacaagaagcagtggagtccacttacagcggagcagctggagaatccaacgagctatgcggattgtgtacattggtgcttgcctggccttcaagatacttggaatgagcttctctttgctaaacttttctatacttgagataagagaaaacatttttttcctttgaagacgacagcgctttttgagtttggaaagagatcttgtggagaaattgtaaaatttagtcattgaattgatattgtcttttttggttgtg

SEQ ID NO: 50533 - protein, 435 aa, Arabidopsis thaliana
  peptide (1)..(435): Ceres Seq. ID no. 13588382
  misc_feature (251)..(432): Pfam Name: Arabidopsis proteins of unknown function Pfam Description: Arabidopsis proteins of unknown function
  misc_feature (74)..(429): Homolog of NCBI NO: 21536676 NR Description: unknown [Arabidopsis thaliana]
  misc_feature (74)..(429): Homolog of NCBI NO: 11291876 NR Description: hypothetical protein F7A7.140 - Arabidopsis
  misc_feature (74)..(429): Homolog of NCBI NO: 18413698 NR Description: expressed protein [Arabidopsis thaliana]
  misc_feature (63)..(434): Homolog of NCBI NO: 28876024 NR Description: unknown protein [Oryza sativa (japonica
  misc_feature (16)..(434): Homolog of NCBI NO: 28876013 NR Description: unknown protein [Oryza sativa (japonica
  misc_feature (8)..(43): Homolog of NCBI NO: 15228429 NR Description: expressed protein [Arabidopsis thaliana]
  misc_feature (56)..(434): Homolog of NCBI NO: 15228429 NR Description: expressed protein [Arabidopsis thaliana]
  misc_feature (78)..(435): Homolog of NCBI NO: 4588008 NR Description: hypothetical protein [Arabidopsis thaliana]
  misc_feature (1)..(435): Homolog of NCBI NO: 28393743 NR Description: unknown protein [Arabidopsis thaliana]
  misc_feature (1)..(435): Homolog of NCBI NO: 15226647 NR Description: expressed protein [Arabidopsis thaliana]
MKPSSPISLTSSSIARKARFSPYLFTLLAFILFVSVLYGEDFMCIFGQLEPNFVLPPSRTPEKNKKSEKLAFAIGKTEESCDVFSGKWVRDEVSRPLYEEWECPYIQPQLTCQEHGRPDKDYQFWRWQPNHCDLPSFNASLMLETLRGKRMMYVGDSLNRGMFVSMICLLHRLIPEDQKSIKTNGSLTVFTAKEYNATIEFYWAPFLLESNSDDAIVHRISDRVVRKGSINKHGRHWKGVDIIIFNTYLWWMTGLKMNILEVSDIGGIYRQGSFDDKEKNIVEVSTEDAYRMGMKSMLRWVKNNMDRKKTRVFFTSMSPTHAKGIDWGGEPGQNCYNQTTLIEDPSYWGSDCRKSIMKVIGEVFGRSKTPITLLNITQMSNYRKDAHTSIYKKQWSPLTAEQLENPTSYADCVHWCLPGLQDTWNELLFAKLFYT

SEQ ID NO: 50534 - protein, 393 aa, Arabidopsis thaliana
  peptide (1)..(393): Ceres Seq. ID no. 13588383
  misc_feature (209)..(390): Pfam Name: Arabidopsis proteins of unknown function Pfam Description: Arabidopsis proteins of unknown function
  misc_feature (16)..(390): Homolog of NCBI NO: 18412850 NR Description: expressed protein [Arabidopsis thaliana]
  misc_feature (32)..(387): Homolog of NCBI NO: 21536676 NR Description: unknown [Arabidopsis thaliana]
  misc_feature (32)..(387): Homolog of NCBI NO: 11291876 NR Description: hypothetical protein F7A7.140 - Arabidopsis
  misc_feature (32)..(387): Homolog of NCBI NO: 18413698 NR Description: expressed protein [Arabidopsis thaliana]
  misc_feature (21)..(392): Homolog of NCBI NO: 28876024 NR Description: unknown protein [Oryza sativa (japonica
  misc_feature (1)..(392): Homolog of NCBI NO: 28876013 NR Description: unknown protein [Oryza sativa (japonica
  misc_feature (14)..(392): Homolog of NCBI NO: 15228429 NR Description: expressed protein [Arabidopsis thaliana]
  misc_feature (36)..(393): Homolog of NCBI NO: 4588008 NR Description: hypothetical protein [Arabidopsis thaliana]
  misc_feature (1)..(393): Homolog of NCBI NO: 28393743 NR Description: unknown protein [Arabidopsis thaliana]
  misc_feature (1)..(393): Homolog of NCBI NO: 15226647 NR Description: expressed protein [Arabidopsis thaliana]
MCIFGQLEPNFVLPPSRTPEKNKKSEKLAFAIGKTEESCDVFSGKWVRDEVSRPLYEEWECPYIQPQLTCQEHGRPDKDYQFWRWQPNHCDLPSFNASLMLETLRGKRMMYVGDSLNRGMFVSMICLLHRLIPEDQKSIKTNGSLTVFTAKEYNATIEFYWAPFLLESNSDDAIVHRISDRVVRKGSINKHGRHWKGVDIIIFNTYLWWMTGLKMNILEVSDIGGIYRQGSFDDKEKNIVEVSTEDAYRMGMKSMLRWVKNNMDRKKTRVFFTSMSPTHAKGIDWGGEPGQNCYNQTTLIEDPSYWGSDCRKSIMKVIGEVFGRSKTPITLLNITQMSNYRKDAHTSIYKKQWSPLTAEQLENPTSYADCVHWCLPGLQDTWNELLFAKLFYT

SEQ ID NO: 50535 - protein, 294 aa, Arabidopsis thaliana
  peptide (1)..(294): Ceres Seq. ID no. 13588384
  misc_feature (110)..(291): Pfam Name: Arabidopsis proteins of unknown function Pfam Description: Arabidopsis proteins of unknown function
  misc_feature (1)..(291): Homolog of NCBI NO: 18412850 NR Description: expressed protein [Arabidopsis thaliana]
  misc_feature (1)..(288): Homolog of NCBI NO: 21536676 NR Description: unknown [Arabidopsis thaliana]
  misc_feature (1)..(288): Homolog of NCBI NO: 11291876 NR Description: hypothetical protein F7A7.140 - Arabidopsis
  misc_feature (1)..(288): Homolog of NCBI NO: 18413698 NR Description: expressed protein [Arabidopsis thaliana]
  misc_feature (1)..(293): Homolog of NCBI NO: 28876024 NR Description: unknown protein [Oryza sativa (japonica
  misc_feature (1)..(293): Homolog of NCBI NO: 28876013 NR Description: unknown protein [Oryza sativa (japonica
  misc_feature (1)..(293): Homolog of NCBI NO: 15228429 NR Description: expressed protein [Arabidopsis thaliana]
  misc_feature (1)..(294): Homolog of NCBI NO: 4588008 NR Description: hypothetical protein [Arabidopsis thaliana]
  misc_feature (1)..(294): Homolog of NCBI NO: 28393743 NR Description: unknown protein [Arabidopsis thaliana]
  misc_feature (1)..(294): Homolog of NCBI NO: 15226647 NR Description: expressed protein [Arabidopsis thaliana]
MLETLRGKRMMYVGDSLNRGMFVSMICLLHRLIPEDQKSIKTNGSLTVFTAKEYNATIEFYWAPFLLESNSDDAIVHRISDRVVRKGSINKHGRHWKGVDIIIFNTYLWWMTGLKMNILEVSDIGGIYRQGSFDDKEKNIVEVSTEDAYRMGMKSMLRWVKNNMDRKKTRVFFTSMSPTHAKGIDWGGEPGQNCYNQTTLIEDPSYWGSDCRKSIMKVIGEVFGRSKTPITLLNITQMSNYRKDAHTSIYKKQWSPLTAEQLENPTSYADCVHWCLPGLQDTWNELLFAKLFYT

SEQ ID NO: 50536 - DNA, 949 bp, Arabidopsis thaliana
  misc_feature (1)..(949): Ceres Seq. ID no. 13648157
  misc_feature: MA Experiment ID: 20000166 Result: Down-regulated in Transcription
  misc_feature: MA Experiment 20000166 PARAMETER Experiment Name: At_100uM_ABA_P Parameter: Age (day) Value: 14
  misc_feature: MA Experiment 20000166 PARAMETER Experiment Name: At_100uM_ABA_P Parameter: Organism Value: A. thaliana
  misc_feature: MA Experiment 20000166 PARAMETER Experiment Name: At_100uM_ABA_P Parameter: Plant Line Value: WS
  misc_feature: MA Experiment 20000166 PARAMETER Experiment Name: At_100uM_ABA_P Parameter: Timepoint (hr) Value: 1
  misc_feature: MA Experiment 20000166 PARAMETER Experiment Name: At_100uM_ABA_P Parameter: Tissue Value: Aerial
  misc_feature: MA Experiment 20000166 PARAMETER Experiment Name: At_100uM_ABA_P Parameter: Treatment Value: 100uM ABA vs. No Treatment
  misc_feature: MA Experiment ID: 20000173 Result: Down-regulated in Transcription
  misc_feature: MA Experiment 20000173 PARAMETER Experiment Name: At_42deg_Heat_P Parameter: Age (day) Value: 14
  misc_feature: MA Experiment 20000173 PARAMETER Experiment Name: At_42deg_Heat_P Parameter: Organism Value: A. thaliana
  misc_feature: MA Experiment 20000173 PARAMETER Experiment Name: At_42deg_Heat_P Parameter: Plant Line Value: WS
  misc_feature: MA Experiment 20000173 PARAMETER Experiment Name: At_42deg_Heat_P Parameter: Temperature (deg C) Value: 42 vs. 22
  misc_feature: MA Experiment 20000173 PARAMETER Experiment Name: At_42deg_Heat_P Parameter: Timepoint (hr) Value: 6
  misc_feature: MA Experiment 20000173 PARAMETER Experiment Name: At_42deg_Heat_P Parameter: Tissue Value: Aerial
  misc_feature: MA Experiment ID: 20000180 Result: Up-regulated in Transcription
  misc_feature: MA Experiment 20000180 PARAMETER Experiment Name: At_Germinating_Seeds_P Parameter: Age (hr) Value: 24 vs. 0
  misc_feature: MA Experiment 20000180 PARAMETER Experiment Name: At_Germinating_Seeds_P Parameter: Tissue Value: Germinating Seeds
  misc_feature: MA Experiment ID: 20000184 Result: Down-regulated in Transcription
  misc_feature: MA Experiment 20000184 PARAMETER Experiment Name: At_Shoots__P Parameter: Age (day) Value: 7
  misc_feature: MA Experiment 20000184 PARAMETER Experiment Name: At_Shoots__P Parameter: Tissue Value: Shoots vs. Whole Plant
  misc_feature: MA Experiment ID: 20000185 Result: Down-regulated in Transcription
  misc_feature: MA Experiment 20000185 PARAMETER Experiment Name: At_Roots__P Parameter: Age (day) Value: 7 vs. 21
  misc_feature: MA Experiment 20000185 PARAMETER Experiment Name: At_Roots__P Parameter: Organism Value: A. thaliana
  misc_feature: MA Experiment 20000185 PARAMETER Experiment Name: At_Roots__P Parameter: Tissue Value: Roots vs. Whole Plant
  misc_feature: MA Experiment ID: 20000234 Result: Down-regulated in Transcription
  misc_feature: MA Experiment 20000234 PARAMETER Experiment Name: At_Siliques_P Parameter: Age (day) Value: 21
  misc_feature: MA Experiment 20000234 PARAMETER Experiment Name: At_Siliques_P Parameter: Organism Value: A. thaliana
  misc_feature: MA Experiment 20000234 PARAMETER Experiment Name: At_Siliques_P Parameter: Plant Line Value: WS
  misc_feature: MA Experiment 20000234 PARAMETER Experiment Name: At_Siliques_P Parameter: Tissue Value: Less Than 5mm Siliques vs. Whole Plant
  misc_feature: MA Experiment ID: 20000265 Result: Down-regulated in Transcription
  misc_feature: MA Experiment 20000265 PARAMETER Experiment Name: At_Open_Flower_P Parameter: Age (day) Value: 21
  misc_feature: MA Experiment 20000265 PARAMETER Experiment Name: At_Open_Flower_P Parameter: Plant Line Value: WS
  misc_feature: MA Experiment 20000265 PARAMETER Experiment Name: At_Open_Flower_P Parameter: Tissue Value: Closed Flower vs. Whole Plant
  misc_feature: MA Experiment ID: 20000268 Result: Down-regulated in Transcription
  misc_feature: MA Experiment 20000268 PARAMETER Experiment Name: At_100mM_NaCl__P Parameter: Age (day) Value: 14
  misc_feature: MA Experiment 20000268 PARAMETER Experiment Name: At_100mM_NaCl__P Parameter: Organism Value: A. thaliana
  misc_feature: MA Experiment 20000268 PARAMETER Experiment Name: At_100mM_NaCl__P Parameter: Plant Line Value: WS
  misc_feature: MA Experiment 20000268 PARAMETER Experiment Name: At_100mM_NaCl__P Parameter: Timepoint (hr) Value: 6
  misc_feature: MA Experiment 20000268 PARAMETER Experiment Name: At_100mM_NaCl__P Parameter: Tissue Value: Whole Plant
  misc_feature: MA Experiment 20000268 PARAMETER Experiment Name: At_100mM_NaCl__P Parameter: Treatment Value: 100mM NaCl vs. No Treatment
  misc_feature: MA Experiment ID: 20000308 Result: Down-regulated in Transcription
  misc_feature: MA Experiment 20000308 PARAMETER Experiment Name: At_100mM_NaCl__P Parameter: Age (day) Value: 17
  misc_feature: MA Experiment 20000308 PARAMETER Experiment Name: At_100mM_NaCl__P Parameter: Organism Value: A. thaliana
  misc_feature: MA Experiment 20000308 PARAMETER Experiment Name: At_100mM_NaCl__P Parameter: Plant Line Value: WS
  misc_feature: MA Experiment 20000308 PARAMETER Experiment Name: At_100mM_NaCl__P Parameter: Timepoint (hr) Value: 72
  misc_feature: MA Experiment 20000308 PARAMETER Experiment Name: At_100mM_NaCl__P Parameter: Tissue Value: Whole Plant
  misc_feature: MA Experiment 20000308 PARAMETER Experiment Name: At_100mM_NaCl__P Parameter: Treatment Value: 100mM NaCl vs. No Treatment
  misc_feature: MA Experiment ID: 20000437 Result: Down-regulated in Transcription
  misc_feature: MA Experiment 20000437 PARAMETER Experiment Name: At_Drought_P Parameter: Age (day) Value: 8
  misc_feature: MA Experiment 20000437 PARAMETER Experiment Name: At_Drought_P Parameter: Organism Value: A. thaliana
  misc_feature: MA Experiment 20000437 PARAMETER Experiment Name: At_Drought_P Parameter: Plant Line Value: WS
  misc_feature: MA Experiment 20000437 PARAMETER Experiment Name: At_Drought_P Parameter: Timepoint (hr) Value: 24
  misc_feature: MA Experiment 20000437 PARAMETER Experiment Name: At_Drought_P Parameter: Tissue Value: Whole Plant
  misc_feature: MA Experiment 20000437 PARAMETER Experiment Name: At_Drought_P Parameter: Treatment Value: Drought vs. No Drought
  misc_feature: MA Experiment ID: 20000438 Result: Down-regulated in Transcription
  misc_feature: MA Experiment 20000438 PARAMETER Experiment Name: At_Shoots__P Parameter: Age (day) Value: 14
  misc_feature: MA Experiment 20000438 PARAMETER Experiment Name: At_Shoots__P Parameter: Tissue Value: Shoots vs. Whole Plant
  misc_feature: MA Experiment ID: 20000439 Result: Down-regulated in Transcription
  misc_feature: MA Experiment 20000439 PARAMETER Experiment Name: At_Roots__P Parameter: Age (day) Value: 14 vs. 21
  misc_feature: MA Experiment 20000439 PARAMETER Experiment Name: At_Roots__P Parameter: Organism Value: A. thaliana
  misc_feature: MA Experiment 20000439 PARAMETER Experiment Name: At_Roots__P Parameter: Tissue Value: Roots vs. Whole Plant
  misc_feature: MA Experiment ID: 20000455 Result: Down-regulated in Transcription
  misc_feature: MA Experiment 20000455 PARAMETER Experiment Name: At_100uM_ABA_P Parameter: Age (day) Value: 16
  misc_feature: MA Experiment 20000455 PARAMETER Experiment Name: At_100uM_ABA_P Parameter: Organism Value: A. thaliana
  misc_feature: MA Experiment 20000455 PARAMETER Experiment Name: At_100uM_ABA_P Parameter: Plant Line Value: WS
  misc_feature: MA Experiment 20000455 PARAMETER Experiment Name: At_100uM_ABA_P Parameter: Timepoint (hr) Value: 48
  misc_feature: MA Experiment 20000455 PARAMETER Experiment Name: At_100uM_ABA_P Parameter: Tissue Value: Aerial
  misc_feature: MA Experiment 20000455 PARAMETER Experiment Name: At_100uM_ABA_P Parameter: Treatment Value: 100uM ABA vs. No Treatment
  misc_feature: MA Experiment ID: 20000575 Result: Down-regulated in Transcription
  misc_feature: MA Experiment 20000575 PARAMETER Experiment Name: At_100uM_ABA_Mutants__P Parameter: Organism Value: A. thaliana
  misc_feature: MA Experiment 20000575 PARAMETER Experiment Name: At_100uM_ABA_Mutants__P Parameter: Plant Line Value: CS22
  misc_feature: MA Experiment 20000575 PARAMETER Experiment Name: At_100uM_ABA_Mutants__P Parameter: Timepoint (hr) Value: 6
  misc_feature: MA Experiment 20000575 PARAMETER Experiment Name: At_100uM_ABA_Mutants__P Parameter: Tissue Value: Whole Plant
  misc_feature: MA Experiment 20000575 PARAMETER Experiment Name: At_100uM_ABA_Mutants__P Parameter: Treatment Value: 1uM ABA vs. No Treatment
  misc_feature: MA Experiment ID: 20000576 Result: Down-regulated in Transcription
  misc_feature: MA Experiment 20000576 PARAMETER Experiment Name: At_100uM_ABA_Mutants__P Parameter: Organism Value: A. thaliana
  misc_feature: MA Experiment 20000576 PARAMETER Experiment Name: At_100uM_ABA_Mutants__P Parameter: Plant Line Value: CS23
  misc_feature: MA Experiment 20000576 PARAMETER Experiment Name: At_100uM_ABA_Mutants__P Parameter: Timepoint (hr) Value: 6
  misc_feature: MA Experiment 20000576 PARAMETER Experiment Name: At_100uM_ABA_Mutants__P Parameter: Tissue Value: Whole Plant
  misc_feature: MA Experiment 20000576 PARAMETER Experiment Name: At_100uM_ABA_Mutants__P Parameter: Treatment Value: 1uM ABA vs. No Treatment
  misc_feature: MA Experiment ID: 20000794 Result: Up-regulated in Transcription
  misc_feature: MA Experiment 20000794 PARAMETER Experiment Name: At_Petals_P Parameter: Age (day) Value: 23-25 days
  misc_feature: MA Experiment 20000794 PARAMETER Experiment Name: At_Petals_P Parameter: Plant Line Value: WS
  misc_feature: MA Experiment 20000794 PARAMETER Experiment Name: At_Petals_P Parameter: Tissue Value: Petals vs. Whole plant
  misc_feature: MA Experiment ID: 20001247 Result: Up-regulated in Transcription
  misc_feature: MA Experiment 20001247 PARAMETER Experiment Name: At_Far-red-induction_P Parameter: Age (day) Value: 7
  misc_feature: MA Experiment 20001247 PARAMETER Experiment Name: At_Far-red-induction_P Parameter: Light Value: Far-red vs. White
  misc_feature: MA Experiment 20001247 PARAMETER Experiment Name: At_Far-red-induction_P Parameter: Organism Value: A. thaliana
  misc_feature: MA Experiment 20001247 PARAMETER Experiment Name: At_Far-red-induction_P Parameter: Plant Line Value: Columbia
  misc_feature: MA Experiment 20001247 PARAMETER Experiment Name: At_Far-red-induction_P Parameter: Timepoint (hr) Value: 1
  misc_feature: MA Experiment 20001247 PARAMETER Experiment Name: At_Far-red-induction_P Parameter: Tissue Value: Whole Plant
  misc_feature: MA Experiment ID: 20001248 Result: Up-regulated in Transcription
  misc_feature: MA Experiment 20001248 PARAMETER Experiment Name: At_Far-red-induction_P Parameter: Age (day) Value: 7
  misc_feature: MA Experiment 20001248 PARAMETER Experiment Name: At_Far-red-induction_P Parameter: Light Value: Far-red vs. White
  misc_feature: MA Experiment 20001248 PARAMETER Experiment Name: At_Far-red-induction_P Parameter: Organism Value: A. thaliana
  misc_feature: MA Experiment 20001248 PARAMETER Experiment Name: At_Far-red-induction_P Parameter: Plant Line Value: Columbia
  misc_feature: MA Experiment 20001248 PARAMETER Experiment Name: At_Far-red-induction_P Parameter: Timepoint (hr) Value: 4
  misc_feature: MA Experiment 20001248 PARAMETER Experiment Name: At_Far-red-induction_P Parameter: Tissue Value: Whole Plant
  misc_feature: MA Experiment ID: 20001450 Result: Up-regulated in Transcription
  misc_feature: MA Experiment 20001450 PARAMETER Experiment Name: At_Far-red-induction_P Parameter: Age (day) Value: 7
  misc_feature: MA Experiment 20001450 PARAMETER Experiment Name: At_Far-red-induction_P Parameter: Light Value: Far-red vs. White
  misc_feature: MA Experiment 20001450 PARAMETER Experiment Name: At_Far-red-induction_P Parameter: Organism Value: A. thaliana
  misc_feature: MA Experiment 20001450 PARAMETER Experiment Name: At_Far-red-induction_P Parameter: Plant Line Value: Columbia
  misc_feature: MA Experiment 20001450 PARAMETER Experiment Name: At_Far-red-induction_P Parameter: Timepoint (hr) Value: 8
  misc_feature: MA Experiment 20001450 PARAMETER Experiment Name: At_Far-red-induction_P Parameter: Tissue Value: Whole Plant
  misc_feature: MA Experiment ID: 20001451 Result: Up-regulated in Transcription
  misc_feature: MA Experiment 20001451 PARAMETER Experiment Name: At_Far-red-induction_P Parameter: Age (day) Value: 7
  misc_feature: MA Experiment 20001451 PARAMETER Experiment Name: At_Far-red-induction_P Parameter: Light Value: Far-red vs. White
  misc_feature: MA Experiment 20001451 PARAMETER Experiment Name: At_Far-red-induction_P Parameter: Organism Value: A. thaliana
  misc_feature: MA Experiment 20001451 PARAMETER Experiment Name: At_Far-red-induction_P Parameter: Plant Line Value: Columbia
  misc_feature: MA Experiment 20001451 PARAMETER Experiment Name: At_Far-red-induction_P Parameter: Timepoint (hr) Value: 24
  misc_feature: MA Experiment 20001451 PARAMETER Experiment Name: At_Far-red-induction_P Parameter: Tissue Value: Whole Plant
  misc_feature: MA Experiment ID: 20001555 Result: Down-regulated in Transcription
  misc_feature: MA Experiment 20001555 PARAMETER Experiment Name: At_Drought_Soil_Dry_P Parameter: Age (day) Value: 24
  misc_feature: MA Experiment 20001555 PARAMETER Experiment Name: At_Drought_Soil_Dry_P Parameter: Organism Value: A. thaliana
  misc_feature: MA Experiment 20001555 PARAMETER Experiment Name: At_Drought_Soil_Dry_P Parameter: Plant Line Value: WS
  misc_feature: MA Experiment 20001555 PARAMETER Experiment Name: At_Drought_Soil_Dry_P Parameter: Post Timepoint (hr) Value: None
  misc_feature: MA Experiment 20001555 PARAMETER Experiment Name: At_Drought_Soil_Dry_P Parameter: Post-Treatment Value: None
  misc_feature: MA Experiment 20001555 PARAMETER Experiment Name: At_Drought_Soil_Dry_P Parameter: Timepoint (day) Value: 10
  misc_feature: MA Experiment 20001555 PARAMETER Experiment Name: At_Drought_Soil_Dry_P Parameter: Treatment Value: Drought vs. No Drought
  misc_feature: MA Experiment ID: 20001556 Result: Down-regulated in Transcription
  misc_feature: MA Experiment 20001556 PARAMETER Experiment Name: At_Drought_Soil_Dry_P Parameter: Age (day) Value: 26
  misc_feature: MA Experiment 20001556 PARAMETER Experiment Name: At_Drought_Soil_Dry_P Parameter: Organism Value: A. thaliana
  misc_feature: MA Experiment 20001556 PARAMETER Experiment Name: At_Drought_Soil_Dry_P Parameter: Plant Line Value: WS
  misc_feature: MA Experiment 20001556 PARAMETER Experiment Name: At_Drought_Soil_Dry_P Parameter: Post Timepoint (hr) Value: None
  misc_feature: MA Experiment 20001556 PARAMETER Experiment Name: At_Drought_Soil_Dry_P Parameter: Post-Treatment Value: None
  misc_feature: MA Experiment 20001556 PARAMETER Experiment Name: At_Drought_Soil_Dry_P Parameter: Timepoint (day) Value: 12
  misc_feature: MA Experiment 20001556 PARAMETER Experiment Name: At_Drought_Soil_Dry_P Parameter: Treatment Value: Drought vs. No Drought
  misc_feature: MA Experiment ID: 20001557 Result: Down-regulated in Transcription
  misc_feature: MA Experiment 20001557 PARAMETER Experiment Name: At_Drought_Soil_Dry_P Parameter: Age (day) Value: 27
  misc_feature: MA Experiment 20001557 PARAMETER Experiment Name: At_Drought_Soil_Dry_P Parameter: Organism Value: A. thaliana
  misc_feature: MA Experiment 20001557 PARAMETER Experiment Name: At_Drought_Soil_Dry_P Parameter: Plant Line Value: WS
  misc_feature: MA Experiment 20001557 PARAMETER Experiment Name: At_Drought_Soil_Dry_P Parameter: Post Timepoint (hr) Value: 3
  misc_feature: MA Experiment 20001557 PARAMETER Experiment Name: At_Drought_Soil_Dry_P Parameter: Post-Treatment Value: Re-Water vs. No Drought
  misc_feature: MA Experiment 20001557 PARAMETER Experiment Name: At_Drought_Soil_Dry_P Parameter: Timepoint (day) Value: 13
  misc_feature: MA Experiment 20001557 PARAMETER Experiment Name: At_Drought_Soil_Dry_P Parameter: Treatment Value: Drought vs. No Drought
  misc_feature: MA Experiment ID: 20001558 Result: Down-regulated in Transcription
  misc_feature: MA Experiment 20001558 PARAMETER Experiment Name: At_Drought_Soil_Dry_P Parameter: Age (day) Value: 27
  misc_feature: MA Experiment 20001558 PARAMETER Experiment Name: At_Drought_Soil_Dry_P Parameter: Organism Value: A. thaliana
  misc_feature: MA Experiment 20001558 PARAMETER Experiment Name: At_Drought_Soil_Dry_P Parameter: Plant Line Value: WS
  misc_feature: MA Experiment 20001558 PARAMETER Experiment Name: At_Drought_Soil_Dry_P Parameter: Post Timepoint (hr) Value: 6
  misc_feature: MA Experiment 20001558 PARAMETER Experiment Name: At_Drought_Soil_Dry_P Parameter: Post-Treatment Value: Re-Water vs. No Drought
  misc_feature: MA Experiment 20001558 PARAMETER Experiment Name: At_Drought_Soil_Dry_P Parameter: Timepoint (day) Value: 13
  misc_feature: MA Experiment 20001558 PARAMETER Experiment Name: At_Drought_Soil_Dry_P Parameter: Treatment Value: Drought vs. No Drought
  misc_feature: MA Experiment ID: 20001559 Result: Down-regulated in Transcription
  misc_feature: MA Experiment 20001559 PARAMETER Experiment Name: At_Drought_Soil_Dry_P Parameter: Age (day) Value: 28
  misc_feature: MA Experiment 20001559 PARAMETER Experiment Name: At_Drought_Soil_Dry_P Parameter: Organism Value: A. thaliana
  misc_feature: MA Experiment 20001559 PARAMETER Experiment Name: At_Drought_Soil_Dry_P Parameter: Plant Line Value: WS
  misc_feature: MA Experiment 20001559 PARAMETER Experiment Name: At_Drought_Soil_Dry_P Parameter: Post Timepoint (hr) Value: 29
  misc_feature: MA Experiment 20001559 PARAMETER Experiment Name: At_Drought_Soil_Dry_P Parameter: Post-Treatment Value: Re-Water vs. No Drought
  misc_feature: MA Experiment 20001559 PARAMETER Experiment Name: At_Drought_Soil_Dry_P Parameter: Timepoint (day) Value: 14
  misc_feature: MA Experiment 20001559 PARAMETER Experiment Name: At_Drought_Soil_Dry_P Parameter: Treatment Value: Drought vs. No Drought
  misc_feature: MA Experiment ID: 20001560 Result: Down-regulated in Transcription
  misc_feature: MA Experiment 20001560 PARAMETER Experiment Name: At_Drought_Soil_Dry_P Parameter: Age (day) Value: 28
  misc_feature: MA Experiment 20001560 PARAMETER Experiment Name: At_Drought_Soil_Dry_P Parameter: Organism Value: A. thaliana
  misc_feature: MA Experiment 20001560 PARAMETER Experiment Name: At_Drought_Soil_Dry_P Parameter: Plant Line Value: WS
  misc_feature: MA Experiment 20001560 PARAMETER Experiment Name: At_Drought_Soil_Dry_P Parameter: Post Timepoint (hr) Value: None
  misc_feature: MA Experiment 20001560 PARAMETER Experiment Name: At_Drought_Soil_Dry_P Parameter: Post-Treatment Value: None
  misc_feature: MA Experiment 20001560 PARAMETER Experiment Name: At_Drought_Soil_Dry_P Parameter: Timepoint (day) Value: 14
  misc_feature: MA Experiment 20001560 PARAMETER Experiment Name: At_Drought_Soil_Dry_P Parameter: Treatment Value: Drought vs. No Drought
  misc_feature: MA Experiment ID: 20001904 Result: Down-regulated in Transcription
  misc_feature: MA Experiment 20001904 PARAMETER Experiment Name: At_Drought_Reproduction_P Parameter: Age (day) Value: 37
  misc_feature: MA Experiment 20001904 PARAMETER Experiment Name: At_Drought_Reproduction_P Parameter: Organism Value: A. thaliana
  misc_feature: MA Experiment 20001904 PARAMETER Experiment Name: At_Drought_Reproduction_P Parameter: Plant Line Value: WS
  misc_feature: MA Experiment 20001904 PARAMETER Experiment Name: At_Drought_Reproduction_P Parameter: Timepoint (day) Value: 7
  misc_feature: MA Experiment 20001904 PARAMETER Experiment Name: At_Drought_Reproduction_P Parameter: Tissue Value: Rosettes
  misc_feature: MA Experiment 20001904 PARAMETER Experiment Name: At_Drought_Reproduction_P Parameter: Treatment Value: Drought vs. No Drought
  misc_feature: MA Experiment ID: 20001905 Result: Down-regulated in Transcription
  misc_feature: MA Experiment 20001905 PARAMETER Experiment Name: At_Drought_Reproduction_P Parameter: Age (day) Value: 40
  misc_feature: MA Experiment 20001905 PARAMETER Experiment Name: At_Drought_Reproduction_P Parameter: Organism Value: A. thaliana
  misc_feature: MA Experiment 20001905 PARAMETER Experiment Name: At_Drought_Reproduction_P Parameter: Plant Line Value: WS
  misc_feature: MA Experiment 20001905 PARAMETER Experiment Name: At_Drought_Reproduction_P Parameter: Timepoint (day) Value: 10
  misc_feature: MA Experiment 20001905 PARAMETER Experiment Name: At_Drought_Reproduction_P Parameter: Tissue Value: Rosettes
  misc_feature: MA Experiment 20001905 PARAMETER Experiment Name: At_Drought_Reproduction_P Parameter: Treatment Value: Drought vs. No Drought
  misc_feature: MA Experiment ID: 20001910 Result: Up-regulated in Transcription
  misc_feature: MA Experiment 20001910 PARAMETER Experiment Name: At_Drought_Reproduction_P Parameter: Age (day) Value: 37
  misc_feature: MA Experiment 20001910 PARAMETER Experiment Name: At_Drought_Reproduction_P Parameter: Organism Value: A. thaliana
  misc_feature: MA Experiment 20001910 PARAMETER Experiment Name: At_Drought_Reproduction_P Parameter: Plant Line Value: WS
  misc_feature: MA Experiment 20001910 PARAMETER Experiment Name: At_Drought_Reproduction_P Parameter: Timepoint (day) Value: 7
  misc_feature: MA Experiment 20001910 PARAMETER Experiment Name: At_Drought_Reproduction_P Parameter: Tissue Value: Flowers
  misc_feature: MA Experiment 20001910 PARAMETER Experiment Name: At_Drought_Reproduction_P Parameter: Treatment Value: Drought vs. No Drought
  misc_feature: MA Experiment ID: 20001911 Result: Up-regulated in Transcription
  misc_feature: MA Experiment 20001911 PARAMETER Experiment Name: At_Drought_Reproduction_P Parameter: Age (day) Value: 40
  misc_feature: MA Experiment 20001911 PARAMETER Experiment Name: At_Drought_Reproduction_P Parameter: Organism Value: A. thaliana
  misc_feature: MA Experiment 20001911 PARAMETER Experiment Name: At_Drought_Reproduction_P Parameter: Plant Line Value: WS
  misc_feature: MA Experiment 20001911 PARAMETER Experiment Name: At_Drought_Reproduction_P Parameter: Timepoint (day) Value: 10
  misc_feature: MA Experiment 20001911 PARAMETER Experiment Name: At_Drought_Reproduction_P Parameter: Tissue Value: Flowers
  misc_feature: MA Experiment 20001911 PARAMETER Experiment Name: At_Drought_Reproduction_P Parameter: Treatment Value: Drought vs. No Drought
gacgattttcaattaactctcttcttttttttttttttggtttttcatttaagtctattcaatcatggaaaccggtttaaacatcttaaagctatcgctatgcgtcagcctagtcgtggttggatcatatgctcaggctcccgcaccatggaatccatctaatgggtttcgtccggggacatgtgaccactacgagtgtcccacctataaattggtagaggccggatacggctttgagatccgcatgtacgacgctgccctatggatatctactagtcctatcccctccctatccatgactcaagccaccaaaaccggtttccgacgattaaataggtacatagaaggagataacaagagcaacgtgaagatgaacatgacagctccggtgatcgcacaagcaacgcctggaagatcagtctacacggtctcactctacctcccgaagaagaaccaacagaacccacctcaggccgatgatctccacgtgcggtctacgaaaccaacctacgtagccgtgagacagatcggtggctacgtgtcgaacaatgtagccaaggaagaagctgcggctctgatggaaagcctccgggattctaactggattttgcccatcgagaagagcaaaggaaagtcgccggcgtatttactcgctgtttataacccgccgtctcataccacggctagggtgattaatgagatcatggttccgtttaacatgtaatgatcatgttaatgacgccctcacgatttgattgttacgtagcaattggattagaagaggtggtttagaaccgatactgtaacagcagcttgcagcttctggtttaaccggtataaattgtatctctggttaagtggtgattaatattgttattttgtaaaggtgggaaaaactataaccaaaaagtttgataaaaagataaaaaataataactaaaattatcgt

SEQ ID NO: 50537 - protein, 219 aa, Arabidopsis thaliana; identical to SEQ ID NO: 49851
  peptide (1)..(219): Ceres Seq. ID no. 13648158
  misc_feature (42)..(218): Pfam Name: SOUL heme-binding protein Pfam Description: SOUL heme-binding protein
  misc_feature (57)..(202): Homolog of NCBI NO: 15778345 NR Description: C6ORF34B [Homo sapiens]
  misc_feature (28)..(202): Homolog of NCBI NO: 7657603 NR Description: heme binding protein 2
  misc_feature (46)..(213): Homolog of NCBI NO: 28278449 NR Description: Similar to heme binding protein 2 [Danio rerio]
  misc_feature (44)..(213): Homolog of NCBI NO: 34904402 NR Description: unnamed protein product [Oryza sativa (japonica
  misc_feature (1)..(219): Homolog of NCBI NO: 21593898 NR Description: SOUL-like protein [Arabidopsis thaliana]
  misc_feature (1)..(219): Homolog of NCBI NO: 18411970 NR Description: expressed protein [Arabidopsis thaliana]
  misc_feature (37)..(218): Homolog of NCBI NO: 34903864 NR Description: unnamed protein product [Oryza sativa (japonica
  misc_feature (1)..(219): Homolog of NCBI NO: 15220033 NR Description: SOUL-related protein [Arabidopsis thaliana]
  misc_feature (103)..(219): Homolog of NCBI NO: 16323115 NR Description: At1g78460/F3F9_3 [Arabidopsis thaliana]
  misc_feature (1)..(219): Homolog of NCBI NO: 15218357 NR Description: expressed protein [Arabidopsis thaliana]

SEQ ID NO: 50538 - protein, 159 aa, Arabidopsis thaliana; identical to SEQ ID NO: 49852
  peptide (1)..(159): Ceres Seq. ID no. 13648159
  misc_feature (1)..(158): Pfam Name: SOUL heme-binding protein Pfam Description: SOUL heme-binding protein
  misc_feature (1)..(142): Homolog of NCBI NO: 15778345 NR Description: C6ORF34B [Homo sapiens]
  misc_feature (1)..(142): Homolog of NCBI NO: 7657603 NR Description: heme binding protein 2
  misc_feature (1)..(153): Homolog of NCBI NO: 28278449 NR Description: Similar to heme binding protein 2 [Danio rerio]
  misc_feature (1)..(153): Homolog of NCBI NO: 34904402 NR Description: unnamed protein product [Oryza sativa (japonica
  misc_feature (1)..(159): Homolog of NCBI NO: 21593898 NR Description: SOUL-like protein [Arabidopsis thaliana]
  misc_feature (1)..(159): Homolog of NCBI NO: 18411970 NR Description: expressed protein [Arabidopsis thaliana]
  misc_feature (1)..(158): Homolog of NCBI NO: 34903864 NR Description: unnamed protein product [Oryza sativa (japonica
  misc_feature (1)..(159): Homolog of NCBI NO: 15220033 NR Description: SOUL-related protein [Arabidopsis thaliana]
  misc_feature (43)..(159): Homolog of NCBI NO: 16323115 NR Description: At1g78460/F3F9_3 [Arabidopsis thaliana]
  misc_feature (1)..(159): Homolog of NCBI NO: 15218357 NR Description: expressed protein [Arabidopsis thaliana]

SEQ ID NO: 50539 - protein, 142 aa, Arabidopsis thaliana; identical to SEQ ID NO: 49853
  peptide (1)..(142): Ceres Seq. ID no. 13648160
  misc_feature (1)..(141): Pfam Name: SOUL heme-binding protein Pfam Description: SOUL heme-binding protein
  misc_feature (1)..(125): Homolog of NCBI NO: 15778345 NR Description: C6ORF34B [Homo sapiens]
  misc_feature (1)..(125): Homolog of NCBI NO: 7657603 NR Description: heme binding protein 2
  misc_feature (1)..(136): Homolog of NCBI NO: 28278449 NR Description: Similar to heme binding protein 2 [Danio rerio]
  misc_feature (1)..(136): Homolog of NCBI NO: 34904402 NR Description: unnamed protein product [Oryza sativa (japonica
  misc_feature (1)..(142): Homolog of NCBI NO: 21593898 NR Description: SOUL-like protein [Arabidopsis thaliana]
  misc_feature (1)..(142): Homolog of NCBI NO: 18411970 NR Description: expressed protein [Arabidopsis thaliana]
  misc_feature (1)..(141): Homolog of NCBI NO: 34903864 NR Description: unnamed protein product [Oryza sativa (japonica
  misc_feature (1)..(142): Homolog of NCBI NO: 15220033 NR Description: SOUL-related protein [Arabidopsis thaliana]
  misc_feature (26)..(142): Homolog of NCBI NO: 16323115 NR Description: At1g78460/F3F9_3 [Arabidopsis thaliana]
  misc_feature (1)..(142): Homolog of NCBI NO: 15218357 NR Description: expressed protein [Arabidopsis thaliana]

SEQ ID NO: 50540 - DNA, 938 bp, Arabidopsis thaliana
  misc_feature (1)..(938): Ceres Seq. ID no. 12606069
  misc_feature: MA Experiment ID: 20001248 Result: Up-regulated in Transcription
  misc_feature: MA Experiment 20001248 PARAMETER Experiment Name: At_Far-red-induction_P Parameter: Age (day) Value: 7
  misc_feature: MA Experiment 20001248 PARAMETER Experiment Name: At_Far-red-induction_P Parameter: Light Value: Far-red vs. White
  misc_feature: MA Experiment 20001248 PARAMETER Experiment Name: At_Far-red-induction_P Parameter: Organism Value: A. thaliana
  misc_feature: MA Experiment 20001248 PARAMETER Experiment Name: At_Far-red-induction_P Parameter: Plant Line Value: Columbia
  misc_feature: MA Experiment 20001248 PARAMETER Experiment Name: At_Far-red-induction_P Parameter: Timepoint (hr) Value: 4
  misc_feature: MA Experiment 20001248 PARAMETER Experiment Name: At_Far-red-induction_P Parameter: Tissue Value: Whole Plant
gaaaaaatttctccaacagatcctttaaggagggatcaaaggggagtgattgcagagattttggggccgcccttcttactagacagcgttaagcttgtcggagccaggactatcaaaatcgactatcgatttccatttcgttttcattgaaatcgcatctgcatcttcttcaatccaatctctgagctcgttatcaccaccaccaccgtctttcctctccgataccggtgcggaagtcttgtcccaaaatgtctatcaggaggcctcaaatccctcggcttcttcttcaaaacgtctcttgcatgagaaacgcgcagcagattctaagacacgtgaatgtatctcttcatgacggtggtgcacttgtcttaactggaacaaacggatccggtaaatcaactttcttgagaatgttagctggattctcaaaaccctctgcaggagaaatcctttggaatggtcacgacatcacacagtcaggaatctttcaacaatacaaactccaactcaactggatctctttaaaagacgccatcaaagagagattcacagtactcgataatgtccaatggtttgagcttctcgagaataaaatcggcaaagctcaacccgcgttggagctaatggggttagggagactggtgaaagagaaatcgagaatgttatcgatgggtcagaggaaaagattgcaacttgcgaggctcctcgctatcgatagaccgatatggcttttggatgaaccatccgttgctttggatgatgaaggtgttagattgctcgagtatattatcgcagagcataggaaaaaaggagggattgtgattgtcgcgactcatcttccgatagacattgaagatgctatgatcttgaggcttcctcctaggtttccaaggaaaatgactttgattgatatgcttgatcgtgcagacatttcttag

SEQ ID NO: 50541 - protein, 229 aa, Arabidopsis thaliana
  peptide (1)..(229): Ceres Seq. ID no. 12606070
  misc_feature (36)..(196): Pfam Name: ABC transporter Pfam Description: ABC transporter
  misc_feature (10)..(201): Homolog of NCBI NO: 22962200 NR Description: hypothetical protein [Rhodopseudomonas palustris]
  misc_feature (18)..(209): Homolog of NCBI NO: 26248584 NR Description: Heme exporter protein A [Escherichia coli CFT073]
  misc_feature (18)..(209): Homolog of NCBI NO: 24113587 NR Description: Heme exporter protein A (Cytochrome c-type
  misc_feature (18)..(209): Homolog of NCBI NO: 16130138 NR Description: ATP binding protein of heme exporter A
  misc_feature (18)..(209): Homolog of NCBI NO: 9911057 NR Description: HEME EXPORTER PROTEIN A (CYTOCHROME C-TYPE
  misc_feature (11)..(209): Homolog of NCBI NO: 15802754 NR Description: ATP binding protein of heme exporter A
  misc_feature (1)..(209): Homolog of NCBI NO: 22965489 NR Description: hypothetical protein [Rhodospirillum rubrum]
  misc_feature (12)..(213): Homolog of NCBI NO: 23016499 NR Description: hypothetical protein [Magnetospirillum
  misc_feature (19)..(222): Homolog of NCBI NO: 39545846 NR Description: OSJNBb0060E08.17 [Oryza sativa (japonica
  misc_feature (1)..(229): Homolog of NCBI NO: 15221728 NR Description: ABC transporter family protein; protein id:
MSIRRPQIPRLLLQNVSCMRNAQQILRHVNVSLHDGGALVLTGTNGSGKSTFLRMLAGFSKPSAGEILWNGHDITQSGIFQQYKLQLNWISLKDAIKERFTVLDNVQWFELLENKIGKAQPALELMGLGRLVKEKSRMLSMGQRKRLQLARLLAIDRPIWLLDEPSVALDDEGVRLLEYIIAEHRKKGGIVIVATHLPIDIEDAMILRLPPRFPRKMTLIDMLDRADIS

SEQ ID NO: 50542 - protein, 211 aa, Arabidopsis thaliana
  peptide (1)..(211): Ceres Seq. ID no. 12606071
  misc_feature (18)..(178): Pfam Name: ABC transporter Pfam Description: ABC transporter
  misc_feature (1)..(183): Homolog of NCBI NO: 22962200 NR Description: hypothetical protein [Rhodopseudomonas palustris]
  misc_feature (1)..(191): Homolog of NCBI NO: 26248584 NR Description: Heme exporter protein A [Escherichia coli CFT073]
  misc_feature (1)..(191): Homolog of NCBI NO: 24113587 NR Description: Heme exporter protein A (Cytochrome c-type
  misc_feature (1)..(191): Homolog of NCBI NO: 16130138 NR Description: ATP binding protein of heme exporter A
  misc_feature (1)..(191): Homolog of NCBI NO: 9911057 NR Description: HEME EXPORTER PROTEIN A (CYTOCHROME C-TYPE
  misc_feature (1)..(191): Homolog of NCBI NO: 15802754 NR Description: ATP binding protein of heme exporter A
  misc_feature (1)..(191): Homolog of NCBI NO: 22965489 NR Description: hypothetical protein [Rhodospirillum rubrum]
  misc_feature (1)..(195): Homolog of NCBI NO: 23016499 NR Description: hypothetical protein [Magnetospirillum
  misc_feature (1)..(204): Homolog of NCBI NO: 39545846 NR Description: OSJNBb0060E08.17 [Oryza sativa (japonica
  misc_feature (1)..(211): Homolog of NCBI NO: 15221728 NR Description: ABC transporter family protein; protein id:
MRNAQQILRHVNVSLHDGGALVLTGTNGSGKSTFLRMLAGFSKPSAGEILWNGHDITQSGIFQQYKLQLNWISLKDAIKERFTVLDNVQWFELLENKIGKAQPALELMGLGRLVKEKSRMLSMGQRKRLQLARLLAIDRPIWLLDEPSVALDDEGVRLLEYIIAEHRKKGGIVIVATHLPIDIEDAMILRLPPRFPRKMTLIDMLDRADIS

SEQ ID NO: 50543 - protein, 175 aa, Arabidopsis thaliana
  peptide (1)..(175): Ceres Seq. ID no. 12606072
  misc_feature (1)..(142): Pfam Name: ABC transporter Pfam Description: ABC transporter
  misc_feature (1)..(147): Homolog of NCBI NO: 22962200 NR Description: hypothetical protein [Rhodopseudomonas palustris]
  misc_feature (1)..(155): Homolog of NCBI NO: 26248584 NR Description: Heme exporter protein A [Escherichia coli CFT073]
  misc_feature (1)..(155): Homolog of NCBI NO: 24113587 NR Description: Heme exporter protein A (Cytochrome c-type
  misc_feature (1)..(155): Homolog of NCBI NO: 16130138 NR Description: ATP binding protein of heme exporter A
  misc_feature (1)..(155): Homolog of NCBI NO: 9911057 NR Description: HEME EXPORTER PROTEIN A (CYTOCHROME C-TYPE
  misc_feature (1)..(155): Homolog of NCBI NO: 15802754 NR Description: ATP binding protein of heme exporter A
  misc_feature (1)..(155): Homolog of NCBI NO: 22965489 NR Description: hypothetical protein [Rhodospirillum rubrum]
  misc_feature (1)..(159): Homolog of NCBI NO: 23016499 NR Description: hypothetical protein [Magnetospirillum
  misc_feature (1)..(168): Homolog of NCBI NO: 39545846 NR Description: OSJNBb0060E08.17 [Oryza sativa (japonica
  misc_feature (1)..(175): Homolog of NCBI NO: 15221728 NR Description: ABC transporter family protein; protein id:
MLAGFSKPSAGEILWNGHDITQSGIFQQYKLQLNWISLKDAIKERFTVLDNVQWFELLENKIGKAQPALELMGLGRLVKEKSRMLSMGQRKRLQLARLLAIDRPIWLLDEPSVALDDEGVRLLEYIIAEHRKKGGIVIVATHLPIDIEDAMILRLPPRFPRKMTLIDMLDRADIS

SEQ ID NO: 50544 - DNA, 1943 bp, Arabidopsis thaliana
  misc_feature (1)..(1943): Ceres Seq. ID no. 13588865
  misc_feature: MA Experiment ID: 20000166 Result: Up-regulated in Transcription
  misc_feature: MA Experiment 20000166 PARAMETER Experiment Name: At_100uM_ABA_P Parameter: Age (day) Value: 14
  misc_feature: MA Experiment 20000166 PARAMETER Experiment Name: At_100uM_ABA_P Parameter: Organism Value: A. thaliana
  misc_feature: MA Experiment 20000166 PARAMETER Experiment Name: At_100uM_ABA_P Parameter: Plant Line Value: WS
  misc_feature: MA Experiment 20000166 PARAMETER Experiment Name: At_100uM_ABA_P Parameter: Timepoint (hr) Value: 1
  misc_feature: MA Experiment 20000166 PARAMETER Experiment Name: At_100uM_ABA_P Parameter: Tissue Value: Aerial
  misc_feature: MA Experiment 20000166 PARAMETER Experiment Name: At_100uM_ABA_P Parameter: Treatment Value: 100uM ABA vs. No Treatment
  misc_feature: MA Experiment ID: 20000169 Result: Up-regulated in Transcription
  misc_feature: MA Experiment 20000169 PARAMETER Experiment Name: At_100uM_ABA_P Parameter: Age (day) Value: 14
  misc_feature: MA Experiment 20000169 PARAMETER Experiment Name: At_100uM_ABA_P Parameter: Organism Value: A. thaliana
  misc_feature: MA Experiment 20000169 PARAMETER Experiment Name: At_100uM_ABA_P Parameter: Plant Line Value: WS
  misc_feature: MA Experiment 20000169 PARAMETER Experiment Name: At_100uM_ABA_P Parameter: Timepoint (hr) Value: 6
  misc_feature: MA Experiment 20000169 PARAMETER Experiment Name: At_100uM_ABA_P Parameter: Tissue Value: Aerial
  misc_feature: MA Experiment 20000169 PARAMETER Experiment Name: At_100uM_ABA_P Parameter: Treatment Value: 100uM ABA vs. No Treatment
  misc_feature: MA Experiment ID: 20000185 Result: Down-regulated in Transcription
  misc_feature: MA Experiment 20000185 PARAMETER Experiment Name: At_Roots__P Parameter: Age (day) Value: 7 vs. 21
  misc_feature: MA Experiment 20000185 PARAMETER Experiment Name: At_Roots__P Parameter: Organism Value: A. thaliana
  misc_feature: MA Experiment 20000185 PARAMETER Experiment Name: At_Roots__P Parameter: Tissue Value: Roots vs. Whole Plant
  misc_feature: MA Experiment ID: 20000227 Result: Down-regulated in Transcription
  misc_feature: MA Experiment 20000227 PARAMETER Experiment Name: At_Root-Tips-vs-Tops_P Parameter: Tissue Value: Root Tips vs. Root Tops
  misc_feature: MA Experiment ID: 20000234 Result: Up-regulated in Transcription
  misc_feature: MA Experiment 20000234 PARAMETER Experiment Name: At_Siliques_P Parameter: Age (day) Value: 21
  misc_feature: MA Experiment 20000234 PARAMETER Experiment Name: At_Siliques_P Parameter: Organism Value: A. thaliana
  misc_feature: MA Experiment 20000234 PARAMETER Experiment Name: At_Siliques_P Parameter: Plant Line Value: WS
  misc_feature: MA Experiment 20000234 PARAMETER Experiment Name: At_Siliques_P Parameter: Tissue Value: Less Than 5mm Siliques vs. Whole Plant
  misc_feature: MA Experiment ID: 20000235 Result: Up-regulated in Transcription
  misc_feature: MA Experiment 20000235 PARAMETER Experiment Name: At_Siliques_P Parameter: Age (day) Value: 21
  misc_feature: MA Experiment 20000235 PARAMETER Experiment Name: At_Siliques_P Parameter: Organism Value: A. thaliana
  misc_feature: MA Experiment 20000235 PARAMETER Experiment Name: At_Siliques_P Parameter: Plant Line Value: WS
  misc_feature: MA Experiment 20000235 PARAMETER Experiment Name: At_Siliques_P Parameter: Tissue Value: 5-10mm Siliques vs. Whole Plant
  misc_feature: MA Experiment ID: 20000264 Result: Up-regulated in Transcription
  misc_feature: MA Experiment 20000264 PARAMETER Experiment Name: At_Open_Flower_P Parameter: Age (day) Value: 21
  misc_feature: MA Experiment 20000264 PARAMETER Experiment Name: At_Open_Flower_P Parameter: Plant Line Value: WS
  misc_feature: MA Experiment 20000264 PARAMETER Experiment Name: At_Open_Flower_P Parameter: Tissue Value: Open Flower vs. Whole Plant
  misc_feature: MA Experiment ID: 20000265 Result: Up-regulated in Transcription
  misc_feature: MA Experiment 20000265 PARAMETER Experiment Name: At_Open_Flower_P Parameter: Age (day) Value: 21
  misc_feature: MA Experiment 20000265 PARAMETER Experiment Name: At_Open_Flower_P Parameter: Plant Line Value: WS
  misc_feature: MA Experiment 20000265 PARAMETER Experiment Name: At_Open_Flower_P Parameter: Tissue Value: Closed Flower vs. Whole Plant
  misc_feature: MA Experiment ID: 20000267 Result: Up-regulated in Transcription
  misc_feature: MA Experiment 20000267 PARAMETER Experiment Name: At_Drought_P Parameter: Age (day) Value: 7
  misc_feature: MA Experiment 20000267 PARAMETER Experiment Name: At_Drought_P Parameter: Organism Value: A. thaliana
  misc_feature: MA Experiment 20000267 PARAMETER Experiment Name: At_Drought_P Parameter: Plant Line Value: WS
  misc_feature: MA Experiment 20000267 PARAMETER Experiment Name: At_Drought_P Parameter: Timepoint (hr) Value: 6
  misc_feature: MA Experiment 20000267 PARAMETER Experiment Name: At_Drought_P Parameter: Tissue Value: Whole Plant
  misc_feature: MA Experiment 20000267 PARAMETER Experiment Name: At_Drought_P Parameter: Treatment Value: Drought vs. No Drought
  misc_feature: MA Experiment ID: 20000268 Result: Up-regulated in Transcription
  misc_feature: MA Experiment 20000268 PARAMETER Experiment Name: At_100mM_NaCl__P Parameter: Age (day) Value: 14
  misc_feature: MA Experiment 20000268 PARAMETER Experiment Name: At_100mM_NaCl__P Parameter: Organism Value: A. thaliana
  misc_feature: MA Experiment 20000268 PARAMETER Experiment Name: At_100mM_NaCl__P Parameter: Plant Line Value: WS
  misc_feature: MA Experiment 20000268 PARAMETER Experiment Name: At_100mM_NaCl__P Parameter: Timepoint (hr) Value: 6
  misc_feature: MA Experiment 20000268 PARAMETER Experiment Name: At_100mM_NaCl__P Parameter: Tissue Value: Whole Plant
  misc_feature: MA Experiment 20000268 PARAMETER Experiment Name: At_100mM_NaCl__P Parameter: Treatment Value: 100mM NaCl vs. No Treatment
  misc_feature: MA Experiment ID: 20000286 Result: Up-regulated in Transcription
  misc_feature: MA Experiment 20000286 PARAMETER Experiment Name: At_Open_Flower_P Parameter: Age (day) Value: 21
  misc_feature: MA Experiment 20000286 PARAMETER Experiment Name: At_Open_Flower_P Parameter: Plant Line Value: WS
  misc_feature: MA Experiment 20000286 PARAMETER Experiment Name: At_Open_Flower_P Parameter: Tissue Value: Half Open vs. Whole Plant
  misc_feature: MA Experiment ID: 20000308 Result: Up-regulated in Transcription
  misc_feature: MA Experiment 20000308 PARAMETER Experiment Name: At_100mM_NaCl__P Parameter: Age (day) Value: 17
  misc_feature: MA Experiment 20000308 PARAMETER Experiment Name: At_100mM_NaCl__P Parameter: Organism Value: A. thaliana
  misc_feature: MA Experiment 20000308 PARAMETER Experiment Name: At_100mM_NaCl__P Parameter: Plant Line Value: WS
  misc_feature: MA Experiment 20000308 PARAMETER Experiment Name: At_100mM_NaCl__P Parameter: Timepoint (hr) Value: 72
  misc_feature: MA Experiment 20000308 PARAMETER Experiment Name: At_100mM_NaCl__P Parameter: Tissue Value: Whole Plant
  misc_feature: MA Experiment 20000308 PARAMETER Experiment Name: At_100mM_NaCl__P Parameter: Treatment Value: 100mM NaCl vs. No Treatment
  misc_feature: MA Experiment ID: 20000436 Result: Up-regulated in Transcription
  misc_feature: MA Experiment 20000436 PARAMETER Experiment Name: At_Drought_P Parameter: Age (day) Value: 7
  misc_feature: MA Experiment 20000436 PARAMETER Experiment Name: At_Drought_P Parameter: Organism Value: A. thaliana
  misc_feature: MA Experiment 20000436 PARAMETER Experiment Name: At_Drought_P Parameter: Plant Line Value: WS
  misc_feature: MA Experiment 20000436 PARAMETER Experiment Name: At_Drought_P Parameter: Timepoint (hr) Value: 12
  misc_feature: MA Experiment 20000436 PARAMETER Experiment Name: At_Drought_P Parameter: Tissue Value: Whole Plant
  misc_feature: MA Experiment 20000436 PARAMETER Experiment Name: At_Drought_P Parameter: Treatment Value: Drought vs. No Drought
  misc_feature: MA Experiment ID: 20000439 Result: Down-regulated in Transcription
  misc_feature: MA Experiment 20000439 PARAMETER Experiment Name: At_Roots__P Parameter: Age (day) Value: 14 vs. 21
  misc_feature: MA Experiment 20000439 PARAMETER Experiment Name: At_Roots__P Parameter: Organism Value: A. thaliana
  misc_feature: MA Experiment 20000439 PARAMETER Experiment Name: At_Roots__P Parameter: Tissue Value: Roots vs. Whole Plant
  misc_feature: MA Experiment ID: 20000451 Result: Down-regulated in Transcription
  misc_feature: MA Experiment 20000451 PARAMETER Experiment Name: At_CS6879_Shoots-Roots_P Parameter: Age (day) Value: 14
  misc_feature: MA Experiment 20000451 PARAMETER Experiment Name: At_CS6879_Shoots-Roots_P Parameter: Organism Value: A. thaliana
  misc_feature: MA Experiment 20000451 PARAMETER Experiment Name: At_CS6879_Shoots-Roots_P Parameter: Plant Line Value: CS6879 vs. WS
  misc_feature: MA Experiment 20000451 PARAMETER Experiment Name: At_CS6879_Shoots-Roots_P Parameter: Tissue Value: Roots
  misc_feature: MA Experiment ID: 20000452 Result: Up-regulated in Transcription
  misc_feature: MA Experiment 20000452 PARAMETER Experiment Name: At_CS6879_Shoots-Roots_P Parameter: Age (day) Value: 14
  misc_feature: MA Experiment 20000452 PARAMETER Experiment Name: At_CS6879_Shoots-Roots_P Parameter: Organism Value: A. thaliana
  misc_feature: MA Experiment 20000452 PARAMETER Experiment Name: At_CS6879_Shoots-Roots_P Parameter: Plant Line Value: CS6879 vs. WS
  misc_feature: MA Experiment 20000452 PARAMETER Experiment Name: At_CS6879_Shoots-Roots_P Parameter: Tissue Value: Shoots
  misc_feature: MA Experiment ID: 20000453 Result: Up-regulated in Transcription
  misc_feature: MA Experiment 20000453 PARAMETER Experiment Name: At_100uM_ABA_P Parameter: Age (day) Value: 15
  misc_feature: MA Experiment 20000453 PARAMETER Experiment Name: At_100uM_ABA_P Parameter: Organism Value: A. thaliana
  misc_feature: MA Experiment 20000453 PARAMETER Experiment Name: At_100uM_ABA_P Parameter: Plant Line Value: WS
  misc_feature: MA Experiment 20000453 PARAMETER Experiment Name: At_100uM_ABA_P Parameter: Timepoint (hr) Value: 24
  misc_feature: MA Experiment 20000453 PARAMETER Experiment Name: At_100uM_ABA_P Parameter: Tissue Value: Aerial
  misc_feature: MA Experiment 20000453 PARAMETER Experiment Name: At_100uM_ABA_P Parameter: Treatment Value: 100uM ABA vs. No Treatment
  misc_feature: MA Experiment ID: 20000709 Result: Down-regulated in Transcription
  misc_feature: MA Experiment 20000709 PARAMETER Experiment Name: At_15mM_NH4NO3_L-to-H_P Parameter: Age (hr) Value: 14
  misc_feature: MA Experiment 20000709 PARAMETER Experiment Name: At_15mM_NH4NO3_L-to-H_P Parameter: Organism Value: A. thaliana
  misc_feature: MA Experiment 20000709 PARAMETER Experiment Name: At_15mM_NH4NO3_L-to-H_P Parameter: Plant Line Value: WS
  misc_feature: MA Experiment 20000709 PARAMETER Experiment Name: At_15mM_NH4NO3_L-to-H_P Parameter: Timepoint (hr) Value: 4
  misc_feature: MA Experiment 20000709 PARAMETER Experiment Name: At_15mM_NH4NO3_L-to-H_P Parameter: Tissue Value: Aerial
  misc_feature: MA Experiment 20000709 PARAMETER Experiment Name: At_15mM_NH4NO3_L-to-H_P Parameter: Treatment Value: 15mM NH4NO3 vs. 30mM Mannitol
  misc_feature: MA Experiment ID: 20000794 Result: Up-regulated in Transcription
  misc_feature: MA Experiment 20000794 PARAMETER Experiment Name: At_Petals_P Parameter: Age (day) Value: 23-25 days
  misc_feature: MA Experiment 20000794 PARAMETER Experiment Name: At_Petals_P Parameter: Plant Line Value: WS
  misc_feature: MA Experiment 20000794 PARAMETER Experiment Name: At_Petals_P Parameter: Tissue Value: Petals vs. Whole plant
  misc_feature: MA Experiment ID: 20001248 Result: Down-regulated in Transcription
  misc_feature: MA Experiment 20001248 PARAMETER Experiment Name: At_Far-red-induction_P Parameter: Age (day) Value: 7
  misc_feature: MA Experiment 20001248 PARAMETER Experiment Name: At_Far-red-induction_P Parameter: Light Value: Far-red vs. White
  misc_feature: MA Experiment 20001248 PARAMETER Experiment Name: At_Far-red-induction_P Parameter: Organism Value: A. thaliana
  misc_feature: MA Experiment 20001248 PARAMETER Experiment Name: At_Far-red-induction_P Parameter: Plant Line Value: Columbia
  misc_feature: MA Experiment 20001248 PARAMETER Experiment Name: At_Far-red-induction_P Parameter: Timepoint (hr) Value: 4
  misc_feature: MA Experiment 20001248 PARAMETER Experiment Name: At_Far-red-induction_P Parameter: Tissue Value: Whole Plant
  misc_feature: MA Experiment ID: 20001450 Result: Down-regulated in Transcription
  misc_feature: MA Experiment 20001450 PARAMETER Experiment Name: At_Far-red-induction_P Parameter: Age (day) Value: 7
  misc_feature: MA Experiment 20001450 PARAMETER Experiment Name: At_Far-red-induction_P Parameter: Light Value: Far-red vs. White
  misc_feature: MA Experiment 20001450 PARAMETER Experiment Name: At_Far-red-induction_P Parameter: Organism Value: A. thaliana
  misc_feature: MA Experiment 20001450 PARAMETER Experiment Name: At_Far-red-induction_P Parameter: Plant Line Value: Columbia
  misc_feature: MA Experiment 20001450 PARAMETER Experiment Name: At_Far-red-induction_P Parameter: Timepoint (hr) Value: 8
  misc_feature: MA Experiment 20001450 PARAMETER Experiment Name: At_Far-red-induction_P Parameter: Tissue Value: Whole Plant
  misc_feature: MA Experiment ID: 20001451 Result: Down-regulated in Transcription
  misc_feature: MA Experiment 20001451 PARAMETER Experiment Name: At_Far-red-induction_P Parameter: Age (day) Value: 7
  misc_feature: MA Experiment 20001451 PARAMETER Experiment Name: At_Far-red-induction_P Parameter: Light Value: Far-red vs. White
  misc_feature: MA Experiment 20001451 PARAMETER Experiment Name: At_Far-red-induction_P Parameter: Organism Value: A. thaliana
  misc_feature: MA Experiment 20001451 PARAMETER Experiment Name: At_Far-red-induction_P Parameter: Plant Line Value: Columbia
  misc_feature: MA Experiment 20001451 PARAMETER Experiment Name: At_Far-red-induction_P Parameter: Timepoint (hr) Value: 24
  misc_feature: MA Experiment 20001451 PARAMETER Experiment Name: At_Far-red-induction_P Parameter: Tissue Value: Whole Plant
  misc_feature: MA Experiment ID: 20001554 Result: Up-regulated in Transcription
  misc_feature: MA Experiment 20001554 PARAMETER Experiment Name: At_Drought_Soil_Dry_P Parameter: Age (day) Value: 21
  misc_feature: MA Experiment 20001554 PARAMETER Experiment Name: At_Drought_Soil_Dry_P Parameter: Organism Value: A. thaliana
  misc_feature: MA Experiment 20001554 PARAMETER Experiment Name: At_Drought_Soil_Dry_P Parameter: Plant Line Value: WS
  misc_feature: MA Experiment 20001554 PARAMETER Experiment Name: At_Drought_Soil_Dry_P Parameter: Post Timepoint (hr) Value: None
  misc_feature: MA Experiment 20001554 PARAMETER Experiment Name: At_Drought_Soil_Dry_P Parameter: Post-Treatment Value: None
  misc_feature: MA Experiment 20001554 PARAMETER Experiment Name: At_Drought_Soil_Dry_P Parameter: Timepoint (day) Value: 7
  misc_feature: MA Experiment 20001554 PARAMETER Experiment Name: At_Drought_Soil_Dry_P Parameter: Treatment Value: Drought vs. No Drought
  misc_feature: MA Experiment ID: 20001555 Result: Up-regulated in Transcription
  misc_feature: MA Experiment 20001555 PARAMETER Experiment Name: At_Drought_Soil_Dry_P Parameter: Age (day) Value: 24
  misc_feature: MA Experiment 20001555 PARAMETER Experiment Name: At_Drought_Soil_Dry_P Parameter: Organism Value: A. thaliana
  misc_feature: MA Experiment 20001555 PARAMETER Experiment Name: At_Drought_Soil_Dry_P Parameter: Plant Line Value: WS
  misc_feature: MA Experiment 20001555 PARAMETER Experiment Name: At_Drought_Soil_Dry_P Parameter: Post Timepoint (hr) Value: None
  misc_feature: MA Experiment 20001555 PARAMETER Experiment Name: At_Drought_Soil_Dry_P Parameter: Post-Treatment Value: None
  misc_feature: MA Experiment 20001555 PARAMETER Experiment Name: At_Drought_Soil_Dry_P Parameter: Timepoint (day) Value: 10
  misc_feature: MA Experiment 20001555 PARAMETER Experiment Name: At_Drought_Soil_Dry_P Parameter: Treatment Value: Drought vs. No Drought
  misc_feature: MA Experiment ID: 20001556 Result: Up-regulated in Transcription
  misc_feature: MA Experiment 20001556 PARAMETER Experiment Name: At_Drought_Soil_Dry_P Parameter: Age (day) Value: 26
  misc_feature: MA Experiment 20001556 PARAMETER Experiment Name: At_Drought_Soil_Dry_P Parameter: Organism Value: A. thaliana
  misc_feature: MA Experiment 20001556 PARAMETER Experiment Name: At_Drought_Soil_Dry_P Parameter: Plant Line Value: WS
  misc_feature: MA Experiment 20001556 PARAMETER Experiment Name: At_Drought_Soil_Dry_P Parameter: Post Timepoint (hr) Value: None
  misc_feature: MA Experiment 20001556 PARAMETER Experiment Name: At_Drought_Soil_Dry_P Parameter: Post-Treatment Value: None
  misc_feature: MA Experiment 20001556 PARAMETER Experiment Name: At_Drought_Soil_Dry_P Parameter: Timepoint (day) Value: 12
  misc_feature: MA Experiment 20001556 PARAMETER Experiment Name: At_Drought_Soil_Dry_P Parameter: Treatment Value: Drought vs. No Drought
  misc_feature: MA Experiment ID: 20001557 Result: Up-regulated in Transcription
  misc_feature: MA Experiment 20001557 PARAMETER Experiment Name: At_Drought_Soil_Dry_P Parameter: Age (day) Value: 27
  misc_feature: MA Experiment 20001557 PARAMETER Experiment Name: At_Drought_Soil_Dry_P Parameter: Organism Value: A. thaliana
  misc_feature: MA Experiment 20001557 PARAMETER Experiment Name: At_Drought_Soil_Dry_P Parameter: Plant Line Value: WS
  misc_feature: MA Experiment 20001557 PARAMETER Experiment Name: At_Drought_Soil_Dry_P Parameter: Post Timepoint (hr) Value: 3
  misc_feature: MA Experiment 20001557 PARAMETER Experiment Name: At_Drought_Soil_Dry_P Parameter: Post-Treatment Value: Re-Water vs. No Drought
  misc_feature: MA Experiment 20001557 PARAMETER Experiment Name: At_Drought_Soil_Dry_P Parameter: Timepoint (day) Value: 13
  misc_feature: MA Experiment 20001557 PARAMETER Experiment Name: At_Drought_Soil_Dry_P Parameter: Treatment Value: Drought vs. No Drought
  misc_feature: MA Experiment ID: 20001558 Result: Up-regulated in Transcription
  misc_feature: MA Experiment 20001558 PARAMETER Experiment Name: At_Drought_Soil_Dry_P Parameter: Age (day) Value: 27
  misc_feature: MA Experiment 20001558 PARAMETER Experiment Name: At_Drought_Soil_Dry_P Parameter: Organism Value: A. thaliana
  misc_feature: MA Experiment 20001558 PARAMETER Experiment Name: At_Drought_Soil_Dry_P Parameter: Plant Line Value: WS
  misc_feature: MA Experiment 20001558 PARAMETER Experiment Name: At_Drought_Soil_Dry_P Parameter: Post Timepoint (hr) Value: 6
  misc_feature: MA Experiment 20001558 PARAMETER Experiment Name: At_Drought_Soil_Dry_P Parameter: Post-Treatment Value: Re-Water vs. No Drought
  misc_feature: MA Experiment 20001558 PARAMETER Experiment Name: At_Drought_Soil_Dry_P Parameter: Timepoint (day) Value: 13
  misc_feature: MA Experiment 20001558 PARAMETER Experiment Name: At_Drought_Soil_Dry_P Parameter: Treatment Value: Drought vs. No Drought
  misc_feature: MA Experiment ID: 20001559 Result: Up-regulated in Transcription
  misc_feature: MA Experiment 20001559 PARAMETER Experiment Name: At_Drought_Soil_Dry_P Parameter: Age (day) Value: 28
  misc_feature: MA Experiment 20001559 PARAMETER Experiment Name: At_Drought_Soil_Dry_P Parameter: Organism Value: A. thaliana
  misc_feature: MA Experiment 20001559 PARAMETER Experiment Name: At_Drought_Soil_Dry_P Parameter: Plant Line Value: WS
  misc_feature: MA Experiment 20001559 PARAMETER Experiment Name: At_Drought_Soil_Dry_P Parameter: Post Timepoint (hr) Value: 29
  misc_feature: MA Experiment 20001559 PARAMETER Experiment Name: At_Drought_Soil_Dry_P Parameter: Post-Treatment Value: Re-Water vs. No Drought
  misc_feature: MA Experiment 20001559 PARAMETER Experiment Name: At_Drought_Soil_Dry_P Parameter: Timepoint (day) Value: 14
  misc_feature: MA Experiment 20001559 PARAMETER Experiment Name: At_Drought_Soil_Dry_P Parameter: Treatment Value: Drought vs. No Drought
  misc_feature: MA Experiment ID: 20001560 Result: Up-regulated in Transcription
  misc_feature: MA Experiment 20001560 PARAMETER Experiment Name: At_Drought_Soil_Dry_P Parameter: Age (day) Value: 28
  misc_feature: MA Experiment 20001560 PARAMETER Experiment Name: At_Drought_Soil_Dry_P Parameter: Organism Value: A. thaliana
  misc_feature: MA Experiment 20001560 PARAMETER Experiment Name: At_Drought_Soil_Dry_P Parameter: Plant Line Value: WS
  misc_feature: MA Experiment 20001560 PARAMETER Experiment Name: At_Drought_Soil_Dry_P Parameter: Post Timepoint (hr) Value: None
  misc_feature: MA Experiment 20001560 PARAMETER Experiment Name: At_Drought_Soil_Dry_P Parameter: Post-Treatment Value: None
  misc_feature: MA Experiment 20001560 PARAMETER Experiment Name: At_Drought_Soil_Dry_P Parameter: Timepoint (day) Value: 14
  misc_feature: MA Experiment 20001560 PARAMETER Experiment Name: At_Drought_Soil_Dry_P Parameter: Treatment Value: Drought vs. No Drought
  misc_feature: MA Experiment ID: 20001904 Result: Up-regulated in Transcription
  misc_feature: MA Experiment 20001904 PARAMETER Experiment Name: At_Drought_Reproduction_P Parameter: Age (day) Value: 37
  misc_feature: MA Experiment 20001904 PARAMETER Experiment Name: At_Drought_Reproduction_P Parameter: Organism Value: A. thaliana
  misc_feature: MA Experiment 20001904 PARAMETER Experiment Name: At_Drought_Reproduction_P Parameter: Plant Line Value: WS
  misc_feature: MA Experiment 20001904 PARAMETER Experiment Name: At_Drought_Reproduction_P Parameter: Timepoint (day) Value: 7
  misc_feature: MA Experiment 20001904 PARAMETER Experiment Name: At_Drought_Reproduction_P Parameter: Tissue Value: Rosettes
  misc_feature: MA Experiment 20001904 PARAMETER Experiment Name: At_Drought_Reproduction_P Parameter: Treatment Value: Drought vs. No Drought
  misc_feature: MA Experiment ID: 20001905 Result: Up-regulated in Transcription
  misc_feature: MA Experiment 20001905 PARAMETER Experiment Name: At_Drought_Reproduction_P Parameter: Age (day) Value: 40
  misc_feature: MA Experiment 20001905 PARAMETER Experiment Name: At_Drought_Reproduction_P Parameter: Organism Value: A. thaliana
  misc_feature: MA Experiment 20001905 PARAMETER Experiment Name: At_Drought_Reproduction_P Parameter: Plant Line Value: WS
  misc_feature: MA Experiment 20001905 PARAMETER Experiment Name: At_Drought_Reproduction_P Parameter: Timepoint (day) Value: 10
  misc_feature: MA Experiment 20001905 PARAMETER Experiment Name: At_Drought_Reproduction_P Parameter: Tissue Value: Rosettes
  misc_feature: MA Experiment 20001905 PARAMETER Experiment Name: At_Drought_Reproduction_P Parameter: Treatment Value: Drought vs. No Drought
  misc_feature: MA Experiment ID: 20001906 Result: Up-regulated in Transcription
  misc_feature: MA Experiment 20001906 PARAMETER Experiment Name: At_Drought_Reproduction_P Parameter: Age (day) Value: 35
  misc_feature: MA Experiment 20001906 PARAMETER Experiment Name: At_Drought_Reproduction_P Parameter: Organism Value: A. thaliana
  misc_feature: MA Experiment 20001906 PARAMETER Experiment Name: At_Drought_Reproduction_P Parameter: Plant Line Value: WS
  misc_feature: MA Experiment 20001906 PARAMETER Experiment Name: At_Drought_Reproduction_P Parameter: Timepoint (day) Value: 5
  misc_feature: MA Experiment 20001906 PARAMETER Experiment Name: At_Drought_Reproduction_P Parameter: Tissue Value: Siliques
  misc_feature: MA Experiment 20001906 PARAMETER Experiment Name: At_Drought_Reproduction_P Parameter: Treatment Value: Drought vs. No Drought
  misc_feature: MA Experiment ID: 20001908 Result: Up-regulated in Transcription
  misc_feature: MA Experiment 20001908 PARAMETER Experiment Name: At_Drought_Reproduction_P Parameter: Age (day) Value: 40
  misc_feature: MA Experiment 20001908 PARAMETER Experiment Name: At_Drought_Reproduction_P Parameter: Organism Value: A. thaliana
  misc_feature: MA Experiment 20001908 PARAMETER Experiment Name: At_Drought_Reproduction_P Parameter: Plant Line Value: WS
  misc_feature: MA Experiment 20001908 PARAMETER Experiment Name: At_Drought_Reproduction_P Parameter: Timepoint (day) Value: 10
  misc_feature: MA Experiment 20001908 PARAMETER Experiment Name: At_Drought_Reproduction_P Parameter: Tissue Value: Siliques
  misc_feature: MA Experiment 20001908 PARAMETER Experiment Name: At_Drought_Reproduction_P Parameter: Treatment Value: Drought vs. No Drought
  misc_feature: MA Experiment ID: 20001911 Result: Up-regulated in Transcription
  misc_feature: MA Experiment 20001911 PARAMETER Experiment Name: At_Drought_Reproduction_P Parameter: Age (day) Value: 40
  misc_feature: MA Experiment 20001911 PARAMETER Experiment Name: At_Drought_Reproduction_P Parameter: Organism Value: A. thaliana
  misc_feature: MA Experiment 20001911 PARAMETER Experiment Name: At_Drought_Reproduction_P Parameter: Plant Line Value: WS
  misc_feature: MA Experiment 20001911 PARAMETER Experiment Name: At_Drought_Reproduction_P Parameter: Timepoint (day) Value: 10
  misc_feature: MA Experiment 20001911 PARAMETER Experiment Name: At_Drought_Reproduction_P Parameter: Tissue Value: Flowers
  misc_feature: MA Experiment 20001911 PARAMETER Experiment Name: At_Drought_Reproduction_P Parameter: Treatment Value: Drought vs. No Drought
aacacttacaagttttacaacaaacgtaatatataaaacattactaattattacaagaaacaatcagaaacatcatggaggagcaaagcaagaacaagatcagtgaagaagaaaaacaactccatgggagaccaaatcgaccaaagggaggattaattaccatgcccttcatcttcgcgaacgagatatgtgaaaaattagcggtggtggggtttcacgcaaacatgataagttacttaacaacacagcttcaccttcccttaaccaaagcagccaacactctcacaaacttcgccgggacatcgagtcttactcctctccttggtgcctttatcgccgactctttcgccggccgattttggaccatcacttttgcttccatcatctaccaaatcgggatgacgttgcttacgatatcggcaataataccaacgctaaggccaccaccatgtaaaggagaagaggtttgtgtagtagctgacacagcacaattgagtatactttacgtagctcttcttcttggagctctcgggtcgggtgggatccgaccatgtgttgttgcttttggtgctgatcagttcgacgagtcggatcctaatcaaaccaccaaaacttggaactacttcaactggtactacttttgcatgggtgcagcagttttactggcggtgacggttcttgtgtggatccaagataacgttgggtggggtctaggtttaggcattccgacagtagctatgttcttatccgttattgcttttgtcggcggttttcaactttaccgtcacttggttcccgcgggtagtccatttacccgcttgatccaagtgggagtcgcggcatttcgcaaaaggaaactgaggatggtttctgatccctctcttctctattttaacgacgagattgatgcacctatctccttaggtggtaaactcacccacaccaaacacatgagtttcttggacaaggcggcaatagtaacggaggaagacaatttaaaaccgggtcaaatcccaaaccattggaggctaagcacagtccatcgagtcgaagaactcaaatccgtcatccgaatgggtccaatcggagcatccgggattctcctaatcacagcctatgctcaacaaggaaccttctcattacaacaagccaaaaccatgaaccgtcacctaacaaactccttccaaatcccagccggttcaatgtccgtcttcacaaccgtcgctatgcttaccacaatcatcttctacgaccgcgtcttcgtcaaagtcgctcgcaaattcaccggtctcgaaagaggcatcacgttcctccaccgtatgggaatcggattcgtaatctcgataatcgccacgttagttgccggattcgtcgaagtaaagcgaaagagcgtcgcgattgagcacggtctcctcgataaacctcacacgattgttccaatctcgtttctttggttgattcctcaatatggtctccatggagtcgctgaagctttcatgtccatcggacatttagagttcttctacgatcaggcaccggagagtatgaggagcacggcaacggcgcttttttggatggcgatttcgatcggaaactatgtgagcactttgctggtgactttggttcataaattcagtgctaaaccggatgggagcaattggttaccggataacaatttgaaccgagggaggcttgagtatttttactggttgattactgtgttacaagctgttaatcttgtgtattatctatggtgcgccaagatttatacgtataaaccggttcaggttcatcatagcaaggaagatagtagtccggttaaggaggaattgcagttgtcaaataggagtttagttgatgaatgagtcttggcgttggatgtgtaatgtaaaattactaaattagtatagttgtaatatgtacttatcaatccaataaattag

SEQ ID NO: 50545 - protein, 596 aa, Arabidopsis thaliana
  peptide (1)..(596): Ceres Seq. ID no. 15220914
  misc_feature (95)..(503): Pfam Name: POT family Pfam Description: POT family
  misc_feature (1)..(568): Homolog of NCBI NO: 30696666 NR Description: oligopeptide transporter -related [Arabidopsis
  misc_feature (18)..(570): Homolog of NCBI NO: 34394155 NR Description: putative peptide transport protein
  misc_feature (31)..(568): Homolog of NCBI NO: 15076661 NR Description: peptide transporter [Oryza sativa (japonica
  misc_feature (1)..(568): Homolog of NCBI NO: 1076331 NR Description: histidine transport protein - Arabidopsis
  misc_feature (1)..(568): Homolog of NCBI NO: 4102839 NR Description: LeOPT1 [Lycopersicon esculentum]
  misc_feature (1)..(568): Homolog of NCBI NO: 15226861 NR Description: histidine transport protein (PTR2-B) [Arabidopsis
  misc_feature (1)..(573): Homolog of NCBI NO: 15240905 NR Description: oligopeptide transporter - like protein
  misc_feature (16)..(568): Homolog of NCBI NO: 15232435 NR Description: peptide transport - like protein [Arabidopsis
  misc_feature (109)..(571): Homolog of NCBI NO: 7484755 NR Description: nitrite transport protein, chloroplast - cucumber
  misc_feature (1)..(571): Homolog of NCBI NO: 15391731 NR Description: nitrite transporter [Cucumis sativus]
MEEQSKNKISEEEKQLHGRPNRPKGGLITMPFIFANEICEKLAVVGFHANMISYLTTQLHLPLTKAANTLTNFAGTSSLTPLLGAFIADSFAGRFWTITFASIIYQIGMTLLTISAIIPTLRPPPCKGEEVCVVADTAQLSILYVALLLGALGSGGIRPCVVAFGADQFDESDPNQTTKTWNYFNWYYFCMGAAVLLAVTVLVWIQDNVGWGLGLGIPTVAMFLSVIAFVGGFQLYRHLVPAGSPFTRLIQVGVAAFRKRKLRMVSDPSLLYFNDEIDAPISLGGKLTHTKHMSFLDKAAIVTEEDNLKPGQIPNHWRLSTVHRVEELKSVIRMGPIGASGILLITAYAQQGTFSLQQAKTMNRHLTNSFQIPAGSMSVFTTVAMLTTIIFYDRVFVKVARKFTGLERGITFLHRMGIGFVISIIATLVAGFVEVKRKSVAIEHGLLDKPHTIVPISFLWLIPQYGLHGVAEAFMSIGHLEFFYDQAPESMRSTATALFWMAISIGNYVSTLLVTLVHKFSAKPDGSNWLPDNNLNRGRLEYFYWLITVLQAVNLVYYLWCAKIYTYKPVQVHHSKEDSSPVKEELQLSNRSLVDE

SEQ ID NO: 50546 - protein, 567 aa, Arabidopsis thaliana
  peptide (1)..(567): Ceres Seq. ID no. 15220915
  misc_feature (66)..(474): Pfam Name: POT family Pfam Description: POT family
  misc_feature (1)..(539): Homolog of NCBI NO: 30696666 NR Description: oligopeptide transporter -related [Arabidopsis
  misc_feature (1)..(541): Homolog of NCBI NO: 34394155 NR Description: putative peptide transport protein
  misc_feature (2)..(539): Homolog of NCBI NO: 15076661 NR Description: peptide transporter [Oryza sativa (japonica
  misc_feature (1)..(539): Homolog of NCBI NO: 1076331 NR Description: histidine transport protein - Arabidopsis
  misc_feature (1)..(539): Homolog of NCBI NO: 4102839 NR Description: LeOPT1 [Lycopersicon esculentum]
  misc_feature (1)..(539): Homolog of NCBI NO: 15226861 NR Description: histidine transport protein (PTR2-B) [Arabidopsis
  misc_feature (1)..(544): Homolog of NCBI NO: 15240905 NR Description: oligopeptide transporter - like protein
  misc_feature (1)..(539): Homolog of NCBI NO: 15232435 NR Description: peptide transport - like protein [Arabidopsis
  misc_feature (80)..(542): Homolog of NCBI NO: 7484755 NR Description: nitrite transport protein, chloroplast - cucumber
  misc_feature (1)..(542): Homolog of NCBI NO: 15391731 NR Description: nitrite transporter [Cucumis sativus]
MPFIFANEICEKLAVVGFHANMISYLTTQLHLPLTKAANTLTNFAGTSSLTPLLGAFIADSFAGRFWTITFASIIYQIGMTLLTISAIIPTLRPPPCKGEEVCVVADTAQLSILYVALLLGALGSGGIRPCVVAFGADQFDESDPNQTTKTWNYFNWYYFCMGAAVLLAVTVLVWIQDNVGWGLGLGIPTVAMFLSVIAFVGGFQLYRHLVPAGSPFTRLIQVGVAAFRKRKLRMVSDPSLLYFNDEIDAPISLGGKLTHTKHMSFLDKAAIVTEEDNLKPGQIPNHWRLSTVHRVEELKSVIRMGPIGASGILLITAYAQQGTFSLQQAKTMNRHLTNSFQIPAGSMSVFTTVAMLTTIIFYDRVFVKVARKFTGLERGITFLHRMGIGFVISIIATLVAGFVEVKRKSVAIEHGLLDKPHTIVPISFLWLIPQYGLHGVAEAFMSIGHLEFFYDQAPESMRSTATALFWMAISIGNYVSTLLVTLVHKFSAKPDGSNWLPDNNLNRGRLEYFYWLITVLQAVNLVYYLWCAKIYTYKPVQVHHSKEDSSPVKEELQLSNRSLVDE

SEQ ID NO: 50547 - protein, 546 aa, Arabidopsis thaliana
  peptide (1)..(546): Ceres Seq. ID no. 15220916
  misc_feature (45)..(453): Pfam Name: POT family Pfam Description: POT family
  misc_feature (1)..(518): Homolog of NCBI NO: 30696666 NR Description: oligopeptide transporter -related [Arabidopsis
  misc_feature (1)..(520): Homolog of NCBI NO: 34394155 NR Description: putative peptide transport protein
  misc_feature (1)..(518): Homolog of NCBI NO: 15076661 NR Description: peptide transporter [Oryza sativa (japonica
  misc_feature (1)..(518): Homolog of NCBI NO: 1076331 NR Description: histidine transport protein - Arabidopsis
  misc_feature (1)..(518): Homolog of NCBI NO: 4102839 NR Description: LeOPT1 [Lycopersicon esculentum]
  misc_feature (1)..(518): Homolog of NCBI NO: 15226861 NR Description: histidine transport protein (PTR2-B) [Arabidopsis
  misc_feature (1)..(523): Homolog of NCBI NO: 15240905 NR Description: oligopeptide transporter - like protein
  misc_feature (1)..(518): Homolog of NCBI NO: 15232435 NR Description: peptide transport - like protein [Arabidopsis
  misc_feature (59)..(521): Homolog of NCBI NO: 7484755 NR Description: nitrite transport protein, chloroplast - cucumber
  misc_feature (1)..(521): Homolog of NCBI NO: 15391731 NR Description: nitrite transporter [Cucumis sativus]
MISYLTTQLHLPLTKAANTLTNFAGTSSLTPLLGAFIADSFAGRFWTITFASIIYQIGMTLLTISAIIPTLRPPPCKGEEVCVVADTAQLSILYVALLLGALGSGGIRPCVVAFGADQFDESDPNQTTKTWNYFNWYYFCMGAAVLLAVTVLVWIQDNVGWGLGLGIPTVAMFLSVIAFVGGFQLYRHLVPAGSPFTRLIQVGVAAFRKRKLRMVSDPSLLYFNDEIDAPISLGGKLTHTKHMSFLDKAAIVTEEDNLKPGQIPNHWRLSTVHRVEELKSVIRMGPIGASGILLITAYAQQGTFSLQQAKTMNRHLTNSFQIPAGSMSVFTTVAMLTTIIFYDRVFVKVARKFTGLERGITFLHRMGIGFVISIIATLVAGFVEVKRKSVAIEHGLLDKPHTIVPISFLWLIPQYGLHGVAEAFMSIGHLEFFYDQAPESMRSTATALFWMAISIGNYVSTLLVTLVHKFSAKPDGSNWLPDNNLNRGRLEYFYWLITVLQAVNLVYYLWCAKIYTYKPVQVHHSKEDSSPVKEELQLSNRSLVDE

SEQ ID NO: 50548 - DNA, 1369 bp, Arabidopsis thaliana
  misc_feature (1)..(1369): Ceres Seq. ID no. 13647766
  misc_feature: MA Experiment ID: 20000264 Result: Up-regulated in Transcription
  misc_feature: MA Experiment 20000264 PARAMETER Experiment Name: At_Open_Flower_P Parameter: Age (day) Value: 21
  misc_feature: MA Experiment 20000264 PARAMETER Experiment Name: At_Open_Flower_P Parameter: Plant Line Value: WS
  misc_feature: MA Experiment 20000264 PARAMETER Experiment Name: At_Open_Flower_P Parameter: Tissue Value: Open Flower vs. Whole Plant
  misc_feature: MA Experiment ID: 20001905 Result: Up-regulated in Transcription
  misc_feature: MA Experiment 20001905 PARAMETER Experiment Name: At_Drought_Reproduction_P Parameter: Age (day) Value: 40
  misc_feature: MA Experiment 20001905 PARAMETER Experiment Name: At_Drought_Reproduction_P Parameter: Organism Value: A. thaliana
  misc_feature: MA Experiment 20001905 PARAMETER Experiment Name: At_Drought_Reproduction_P Parameter: Plant Line Value: WS
  misc_feature: MA Experiment 20001905 PARAMETER Experiment Name: At_Drought_Reproduction_P Parameter: Timepoint (day) Value: 10
  misc_feature: MA Experiment 20001905 PARAMETER Experiment Name: At_Drought_Reproduction_P Parameter: Tissue Value: Rosettes
  misc_feature: MA Experiment 20001905 PARAMETER Experiment Name: At_Drought_Reproduction_P Parameter: Treatment Value: Drought vs. No Drought
  misc_feature: MA Experiment ID: 20001910 Result: Up-regulated in Transcription
  misc_feature: MA Experiment 20001910 PARAMETER Experiment Name: At_Drought_Reproduction_P Parameter: Age (day) Value: 37
  misc_feature: MA Experiment 20001910 PARAMETER Experiment Name: At_Drought_Reproduction_P Parameter: Organism Value: A. thaliana
  misc_feature: MA Experiment 20001910 PARAMETER Experiment Name: At_Drought_Reproduction_P Parameter: Plant Line Value: WS
  misc_feature: MA Experiment 20001910 PARAMETER Experiment Name: At_Drought_Reproduction_P Parameter: Timepoint (day) Value: 7
  misc_feature: MA Experiment 20001910 PARAMETER Experiment Name: At_Drought_Reproduction_P Parameter: Tissue Value: Flowers
  misc_feature: MA Experiment 20001910 PARAMETER Experiment Name: At_Drought_Reproduction_P Parameter: Treatment Value: Drought vs. No Drought
cccccaaaatctttgggtttttattcttttaaacttctttatgggattttggtgcaagaaagaagaaaatgtttcagagattcaccttctttctaacagctcttctcattccatgtattctaattatccttagcccttcatatgccctcaaggaaggagaaacatgcatcgtgagcaagaattgtgatcggggattacactgtgaatcgtgtctcgccagcgatagtttccgacctagatgctcccgaatgcaacccattaacccgaccaccaaggtaaaagggttgccttacaacaagtactcatggtaacaacccacaattcatttgctcgaatgggtgcaaaatcaggcactggctctatgattcttgcaccttccaaccaacaagattcaatcacaagccaactccttaatggtgttagagggtttatgcttgacttgtacgacttccaaaacgatatatggctttgccattcttacggtggaaattgtttcaattacaccgcattccaacccgcggttaacattttaaaggagtttcaagtgtttctagacaagaacaaggatgttgttgtaacgcttatcctcgaggactatgtgaaatctcctaatggtttaaccagagtgtttgatgcatccggattacgaaacttcatgtttccggtatcaagaatgcctaaaaacggagaagattggcctactcttgatgatatgatatgtcagaaccaacgattgcttgttttcacgtctaatcctcaaaaagaagcgtcggagggaattgcgtttatgtggagatacatgatagagaatcaatatggagatggagggatgaaggctggagtgtgtaccaatagaccggaatcagttgcaatgggagatagatcaagatcacttattctagtcaattattttccggatactgcagatgtgatcggatcttgtaagcagaactctgctcctcttcttgacaccgtcaaaaactgtcaagaagcctcgggaaaacgttggcctaacttcattgcagtcgatttctacaagagaagcgatggtggaggagctccaaaagcagtggatgttgcaaacggtcatgcagtttgcggctgcgaagatatagccgcttgtaaagagaacatgccatatgggacgtgtgagaagcaagaagagaagaaaccggaatcaaacctaatgatgatagcaaaacttaccgcggaagcgactaaaggctatggccacccatctaccaaaccgaccctacttgggctttctgtgtttgttgtaacctttgtctcacttctctcaactttttgactcaaatgatttactttatacaaaaaaaaaaaaaaaaaaactcgagggggggcccggtac

SEQ ID NO: 50549 - protein, 334 aa, Arabidopsis thaliana
  peptide (1)..(334): Ceres Seq. ID no. 15219476
  misc_feature (1)..(282): Homolog of NCBI NO: 38345515 NR Description: OSJNBa0039K24.18 [Oryza sativa (japonica
  misc_feature (4)..(283): Homolog of NCBI NO: 21593427 NR Description: unknown [Arabidopsis thaliana]
  misc_feature (4)..(283): Homolog of NCBI NO: 18425155 NR Description: expressed protein [Arabidopsis thaliana]
  misc_feature (1)..(261): Homolog of NCBI NO: 34897530 NR Description: OSJNBa0042L16.2 [Oryza sativa (japonica
  misc_feature (2)..(292): Homolog of NCBI NO: 38637049 NR Description: MAP3K-like protein kinase [Oryza sativa (japonica
  misc_feature (1)..(282): Homolog of NCBI NO: 38345461 NR Description: OSJNBa0042L16.16 [Oryza sativa (japonica
  misc_feature (2)..(292): Homolog of NCBI NO: 25407778 NR Description: MAP3K-like protein kinase [imported] -
  misc_feature (1)..(282): Homolog of NCBI NO: 18402763 NR Description: expressed protein [Arabidopsis thaliana]
  misc_feature (1)..(334): Homolog of NCBI NO: 27754722 NR Description: unknown protein [Arabidopsis thaliana]
  misc_feature (1)..(334): Homolog of NCBI NO: 15230348 NR Description: expressed protein [Arabidopsis thaliana]
MVTTHNSFARMGAKSGTGSMILAPSNQQDSITSQLLNGVRGFMLDLYDFQNDIWLCHSYGGNCFNYTAFQPAVNILKEFQVFLDKNKDVVVTLILEDYVKSPNGLTRVFDASGLRNFMFPVSRMPKNGEDWPTLDDMICQNQRLLVFTSNPQKEASEGIAFMWRYMIENQYGDGGMKAGVCTNRPESVAMGDRSRSLILVNYFPDTADVIGSCKQNSAPLLDTVKNCQEASGKRWPNFIAVDFYKRSDGGGAPKAVDVANGHAVCGCEDIAACKENMPYGTCEKQEEKKPESNLMMIAKLTAEATKGYGHPSTKPTLLGLSVFVVTFVSLLSTF

SEQ ID NO: 50550 - protein, 324 aa, Arabidopsis thaliana
  peptide (1)..(324): Ceres Seq. ID no. 15219477
  misc_feature (1)..(272): Homolog of NCBI NO: 38345515 NR Description: OSJNBa0039K24.18 [Oryza sativa (japonica
  misc_feature (1)..(273): Homolog of NCBI NO: 21593427 NR Description: unknown [Arabidopsis thaliana]
  misc_feature (1)..(273): Homolog of NCBI NO: 18425155 NR Description: expressed protein [Arabidopsis thaliana]
  misc_feature (1)..(251): Homolog of NCBI NO: 34897530 NR Description: OSJNBa0042L16.2 [Oryza sativa (japonica
  misc_feature (1)..(282): Homolog of NCBI NO: 38637049 NR Description: MAP3K-like protein kinase [Oryza sativa (japonica
  misc_feature (1)..(272): Homolog of NCBI NO: 38345461 NR Description: OSJNBa0042L16.16 [Oryza sativa (japonica
  misc_feature (1)..(282): Homolog of NCBI NO: 25407778 NR Description: MAP3K-like protein kinase [imported] -
  misc_feature (1)..(272): Homolog of NCBI NO: 18402763 NR Description: expressed protein [Arabidopsis thaliana]
  misc_feature (1)..(324): Homolog of NCBI NO: 27754722 NR Description: unknown protein [Arabidopsis thaliana]
  misc_feature (1)..(324): Homolog of NCBI NO: 15230348 NR Description: expressed protein [Arabidopsis thaliana]
MGAKSGTGSMILAPSNQQDSITSQLLNGVRGFMLDLYDFQNDIWLCHSYGGNCFNYTAFQPAVNILKEFQVFLDKNKDVVVTLILEDYVKSPNGLTRVFDASGLRNFMFPVSRMPKNGEDWPTLDDMICQNQRLLVFTSNPQKEASEGIAFMWRYMIENQYGDGGMKAGVCTNRPESVAMGDRSRSLILVNYFPDTADVIGSCKQNSAPLLDTVKNCQEASGKRWPNFIAVDFYKRSDGGGAPKAVDVANGHAVCGCEDIAACKENMPYGTCEKQEEKKPESNLMMIAKLTAEATKGYGHPSTKPTLLGLSVFVVTFVSLLSTF

SEQ ID NO: 50551 - protein, 315 aa, Arabidopsis thaliana
  peptide (1)..(315): Ceres Seq. ID no. 15219478
  misc_feature (1)..(263): Homolog of NCBI NO: 38345515 NR Description: OSJNBa0039K24.18 [Oryza sativa (japonica
  misc_feature (1)..(264): Homolog of NCBI NO: 21593427 NR Description: unknown [Arabidopsis thaliana]
  misc_feature (1)..(264): Homolog of NCBI NO: 18425155 NR Description: expressed protein [Arabidopsis thaliana]
  misc_feature (1)..(242): Homolog of NCBI NO: 34897530 NR Description: OSJNBa0042L16.2 [Oryza sativa (japonica
  misc_feature (1)..(273): Homolog of NCBI NO: 38637049 NR Description: MAP3K-like protein kinase [Oryza sativa (japonica
  misc_feature (1)..(263): Homolog of NCBI NO: 38345461 NR Description: OSJNBa0042L16.16 [Oryza sativa (japonica
  misc_feature (1)..(273): Homolog of NCBI NO: 25407778 NR Description: MAP3K-like protein kinase [imported] -
  misc_feature (1)..(263): Homolog of NCBI NO: 18402763 NR Description: expressed protein [Arabidopsis thaliana]
  misc_feature (1)..(315): Homolog of NCBI NO: 27754722 NR Description: unknown protein [Arabidopsis thaliana]
  misc_feature (1)..(315): Homolog of NCBI NO: 15230348 NR Description: expressed protein [Arabidopsis thaliana]
MILAPSNQQDSITSQLLNGVRGFMLDLYDFQNDIWLCHSYGGNCFNYTAFQPAVNILKEFQVFLDKNKDVVVTLILEDYVKSPNGLTRVFDASGLRNFMFPVSRMPKNGEDWPTLDDMICQNQRLLVFTSNPQKEASEGIAFMWRYMIENQYGDGGMKAGVCTNRPESVAMGDRSRSLILVNYFPDTADVIGSCKQNSAPLLDTVKNCQEASGKRWPNFIAVDFYKRSDGGGAPKAVDVANGHAVCGCEDIAACKENMPYGTCEKQEEKKPESNLMMIAKLTAEATKGYGHPSTKPTLLGLSVFVVTFVSLLSTF

SEQ ID NO: 50552 - DNA, 1766 bp, Arabidopsis thaliana; identical to SEQ ID NO: 42339
  misc_feature (1)..(1766): Ceres Seq. ID no. 13592405
  misc_feature: MA Experiment ID: 20000306 Result: Up-regulated in Transcription
  misc_feature: MA Experiment 20000306 PARAMETER Experiment Name: At_Germinating_Seeds_Sub_P Parameter: Age (hr) Value: 6 vs. 0
  misc_feature: MA Experiment 20000306 PARAMETER Experiment Name: At_Germinating_Seeds_Sub_P Parameter: Organism Value: A. thaliana
  misc_feature: MA Experiment 20000306 PARAMETER Experiment Name: At_Germinating_Seeds_Sub_P Parameter: Plant Line Value: WS
  misc_feature: MA Experiment 20000306 PARAMETER Experiment Name: At_Germinating_Seeds_Sub_P Parameter: Tissue Value: Germinating Seeds
  misc_feature: MA Experiment ID: 20000328 Result: Up-regulated in Transcription
  misc_feature: MA Experiment 20000328 PARAMETER Experiment Name: At_42deg_Heat_Sub_P Parameter: Age (day) Value: 14
  misc_feature: MA Experiment 20000328 PARAMETER Experiment Name: At_42deg_Heat_Sub_P Parameter: Organism Value: A. thaliana
  misc_feature: MA Experiment 20000328 PARAMETER Experiment Name: At_42deg_Heat_Sub_P Parameter: Plant Line Value: WS
  misc_feature: MA Experiment 20000328 PARAMETER Experiment Name: At_42deg_Heat_Sub_P Parameter: Temperature (deg C) Value: 42 vs. 22
  misc_feature: MA Experiment 20000328 PARAMETER Experiment Name: At_42deg_Heat_Sub_P Parameter: Timepoint (hr) Value: 6
  misc_feature: MA Experiment 20000328 PARAMETER Experiment Name: At_42deg_Heat_Sub_P Parameter: Tissue Value: Aerial
  misc_feature: MA Experiment ID: 20000329 Result: Down-regulated in Transcription
  misc_feature: MA Experiment 20000329 PARAMETER Experiment Name: At_4deg_Cold_Sub_P Parameter: Age (day) Value: 14
  misc_feature: MA Experiment 20000329 PARAMETER Experiment Name: At_4deg_Cold_Sub_P Parameter: Organism Value: A. thaliana
  misc_feature: MA Experiment 20000329 PARAMETER Experiment Name: At_4deg_Cold_Sub_P Parameter: Plant Line Value: WS
  misc_feature: MA Experiment 20000329 PARAMETER Experiment Name: At_4deg_Cold_Sub_P Parameter: Temperature (deg C) Value: 4 vs. 22
  misc_feature: MA Experiment 20000329 PARAMETER Experiment Name: At_4deg_Cold_Sub_P Parameter: Timepoint (hr) Value: 6
  misc_feature: MA Experiment 20000329 PARAMETER Experiment Name: At_4deg_Cold_Sub_P Parameter: Tissue Value: Aerial
  misc_feature: MA Experiment ID: 20000352 Result: Up-regulated in Transcription
  misc_feature: MA Experiment 20000352 PARAMETER Experiment Name: At_Drought_Sub_P Parameter: Age (day) Value: 7
  misc_feature: MA Experiment 20000352 PARAMETER Experiment Name: At_Drought_Sub_P Parameter: Organism Value: A. thaliana
  misc_feature: MA Experiment 20000352 PARAMETER Experiment Name: At_Drought_Sub_P Parameter: Plant Line Value: WS
  misc_feature: MA Experiment 20000352 PARAMETER Experiment Name: At_Drought_Sub_P Parameter: Timepoint (hr) Value: 6
  misc_feature: MA Experiment 20000352 PARAMETER Experiment Name: At_Drought_Sub_P Parameter: Tissue Value: Whole Plant
  misc_feature: MA Experiment 20000352 PARAMETER Experiment Name: At_Drought_Sub_P Parameter: Treatment Value: Drought vs. No Drought

SEQ ID NO: 50553 - protein, 246 aa, Arabidopsis thaliana; identical to SEQ ID NO: 42340
  peptide (1)..(246): Ceres Seq. ID no. 15221095
  misc_feature (1)..(33): Homolog of NCBI NO: 15242462 NR Description: octicosapeptide/Phox/Bem1p (PB1)
  misc_feature (1)..(95): Homolog of NCBI NO: 15237703 NR Description: octicosapeptide/Phox/Bem1p (PB1)
  misc_feature (1)..(33): Homolog of NCBI NO: 15242462 NR Description: octicosapeptide/Phox/Bem1p (PB1)
  misc_feature (1)..(95): Homolog of NCBI NO: 15237703 NR Description: octicosapeptide/Phox/Bem1p (PB1)
  misc_feature (66)..(66): Xaa is any aa, unknown or other
  misc_feature (72)..(72): Xaa is any aa, unknown or other
  misc_feature (120)..(120): Xaa is any aa, unknown or other
  misc_feature (125)..(125): Xaa is any aa, unknown or other
  misc_feature (127)..(127): Xaa is any aa, unknown or other
  misc_feature (136)..(136): Xaa is any aa, unknown or other
  misc_feature (146)..(146): Xaa is any aa, unknown or other

SEQ ID NO: 50554 - protein, 240 aa, Arabidopsis thaliana; identical to SEQ ID NO: 42341
  peptide (1)..(240): Ceres Seq. ID no. 15221096
  misc_feature (1)..(27): Homolog of NCBI NO: 15242462 NR Description: octicosapeptide/Phox/Bem1p (PB1)
  misc_feature (1)..(89): Homolog of NCBI NO: 15237703 NR Description: octicosapeptide/Phox/Bem1p (PB1)
  misc_feature (1)..(27): Homolog of NCBI NO: 15242462 NR Description: octicosapeptide/Phox/Bem1p (PB1)
  misc_feature (1)..(89): Homolog of NCBI NO: 15237703 NR Description: octicosapeptide/Phox/Bem1p (PB1)
  misc_feature (60)..(60): Xaa is any aa, unknown or other
  misc_feature (66)..(66): Xaa is any aa, unknown or other
  misc_feature (114)..(114): Xaa is any aa, unknown or other
  misc_feature (119)..(119): Xaa is any aa, unknown or other
  misc_feature (121)..(121): Xaa is any aa, unknown or other
  misc_feature (130)..(130): Xaa is any aa, unknown or other
  misc_feature (140)..(140): Xaa is any aa, unknown or other

SEQ ID NO: 50555 - protein, 234 aa, Arabidopsis thaliana; identical to SEQ ID NO: 42342
  peptide (1)..(234): Ceres Seq. ID no. 15221097
  misc_feature (1)..(21): Homolog of NCBI NO: 15242462 NR Description: octicosapeptide/Phox/Bem1p (PB1)
  misc_feature (1)..(83): Homolog of NCBI NO: 15237703 NR Description: octicosapeptide/Phox/Bem1p (PB1)
  misc_feature (1)..(21): Homolog of NCBI NO: 15242462 NR Description: octicosapeptide/Phox/Bem1p (PB1)
  misc_feature (1)..(83): Homolog of NCBI NO: 15237703 NR Description: octicosapeptide/Phox/Bem1p (PB1)
  misc_feature (54)..(54): Xaa is any aa, unknown or other
  misc_feature (60)..(60): Xaa is any aa, unknown or other
  misc_feature (108)..(108): Xaa is any aa, unknown or other
  misc_feature (113)..(113): Xaa is any aa, unknown or other
  misc_feature (115)..(115): Xaa is any aa, unknown or other
  misc_feature (124)..(124): Xaa is any aa, unknown or other
  misc_feature (134)..(134): Xaa is any aa, unknown or other

SEQ ID NO: 50556 - DNA, 875 bp, Arabidopsis thaliana
  misc_feature (1)..(875): Ceres Seq. ID no. 13647767
gggagtgagattgaaatttctggcggctctttcaaaggaaaattgtagattgtattcaaatacgttgaggaagaaagaaggcgacaaagaggaagacgaagaagaaagttgtagaaagtaatggtgttgtgggagttagctctaggaacagcttacttcttggggattaggcggacttaccggctcgcattgaagacccagcgtcggcttgttagccctaagcatccaaggattcgagattttatgcatcggaggacttatcaaatctttgatatggcacttagggtccacaagaacatacaacagagagacatggatattggtcggaatcttggaaactggattctccgggggcttgaccggatgaagccatcggctcaggttctactaccaaagaatacagagccaagcatagacaaggcgaaaagagtattacaatcaacccgtcttaaaccacatgttaacacgcagactcctcagaaccgtgaggttgataggaacttgttcatgtccttgaggaactttcggtccaaataccccattgcttcgatgatgatgatcaaacctccaagatccacgggaactactactcagtacaggccttacagtgttggtgaatccagtctgattaaaccaatttatgctagaggcgggttcaacagcgtcatcaggaaggacattttgcagtggatggtgcagaagagataaagccgccaaaattcatcaaaggcccttctgtttcttagattacaacatactcagaaggaaacacttgtctcaaccgtatcactttgtatgagtttttaataaccggtggattgataggaaaatctcctggacaactaaaaattgtgactagtattacttacttgact

SEQ ID NO: 50557 - protein, 195 aa, Arabidopsis thaliana
  peptide (1)..(195): Ceres Seq. ID no. 13647768
  misc_feature (1)..(194): Homolog of NCBI NO: 15222623 NR Description: expressed protein [Arabidopsis thaliana]
  misc_feature (45)..(195): Homolog of NCBI NO: 25370789 NR Description: hypothetical protein At2g35480 [imported] -
  misc_feature (1)..(195): Homolog of NCBI NO: 30686423 NR Description: expressed protein [Arabidopsis thaliana]
MVLWELALGTAYFLGIRRTYRLALKTQRRLVSPKHPRIRDFMHRRTYQIFDMALRVHKNIQQRDMDIGRNLGNWILRGLDRMKPSAQVLLPKNTEPSIDKAKRVLQSTRLKPHVNTQTPQNREVDRNLFMSLRNFRSKYPIASMMMIKPPRSTGTTTQYRPYSVGESSLIKPIYARGGFNSVIRKDILQWMVQKR

SEQ ID NO: 50558 - protein, 154 aa, Arabidopsis thaliana
  peptide (1)..(154): Ceres Seq. ID no. 13647769
  misc_feature (1)..(153): Homolog of NCBI NO: 15222623 NR Description: expressed protein [Arabidopsis thaliana]
  misc_feature (4)..(154): Homolog of NCBI NO: 25370789 NR Description: hypothetical protein At2g35480 [imported] -
  misc_feature (1)..(154): Homolog of NCBI NO: 30686423 NR Description: expressed protein [Arabidopsis thaliana]
MHRRTYQIFDMALRVHKNIQQRDMDIGRNLGNWILRGLDRMKPSAQVLLPKNTEPSIDKAKRVLQSTRLKPHVNTQTPQNREVDRNLFMSLRNFRSKYPIASMMMIKPPRSTGTTTQYRPYSVGESSLIKPIYARGGFNSVIRKDILQWMVQKR

SEQ ID NO: 50559 - protein, 144 aa, Arabidopsis thaliana
  peptide (1)..(144): Ceres Seq. ID no. 13647770
  misc_feature (1)..(143): Homolog of NCBI NO: 15222623 NR Description: expressed protein [Arabidopsis thaliana]
  misc_feature (1)..(144): Homolog of NCBI NO: 25370789 NR Description: hypothetical protein At2g35480 [imported] -
  misc_feature (1)..(144): Homolog of NCBI NO: 30686423 NR Description: expressed protein [Arabidopsis thaliana]
MALRVHKNIQQRDMDIGRNLGNWILRGLDRMKPSAQVLLPKNTEPSIDKAKRVLQSTRLKPHVNTQTPQNREVDRNLFMSLRNFRSKYPIASMMMIKPPRSTGTTTQYRPYSVGESSLIKPIYARGGFNSVIRKDILQWMVQKR

SEQ ID NO: 50560 - DNA, 1567 bp, Arabidopsis thaliana
  misc_feature (1)..(1567): Ceres Seq. ID no. 12559635
  misc_feature: MA Experiment ID: 20000173 Result: Down-regulated in Transcription
  misc_feature: MA Experiment 20000173 PARAMETER Experiment Name: At_42deg_Heat_P Parameter: Age (day) Value: 14
  misc_feature: MA Experiment 20000173 PARAMETER Experiment Name: At_42deg_Heat_P Parameter: Organism Value: A. thaliana
  misc_feature: MA Experiment 20000173 PARAMETER Experiment Name: At_42deg_Heat_P Parameter: Plant Line Value: WS
  misc_feature: MA Experiment 20000173 PARAMETER Experiment Name: At_42deg_Heat_P Parameter: Temperature (deg C) Value: 42 vs. 22
  misc_feature: MA Experiment 20000173 PARAMETER Experiment Name: At_42deg_Heat_P Parameter: Timepoint (hr) Value: 6
  misc_feature: MA Experiment 20000173 PARAMETER Experiment Name: At_42deg_Heat_P Parameter: Tissue Value: Aerial
  misc_feature: MA Experiment ID: 20000180 Result: Up-regulated in Transcription
  misc_feature: MA Experiment 20000180 PARAMETER Experiment Name: At_Germinating_Seeds_P Parameter: Age (hr) Value: 24 vs. 0
  misc_feature: MA Experiment 20000180 PARAMETER Experiment Name: At_Germinating_Seeds_P Parameter: Tissue Value: Germinating Seeds
  misc_feature: MA Experiment ID: 20000185 Result: Down-regulated in Transcription
  misc_feature: MA Experiment 20000185 PARAMETER Experiment Name: At_Roots__P Parameter: Age (day) Value: 7 vs. 21
  misc_feature: MA Experiment 20000185 PARAMETER Experiment Name: At_Roots__P Parameter: Organism Value: A. thaliana
  misc_feature: MA Experiment 20000185 PARAMETER Experiment Name: At_Roots__P Parameter: Tissue Value: Roots vs. Whole Plant
  misc_feature: MA Experiment ID: 20000437 Result: Down-regulated in Transcription
  misc_feature: MA Experiment 20000437 PARAMETER Experiment Name: At_Drought_P Parameter: Age (day) Value: 8
  misc_feature: MA Experiment 20000437 PARAMETER Experiment Name: At_Drought_P Parameter: Organism Value: A. thaliana
  misc_feature: MA Experiment 20000437 PARAMETER Experiment Name: At_Drought_P Parameter: Plant Line Value: WS
  misc_feature: MA Experiment 20000437 PARAMETER Experiment Name: At_Drought_P Parameter: Timepoint (hr) Value: 24
  misc_feature: MA Experiment 20000437 PARAMETER Experiment Name: At_Drought_P Parameter: Tissue Value: Whole Plant
  misc_feature: MA Experiment 20000437 PARAMETER Experiment Name: At_Drought_P Parameter: Treatment Value: Drought vs. No Drought
  misc_feature: MA Experiment ID: 20000439 Result: Down-regulated in Transcription
  misc_feature: MA Experiment 20000439 PARAMETER Experiment Name: At_Roots__P Parameter: Age (day) Value: 14 vs. 21
  misc_feature: MA Experiment 20000439 PARAMETER Experiment Name: At_Roots__P Parameter: Organism Value: A. thaliana
  misc_feature: MA Experiment 20000439 PARAMETER Experiment Name: At_Roots__P Parameter: Tissue Value: Roots vs. Whole Plant
  misc_feature: MA Experiment ID: 20000794 Result: Down-regulated in Transcription
  misc_feature: MA Experiment 20000794 PARAMETER Experiment Name: At_Petals_P Parameter: Age (day) Value: 23-25 days
  misc_feature: MA Experiment 20000794 PARAMETER Experiment Name: At_Petals_P Parameter: Plant Line Value: WS
  misc_feature: MA Experiment 20000794 PARAMETER Experiment Name: At_Petals_P Parameter: Tissue Value: Petals vs. Whole plant
  misc_feature: MA Experiment ID: 20001450 Result: Down-regulated in Transcription
  misc_feature: MA Experiment 20001450 PARAMETER Experiment Name: At_Far-red-induction_P Parameter: Age (day) Value: 7
  misc_feature: MA Experiment 20001450 PARAMETER Experiment Name: At_Far-red-induction_P Parameter: Light Value: Far-red vs. White
  misc_feature: MA Experiment 20001450 PARAMETER Experiment Name: At_Far-red-induction_P Parameter: Organism Value: A. thaliana
  misc_feature: MA Experiment 20001450 PARAMETER Experiment Name: At_Far-red-induction_P Parameter: Plant Line Value: Columbia
  misc_feature: MA Experiment 20001450 PARAMETER Experiment Name: At_Far-red-induction_P Parameter: Timepoint (hr) Value: 8
  misc_feature: MA Experiment 20001450 PARAMETER Experiment Name: At_Far-red-induction_P Parameter: Tissue Value: Whole Plant
  misc_feature: MA Experiment ID: 20001451 Result: Down-regulated in Transcription
  misc_feature: MA Experiment 20001451 PARAMETER Experiment Name: At_Far-red-induction_P Parameter: Age (day) Value: 7
  misc_feature: MA Experiment 20001451 PARAMETER Experiment Name: At_Far-red-induction_P Parameter: Light Value: Far-red vs. White
  misc_feature: MA Experiment 20001451 PARAMETER Experiment Name: At_Far-red-induction_P Parameter: Organism Value: A. thaliana
  misc_feature: MA Experiment 20001451 PARAMETER Experiment Name: At_Far-red-induction_P Parameter: Plant Line Value: Columbia
  misc_feature: MA Experiment 20001451 PARAMETER Experiment Name: At_Far-red-induction_P Parameter: Timepoint (hr) Value: 24
  misc_feature: MA Experiment 20001451 PARAMETER Experiment Name: At_Far-red-induction_P Parameter: Tissue Value: Whole Plant
  misc_feature: MA Experiment ID: 20001555 Result: Down-regulated in Transcription
  misc_feature: MA Experiment 20001555 PARAMETER Experiment Name: At_Drought_Soil_Dry_P Parameter: Age (day) Value: 24
  misc_feature: MA Experiment 20001555 PARAMETER Experiment Name: At_Drought_Soil_Dry_P Parameter: Organism Value: A. thaliana
  misc_feature: MA Experiment 20001555 PARAMETER Experiment Name: At_Drought_Soil_Dry_P Parameter: Plant Line Value: WS
  misc_feature: MA Experiment 20001555 PARAMETER Experiment Name: At_Drought_Soil_Dry_P Parameter: Post Timepoint (hr) Value: None
  misc_feature: MA Experiment 20001555 PARAMETER Experiment Name: At_Drought_Soil_Dry_P Parameter: Post-Treatment Value: None
  misc_feature: MA Experiment 20001555 PARAMETER Experiment Name: At_Drought_Soil_Dry_P Parameter: Timepoint (day) Value: 10
  misc_feature: MA Experiment 20001555 PARAMETER Experiment Name: At_Drought_Soil_Dry_P Parameter: Treatment Value: Drought vs. No Drought
  misc_feature: MA Experiment ID: 20001560 Result: Up-regulated in Transcription
  misc_feature: MA Experiment 20001560 PARAMETER Experiment Name: At_Drought_Soil_Dry_P Parameter: Age (day) Value: 28
  misc_feature: MA Experiment 20001560 PARAMETER Experiment Name: At_Drought_Soil_Dry_P Parameter: Organism Value: A. thaliana
  misc_feature: MA Experiment 20001560 PARAMETER Experiment Name: At_Drought_Soil_Dry_P Parameter: Plant Line Value: WS
  misc_feature: MA Experiment 20001560 PARAMETER Experiment Name: At_Drought_Soil_Dry_P Parameter: Post Timepoint (hr) Value: None
  misc_feature: MA Experiment 20001560 PARAMETER Experiment Name: At_Drought_Soil_Dry_P Parameter: Post-Treatment Value: None
  misc_feature: MA Experiment 20001560 PARAMETER Experiment Name: At_Drought_Soil_Dry_P Parameter: Timepoint (day) Value: 14
  misc_feature: MA Experiment 20001560 PARAMETER Experiment Name: At_Drought_Soil_Dry_P Parameter: Treatment Value: Drought vs. No Drought
  misc_feature: MA Experiment ID: 20001905 Result: Down-regulated in Transcription
  misc_feature: MA Experiment 20001905 PARAMETER Experiment Name: At_Drought_Reproduction_P Parameter: Age (day) Value: 40
  misc_feature: MA Experiment 20001905 PARAMETER Experiment Name: At_Drought_Reproduction_P Parameter: Organism Value: A. thaliana
  misc_feature: MA Experiment 20001905 PARAMETER Experiment Name: At_Drought_Reproduction_P Parameter: Plant Line Value: WS
  misc_feature: MA Experiment 20001905 PARAMETER Experiment Name: At_Drought_Reproduction_P Parameter: Timepoint (day) Value: 10
  misc_feature: MA Experiment 20001905 PARAMETER Experiment Name: At_Drought_Reproduction_P Parameter: Tissue Value: Rosettes
  misc_feature: MA Experiment 20001905 PARAMETER Experiment Name: At_Drought_Reproduction_P Parameter: Treatment Value: Drought vs. No Drought
  misc_feature: MA Experiment ID: 20001906 Result: Down-regulated in Transcription
  misc_feature: MA Experiment 20001906 PARAMETER Experiment Name: At_Drought_Reproduction_P Parameter: Age (day) Value: 35
  misc_feature: MA Experiment 20001906 PARAMETER Experiment Name: At_Drought_Reproduction_P Parameter: Organism Value: A. thaliana
  misc_feature: MA Experiment 20001906 PARAMETER Experiment Name: At_Drought_Reproduction_P Parameter: Plant Line Value: WS
  misc_feature: MA Experiment 20001906 PARAMETER Experiment Name: At_Drought_Reproduction_P Parameter: Timepoint (day) Value: 5
  misc_feature: MA Experiment 20001906 PARAMETER Experiment Name: At_Drought_Reproduction_P Parameter: Tissue Value: Siliques
  misc_feature: MA Experiment 20001906 PARAMETER Experiment Name: At_Drought_Reproduction_P Parameter: Treatment Value: Drought vs. No Drought
  misc_feature: MA Experiment ID: 20001908 Result: Down-regulated in Transcription
  misc_feature: MA Experiment 20001908 PARAMETER Experiment Name: At_Drought_Reproduction_P Parameter: Age (day) Value: 40
  misc_feature: MA Experiment 20001908 PARAMETER Experiment Name: At_Drought_Reproduction_P Parameter: Organism Value: A. thaliana
  misc_feature: MA Experiment 20001908 PARAMETER Experiment Name: At_Drought_Reproduction_P Parameter: Plant Line Value: WS
  misc_feature: MA Experiment 20001908 PARAMETER Experiment Name: At_Drought_Reproduction_P Parameter: Timepoint (day) Value: 10
  misc_feature: MA Experiment 20001908 PARAMETER Experiment Name: At_Drought_Reproduction_P Parameter: Tissue Value: Siliques
  misc_feature: MA Experiment 20001908 PARAMETER Experiment Name: At_Drought_Reproduction_P Parameter: Treatment Value: Drought vs. No Drought
  misc_feature: MA Experiment ID: 20001911 Result: Down-regulated in Transcription
  misc_feature: MA Experiment 20001911 PARAMETER Experiment Name: At_Drought_Reproduction_P Parameter: Age (day) Value: 40
  misc_feature: MA Experiment 20001911 PARAMETER Experiment Name: At_Drought_Reproduction_P Parameter: Organism Value: A. thaliana
  misc_feature: MA Experiment 20001911 PARAMETER Experiment Name: At_Drought_Reproduction_P Parameter: Plant Line Value: WS
  misc_feature: MA Experiment 20001911 PARAMETER Experiment Name: At_Drought_Reproduction_P Parameter: Timepoint (day) Value: 10
  misc_feature: MA Experiment 20001911 PARAMETER Experiment Name: At_Drought_Reproduction_P Parameter: Tissue Value: Flowers
  misc_feature: MA Experiment 20001911 PARAMETER Experiment Name: At_Drought_Reproduction_P Parameter: Treatment Value: Drought vs. No Drought
agaaagcatttgatcttcaaactcttgggttcttctctgattgaaaatgagcttatcatcgccaaccagtgcttgtagctcgtccagatgttactcctcgggattatcgtttccgattggatttggatcgaatcccatcaatgtgggattggtttgttacccaaaaagatacagtattgctgctcggaagttcgtagtggcttgctcctcctcctcttccgatccacttttggttaaggctgcaaaagggcaagccataagtcgtcctccagcttggatgatgaggcaagcaggaaggtatatggctgtttaccaaaagctcgccaagaaacatccgtccttcagagagagatcagagaacactgatctaatagtggaaatctctttgcagccttggcaagcattcagaccagacggtgtcatcattttctctgacatcctcacccctttacctgcattcggtgtcccttttgatattgaagaggtaaaaggtcctgtaatccaatctcctatccgaactgaagaagatatgaagagattacatcccattgatttcgagaaactacagtttgttggagattctctcaagattttgagacgagaggttggggaacatgctgcggtgttgggtttcgttggagcgccttggacaattgcaacatatattgttgaaggaggaacaactcgaacatatacagtcataaagaatatgtgccacactgcaccagatgtattgagagctctattatctcatttaaccaaggccattaccgagtatgtggtttaccaagttgagcacggagctcactgcatacaaatattcgattcctggggtggccaactgactccggagatgtgggagcgctggtccaaaccatacattgaagagatcatacatgctgtaaagaaaagatgtccagatacgccgatagttttctacatcaatggaaatggtggccttcttgagcgaatgaaaggaactggagctgatgttattggacttgactggactgtagatatggctgatggaaggaggcgattgggaagcgaggtaagtgtgcagggaaatgttgatccagcttacctattctctccgcttcctgctttgaccgaagaaattgaaagagttgtgaagtgtgctggaccaaaagggcatattctcaatctaggacacggtgtcttggtagggacaccagaggaagccgtggctcatttctttgaaaccgctagaaacttggattaccaaacacttttccaaaatcatgttcctgcagaaaaagctgaacctgaattggttgtctgagaaatggaatgagagaaaaagttccatgtctgacccttaatcgatgctagagttggtaacttgctatgagatatatgcgaagctgtccagtttttgtttggcttgcttgaggatttccaatcttctggaccaagctctgcttaacgtttaacaatgtattgagttgctcctaggcttcaaatgttgctgcttcttttggagatatgactctggttaaagtttaaccaaacattcatttatctggttaatctcaaacctttgcta

SEQ ID NO: 50561 - protein, 418 aa, Arabidopsis thaliana; identical to SEQ ID NO: 49697
  peptide (1)..(418): Ceres Seq. ID no. 12559636
  misc_feature (78)..(397): Pfam Name: Uroporphyrinogen decarboxylase (URO-D) Pfam Description: Uroporphyrinogen decarboxylase (URO-D)
  misc_feature (56)..(399): Homolog of NCBI NO: 23130482 NR Description: hypothetical protein [Nostoc punctiforme]
  misc_feature (55)..(399): Homolog of NCBI NO: 14334768 NR Description: putative uroporphyrinogen decarboxylase
  misc_feature (56)..(399): Homolog of NCBI NO: 16975230 NR Description: Chain A, Crystal Structure And Substrate Binding Of The Uroporphyrinogen-Iii Decarboxylase From Nicotiana Tabacum:
  misc_feature (55)..(399): Homolog of NCBI NO: 15226690 NR Description: putative uroporphyrinogen decarboxylase
  misc_feature (3)..(399): Homolog of NCBI NO: 2501647 NR Description: Uroporphyrinogen decarboxylase, chloroplast
  misc_feature (60)..(398): Homolog of NCBI NO: 16332025 NR Description: uroporphyrinogen decarboxylase [Synechocystis sp.
  misc_feature (40)..(414): Homolog of NCBI NO: 34912796 NR Description: putative uroporphyrinogen decarboxylase
  misc_feature (78)..(418): Homolog of NCBI NO: 8777476 NR Description: uroporphyrinogen decarboxylase [Arabidopsis
  misc_feature (1)..(418): Homolog of NCBI NO: 16323119 NR Description: AT3g14930/K15M2_7 [Arabidopsis thaliana]
  misc_feature (1)..(418): Homolog of NCBI NO: 18400577 NR Description: uroporphyrinogen decarboxylase, putative

SEQ ID NO: 50562 - protein, 341 aa, Arabidopsis thaliana; identical to SEQ ID NO: 49698
  peptide (1)..(341): Ceres Seq. ID no. 12559637
  misc_feature (1)..(320): Pfam Name: Uroporphyrinogen decarboxylase (URO-D) Pfam Description: Uroporphyrinogen decarboxylase (URO-D)
  misc_feature (1)..(322): Homolog of NCBI NO: 23130482 NR Description: hypothetical protein [Nostoc punctiforme]
  misc_feature (1)..(322): Homolog of NCBI NO: 14334768 NR Description: putative uroporphyrinogen decarboxylase
  misc_feature (1)..(322): Homolog of NCBI NO: 16975230 NR Description: Chain A, Crystal Structure And Substrate Binding Of The Uroporphyrinogen-Iii Decarboxylase From Nicotiana Tabacum:
  misc_feature (1)..(322): Homolog of NCBI NO: 15226690 NR Description: putative uroporphyrinogen decarboxylase
  misc_feature (1)..(322): Homolog of NCBI NO: 2501647 NR Description: Uroporphyrinogen decarboxylase, chloroplast
  misc_feature (1)..(321): Homolog of NCBI NO: 16332025 NR Description: uroporphyrinogen decarboxylase [Synechocystis sp.
  misc_feature (1)..(337): Homolog of NCBI NO: 34912796 NR Description: putative uroporphyrinogen decarboxylase
  misc_feature (1)..(341): Homolog of NCBI NO: 8777476 NR Description: uroporphyrinogen decarboxylase [Arabidopsis
  misc_feature (1)..(341): Homolog of NCBI NO: 16323119 NR Description: AT3g14930/K15M2_7 [Arabidopsis thaliana]
  misc_feature (1)..(341): Homolog of NCBI NO: 18400577 NR Description: uroporphyrinogen decarboxylase, putative

SEQ ID NO: 50563 - protein, 340 aa, Arabidopsis thaliana; identical to SEQ ID NO: 49699
  peptide (1)..(340): Ceres Seq. ID no. 12559638
  misc_feature (1)..(319): Pfam Name: Uroporphyrinogen decarboxylase (URO-D) Pfam Description: Uroporphyrinogen decarboxylase (URO-D)
  misc_feature (1)..(321): Homolog of NCBI NO: 23130482 NR Description: hypothetical protein [Nostoc punctiforme]
  misc_feature (1)..(321): Homolog of NCBI NO: 14334768 NR Description: putative uroporphyrinogen decarboxylase
  misc_feature (1)..(321): Homolog of NCBI NO: 16975230 NR Description: Chain A, Crystal Structure And Substrate Binding Of The Uroporphyrinogen-Iii Decarboxylase From Nicotiana Tabacum:
  misc_feature (1)..(321): Homolog of NCBI NO: 15226690 NR Description: putative uroporphyrinogen decarboxylase
  misc_feature (1)..(321): Homolog of NCBI NO: 2501647 NR Description: Uroporphyrinogen decarboxylase, chloroplast
  misc_feature (1)..(320): Homolog of NCBI NO: 16332025 NR Description: uroporphyrinogen decarboxylase [Synechocystis sp.
  misc_feature (1)..(336): Homolog of NCBI NO: 34912796 NR Description: putative uroporphyrinogen decarboxylase
  misc_feature (1)..(340): Homolog of NCBI NO: 8777476 NR Description: uroporphyrinogen decarboxylase [Arabidopsis
  misc_feature (1)..(340): Homolog of NCBI NO: 16323119 NR Description: AT3g14930/K15M2_7 [Arabidopsis thaliana]
  misc_feature (1)..(340): Homolog of NCBI NO: 18400577 NR Description: uroporphyrinogen decarboxylase, putative

SEQ ID NO: 50564 - DNA, 638 bp, Arabidopsis thaliana
  misc_feature (1)..(638): Ceres Seq. ID no. 14307581
  misc_feature: MA Experiment ID: 20000184 Result: Up-regulated in Transcription
  misc_feature: MA Experiment 20000184 PARAMETER Experiment Name: At_Shoots__P Parameter: Age (day) Value: 7
  misc_feature: MA Experiment 20000184 PARAMETER Experiment Name: At_Shoots__P Parameter: Tissue Value: Shoots vs. Whole Plant
  misc_feature: MA Experiment ID: 20000437 Result: Down-regulated in Transcription
  misc_feature: MA Experiment 20000437 PARAMETER Experiment Name: At_Drought_P Parameter: Age (day) Value: 8
  misc_feature: MA Experiment 20000437 PARAMETER Experiment Name: At_Drought_P Parameter: Organism Value: A. thaliana
  misc_feature: MA Experiment 20000437 PARAMETER Experiment Name: At_Drought_P Parameter: Plant Line Value: WS
  misc_feature: MA Experiment 20000437 PARAMETER Experiment Name: At_Drought_P Parameter: Timepoint (hr) Value: 24
  misc_feature: MA Experiment 20000437 PARAMETER Experiment Name: At_Drought_P Parameter: Tissue Value: Whole Plant
  misc_feature: MA Experiment 20000437 PARAMETER Experiment Name: At_Drought_P Parameter: Treatment Value: Drought vs. No Drought
  misc_feature: MA Experiment ID: 20000438 Result: Up-regulated in Transcription
  misc_feature: MA Experiment 20000438 PARAMETER Experiment Name: At_Shoots__P Parameter: Age (day) Value: 14
  misc_feature: MA Experiment 20000438 PARAMETER Experiment Name: At_Shoots__P Parameter: Tissue Value: Shoots vs. Whole Plant
  misc_feature: MA Experiment ID: 20000439 Result: Down-regulated in Transcription
  misc_feature: MA Experiment 20000439 PARAMETER Experiment Name: At_Roots__P Parameter: Age (day) Value: 14 vs. 21
  misc_feature: MA Experiment 20000439 PARAMETER Experiment Name: At_Roots__P Parameter: Organism Value: A. thaliana
  misc_feature: MA Experiment 20000439 PARAMETER Experiment Name: At_Roots__P Parameter: Tissue Value: Roots vs. Whole Plant
  misc_feature: MA Experiment ID: 20000527 Result: Up-regulated in Transcription
  misc_feature: MA Experiment 20000527 PARAMETER Experiment Name: At_10percent_PEG_P Parameter: Age (day) Value: 20
  misc_feature: MA Experiment 20000527 PARAMETER Experiment Name: At_10percent_PEG_P Parameter: Organism Value: A. thaliana
  misc_feature: MA Experiment 20000527 PARAMETER Experiment Name: At_10percent_PEG_P Parameter: Plant Line Value: WS
  misc_feature: MA Experiment 20000527 PARAMETER Experiment Name: At_10percent_PEG_P Parameter: Timepoint (day) Value: 20
  misc_feature: MA Experiment 20000527 PARAMETER Experiment Name: At_10percent_PEG_P Parameter: Tissue Value: Whole Plant
  misc_feature: MA Experiment 20000527 PARAMETER Experiment Name: At_10percent_PEG_P Parameter: Treatment Value: 10percent PEG vs. No Treatment
  misc_feature: MA Experiment ID: 20001248 Result: Down-regulated in Transcription
  misc_feature: MA Experiment 20001248 PARAMETER Experiment Name: At_Far-red-induction_P Parameter: Age (day) Value: 7
  misc_feature: MA Experiment 20001248 PARAMETER Experiment Name: At_Far-red-induction_P Parameter: Light Value: Far-red vs. White
  misc_feature: MA Experiment 20001248 PARAMETER Experiment Name: At_Far-red-induction_P Parameter: Organism Value: A. thaliana
  misc_feature: MA Experiment 20001248 PARAMETER Experiment Name: At_Far-red-induction_P Parameter: Plant Line Value: Columbia
  misc_feature: MA Experiment 20001248 PARAMETER Experiment Name: At_Far-red-induction_P Parameter: Timepoint (hr) Value: 4
  misc_feature: MA Experiment 20001248 PARAMETER Experiment Name: At_Far-red-induction_P Parameter: Tissue Value: Whole Plant
  misc_feature: MA Experiment ID: 20001450 Result: Down-regulated in Transcription
  misc_feature: MA Experiment 20001450 PARAMETER Experiment Name: At_Far-red-induction_P Parameter: Age (day) Value: 7
  misc_feature: MA Experiment 20001450 PARAMETER Experiment Name: At_Far-red-induction_P Parameter: Light Value: Far-red vs. White
  misc_feature: MA Experiment 20001450 PARAMETER Experiment Name: At_Far-red-induction_P Parameter: Organism Value: A. thaliana
  misc_feature: MA Experiment 20001450 PARAMETER Experiment Name: At_Far-red-induction_P Parameter: Plant Line Value: Columbia
  misc_feature: MA Experiment 20001450 PARAMETER Experiment Name: At_Far-red-induction_P Parameter: Timepoint (hr) Value: 8
  misc_feature: MA Experiment 20001450 PARAMETER Experiment Name: At_Far-red-induction_P Parameter: Tissue Value: Whole Plant
  misc_feature: MA Experiment ID: 20001451 Result: Down-regulated in Transcription
  misc_feature: MA Experiment 20001451 PARAMETER Experiment Name: At_Far-red-induction_P Parameter: Age (day) Value: 7
  misc_feature: MA Experiment 20001451 PARAMETER Experiment Name: At_Far-red-induction_P Parameter: Light Value: Far-red vs. White
  misc_feature: MA Experiment 20001451 PARAMETER Experiment Name: At_Far-red-induction_P Parameter: Organism Value: A. thaliana
  misc_feature: MA Experiment 20001451 PARAMETER Experiment Name: At_Far-red-induction_P Parameter: Plant Line Value: Columbia
  misc_feature: MA Experiment 20001451 PARAMETER Experiment Name: At_Far-red-induction_P Parameter: Timepoint (hr) Value: 24
  misc_feature: MA Experiment 20001451 PARAMETER Experiment Name: At_Far-red-induction_P Parameter: Tissue Value: Whole Plant
  misc_feature: MA Experiment ID: 20001757 Result: Up-regulated in Transcription
  misc_feature: MA Experiment 20001757 PARAMETER Experiment Name: At_50mM_NH4NO3_L-to-H_P Parameter: Timepoint (hr) Value: 6
  misc_feature: MA Experiment 20001757 PARAMETER Experiment Name: At_50mM_NH4NO3_L-to-H_P Parameter: Tissue Value: Leaf
  misc_feature: MA Experiment 20001757 PARAMETER Experiment Name: At_50mM_NH4NO3_L-to-H_P Parameter: Treatment Value: 50mM NH4NO3 vs 100mM Mannitol
ggtcacatttctttaactttaaaaactcttccgtttcgccgaagcttcttcaatggcgatttctctcgccaccgcctatatctctccatgttttacaccggaatcgtctagttccgcttcaccatcacgaactctttcctccgtacgattaccttctcagattcgccgattcggaagtgttcaatcgccgtcttcgtctactcgcttcgctccactcactgtaagagcagcaaagaagcaaactttcaactcttttgatgatttgttgcagaattctgataaacctgtacttgtagacttctatgctacttggtgtggtccatgtcagcttatggtacctatactcaatgaagtgagtgaaacactgaaagatataattgcagttgtgaaaattgatactgagaagtacccaagtcttgctaacaaataccagattgaggctttgcccacattcatcttattcaaagacggcaaactctgggaccgtttcgagggtgccttgccagcgaaccaactcgttgagcgtattgagaattctttgcaagtgaaacagtaggtttgagaaaccaagaaaacttgtcatctatgaacaatctgttgtgacataagccattgttgattgtttgctcggtataatc

SEQ ID NO: 50565 - protein, 167 aa, Arabidopsis thaliana
  peptide (1)..(167): Ceres Seq. ID no. 14307582
  misc_feature (59)..(164): Pfam Name: Thioredoxin Pfam Description: Thioredoxin
  misc_feature (59)..(160): Homolog of NCBI NO: 16331440 NR Description: thioredoxin M [Synechocystis sp. PCC 6803]
  misc_feature (59)..(159): Homolog of NCBI NO: 27763679 NR Description: thioredoxin y [Chlamydomonas reinhardtii]
  misc_feature (61)..(161): Homolog of NCBI NO: 17229385 NR Description: thioredoxin [Nostoc sp. PCC 7120]
  misc_feature (59)..(163): Homolog of NCBI NO: 23123943 NR Description: hypothetical protein [Nostoc punctiforme]
  misc_feature (60)..(165): Homolog of NCBI NO: 23039598 NR Description: hypothetical protein [Trichodesmium erythraeum
  misc_feature (19)..(166): Homolog of NCBI NO: 15223728 NR Description: thioredoxin family [Arabidopsis thaliana]
  misc_feature (2)..(166): Homolog of NCBI NO: 38454080 NR Description: At1g76760 [Arabidopsis thaliana]
  misc_feature (1)..(69): Homolog of NCBI NO: 25405118 NR Description: hypothetical protein T10P12.4 [imported] -
  misc_feature (57)..(167): Homolog of NCBI NO: 25405118 NR Description: hypothetical protein T10P12.4 [imported] -
  misc_feature (1)..(167): Homolog of NCBI NO: 30693659 NR Description: thioredoxin family [Arabidopsis thaliana]
MAISLATAYISPCFTPESSSSASPSRTLSSVRLPSQIRRFGSVQSPSSSTRFAPLTVRAAKKQTFNSFDDLLQNSDKPVLVDFYATWCGPCQLMVPILNEVSETLKDIIAVVKIDTEKYPSLANKYQIEALPTFILFKDGKLWDRFEGALPANQLVERIENSLQVKQ

SEQ ID NO: 50566 - DNA, 1727 bp, Arabidopsis thaliana; identical to SEQ ID NO: 45624
  misc_feature (1)..(1727): Ceres Seq. ID no. 12559251
  misc_feature: MA Experiment ID: 20000234 Result: Up-regulated in Transcription
  misc_feature: MA Experiment 20000234 PARAMETER Experiment Name: At_Siliques_P Parameter: Age (day) Value: 21
  misc_feature: MA Experiment 20000234 PARAMETER Experiment Name: At_Siliques_P Parameter: Organism Value: A. thaliana
  misc_feature: MA Experiment 20000234 PARAMETER Experiment Name: At_Siliques_P Parameter: Plant Line Value: WS
  misc_feature: MA Experiment 20000234 PARAMETER Experiment Name: At_Siliques_P Parameter: Tissue Value: Less Than 5mm Siliques vs. Whole Plant
  misc_feature: MA Experiment ID: 20000264 Result: Up-regulated in Transcription
  misc_feature: MA Experiment 20000264 PARAMETER Experiment Name: At_Open_Flower_P Parameter: Age (day) Value: 21
  misc_feature: MA Experiment 20000264 PARAMETER Experiment Name: At_Open_Flower_P Parameter: Plant Line Value: WS
  misc_feature: MA Experiment 20000264 PARAMETER Experiment Name: At_Open_Flower_P Parameter: Tissue Value: Open Flower vs. Whole Plant
  misc_feature: MA Experiment ID: 20000265 Result: Up-regulated in Transcription
  misc_feature: MA Experiment 20000265 PARAMETER Experiment Name: At_Open_Flower_P Parameter: Age (day) Value: 21
  misc_feature: MA Experiment 20000265 PARAMETER Experiment Name: At_Open_Flower_P Parameter: Plant Line Value: WS
  misc_feature: MA Experiment 20000265 PARAMETER Experiment Name: At_Open_Flower_P Parameter: Tissue Value: Closed Flower vs. Whole Plant

SEQ ID NO: 50567 - protein, 343 aa, Arabidopsis thaliana; identical to SEQ ID NO: 45625
  peptide (1)..(343): Ceres Seq. ID no. 12559252
  misc_feature (15)..(314): Pfam Name: Protein of unknown function (DUF803) Pfam Description: Protein of unknown function (DUF803)
  misc_feature (15)..(314): Pfam Name: Protein of unknown function (DUF803) Pfam Description: Protein of unknown function (DUF803)
  misc_feature (15)..(314): Homolog of NCBI NO: 26449939 NR Description: unknown protein [Arabidopsis thaliana]
  misc_feature (15)..(338): Homolog of NCBI NO: 30681265 NR Description: expressed protein [Arabidopsis thaliana]
  misc_feature (15)..(321): Homolog of NCBI NO: 21742149 NR Description: OSJNBa0069D17.4 [Oryza sativa (japonica
  misc_feature (15)..(316): Homolog of NCBI NO: 21593618 NR Description: unknown [Arabidopsis thaliana]
  misc_feature (15)..(316): Homolog of NCBI NO: 18414079 NR Description: expressed protein
  misc_feature (15)..(314): Homolog of NCBI NO: 26449939 NR Description: unknown protein [Arabidopsis thaliana]
  misc_feature (15)..(321): Homolog of NCBI NO: 21742149 NR Description: OSJNBa0069D17.4 [Oryza sativa (japonica
  misc_feature (15)..(316): Homolog of NCBI NO: 18414079 NR Description: expressed protein
  misc_feature (1)..(343): Homolog of NCBI NO: 18409942 NR Description: expressed protein
  misc_feature (1)..(314): Homolog of NCBI NO: 25406128 NR Description: unknown protein F17M19.5 [imported] - Arabidopsis
  misc_feature (1)..(343): Homolog of NCBI NO: 18399280 NR Description: expressed protein
  misc_feature (6)..(343): Homolog of NCBI NO: 20161440 NR Description: B1065E10.15 [Oryza sativa (japonica
  misc_feature (15)..(315): Homolog of NCBI NO: 15229534 NR Description: unknown protein; protein id: At3g23870.1
  misc_feature (15)..(316): Homolog of NCBI NO: 21593618 NR Description: unknown [Arabidopsis thaliana]
  misc_feature (15)..(338): Homolog of NCBI NO: 30681265 NR Description: expressed protein [Arabidopsis thaliana]
  misc_feature (15)..(315): Homolog of NCBI NO: 15229534 NR Description: unknown protein; protein id: At3g23870.1
  misc_feature (6)..(343): Homolog of NCBI NO: 20161440 NR Description: B1065E10.15 [Oryza sativa (japonica
  misc_feature (1)..(343): Homolog of NCBI NO: 18399280 NR Description: expressed protein
  misc_feature (1)..(314): Homolog of NCBI NO: 25406128 NR Description: unknown protein F17M19.5 [imported] - Arabidopsis
  misc_feature (1)..(343): Homolog of NCBI NO: 18409942 NR Description: expressed protein

SEQ ID NO: 50568 - protein, 329 aa, Arabidopsis thaliana; identical to SEQ ID NO: 45626
  peptide (1)..(329): Ceres Seq. ID no. 12559253
  misc_feature (1)..(300): Pfam Name: Protein of unknown function (DUF803) Pfam Description: Protein of unknown function (DUF803)
  misc_feature (1)..(300): Pfam Name: Protein of unknown function (DUF803) Pfam Description: Protein of unknown function (DUF803)
  misc_feature (1)..(300): Homolog of NCBI NO: 26449939 NR Description: unknown protein [Arabidopsis thaliana]
  misc_feature (1)..(324): Homolog of NCBI NO: 30681265 NR Description: expressed protein [Arabidopsis thaliana]
  misc_feature (1)..(307): Homolog of NCBI NO: 21742149 NR Description: OSJNBa0069D17.4 [Oryza sativa (japonica
  misc_feature (1)..(302): Homolog of NCBI NO: 21593618 NR Description: unknown [Arabidopsis thaliana]
  misc_feature (1)..(302): Homolog of NCBI NO: 18414079 NR Description: expressed protein
  misc_feature (1)..(300): Homolog of NCBI NO: 26449939 NR Description: unknown protein [Arabidopsis thaliana]
  misc_feature (1)..(307): Homolog of NCBI NO: 21742149 NR Description: OSJNBa0069D17.4 [Oryza sativa (japonica
  misc_feature (1)..(302): Homolog of NCBI NO: 18414079 NR Description: expressed protein
  misc_feature (1)..(329): Homolog of NCBI NO: 18409942 NR Description: expressed protein
  misc_feature (1)..(300): Homolog of NCBI NO: 25406128 NR Description: unknown protein F17M19.5 [imported] - Arabidopsis
  misc_feature (1)..(329): Homolog of NCBI NO: 18399280 NR Description: expressed protein
  misc_feature (1)..(329): Homolog of NCBI NO: 20161440 NR Description: B1065E10.15 [Oryza sativa (japonica
  misc_feature (1)..(301): Homolog of NCBI NO: 15229534 NR Description: unknown protein; protein id: At3g23870.1
  misc_feature (1)..(302): Homolog of NCBI NO: 21593618 NR Description: unknown [Arabidopsis thaliana]
  misc_feature (1)..(324): Homolog of NCBI NO: 30681265 NR Description: expressed protein [Arabidopsis thaliana]
  misc_feature (1)..(301): Homolog of NCBI NO: 15229534 NR Description: unknown protein; protein id: At3g23870.1
  misc_feature (1)..(329): Homolog of NCBI NO: 20161440 NR Description: B1065E10.15 [Oryza sativa (japonica
  misc_feature (1)..(329): Homolog of NCBI NO: 18399280 NR Description: expressed protein
  misc_feature (1)..(300): Homolog of NCBI NO: 25406128 NR Description: unknown protein F17M19.5 [imported] - Arabidopsis
  misc_feature (1)..(329): Homolog of NCBI NO: 18409942 NR Description: expressed protein

SEQ ID NO: 50569 - protein, 273 aa, Arabidopsis thaliana; identical to SEQ ID NO: 45627
  peptide (1)..(273): Ceres Seq. ID no. 12559254
  misc_feature (1)..(244): Pfam Name: Protein of unknown function (DUF803) Pfam Description: Protein of unknown function (DUF803)
  misc_feature (1)..(244): Pfam Name: Protein of unknown function (DUF803) Pfam Description: Protein of unknown function (DUF803)
  misc_feature (1)..(244): Homolog of NCBI NO: 26449939 NR Description: unknown protein [Arabidopsis thaliana]
  misc_feature (1)..(268): Homolog of NCBI NO: 30681265 NR Description: expressed protein [Arabidopsis thaliana]
  misc_feature (1)..(251): Homolog of NCBI NO: 21742149 NR Description: OSJNBa0069D17.4 [Oryza sativa (japonica
  misc_feature (1)..(246): Homolog of NCBI NO: 21593618 NR Description: unknown [Arabidopsis thaliana]
  misc_feature (1)..(246): Homolog of NCBI NO: 18414079 NR Description: expressed protein
  misc_feature (1)..(244): Homolog of NCBI NO: 26449939 NR Description: unknown protein [Arabidopsis thaliana]
  misc_feature (1)..(251): Homolog of NCBI NO: 21742149 NR Description: OSJNBa0069D17.4 [Oryza sativa (japonica
  misc_feature (1)..(246): Homolog of NCBI NO: 18414079 NR Description: expressed protein
  misc_feature (1)..(273): Homolog of NCBI NO: 18409942 NR Description: expressed protein
  misc_feature (1)..(244): Homolog of NCBI NO: 25406128 NR Description: unknown protein F17M19.5 [imported] - Arabidopsis
  misc_feature (1)..(273): Homolog of NCBI NO: 18399280 NR Description: expressed protein
  misc_feature (1)..(273): Homolog of NCBI NO: 20161440 NR Description: B1065E10.15 [Oryza sativa (japonica
  misc_feature (1)..(245): Homolog of NCBI NO: 15229534 NR Description: unknown protein; protein id: At3g23870.1
  misc_feature (1)..(246): Homolog of NCBI NO: 21593618 NR Description: unknown [Arabidopsis thaliana]
  misc_feature (1)..(268): Homolog of NCBI NO: 30681265 NR Description: expressed protein [Arabidopsis thaliana]
  misc_feature (1)..(245): Homolog of NCBI NO: 15229534 NR Description: unknown protein; protein id: At3g23870.1
  misc_feature (1)..(273): Homolog of NCBI NO: 20161440 NR Description: B1065E10.15 [Oryza sativa (japonica
  misc_feature (1)..(273): Homolog of NCBI NO: 18399280 NR Description: expressed protein
  misc_feature (1)..(244): Homolog of NCBI NO: 25406128 NR Description: unknown protein F17M19.5 [imported] - Arabidopsis
  misc_feature (1)..(273): Homolog of NCBI NO: 18409942 NR Description: expressed protein

SEQ ID NO: 50570 - DNA, 1647 bp, Arabidopsis thaliana
  misc_feature (1)..(1647): Ceres Seq. ID no. 13592448
  misc_feature: MA Experiment ID: 20000173 Result: Down-regulated in Transcription
  misc_feature: MA Experiment 20000173 PARAMETER Experiment Name: At_42deg_Heat_P Parameter: Age (day) Value: 14
  misc_feature: MA Experiment 20000173 PARAMETER Experiment Name: At_42deg_Heat_P Parameter: Organism Value: A. thaliana
  misc_feature: MA Experiment 20000173 PARAMETER Experiment Name: At_42deg_Heat_P Parameter: Plant Line Value: WS
  misc_feature: MA Experiment 20000173 PARAMETER Experiment Name: At_42deg_Heat_P Parameter: Temperature (deg C) Value: 42 vs. 22
  misc_feature: MA Experiment 20000173 PARAMETER Experiment Name: At_42deg_Heat_P Parameter: Timepoint (hr) Value: 6
  misc_feature: MA Experiment 20000173 PARAMETER Experiment Name: At_42deg_Heat_P Parameter: Tissue Value: Aerial
atggacttgcaactgaaacaatggagaagtcagcagcagaatgagtcagaagaacaaggctctgctgcaactaagatatcaaactttttctttgatcagattcagtcccaaactgctacttctgctgctgcggctcctcttcctctctttgtccctgaacccacttcttcctcttctttctcttgcttctctcctgactcttctaattcttcttcttcttccaggttcctcaagatgggaaacttcttcagctgggcacagtggcaagaacttgagctacaagcactgatctatagatacatgttggctggtgcttctgttcctcaagagcttctcttacctattaagaaaagtctcctccatcaatctcctatgcatttccttcaccatcctcttcaacatagttttcctcatcaccaaccttcttggtattggggaagaggagcaatggatcctgagccagggaggtgtaagagaactgacggcaagaaatggagatgttcaagggatgttgtagcgggccacaagtattgtgaccgccacattcaccgtggaagaaaccgttcaagaaagcctgtggaaaccgccacaaccaccatcacaacgacagccacaacaaccgcatcttcttttgtcttaggtgaggagcttggtcatggaccaaacaacaaccacttcttctcctctggttcatctcaacctctccaccttagtcatcaacaaagttgttcttcagagatgaaacaagaaagcaacaacaacaagaggccatatgaagctaacagtggattcagcaatggaagatcagacgatggtcacatcttgaggcatttctttgacgattggccacgatcatcagactctacctccagtccaatgagctcatccacttgtcatctttcaatctccatgcccggtaacaacacgtcctcagatgtttctctaaaactttccacaggcaatgaagaagaagaagagaacatgagaaataacaacaatgagagggagcaaatgaattggtggagcaatggagggaatcaccacaacaatatgggaggaccattagctgaggctttgaggtcagcttcttcgacgtcaagtgttcttcatcagatgggaatctctactcaagaaatgaagtatgtgaagccattgagcttattgggtaatgcgctgaagaccaaagtgtcagtccctggtcggtttctgggtttagatgttggtgataagtatgttggattagctatctcagatccttcaaatatggttgcttctccattgagtgttttgctcagaaagaaatcaaacattgacctgatggctacagatttccagaacctggtcaaagcattttctgtgtcgggattagtcgttggttatccatttggcaaactgaacaatgtagaggatgttgtcactgtgaatcttttcattgaggaacttcgtaagaccgaaaaactcaaggatgtgaaatacacatattgggacgagcgattatcatcaaagaccgttgaactgatgttgaagcccttgaatttgcatcctgttcaagagaagacaatgttggacaagttagccgcagtagttatacttcaggagtatttagattacgcgaacaggtatgtaaacactgagccagcagagtaa

SEQ ID NO: 50571 - protein, 548 aa, Arabidopsis thaliana
  peptide (1)..(548): Ceres Seq. ID no. 15221106
  misc_feature (400)..(537): Pfam Name: Uncharacterised protein family (UPF0081) Pfam Description: Uncharacterised protein family (UPF0081)
  misc_feature (42)..(239): Homolog of NCBI NO: 38605957 NR Description: OSJNBa0019K04.18 [Oryza sativa (japonica
  misc_feature (83)..(311): Homolog of NCBI NO: 32470630 NR Description: putative growth-regulating factor [Solanum
  misc_feature (83)..(291): Homolog of NCBI NO: 32470646 NR Description: putative growth-regulating factor [Solanum
  misc_feature (379)..(540): Homolog of NCBI NO: 7635496 NR Description: hypothetical 19.6 kDa protein [Cicer arietinum]
  misc_feature (1)..(351): Homolog of NCBI NO: 26449924 NR Description: unknown protein [Arabidopsis thaliana]
  misc_feature (1)..(351): Homolog of NCBI NO: 15227652 NR Description: transcription activator (GRL3) [Arabidopsis
  misc_feature (379)..(548): Homolog of NCBI NO: 26449955 NR Description: unknown protein [Arabidopsis thaliana]
  misc_feature (1)..(191): Homolog of NCBI NO: 27808514 NR Description: At3g52910 [Arabidopsis thaliana]
  misc_feature (1)..(377): Homolog of NCBI NO: 21539886 NR Description: transcription activator [Arabidopsis thaliana]
  misc_feature (1)..(548): Homolog of NCBI NO: 15231708 NR Description: expressed protein [Arabidopsis thaliana]
MDLQLKQWRSQQQNESEEQGSAATKISNFFFDQIQSQTATSAAAAPLPLFVPEPTSSSSFSCFSPDSSNSSSSSRFLKMGNFFSWAQWQELELQALIYRYMLAGASVPQELLLPIKKSLLHQSPMHFLHHPLQHSFPHHQPSWYWGRGAMDPEPGRCKRTDGKKWRCSRDVVAGHKYCDRHIHRGRNRSRKPVETATTTITTTATTTASSFVLGEELGHGPNNNHFFSSGSSQPLHLSHQQSCSSEMKQESNNNKRPYEANSGFSNGRSDDGHILRHFFDDWPRSSDSTSSPMSSSTCHLSISMPGNNTSSDVSLKLSTGNEEEEENMRNNNNEREQMNWWSNGGNHHNNMGGPLAEALRSASSTSSVLHQMGISTQEMKYVKPLSLLGNALKTKVSVPGRFLGLDVGDKYVGLAISDPSNMVASPLSVLLRKKSNIDLMATDFQNLVKAFSVSGLVVGYPFGKLNNVEDVVTVNLFIEELRKTEKLKDVKYTYWDERLSSKTVELMLKPLNLHPVQEKTMLDKLAAVVILQEYLDYANRYVNTEPAE

SEQ ID NO: 50572 - protein, 470 aa, Arabidopsis thaliana
  peptide (1)..(470): Ceres Seq. ID no. 15221107
  misc_feature (322)..(459): Pfam Name: Uncharacterised protein family (UPF0081) Pfam Description: Uncharacterised protein family (UPF0081)
  misc_feature (1)..(161): Homolog of NCBI NO: 38605957 NR Description: OSJNBa0019K04.18 [Oryza sativa (japonica
  misc_feature (5)..(233): Homolog of NCBI NO: 32470630 NR Description: putative growth-regulating factor [Solanum
  misc_feature (5)..(213): Homolog of NCBI NO: 32470646 NR Description: putative growth-regulating factor [Solanum
  misc_feature (301)..(462): Homolog of NCBI NO: 7635496 NR Description: hypothetical 19.6 kDa protein [Cicer arietinum]
  misc_feature (1)..(273): Homolog of NCBI NO: 26449924 NR Description: unknown protein [Arabidopsis thaliana]
  misc_feature (1)..(273): Homolog of NCBI NO: 15227652 NR Description: transcription activator (GRL3) [Arabidopsis
  misc_feature (301)..(470): Homolog of NCBI NO: 26449955 NR Description: unknown protein [Arabidopsis thaliana]
  misc_feature (1)..(113): Homolog of NCBI NO: 27808514 NR Description: At3g52910 [Arabidopsis thaliana]
  misc_feature (1)..(299): Homolog of NCBI NO: 21539886 NR Description: transcription activator [Arabidopsis thaliana]
  misc_feature (1)..(470): Homolog of NCBI NO: 15231708 NR Description: expressed protein [Arabidopsis thaliana]
MGNFFSWAQWQELELQALIYRYMLAGASVPQELLLPIKKSLLHQSPMHFLHHPLQHSFPHHQPSWYWGRGAMDPEPGRCKRTDGKKWRCSRDVVAGHKYCDRHIHRGRNRSRKPVETATTTITTTATTTASSFVLGEELGHGPNNNHFFSSGSSQPLHLSHQQSCSSEMKQESNNNKRPYEANSGFSNGRSDDGHILRHFFDDWPRSSDSTSSPMSSSTCHLSISMPGNNTSSDVSLKLSTGNEEEEENMRNNNNEREQMNWWSNGGNHHNNMGGPLAEALRSASSTSSVLHQMGISTQEMKYVKPLSLLGNALKTKVSVPGRFLGLDVGDKYVGLAISDPSNMVASPLSVLLRKKSNIDLMATDFQNLVKAFSVSGLVVGYPFGKLNNVEDVVTVNLFIEELRKTEKLKDVKYTYWDERLSSKTVELMLKPLNLHPVQEKTMLDKLAAVVILQEYLDYANRYVNTEPAE

SEQ ID NO: 50573 - protein, 448 aa, Arabidopsis thaliana
  peptide (1)..(448): Ceres Seq. ID no. 15221108
  misc_feature (300)..(437): Pfam Name: Uncharacterised protein family (UPF0081) Pfam Description: Uncharacterised protein family (UPF0081)
  misc_feature (1)..(139): Homolog of NCBI NO: 38605957 NR Description: OSJNBa0019K04.18 [Oryza sativa (japonica
  misc_feature (1)..(211): Homolog of NCBI NO: 32470630 NR Description: putative growth-regulating factor [Solanum
  misc_feature (1)..(191): Homolog of NCBI NO: 32470646 NR Description: putative growth-regulating factor [Solanum
  misc_feature (279)..(440): Homolog of NCBI NO: 7635496 NR Description: hypothetical 19.6 kDa protein [Cicer arietinum]
  misc_feature (1)..(251): Homolog of NCBI NO: 26449924 NR Description: unknown protein [Arabidopsis thaliana]
  misc_feature (1)..(251): Homolog of NCBI NO: 15227652 NR Description: transcription activator (GRL3) [Arabidopsis
  misc_feature (279)..(448): Homolog of NCBI NO: 26449955 NR Description: unknown protein [Arabidopsis thaliana]
  misc_feature (1)..(91): Homolog of NCBI NO: 27808514 NR Description: At3g52910 [Arabidopsis thaliana]
  misc_feature (1)..(277): Homolog of NCBI NO: 21539886 NR Description: transcription activator [Arabidopsis thaliana]
  misc_feature (1)..(448): Homolog of NCBI NO: 15231708 NR Description: expressed protein [Arabidopsis thaliana]
MLAGASVPQELLLPIKKSLLHQSPMHFLHHPLQHSFPHHQPSWYWGRGAMDPEPGRCKRTDGKKWRCSRDVVAGHKYCDRHIHRGRNRSRKPVETATTTITTTATTTASSFVLGEELGHGPNNNHFFSSGSSQPLHLSHQQSCSSEMKQESNNNKRPYEANSGFSNGRSDDGHILRHFFDDWPRSSDSTSSPMSSSTCHLSISMPGNNTSSDVSLKLSTGNEEEEENMRNNNNEREQMNWWSNGGNHHNNMGGPLAEALRSASSTSSVLHQMGISTQEMKYVKPLSLLGNALKTKVSVPGRFLGLDVGDKYVGLAISDPSNMVASPLSVLLRKKSNIDLMATDFQNLVKAFSVSGLVVGYPFGKLNNVEDVVTVNLFIEELRKTEKLKDVKYTYWDERLSSKTVELMLKPLNLHPVQEKTMLDKLAAVVILQEYLDYANRYVNTEPAE

SEQ ID NO: 50574 - DNA, 1384 bp, Arabidopsis thaliana
  misc_feature (1)..(1384): Ceres Seq. ID no. 13588389
  misc_feature: MA Experiment ID: 108434 Result: Down-regulated in Transcription
  misc_feature: MA Experiment 108434 PARAMETER Experiment Name: At_Root_Tips_cDNA_P Parameter: Tissue Value: Root Tips
  misc_feature: MA Experiment ID: 108435 Result: Down-regulated in Transcription
  misc_feature: MA Experiment 108435 PARAMETER Experiment Name: At_stm_Mutants_cDNA_P Parameter: Plant Line Value: wt Landsburg vs stm
  misc_feature: MA Experiment 108435 PARAMETER Experiment Name: At_stm_Mutants_cDNA_P Parameter: Tissue Value: Shoot Apical Meristem Region
  misc_feature: MA Experiment ID: 108462 Result: Up-regulated in Transcription
  misc_feature: MA Experiment 108462 PARAMETER Experiment Name: At_Germinating_Seeds_cDNA_P Parameter: Age (day) Value: 2 vs. 0
  misc_feature: MA Experiment 108462 PARAMETER Experiment Name: At_Germinating_Seeds_cDNA_P Parameter: Tissue Value: Germinating Seeds
  misc_feature: MA Experiment ID: 108463 Result: Up-regulated in Transcription
  misc_feature: MA Experiment 108463 PARAMETER Experiment Name: At_Germinating_Seeds_cDNA_P Parameter: Age (day) Value: 3 vs. 0
  misc_feature: MA Experiment 108463 PARAMETER Experiment Name: At_Germinating_Seeds_cDNA_P Parameter: Tissue Value: Germinating Seeds
  misc_feature: MA Experiment ID: 108464 Result: Up-regulated in Transcription
  misc_feature: MA Experiment 108464 PARAMETER Experiment Name: At_Germinating_Seeds_cDNA_P Parameter: Age (day) Value: 4 vs. 0
  misc_feature: MA Experiment 108464 PARAMETER Experiment Name: At_Germinating_Seeds_cDNA_P Parameter: Tissue Value: Germinating Seeds
  misc_feature: MA Experiment ID: 108572 Result: Down-regulated in Transcription
  misc_feature: MA Experiment 108572 PARAMETER Experiment Name: At_Drought_cDNA_P Parameter: Timepoint (hr) Value: 1
  misc_feature: MA Experiment 108572 PARAMETER Experiment Name: At_Drought_cDNA_P Parameter: Tissue Value: Aerial
  misc_feature: MA Experiment 108572 PARAMETER Experiment Name: At_Drought_cDNA_P Parameter: Treatment Value: Drought vs. No Drought
  misc_feature: MA Experiment ID: 108573 Result: Down-regulated in Transcription
  misc_feature: MA Experiment 108573 PARAMETER Experiment Name: At_Drought_cDNA_P Parameter: Timepoint (hr) Value: 6
  misc_feature: MA Experiment 108573 PARAMETER Experiment Name: At_Drought_cDNA_P Parameter: Tissue Value: Aerial
  misc_feature: MA Experiment 108573 PARAMETER Experiment Name: At_Drought_cDNA_P Parameter: Treatment Value: Drought vs. No Drought
  misc_feature: MA Experiment ID: 108585 Result: Up-regulated in Transcription
  misc_feature: MA Experiment 108585 PARAMETER Experiment Name: At_5mM_NaNP_cDNA_P Parameter: Timepoint (hr) Value: 6
  misc_feature: MA Experiment 108585 PARAMETER Experiment Name: At_5mM_NaNP_cDNA_P Parameter: Tissue Value: Aerial
  misc_feature: MA Experiment 108585 PARAMETER Experiment Name: At_5mM_NaNP_cDNA_P Parameter: Treatment Value: null
  misc_feature: MA Experiment ID: 108594 Result: Down-regulated in Transcription
  misc_feature: MA Experiment 108594 PARAMETER Experiment Name: At_Ler-rhl_Root_cDNA_P Parameter: Plant Line Value: null
  misc_feature: MA Experiment ID: 108595 Result: Down-regulated in Transcription
  misc_feature: MA Experiment 108595 PARAMETER Experiment Name: At_Ler-pi_Ovule_cDNA_P Parameter: Plant Line Value: null
  misc_feature: MA Experiment ID: 108608 Result: Down-regulated in Transcription
  misc_feature: MA Experiment 108608 PARAMETER Experiment Name: At_100uM_ABA_cDNA_P Parameter: Timepoint (hr) Value: 1
  misc_feature: MA Experiment 108608 PARAMETER Experiment Name: At_100uM_ABA_cDNA_P Parameter: Tissue Value: Aerial
  misc_feature: MA Experiment 108608 PARAMETER Experiment Name: At_100uM_ABA_cDNA_P Parameter: Treatment Value: 100uM ABA vs. No Treatment
  misc_feature: MA Experiment ID: 20000068 Result: Down-regulated in Transcription
  misc_feature: MA Experiment ID: 20000070 Result: Up-regulated in Transcription
  misc_feature: MA Experiment 20000070 PARAMETER Experiment Name: At_100uM_ABA_Mutants_cDNA_P Parameter: Plant Line Value: CS24
  misc_feature: MA Experiment 20000070 PARAMETER Experiment Name: At_100uM_ABA_Mutants_cDNA_P Parameter: Timepoint (hr) Value: 6
  misc_feature: MA Experiment 20000070 PARAMETER Experiment Name: At_100uM_ABA_Mutants_cDNA_P Parameter: Tissue Value: Aerial
  misc_feature: MA Experiment 20000070 PARAMETER Experiment Name: At_100uM_ABA_Mutants_cDNA_P Parameter: Treatment Value: 100uM ABA vs. No Treatment
  misc_feature: MA Experiment ID: 20000071 Result: Up-regulated in Transcription
  misc_feature: MA Experiment 20000071 PARAMETER Experiment Name: At_100uM_ABA_Mutants_cDNA_P Parameter: Plant Line Value: CS8104
  misc_feature: MA Experiment 20000071 PARAMETER Experiment Name: At_100uM_ABA_Mutants_cDNA_P Parameter: Timepoint (hr) Value: 6
  misc_feature: MA Experiment 20000071 PARAMETER Experiment Name: At_100uM_ABA_Mutants_cDNA_P Parameter: Tissue Value: Aerial
  misc_feature: MA Experiment 20000071 PARAMETER Experiment Name: At_100uM_ABA_Mutants_cDNA_P Parameter: Treatment Value: 100uM ABA vs. No Treatment
  misc_feature: MA Experiment ID: 20000072 Result: Up-regulated in Transcription
  misc_feature: MA Experiment 20000072 PARAMETER Experiment Name: At_100uM_ABA_Mutants_cDNA_P Parameter: Plant Line Value: CS8105
  misc_feature: MA Experiment 20000072 PARAMETER Experiment Name: At_100uM_ABA_Mutants_cDNA_P Parameter: Timepoint (hr) Value: 6
  misc_feature: MA Experiment 20000072 PARAMETER Experiment Name: At_100uM_ABA_Mutants_cDNA_P Parameter: Tissue Value: Aerial
  misc_feature: MA Experiment 20000072 PARAMETER Experiment Name: At_100uM_ABA_Mutants_cDNA_P Parameter: Treatment Value: 100uM ABA vs. No Treatment
  misc_feature: MA Experiment ID: 20000086 Result: Up-regulated in Transcription
  misc_feature: MA Experiment 20000086 PARAMETER Experiment Name: At_100uM_ABA_Mutants_cDNA_P Parameter: Plant Line Value: CS22
  misc_feature: MA Experiment 20000086 PARAMETER Experiment Name: At_100uM_ABA_Mutants_cDNA_P Parameter: Timepoint (hr) Value: 6
  misc_feature: MA Experiment 20000086 PARAMETER Experiment Name: At_100uM_ABA_Mutants_cDNA_P Parameter: Tissue Value: Aerial
  misc_feature: MA Experiment 20000086 PARAMETER Experiment Name: At_100uM_ABA_Mutants_cDNA_P Parameter: Treatment Value: 100uM ABA vs. No Treatment
  misc_feature: MA Experiment ID: 20000089 Result: Up-regulated in Transcription
  misc_feature: MA Experiment ID: 20000090 Result: Up-regulated in Transcription
  misc_feature: MA Experiment ID: 20000111 Result: Down-regulated in Transcription
  misc_feature: MA Experiment 20000111 PARAMETER Experiment Name: At_42deg_Heat_cDNA_P Parameter: Temperature (deg C) Value: 42 vs. 22
  misc_feature: MA Experiment 20000111 PARAMETER Experiment Name: At_42deg_Heat_cDNA_P Parameter: Timepoint (hr) Value: 6
  misc_feature: MA Experiment 20000111 PARAMETER Experiment Name: At_42deg_Heat_cDNA_P Parameter: Tissue Value: Aerial
  misc_feature: MA Experiment ID: 20000113 Result: Down-regulated in Transcription
  misc_feature: MA Experiment 20000113 PARAMETER Experiment Name: At_42deg_Heat_cDNA_P Parameter: Temperature (deg C) Value: 42 vs. 22
  misc_feature: MA Experiment 20000113 PARAMETER Experiment Name: At_42deg_Heat_cDNA_P Parameter: Timepoint (hr) Value: 8
  misc_feature: MA Experiment 20000113 PARAMETER Experiment Name: At_42deg_Heat_cDNA_P Parameter: Tissue Value: Aerial
  misc_feature: MA Experiment ID: 20000117 Result: Up-regulated in Transcription
  misc_feature: MA Experiment 20000117 PARAMETER Experiment Name: At_100uM_ABA_Mutants_cDNA_P Parameter: Plant Line Value: Columbia
  misc_feature: MA Experiment 20000117 PARAMETER Experiment Name: At_100uM_ABA_Mutants_cDNA_P Parameter: Timepoint (hr) Value: 6
  misc_feature: MA Experiment 20000117 PARAMETER Experiment Name: At_100uM_ABA_Mutants_cDNA_P Parameter: Tissue Value: Aerial
  misc_feature: MA Experiment 20000117 PARAMETER Experiment Name: At_100uM_ABA_Mutants_cDNA_P Parameter: Treatment Value: 100uM ABA vs. No Treatment
  misc_feature: MA Experiment ID: 20000179 Result: Down-regulated in Transcription
  misc_feature: MA Experiment 20000179 PARAMETER Experiment Name: At_Germinating_Seeds_P Parameter: Age (hr) Value: 6 vs. 0
  misc_feature: MA Experiment 20000179 PARAMETER Experiment Name: At_Germinating_Seeds_P Parameter: Tissue Value: Germinating Seeds
  misc_feature: MA Experiment ID: 20000180 Result: Down-regulated in Transcription
  misc_feature: MA Experiment 20000180 PARAMETER Experiment Name: At_Germinating_Seeds_P Parameter: Age (hr) Value: 24 vs. 0
  misc_feature: MA Experiment 20000180 PARAMETER Experiment Name: At_Germinating_Seeds_P Parameter: Tissue Value: Germinating Seeds
  misc_feature: MA Experiment ID: 20000184 Result: Down-regulated in Transcription
  misc_feature: MA Experiment 20000184 PARAMETER Experiment Name: At_Shoots__P Parameter: Age (day) Value: 7
  misc_feature: MA Experiment 20000184 PARAMETER Experiment Name: At_Shoots__P Parameter: Tissue Value: Shoots vs. Whole Plant
  misc_feature: MA Experiment ID: 20000224 Result: Down-regulated in Transcription
  misc_feature: MA Experiment ID: 20000227 Result: Down-regulated in Transcription
  misc_feature: MA Experiment 20000227 PARAMETER Experiment Name: At_Root-Tips-vs-Tops_P Parameter: Tissue Value: Root Tips vs. Root Tops
  misc_feature: MA Experiment ID: 20000234 Result: Down-regulated in Transcription
  misc_feature: MA Experiment 20000234 PARAMETER Experiment Name: At_Siliques_P Parameter: Age (day) Value: 21
  misc_feature: MA Experiment 20000234 PARAMETER Experiment Name: At_Siliques_P Parameter: Organism Value: A. thaliana
  misc_feature: MA Experiment 20000234 PARAMETER Experiment Name: At_Siliques_P Parameter: Plant Line Value: WS
  misc_feature: MA Experiment 20000234 PARAMETER Experiment Name: At_Siliques_P Parameter: Tissue Value: Less Than 5mm Siliques vs. Whole Plant
  misc_feature: MA Experiment ID: 20000264 Result: Down-regulated in Transcription
  misc_feature: MA Experiment 20000264 PARAMETER Experiment Name: At_Open_Flower_P Parameter: Age (day) Value: 21
  misc_feature: MA Experiment 20000264 PARAMETER Experiment Name: At_Open_Flower_P Parameter: Plant Line Value: WS
  misc_feature: MA Experiment 20000264 PARAMETER Experiment Name: At_Open_Flower_P Parameter: Tissue Value: Open Flower vs. Whole Plant
  misc_feature: MA Experiment ID: 20000265 Result: Down-regulated in Transcription
  misc_feature: MA Experiment 20000265 PARAMETER Experiment Name: At_Open_Flower_P Parameter: Age (day) Value: 21
  misc_feature: MA Experiment 20000265 PARAMETER Experiment Name: At_Open_Flower_P Parameter: Plant Line Value: WS
  misc_feature: MA Experiment 20000265 PARAMETER Experiment Name: At_Open_Flower_P Parameter: Tissue Value: Closed Flower vs. Whole Plant
  misc_feature: MA Experiment ID: 20000267 Result: Down-regulated in Transcription
  misc_feature: MA Experiment 20000267 PARAMETER Experiment Name: At_Drought_P Parameter: Age (day) Value: 7
  misc_feature: MA Experiment 20000267 PARAMETER Experiment Name: At_Drought_P Parameter: Organism Value: A. thaliana
  misc_feature: MA Experiment 20000267 PARAMETER Experiment Name: At_Drought_P Parameter: Plant Line Value: WS
  misc_feature: MA Experiment 20000267 PARAMETER Experiment Name: At_Drought_P Parameter: Timepoint (hr) Value: 6
  misc_feature: MA Experiment 20000267 PARAMETER Experiment Name: At_Drought_P Parameter: Tissue Value: Whole Plant
  misc_feature: MA Experiment 20000267 PARAMETER Experiment Name: At_Drought_P Parameter: Treatment Value: Drought vs. No Drought
  misc_feature: MA Experiment ID: 20000286 Result: Down-regulated in Transcription
  misc_feature: MA Experiment 20000286 PARAMETER Experiment Name: At_Open_Flower_P Parameter: Age (day) Value: 21
  misc_feature: MA Experiment 20000286 PARAMETER Experiment Name: At_Open_Flower_P Parameter: Plant Line Value: WS
  misc_feature: MA Experiment 20000286 PARAMETER Experiment Name: At_Open_Flower_P Parameter: Tissue Value: Half Open vs. Whole Plant
  misc_feature: MA Experiment ID: 20000436 Result: Down-regulated in Transcription
  misc_feature: MA Experiment 20000436 PARAMETER Experiment Name: At_Drought_P Parameter: Age (day) Value: 7
  misc_feature: MA Experiment 20000436 PARAMETER Experiment Name: At_Drought_P Parameter: Organism Value: A. thaliana
  misc_feature: MA Experiment 20000436 PARAMETER Experiment Name: At_Drought_P Parameter: Plant Line Value: WS
  misc_feature: MA Experiment 20000436 PARAMETER Experiment Name: At_Drought_P Parameter: Timepoint (hr) Value: 12
  misc_feature: MA Experiment 20000436 PARAMETER Experiment Name: At_Drought_P Parameter: Tissue Value: Whole Plant
  misc_feature: MA Experiment 20000436 PARAMETER Experiment Name: At_Drought_P Parameter: Treatment Value: Drought vs. No Drought
  misc_feature: MA Experiment ID: 20000437 Result: Down-regulated in Transcription
  misc_feature: MA Experiment 20000437 PARAMETER Experiment Name: At_Drought_P Parameter: Age (day) Value: 8
  misc_feature: MA Experiment 20000437 PARAMETER Experiment Name: At_Drought_P Parameter: Organism Value: A. thaliana
  misc_feature: MA Experiment 20000437 PARAMETER Experiment Name: At_Drought_P Parameter: Plant Line Value: WS
  misc_feature: MA Experiment 20000437 PARAMETER Experiment Name: At_Drought_P Parameter: Timepoint (hr) Value: 24
  misc_feature: MA Experiment 20000437 PARAMETER Experiment Name: At_Drought_P Parameter: Tissue Value: Whole Plant
  misc_feature: MA Experiment 20000437 PARAMETER Experiment Name: At_Drought_P Parameter: Treatment Value: Drought vs. No Drought
  misc_feature: MA Experiment ID: 20000438 Result: Down-regulated in Transcription
  misc_feature: MA Experiment 20000438 PARAMETER Experiment Name: At_Shoots__P Parameter: Age (day) Value: 14
  misc_feature: MA Experiment 20000438 PARAMETER Experiment Name: At_Shoots__P Parameter: Tissue Value: Shoots vs. Whole Plant
  misc_feature: MA Experiment ID: 20000439 Result: Up-regulated in Transcription
  misc_feature: MA Experiment 20000439 PARAMETER Experiment Name: At_Roots__P Parameter: Age (day) Value: 14 vs. 21
  misc_feature: MA Experiment 20000439 PARAMETER Experiment Name: At_Roots__P Parameter: Organism Value: A. thaliana
  misc_feature: MA Experiment 20000439 PARAMETER Experiment Name: At_Roots__P Parameter: Tissue Value: Roots vs. Whole Plant
  misc_feature: MA Experiment ID: 20000451 Result: Down-regulated in Transcription
  misc_feature: MA Experiment 20000451 PARAMETER Experiment Name: At_CS6879_Shoots-Roots_P Parameter: Age (day) Value: 14
  misc_feature: MA Experiment 20000451 PARAMETER Experiment Name: At_CS6879_Shoots-Roots_P Parameter: Organism Value: A. thaliana
  misc_feature: MA Experiment 20000451 PARAMETER Experiment Name: At_CS6879_Shoots-Roots_P Parameter: Plant Line Value: CS6879 vs. WS
  misc_feature: MA Experiment 20000451 PARAMETER Experiment Name: At_CS6879_Shoots-Roots_P Parameter: Tissue Value: Roots
  misc_feature: MA Experiment ID: 20000452 Result: Up-regulated in Transcription
  misc_feature: MA Experiment 20000452 PARAMETER Experiment Name: At_CS6879_Shoots-Roots_P Parameter: Age (day) Value: 14
  misc_feature: MA Experiment 20000452 PARAMETER Experiment Name: At_CS6879_Shoots-Roots_P Parameter: Organism Value: A. thaliana
  misc_feature: MA Experiment 20000452 PARAMETER Experiment Name: At_CS6879_Shoots-Roots_P Parameter: Plant Line Value: CS6879 vs. WS
  misc_feature: MA Experiment 20000452 PARAMETER Experiment Name: At_CS6879_Shoots-Roots_P Parameter: Tissue Value: Shoots
  misc_feature: MA Experiment ID: 20000576 Result: Down-regulated in Transcription
  misc_feature: MA Experiment 20000576 PARAMETER Experiment Name: At_100uM_ABA_Mutants__P Parameter: Organism Value: A. thaliana
  misc_feature: MA Experiment 20000576 PARAMETER Experiment Name: At_100uM_ABA_Mutants__P Parameter: Plant Line Value: CS23
  misc_feature: MA Experiment 20000576 PARAMETER Experiment Name: At_100uM_ABA_Mutants__P Parameter: Timepoint (hr) Value: 6
  misc_feature: MA Experiment 20000576 PARAMETER Experiment Name: At_100uM_ABA_Mutants__P Parameter: Tissue Value: Whole Plant
  misc_feature: MA Experiment 20000576 PARAMETER Experiment Name: At_100uM_ABA_Mutants__P Parameter: Treatment Value: 1uM ABA vs. No Treatment
  misc_feature: MA Experiment ID: 20000794 Result: Down-regulated in Transcription
  misc_feature: MA Experiment 20000794 PARAMETER Experiment Name: At_Petals_P Parameter: Age (day) Value: 23-25 days
  misc_feature: MA Experiment 20000794 PARAMETER Experiment Name: At_Petals_P Parameter: Plant Line Value: WS
  misc_feature: MA Experiment 20000794 PARAMETER Experiment Name: At_Petals_P Parameter: Tissue Value: Petals vs. Whole plant
  misc_feature: MA Experiment ID: 20001248 Result: Up-regulated in Transcription
  misc_feature: MA Experiment 20001248 PARAMETER Experiment Name: At_Far-red-induction_P Parameter: Age (day) Value: 7
  misc_feature: MA Experiment 20001248 PARAMETER Experiment Name: At_Far-red-induction_P Parameter: Light Value: Far-red vs. White
  misc_feature: MA Experiment 20001248 PARAMETER Experiment Name: At_Far-red-induction_P Parameter: Organism Value: A. thaliana
  misc_feature: MA Experiment 20001248 PARAMETER Experiment Name: At_Far-red-induction_P Parameter: Plant Line Value: Columbia
  misc_feature: MA Experiment 20001248 PARAMETER Experiment Name: At_Far-red-induction_P Parameter: Timepoint (hr) Value: 4
  misc_feature: MA Experiment 20001248 PARAMETER Experiment Name: At_Far-red-induction_P Parameter: Tissue Value: Whole Plant
  misc_feature: MA Experiment ID: 20001451 Result: Down-regulated in Transcription
  misc_feature: MA Experiment 20001451 PARAMETER Experiment Name: At_Far-red-induction_P Parameter: Age (day) Value: 7
  misc_feature: MA Experiment 20001451 PARAMETER Experiment Name: At_Far-red-induction_P Parameter: Light Value: Far-red vs. White
  misc_feature: MA Experiment 20001451 PARAMETER Experiment Name: At_Far-red-induction_P Parameter: Organism Value: A. thaliana
  misc_feature: MA Experiment 20001451 PARAMETER Experiment Name: At_Far-red-induction_P Parameter: Plant Line Value: Columbia
  misc_feature: MA Experiment 20001451 PARAMETER Experiment Name: At_Far-red-induction_P Parameter: Timepoint (hr) Value: 24
  misc_feature: MA Experiment 20001451 PARAMETER Experiment Name: At_Far-red-induction_P Parameter: Tissue Value: Whole Plant
  misc_feature: MA Experiment ID: 20001554 Result: Down-regulated in Transcription
  misc_feature: MA Experiment 20001554 PARAMETER Experiment Name: At_Drought_Soil_Dry_P Parameter: Age (day) Value: 21
  misc_feature: MA Experiment 20001554 PARAMETER Experiment Name: At_Drought_Soil_Dry_P Parameter: Organism Value: A. thaliana
  misc_feature: MA Experiment 20001554 PARAMETER Experiment Name: At_Drought_Soil_Dry_P Parameter: Plant Line Value: WS
  misc_feature: MA Experiment 20001554 PARAMETER Experiment Name: At_Drought_Soil_Dry_P Parameter: Post Timepoint (hr) Value: None
  misc_feature: MA Experiment 20001554 PARAMETER Experiment Name: At_Drought_Soil_Dry_P Parameter: Post-Treatment Value: None
  misc_feature: MA Experiment 20001554 PARAMETER Experiment Name: At_Drought_Soil_Dry_P Parameter: Timepoint (day) Value: 7
  misc_feature: MA Experiment 20001554 PARAMETER Experiment Name: At_Drought_Soil_Dry_P Parameter: Treatment Value: Drought vs. No Drought
  misc_feature: MA Experiment ID: 20001556 Result: Down-regulated in Transcription
  misc_feature: MA Experiment 20001556 PARAMETER Experiment Name: At_Drought_Soil_Dry_P Parameter: Age (day) Value: 26
  misc_feature: MA Experiment 20001556 PARAMETER Experiment Name: At_Drought_Soil_Dry_P Parameter: Organism Value: A. thaliana
  misc_feature: MA Experiment 20001556 PARAMETER Experiment Name: At_Drought_Soil_Dry_P Parameter: Plant Line Value: WS
  misc_feature: MA Experiment 20001556 PARAMETER Experiment Name: At_Drought_Soil_Dry_P Parameter: Post Timepoint (hr) Value: None
  misc_feature: MA Experiment 20001556 PARAMETER Experiment Name: At_Drought_Soil_Dry_P Parameter: Post-Treatment Value: None
  misc_feature: MA Experiment 20001556 PARAMETER Experiment Name: At_Drought_Soil_Dry_P Parameter: Timepoint (day) Value: 12
  misc_feature: MA Experiment 20001556 PARAMETER Experiment Name: At_Drought_Soil_Dry_P Parameter: Treatment Value: Drought vs. No Drought
  misc_feature: MA Experiment ID: 20001560 Result: Down-regulated in Transcription
  misc_feature: MA Experiment 20001560 PARAMETER Experiment Name: At_Drought_Soil_Dry_P Parameter: Age (day) Value: 28
  misc_feature: MA Experiment 20001560 PARAMETER Experiment Name: At_Drought_Soil_Dry_P Parameter: Organism Value: A. thaliana
  misc_feature: MA Experiment 20001560 PARAMETER Experiment Name: At_Drought_Soil_Dry_P Parameter: Plant Line Value: WS
  misc_feature: MA Experiment 20001560 PARAMETER Experiment Name: At_Drought_Soil_Dry_P Parameter: Post Timepoint (hr) Value: None
  misc_feature: MA Experiment 20001560 PARAMETER Experiment Name: At_Drought_Soil_Dry_P Parameter: Post-Treatment Value: None
  misc_feature: MA Experiment 20001560 PARAMETER Experiment Name: At_Drought_Soil_Dry_P Parameter: Timepoint (day) Value: 14
  misc_feature: MA Experiment 20001560 PARAMETER Experiment Name: At_Drought_Soil_Dry_P Parameter: Treatment Value: Drought vs. No Drought
  misc_feature: MA Experiment ID: 20001760 Result: Down-regulated in Transcription
  misc_feature: MA Experiment 20001760 PARAMETER Experiment Name: At_50mM_NH4NO3_L-to-H_P Parameter: Timepoint (hr) Value: 2
  misc_feature: MA Experiment 20001760 PARAMETER Experiment Name: At_50mM_NH4NO3_L-to-H_P Parameter: Tissue Value: Siliques
  misc_feature: MA Experiment 20001760 PARAMETER Experiment Name: At_50mM_NH4NO3_L-to-H_P Parameter: Treatment Value: 50mM NH4NO3 vs 100mM Mannitol
  misc_feature: MA Experiment ID: 20001904 Result: Down-regulated in Transcription
  misc_feature: MA Experiment 20001904 PARAMETER Experiment Name: At_Drought_Reproduction_P Parameter: Age (day) Value: 37
  misc_feature: MA Experiment 20001904 PARAMETER Experiment Name: At_Drought_Reproduction_P Parameter: Organism Value: A. thaliana
  misc_feature: MA Experiment 20001904 PARAMETER Experiment Name: At_Drought_Reproduction_P Parameter: Plant Line Value: WS
  misc_feature: MA Experiment 20001904 PARAMETER Experiment Name: At_Drought_Reproduction_P Parameter: Timepoint (day) Value: 7
  misc_feature: MA Experiment 20001904 PARAMETER Experiment Name: At_Drought_Reproduction_P Parameter: Tissue Value: Rosettes
  misc_feature: MA Experiment 20001904 PARAMETER Experiment Name: At_Drought_Reproduction_P Parameter: Treatment Value: Drought vs. No Drought
gaccaaaacacacacacactcactctcaatatctagtttttcccttgtttctgatcagtgtgatcacgtagagtgccttgaaggagaagaaagaaacaaaaacaaaggaaaatgggatacctttttcaagaaaccttaagctctaaccctaaaactccaattgttgttgatgatgataacgagttgggtttgatggccgtgagacttgccaacgccgccgcctttcctatggttctcaaagccgccctcgagcttggtgtctttgacactctctacgccgcagcctctcgcaccgactcattcctctcaccctatgaaatagcaagtaagctaccaactacacctcgtaaccctgaagcgccggttttgttggaccgcatgcttcgtctactcgctagctactccatggtcaagtgtggtaaggccttatccggaaagggcgagagggtctacagagccgagccgatttgcaggttcttcttgaaggataacattcaagatattggatcccttgcttctcaagtcatcgtcaatttcgacagcgtcttccttaatacctgggcacagttgaaagatgtggtgctagaaggaggagatgcgtttggtcgcgcacatggtggtatgaaactctttgactatatgggtacagatgagagattcagcaagctctttaaccagaccggattcacaatcgcggtcgttaagaaggcccttgaagtctatgaaggcttcaaaggtgtgaaagttttagttgatgttggaggaggagttggtaacactcttggtgttgttacttctaaatatcccaatattaagggtatcaactttgatctaacctgtgccttggcacaagcaccttcttatcccggtgtggagcatgttgccggagatatgtttgtggatgtcccaaccggagatgccatgatcttgaaacgtatacttcatgattggaccgacgaagattgtgtcaagattcttaagaattgttggaaatcactacctgaaaacggtaaagtggttgttatagaattagtcactcctgatgaggcagagaatggtgacatcaatgcgaacattgcctttgacatggacatgttaatgttcacccaatgttctggtggaaaagagcgatcaagagctgagtttgaagctttagctgcagcttctggcttcacccattgcaagttcgtttgccaagcttatcactgctggattattgaattctgtaaataaaatgtgtgatacaaatctaaatcgtcgtttctagtatttttcttttttgttgatatgtgattatcgttgttatttcttattttcatatttgtttgaaatggtcatgcatgtctttgtcttcaagcaatctagcaataaaaataaggtttta

SEQ ID NO: 50575 - protein, 373 aa, Arabidopsis thaliana
  peptide (1)..(373): Ceres Seq. ID no. 13588390
  misc_feature (107)..(350): Pfam Name: O-methyltransferase Pfam Description: O-methyltransferase
  misc_feature (6)..(373): Homolog of NCBI NO: 27808586 NR Description: At1g77520 [Arabidopsis thaliana]
  misc_feature (6)..(373): Homolog of NCBI NO: 15223976 NR Description: O-methyltransferase family 2 [Arabidopsis
  misc_feature (40)..(373): Homolog of NCBI NO: 21617938 NR Description: putative catechol O-methyltransferase
  misc_feature (1)..(274): Homolog of NCBI NO: 30687192 NR Description: O-methyltransferase 1, putative [Arabidopsis
  misc_feature (16)..(373): Homolog of NCBI NO: 15223731 NR Description: O-methyltransferase family 2 [Arabidopsis
  misc_feature (1)..(373): Homolog of NCBI NO: 15218135 NR Description: O-methyltransferase 1, putative [Arabidopsis
  misc_feature (1)..(373): Homolog of NCBI NO: 21618219 NR Description: O-methyltransferase, putative [Arabidopsis
  misc_feature (1)..(373): Homolog of NCBI NO: 15218137 NR Description: O-methyltransferase 1, putative [Arabidopsis
  misc_feature (1)..(373): Homolog of NCBI NO: 15218138 NR Description: O-methyltransferase 1, putative [Arabidopsis
  misc_feature (1)..(373): Homolog of NCBI NO: 15218133 NR Description: O-methyltransferase 1, putative [Arabidopsis
MGYLFQETLSSNPKTPIVVDDDNELGLMAVRLANAAAFPMVLKAALELGVFDTLYAAASRTDSFLSPYEIASKLPTTPRNPEAPVLLDRMLRLLASYSMVKCGKALSGKGERVYRAEPICRFFLKDNIQDIGSLASQVIVNFDSVFLNTWAQLKDVVLEGGDAFGRAHGGMKLFDYMGTDERFSKLFNQTGFTIAVVKKALEVYEGFKGVKVLVDVGGGVGNTLGVVTSKYPNIKGINFDLTCALAQAPSYPGVEHVAGDMFVDVPTGDAMILKRILHDWTDEDCVKILKNCWKSLPENGKVVVIELVTPDEAENGDINANIAFDMDMLMFTQCSGGKERSRAEFEALAAASGFTHCKFVCQAYHCWIIEFCK

SEQ ID NO: 50576 - protein, 346 aa, Arabidopsis thaliana
  peptide (1)..(346): Ceres Seq. ID no. 13588391
  misc_feature (80)..(323): Pfam Name: O-methyltransferase Pfam Description: O-methyltransferase
  misc_feature (1)..(346): Homolog of NCBI NO: 27808586 NR Description: At1g77520 [Arabidopsis thaliana]
  misc_feature (1)..(346): Homolog of NCBI NO: 15223976 NR Description: O-methyltransferase family 2 [Arabidopsis
  misc_feature (13)..(346): Homolog of NCBI NO: 21617938 NR Description: putative catechol O-methyltransferase
  misc_feature (1)..(247): Homolog of NCBI NO: 30687192 NR Description: O-methyltransferase 1, putative [Arabidopsis
  misc_feature (1)..(346): Homolog of NCBI NO: 15223731 NR Description: O-methyltransferase family 2 [Arabidopsis
  misc_feature (1)..(346): Homolog of NCBI NO: 15218135 NR Description: O-methyltransferase 1, putative [Arabidopsis
  misc_feature (1)..(346): Homolog of NCBI NO: 21618219 NR Description: O-methyltransferase, putative [Arabidopsis
  misc_feature (1)..(346): Homolog of NCBI NO: 15218137 NR Description: O-methyltransferase 1, putative [Arabidopsis
  misc_feature (1)..(346): Homolog of NCBI NO: 15218138 NR Description: O-methyltransferase 1, putative [Arabidopsis
  misc_feature (1)..(346): Homolog of NCBI NO: 15218133 NR Description: O-methyltransferase 1, putative [Arabidopsis
MAVRLANAAAFPMVLKAALELGVFDTLYAAASRTDSFLSPYEIASKLPTTPRNPEAPVLLDRMLRLLASYSMVKCGKALSGKGERVYRAEPICRFFLKDNIQDIGSLASQVIVNFDSVFLNTWAQLKDVVLEGGDAFGRAHGGMKLFDYMGTDERFSKLFNQTGFTIAVVKKALEVYEGFKGVKVLVDVGGGVGNTLGVVTSKYPNIKGINFDLTCALAQAPSYPGVEHVAGDMFVDVPTGDAMILKRILHDWTDEDCVKILKNCWKSLPENGKVVVIELVTPDEAENGDINANIAFDMDMLMFTQCSGGKERSRAEFEALAAASGFTHCKFVCQAYHCWIIEFCK

SEQ ID NO: 50577 - protein, 334 aa, Arabidopsis thaliana
  peptide (1)..(334): Ceres Seq. ID no. 13588392
  misc_feature (68)..(311): Pfam Name: O-methyltransferase Pfam Description: O-methyltransferase
  misc_feature (1)..(334): Homolog of NCBI NO: 27808586 NR Description: At1g77520 [Arabidopsis thaliana]
  misc_feature (1)..(334): Homolog of NCBI NO: 15223976 NR Description: O-methyltransferase family 2 [Arabidopsis
  misc_feature (1)..(334): Homolog of NCBI NO: 21617938 NR Description: putative catechol O-methyltransferase
  misc_feature (1)..(235): Homolog of NCBI NO: 30687192 NR Description: O-methyltransferase 1, putative [Arabidopsis
  misc_feature (1)..(334): Homolog of NCBI NO: 15223731 NR Description: O-methyltransferase family 2 [Arabidopsis
  misc_feature (1)..(334): Homolog of NCBI NO: 15218135 NR Description: O-methyltransferase 1, putative [Arabidopsis
  misc_feature (1)..(334): Homolog of NCBI NO: 21618219 NR Description: O-methyltransferase, putative [Arabidopsis
  misc_feature (1)..(334): Homolog of NCBI NO: 15218137 NR Description: O-methyltransferase 1, putative [Arabidopsis
  misc_feature (1)..(334): Homolog of NCBI NO: 15218138 NR Description: O-methyltransferase 1, putative [Arabidopsis
  misc_feature (1)..(334): Homolog of NCBI NO: 15218133 NR Description: O-methyltransferase 1, putative [Arabidopsis
MVLKAALELGVFDTLYAAASRTDSFLSPYEIASKLPTTPRNPEAPVLLDRMLRLLASYSMVKCGKALSGKGERVYRAEPICRFFLKDNIQDIGSLASQVIVNFDSVFLNTWAQLKDVVLEGGDAFGRAHGGMKLFDYMGTDERFSKLFNQTGFTIAVVKKALEVYEGFKGVKVLVDVGGGVGNTLGVVTSKYPNIKGINFDLTCALAQAPSYPGVEHVAGDMFVDVPTGDAMILKRILHDWTDEDCVKILKNCWKSLPENGKVVVIELVTPDEAENGDINANIAFDMDMLMFTQCSGGKERSRAEFEALAAASGFTHCKFVCQAYHCWIIEFCK

SEQ ID NO: 50578 - DNA, 1252 bp, Arabidopsis thaliana
  misc_feature (1)..(1252): Ceres Seq. ID no. 14304403
  misc_feature: MA Experiment ID: 20000180 Result: Up-regulated in Transcription
  misc_feature: MA Experiment 20000180 PARAMETER Experiment Name: At_Germinating_Seeds_P Parameter: Age (hr) Value: 24 vs. 0
  misc_feature: MA Experiment 20000180 PARAMETER Experiment Name: At_Germinating_Seeds_P Parameter: Tissue Value: Germinating Seeds
  misc_feature: MA Experiment ID: 20000227 Result: Down-regulated in Transcription
  misc_feature: MA Experiment 20000227 PARAMETER Experiment Name: At_Root-Tips-vs-Tops_P Parameter: Tissue Value: Root Tips vs. Root Tops
  misc_feature: MA Experiment ID: 20000794 Result: Up-regulated in Transcription
  misc_feature: MA Experiment 20000794 PARAMETER Experiment Name: At_Petals_P Parameter: Age (day) Value: 23-25 days
  misc_feature: MA Experiment 20000794 PARAMETER Experiment Name: At_Petals_P Parameter: Plant Line Value: WS
  misc_feature: MA Experiment 20000794 PARAMETER Experiment Name: At_Petals_P Parameter: Tissue Value: Petals vs. Whole plant
  misc_feature: MA Experiment ID: 20001247 Result: Down-regulated in Transcription
  misc_feature: MA Experiment 20001247 PARAMETER Experiment Name: At_Far-red-induction_P Parameter: Age (day) Value: 7
  misc_feature: MA Experiment 20001247 PARAMETER Experiment Name: At_Far-red-induction_P Parameter: Light Value: Far-red vs. White
  misc_feature: MA Experiment 20001247 PARAMETER Experiment Name: At_Far-red-induction_P Parameter: Organism Value: A. thaliana
  misc_feature: MA Experiment 20001247 PARAMETER Experiment Name: At_Far-red-induction_P Parameter: Plant Line Value: Columbia
  misc_feature: MA Experiment 20001247 PARAMETER Experiment Name: At_Far-red-induction_P Parameter: Timepoint (hr) Value: 1
  misc_feature: MA Experiment 20001247 PARAMETER Experiment Name: At_Far-red-induction_P Parameter: Tissue Value: Whole Plant
  misc_feature: MA Experiment ID: 20001459 Result: Up-regulated in Transcription
  misc_feature: MA Experiment 20001459 PARAMETER Experiment Name: At_50mM_NH4NO3_L-to-H_P Parameter: Age (day) Value: Undefined
  misc_feature: MA Experiment 20001459 PARAMETER Experiment Name: At_50mM_NH4NO3_L-to-H_P Parameter: Organism Value: Undefined
  misc_feature: MA Experiment 20001459 PARAMETER Experiment Name: At_50mM_NH4NO3_L-to-H_P Parameter: Plant Line Value: Undefined
  misc_feature: MA Experiment 20001459 PARAMETER Experiment Name: At_50mM_NH4NO3_L-to-H_P Parameter: Timepoint (hr) Value: 4
  misc_feature: MA Experiment 20001459 PARAMETER Experiment Name: At_50mM_NH4NO3_L-to-H_P Parameter: Tissue Value: Siliques
  misc_feature: MA Experiment 20001459 PARAMETER Experiment Name: At_50mM_NH4NO3_L-to-H_P Parameter: Treatment Value: 50mM NH4NO3 vs. 100mM Manitol
  misc_feature: MA Experiment ID: 20001911 Result: Up-regulated in Transcription
  misc_feature: MA Experiment 20001911 PARAMETER Experiment Name: At_Drought_Reproduction_P Parameter: Age (day) Value: 40
  misc_feature: MA Experiment 20001911 PARAMETER Experiment Name: At_Drought_Reproduction_P Parameter: Organism Value: A. thaliana
  misc_feature: MA Experiment 20001911 PARAMETER Experiment Name: At_Drought_Reproduction_P Parameter: Plant Line Value: WS
  misc_feature: MA Experiment 20001911 PARAMETER Experiment Name: At_Drought_Reproduction_P Parameter: Timepoint (day) Value: 10
  misc_feature: MA Experiment 20001911 PARAMETER Experiment Name: At_Drought_Reproduction_P Parameter: Tissue Value: Flowers
  misc_feature: MA Experiment 20001911 PARAMETER Experiment Name: At_Drought_Reproduction_P Parameter: Treatment Value: Drought vs. No Drought
acaatcaaccactttccttttttcattcgtctcaatttctctcatgacgagtagtagtggaagcctcaaactagagatccacactgatgacaagacgccgggaaagtggagcgtaccgctcggcgatgatgttttccgaaggttcttgagcgggggaggaggctcggagaaggctgtgttcggtgaggggtctctttttagcccgtttttgttcgggaagtactttgatccgtcagacgcctttccgttgtgggaatttgaagctgaggttttgctggcgagccttaggagcttaggacagtgtagagtcgattggtctcatacggatcaagcttatgtccttaaatccgatatccccggtacgtacgtctttccacaccacaattctcttatttattttcattcggaaaacgtttatttctgctttagtaaaaaataaaataggatatatcgaacttaaaaaaaagaaaagtaaatcttcgttcaaatgatttgttatacatcataacgatcaaaactgaatatgtgaactgatgaatggttgatatagtacaaatatgaacagaacctaagtttctttaaaagtgaacgtgaaccaatctcaaaacgtaactcattcaaatttaggatttcttttgtcaattttactttaaatatcaaaatgatcgaaccacaacttgaattggacactagttataatgatggtaacgagaaagatgaaatggttcgcaaaattttcaaataataatgtatcttttaaaatggtataaaataaggaaaaaaaaaactgattaaatttttggtacttgtatattagtggtggggaaaaataacgtgcaggtgtacgtggacattaacggaagagtgatggagattagtggccaatggaacagcaacaagaaagcggcgaccaacagtgactggagaagcggccggtggtgggaacatggctatgtccgccgtctcgagctccctagcgatgccgacgccaaatactctgaagctttcctctctaacaacgacgattactctttcttagagatccgaatccctaagataaattctaagaacaagttttaatctgatcatgtcgccttgacgagttttaactttagattcttttcgtaattttgttttctttagttaactattattatagatatgaaattctgtggtagagacacaatggatgaatgatatgttatatatacatactataaaatatatcaaatataacatatcgattataaac

SEQ ID NO: 50579 - protein, 145 aa, Arabidopsis thaliana
  peptide (1)..(145): Ceres Seq. ID no. 14304404
  misc_feature (15)..(119): Homolog of NCBI NO: 18423654 NR Description: expressed protein [Arabidopsis thaliana]
QSTTFLFSFVSISLMTSSSGSLKLEIHTDDKTPGKWSVPLGDDVFRRFLSGGGGSEKAVFGEGSLFSPFLFGKYFDPSDAFPLWEFEAEVLLASLRSLGQCRVDWSHTDQAYVLKSDIPGTYVFPHHNSLIYFHSENVYFCFSKK

SEQ ID NO: 50580 - protein, 131 aa, Arabidopsis thaliana
  peptide (1)..(131): Ceres Seq. ID no. 14304405
  misc_feature (1)..(105): Homolog of NCBI NO: 18423654 NR Description: expressed protein [Arabidopsis thaliana]
MTSSSGSLKLEIHTDDKTPGKWSVPLGDDVFRRFLSGGGGSEKAVFGEGSLFSPFLFGKYFDPSDAFPLWEFEAEVLLASLRSLGQCRVDWSHTDQAYVLKSDIPGTYVFPHHNSLIYFHSENVYFCFSKK

SEQ ID NO: 50581 - DNA, 749 bp, Arabidopsis thaliana
  misc_feature (1)..(749): Ceres Seq. ID no. 13593511
  misc_feature: MA Experiment ID: 20000307 Result: Up-regulated in Transcription
  misc_feature: MA Experiment 20000307 PARAMETER Experiment Name: At_Germinating_Seeds_Sub_P Parameter: Age (hr) Value: 24 vs. 0
  misc_feature: MA Experiment 20000307 PARAMETER Experiment Name: At_Germinating_Seeds_Sub_P Parameter: Organism Value: A. thaliana
  misc_feature: MA Experiment 20000307 PARAMETER Experiment Name: At_Germinating_Seeds_Sub_P Parameter: Plant Line Value: WS
  misc_feature: MA Experiment 20000307 PARAMETER Experiment Name: At_Germinating_Seeds_Sub_P Parameter: Tissue Value: Germinating Seeds
  misc_feature: MA Experiment ID: 20000314 Result: Up-regulated in Transcription
  misc_feature: MA Experiment 20000314 PARAMETER Experiment Name: At_14day_Shoots-Roots_Sub_P Parameter: Age (day) Value: 14
  misc_feature: MA Experiment 20000314 PARAMETER Experiment Name: At_14day_Shoots-Roots_Sub_P Parameter: Organism Value: A. thaliana
  misc_feature: MA Experiment 20000314 PARAMETER Experiment Name: At_14day_Shoots-Roots_Sub_P Parameter: Plant Line Value: WS
  misc_feature: MA Experiment 20000314 PARAMETER Experiment Name: At_14day_Shoots-Roots_Sub_P Parameter: Tissue Value: Roots vs. Whole Plant
  misc_feature: MA Experiment ID: 20000347 Result: Up-regulated in Transcription
  misc_feature: MA Experiment 20000347 PARAMETER Experiment Name: At_2mM_SA_Sub_P Parameter: Age (day) Value: 14
  misc_feature: MA Experiment 20000347 PARAMETER Experiment Name: At_2mM_SA_Sub_P Parameter: Organism Value: A. thaliana
  misc_feature: MA Experiment 20000347 PARAMETER Experiment Name: At_2mM_SA_Sub_P Parameter: Plant Line Value: WS
  misc_feature: MA Experiment 20000347 PARAMETER Experiment Name: At_2mM_SA_Sub_P Parameter: Timepoint (hr) Value: 6
  misc_feature: MA Experiment 20000347 PARAMETER Experiment Name: At_2mM_SA_Sub_P Parameter: Tissue Value: Aerial
  misc_feature: MA Experiment 20000347 PARAMETER Experiment Name: At_2mM_SA_Sub_P Parameter: Treatment Value: 2mM SA vs. No Treatment
  misc_feature: MA Experiment ID: 20000355 Result: Down-regulated in Transcription
  misc_feature: MA Experiment 20000355 PARAMETER Experiment Name: At_Siliques_Sub_P Parameter: Age (day) Value: 21
  misc_feature: MA Experiment 20000355 PARAMETER Experiment Name: At_Siliques_Sub_P Parameter: Organism Value: A. thaliana
  misc_feature: MA Experiment 20000355 PARAMETER Experiment Name: At_Siliques_Sub_P Parameter: Plant Line Value: WS
  misc_feature: MA Experiment 20000355 PARAMETER Experiment Name: At_Siliques_Sub_P Parameter: Tissue Value: Less Than 5mm Siliques vs. Whole Plant
  misc_feature: MA Experiment ID: 20000440 Result: Down-regulated in Transcription
  misc_feature: MA Experiment 20000440 PARAMETER Experiment Name: At_Closed-Flower__Sub_P Parameter: Tissue Value: Closed Flower vs. Whole Plant
gaagagttgaagaaaatcacagaaagccttagcacagagaagagagattgaagaagtcatggatgtttcaggaagcttgaattgcgttgttgtggcggtagatggaagcgaggtgagtatggaagctctgaggtgggctctagacaacctcaagctctcttcgtcttcttccgattcatcattcgtcgtgctccacgtccagccgtcgccttctgtagccgccggcgtgagtcccggcaccatacctttcggtggtcccagtggtcttgaggttcctgctttcactgctgcaatcgagcaacaccagaagcggatcaccgacaccatcctcgaacacgctagtcaaatttgtgctgaaaaatctgtgaatgtgaaaacacaagtggttattggggatcccaagtataaaatctgcgaagctgtagagaatttgcatgctgatcttcttgtcatgggctcccgggcttatggccgcattaagagaatgtttctgggaagtgtaagcaactactgcaccaaccacgcccattgtcctgttgtgataatcaaaccaaaagaggattcttctgcataaagaggatatatatgtacatatgcaaagggatatcaagaccatctgtaatcttttgaagttttgtgaatgtatagaagtcaagcaggaattatcccggattacttctcaaataagtggtgtgaatgtaaactaataagaggtacagagaacattgattggctcagtatatgtgttg

SEQ ID NO: 50582 - protein, 171 aa, Arabidopsis thaliana
  peptide (1)..(171): Ceres Seq. ID no. 13593512
  misc_feature (6)..(164): Pfam Name: Universal stress protein family Pfam Description: Universal stress protein family
  misc_feature (10)..(170): Homolog of NCBI NO: 20067187 NR Description: putative universal stress protein USP1
  misc_feature (10)..(170): Homolog of NCBI NO: 22831145 NR Description: contains ESTs
  misc_feature (10)..(168): Homolog of NCBI NO: 21594903 NR Description: ethylene-responsive protein, putative
  misc_feature (10)..(168): Homolog of NCBI NO: 30681955 NR Description: ethylene-responsive protein -related [Arabidopsis
  misc_feature (4)..(165): Homolog of NCBI NO: 40539010 NR Description: putative stress-related protein
  misc_feature (10)..(168): Homolog of NCBI NO: 18399413 NR Description: ethylene-responsive protein -related [Arabidopsis
  misc_feature (7)..(167): Homolog of NCBI NO: 34914610 NR Description: P0520B06.18 [Oryza sativa (japonica
  misc_feature (7)..(164): Homolog of NCBI NO: 5669654 NR Description: ER6 protein [Lycopersicon esculentum]
  misc_feature (1)..(171): Homolog of NCBI NO: 25402571 NR Description: hypothetical protein [imported] - Arabidopsis
  misc_feature (1)..(171): Homolog of NCBI NO: 30681321 NR Description: ER6 protein -related [Arabidopsis thaliana]
MDVSGSLNCVVVAVDGSEVSMEALRWALDNLKLSSSSSDSSFVVLHVQPSPSVAAGVSPGTIPFGGPSGLEVPAFTAAIEQHQKRITDTILEHASQICAEKSVNVKTQVVIGDPKYKICEAVENLHADLLVMGSRAYGRIKRMFLGSVSNYCTNHAHCPVVIIKPKEDSSA

SEQ ID NO: 50583 - protein, 151 aa, Arabidopsis thaliana
  peptide (1)..(151): Ceres Seq. ID no. 13593513
  misc_feature (1)..(144): Pfam Name: Universal stress protein family Pfam Description: Universal stress protein family
  misc_feature (1)..(150): Homolog of NCBI NO: 20067187 NR Description: putative universal stress protein USP1
  misc_feature (1)..(150): Homolog of NCBI NO: 22831145 NR Description: contains ESTs
  misc_feature (1)..(148): Homolog of NCBI NO: 21594903 NR Description: ethylene-responsive protein, putative
  misc_feature (1)..(148): Homolog of NCBI NO: 30681955 NR Description: ethylene-responsive protein -related [Arabidopsis
  misc_feature (1)..(145): Homolog of NCBI NO: 40539010 NR Description: putative stress-related protein
  misc_feature (1)..(148): Homolog of NCBI NO: 18399413 NR Description: ethylene-responsive protein -related [Arabidopsis
  misc_feature (1)..(147): Homolog of NCBI NO: 34914610 NR Description: P0520B06.18 [Oryza sativa (japonica
  misc_feature (1)..(144): Homolog of NCBI NO: 5669654 NR Description: ER6 protein [Lycopersicon esculentum]
  misc_feature (1)..(151): Homolog of NCBI NO: 25402571 NR Description: hypothetical protein [imported] - Arabidopsis
  misc_feature (1)..(151): Homolog of NCBI NO: 30681321 NR Description: ER6 protein -related [Arabidopsis thaliana]
MEALRWALDNLKLSSSSSDSSFVVLHVQPSPSVAAGVSPGTIPFGGPSGLEVPAFTAAIEQHQKRITDTILEHASQICAEKSVNVKTQVVIGDPKYKICEAVENLHADLLVMGSRAYGRIKRMFLGSVSNYCTNHAHCPVVIIKPKEDSSA

SEQ ID NO: 50584 - DNA, 1431 bp, Arabidopsis thaliana
  misc_feature (1)..(1431): Ceres Seq. ID no. 13588866
  misc_feature: MA Experiment ID: 20000184 Result: Down-regulated in Transcription
  misc_feature: MA Experiment 20000184 PARAMETER Experiment Name: At_Shoots__P Parameter: Age (day) Value: 7
  misc_feature: MA Experiment 20000184 PARAMETER Experiment Name: At_Shoots__P Parameter: Tissue Value: Shoots vs. Whole Plant
  misc_feature: MA Experiment ID: 20000234 Result: Down-regulated in Transcription
  misc_feature: MA Experiment 20000234 PARAMETER Experiment Name: At_Siliques_P Parameter: Age (day) Value: 21
  misc_feature: MA Experiment 20000234 PARAMETER Experiment Name: At_Siliques_P Parameter: Organism Value: A. thaliana
  misc_feature: MA Experiment 20000234 PARAMETER Experiment Name: At_Siliques_P Parameter: Plant Line Value: WS
  misc_feature: MA Experiment 20000234 PARAMETER Experiment Name: At_Siliques_P Parameter: Tissue Value: Less Than 5mm Siliques vs. Whole Plant
  misc_feature: MA Experiment ID: 20000235 Result: Down-regulated in Transcription
  misc_feature: MA Experiment 20000235 PARAMETER Experiment Name: At_Siliques_P Parameter: Age (day) Value: 21
  misc_feature: MA Experiment 20000235 PARAMETER Experiment Name: At_Siliques_P Parameter: Organism Value: A. thaliana
  misc_feature: MA Experiment 20000235 PARAMETER Experiment Name: At_Siliques_P Parameter: Plant Line Value: WS
  misc_feature: MA Experiment 20000235 PARAMETER Experiment Name: At_Siliques_P Parameter: Tissue Value: 5-10mm Siliques vs. Whole Plant
  misc_feature: MA Experiment ID: 20000439 Result: Down-regulated in Transcription
  misc_feature: MA Experiment 20000439 PARAMETER Experiment Name: At_Roots__P Parameter: Age (day) Value: 14 vs. 21
  misc_feature: MA Experiment 20000439 PARAMETER Experiment Name: At_Roots__P Parameter: Organism Value: A. thaliana
  misc_feature: MA Experiment 20000439 PARAMETER Experiment Name: At_Roots__P Parameter: Tissue Value: Roots vs. Whole Plant
  misc_feature: MA Experiment ID: 20000496 Result: Down-regulated in Transcription
  misc_feature: MA Experiment 20000496 PARAMETER Experiment Name: At_Guard_Cells_P Parameter: Harvest Date Value: 7/19/2002
  misc_feature: MA Experiment 20000496 PARAMETER Experiment Name: At_Guard_Cells_P Parameter: Organism Value: Canola
  misc_feature: MA Experiment 20000496 PARAMETER Experiment Name: At_Guard_Cells_P Parameter: Tissue Value: Guard Cells vs. Leaves
  misc_feature: MA Experiment ID: 20001451 Result: Down-regulated in Transcription
  misc_feature: MA Experiment 20001451 PARAMETER Experiment Name: At_Far-red-induction_P Parameter: Age (day) Value: 7
  misc_feature: MA Experiment 20001451 PARAMETER Experiment Name: At_Far-red-induction_P Parameter: Light Value: Far-red vs. White
  misc_feature: MA Experiment 20001451 PARAMETER Experiment Name: At_Far-red-induction_P Parameter: Organism Value: A. thaliana
  misc_feature: MA Experiment 20001451 PARAMETER Experiment Name: At_Far-red-induction_P Parameter: Plant Line Value: Columbia
  misc_feature: MA Experiment 20001451 PARAMETER Experiment Name: At_Far-red-induction_P Parameter: Timepoint (hr) Value: 24
  misc_feature: MA Experiment 20001451 PARAMETER Experiment Name: At_Far-red-induction_P Parameter: Tissue Value: Whole Plant
  misc_feature: MA Experiment ID: 20001560 Result: Down-regulated in Transcription
  misc_feature: MA Experiment 20001560 PARAMETER Experiment Name: At_Drought_Soil_Dry_P Parameter: Age (day) Value: 28
  misc_feature: MA Experiment 20001560 PARAMETER Experiment Name: At_Drought_Soil_Dry_P Parameter: Organism Value: A. thaliana
  misc_feature: MA Experiment 20001560 PARAMETER Experiment Name: At_Drought_Soil_Dry_P Parameter: Plant Line Value: WS
  misc_feature: MA Experiment 20001560 PARAMETER Experiment Name: At_Drought_Soil_Dry_P Parameter: Post Timepoint (hr) Value: None
  misc_feature: MA Experiment 20001560 PARAMETER Experiment Name: At_Drought_Soil_Dry_P Parameter: Post-Treatment Value: None
  misc_feature: MA Experiment 20001560 PARAMETER Experiment Name: At_Drought_Soil_Dry_P Parameter: Timepoint (day) Value: 14
  misc_feature: MA Experiment 20001560 PARAMETER Experiment Name: At_Drought_Soil_Dry_P Parameter: Treatment Value: Drought vs. No Drought
ggtcgacgtcgatggggatgagaagtagtggagaatccgctcacattgggattcgtcattcttcttctaaaacccgcaaaatttctccatttctaccaaaaatatccaacttttacttttctttcctgtgaaattatctgctcaaatctttggttcctgacggagatggcggcgatttcaggcatctcctctggtacgttgacgatttcacggcctttggttactcttcgacgctctagagccgccgtttcgtacagctcctctcaccgattgcttcatcatcttcctctctcttctcgtcgtctgctattaaggaacaatcatcgagtccaagcaacgattttgcaagacgatgaagagaaagtggtggtggaggaatcgtttaaagccgagacttctactggtacagaaccacttgaggagccaaatatgagttcttcttcaactagtgcttttgagacatggatcatcaagcttgagcaaggagtgaatgttttccttacagactcggttattaagatacttgacactttgtatcgtgaccgaacatatgcaaggttctttgttcttgagacaattgctagagtgccttattttgcgtttatgtctgtgctacatatgtatgagacctttggttggtggaggagagcagattatttgaaagtacactttgctgagagctggaatgaaatgcatcacttgctcataatggaagaattgggtggaaattcttggtggtttgatcgttttctggctcagcacatagcaaccttctactacttcatgacagtgttcttgtatatcttaagccctagaatggcatatcacttttcggaatgtgtggagagtcatgcatatgagacttatgataaatttctcaaggccagtggagaggagttgaagaatatgcctgcaccggatatcgcagtaaaatactatacgggaggtgacttgtacttatttgatgagttccaaacatcaagaactcccaatactcgaagaccagtaatagaaaatctatacgatgtgtttgtgaacataagagatgatgaagcagaacactgcaagacaatgagagcttgtcagactctaggcagtctgcgttctccacactccattttagaagatgatgatactgaagaagaatcagggtgtgttgttcctgaggaggctcattgcgaaggtattgtagactgcctcaagaaatccattacaagttaataaattagaaagtaaactaaaaaagattatttgtatcagctcatgaacaatagatataatcccatatacttgggaataaaggaataatgtgaaattcccatcgttgtgctagtgtgtgagagaatcaaataccctaatgatgtaaatgtactttgatgagcttaagtcgttgtagaccattttatccatactactagcctttgtggttgc

SEQ ID NO: 50585 - protein, 351 aa, Arabidopsis thaliana
  peptide (1)..(351): Ceres Seq. ID no. 15220917
  misc_feature (32)..(335): Pfam Name: Alternative oxidase Pfam Description: Alternative oxidase
  misc_feature (98)..(307): Homolog of NCBI NO: 20149254 NR Description: quinol-to-oxygen oxidoreductase [Chlamydomonas
  misc_feature (112)..(317): Homolog of NCBI NO: 17229588 NR Description: oxidase [Nostoc sp. PCC 7120]
  misc_feature (111)..(325): Homolog of NCBI NO: 37520170 NR Description: oxidase [Gloeobacter violaceus]
  misc_feature (81)..(296): Homolog of NCBI NO: 9837152 NR Description: oxidase [Triticum aestivum]
  misc_feature (40)..(351): Homolog of NCBI NO: 21105122 NR Description: oxidase [Oryza sativa (japonica cultivar-group)]
  misc_feature (48)..(349): Homolog of NCBI NO: 9937103 NR Description: plastid terminal oxidase [Capsicum annuum]
  misc_feature (43)..(350): Homolog of NCBI NO: 9937099 NR Description: plastid terminal oxidase [Lycopersicon
  misc_feature (1)..(351): Homolog of NCBI NO: 7486836 NR Description: hypothetical protein T10I14.90 - Arabidopsis
  misc_feature (1)..(351): Homolog of NCBI NO: 3929647 NR Description: Immutans protein [Arabidopsis thaliana]
  misc_feature (1)..(351): Homolog of NCBI NO: 18415888 NR Description: alternative oxidase, putative (IMMUTANS)
MAAISGISSGTLTISRPLVTLRRSRAAVSYSSSHRLLHHLPLSSRRLLLRNNHRVQATILQDDEEKVVVEESFKAETSTGTEPLEEPNMSSSSTSAFETWIIKLEQGVNVFLTDSVIKILDTLYRDRTYARFFVLETIARVPYFAFMSVLHMYETFGWWRRADYLKVHFAESWNEMHHLLIMEELGGNSWWFDRFLAQHIATFYYFMTVFLYILSPRMAYHFSECVESHAYETYDKFLKASGEELKNMPAPDIAVKYYTGGDLYLFDEFQTSRTPNTRRPVIENLYDVFVNIRDDEAEHCKTMRACQTLGSLRSPHSILEDDDTEEESGCVVPEEAHCEGIVDCLKKSITS

SEQ ID NO: 50586 - protein, 263 aa, Arabidopsis thaliana
  peptide (1)..(263): Ceres Seq. ID no. 15220918
  misc_feature (1)..(247): Pfam Name: Alternative oxidase Pfam Description: Alternative oxidase
  misc_feature (10)..(219): Homolog of NCBI NO: 20149254 NR Description: quinol-to-oxygen oxidoreductase [Chlamydomonas
  misc_feature (24)..(229): Homolog of NCBI NO: 17229588 NR Description: oxidase [Nostoc sp. PCC 7120]
  misc_feature (23)..(237): Homolog of NCBI NO: 37520170 NR Description: oxidase [Gloeobacter violaceus]
  misc_feature (1)..(208): Homolog of NCBI NO: 9837152 NR Description: oxidase [Triticum aestivum]
  misc_feature (1)..(263): Homolog of NCBI NO: 21105122 NR Description: oxidase [Oryza sativa (japonica cultivar-group)]
  misc_feature (1)..(261): Homolog of NCBI NO: 9937103 NR Description: plastid terminal oxidase [Capsicum annuum]
  misc_feature (1)..(262): Homolog of NCBI NO: 9937099 NR Description: plastid terminal oxidase [Lycopersicon
  misc_feature (1)..(263): Homolog of NCBI NO: 7486836 NR Description: hypothetical protein T10I14.90 - Arabidopsis
  misc_feature (1)..(263): Homolog of NCBI NO: 3929647 NR Description: Immutans protein [Arabidopsis thaliana]
  misc_feature (1)..(263): Homolog of NCBI NO: 18415888 NR Description: alternative oxidase, putative (IMMUTANS)
MSSSSTSAFETWIIKLEQGVNVFLTDSVIKILDTLYRDRTYARFFVLETIARVPYFAFMSVLHMYETFGWWRRADYLKVHFAESWNEMHHLLIMEELGGNSWWFDRFLAQHIATFYYFMTVFLYILSPRMAYHFSECVESHAYETYDKFLKASGEELKNMPAPDIAVKYYTGGDLYLFDEFQTSRTPNTRRPVIENLYDVFVNIRDDEAEHCKTMRACQTLGSLRSPHSILEDDDTEEESGCVVPEEAHCEGIVDCLKKSITS

SEQ ID NO: 50587 - protein, 205 aa, Arabidopsis thaliana
  peptide (1)..(205): Ceres Seq. ID no. 15220919
  misc_feature (1)..(189): Pfam Name: Alternative oxidase Pfam Description: Alternative oxidase
  misc_feature (1)..(161): Homolog of NCBI NO: 20149254 NR Description: quinol-to-oxygen oxidoreductase [Chlamydomonas
  misc_feature (1)..(171): Homolog of NCBI NO: 17229588 NR Description: oxidase [Nostoc sp. PCC 7120]
  misc_feature (1)..(179): Homolog of NCBI NO: 37520170 NR Description: oxidase [Gloeobacter violaceus]
  misc_feature (1)..(150): Homolog of NCBI NO: 9837152 NR Description: oxidase [Triticum aestivum]
  misc_feature (1)..(205): Homolog of NCBI NO: 21105122 NR Description: oxidase [Oryza sativa (japonica cultivar-group)]
  misc_feature (1)..(203): Homolog of NCBI NO: 9937103 NR Description: plastid terminal oxidase [Capsicum annuum]
  misc_feature (1)..(204): Homolog of NCBI NO: 9937099 NR Description: plastid terminal oxidase [Lycopersicon
  misc_feature (1)..(205): Homolog of NCBI NO: 7486836 NR Description: hypothetical protein T10I14.90 - Arabidopsis
  misc_feature (1)..(205): Homolog of NCBI NO: 3929647 NR Description: Immutans protein [Arabidopsis thaliana]
  misc_feature (1)..(205): Homolog of NCBI NO: 18415888 NR Description: alternative oxidase, putative (IMMUTANS)
MSVLHMYETFGWWRRADYLKVHFAESWNEMHHLLIMEELGGNSWWFDRFLAQHIATFYYFMTVFLYILSPRMAYHFSECVESHAYETYDKFLKASGEELKNMPAPDIAVKYYTGGDLYLFDEFQTSRTPNTRRPVIENLYDVFVNIRDDEAEHCKTMRACQTLGSLRSPHSILEDDDTEEESGCVVPEEAHCEGIVDCLKKSITS

SEQ ID NO: 50588 - DNA, 1583 bp, Arabidopsis thaliana
  misc_feature (1)..(1583): Ceres Seq. ID no. 13647889
  misc_feature: MA Experiment ID: 20000173 Result: Down-regulated in Transcription
  misc_feature: MA Experiment 20000173 PARAMETER Experiment Name: At_42deg_Heat_P Parameter: Age (day) Value: 14
  misc_feature: MA Experiment 20000173 PARAMETER Experiment Name: At_42deg_Heat_P Parameter: Organism Value: A. thaliana
  misc_feature: MA Experiment 20000173 PARAMETER Experiment Name: At_42deg_Heat_P Parameter: Plant Line Value: WS
  misc_feature: MA Experiment 20000173 PARAMETER Experiment Name: At_42deg_Heat_P Parameter: Temperature (deg C) Value: 42 vs. 22
  misc_feature: MA Experiment 20000173 PARAMETER Experiment Name: At_42deg_Heat_P Parameter: Timepoint (hr) Value: 6
  misc_feature: MA Experiment 20000173 PARAMETER Experiment Name: At_42deg_Heat_P Parameter: Tissue Value: Aerial
  misc_feature: MA Experiment ID: 20000184 Result: Down-regulated in Transcription
  misc_feature: MA Experiment 20000184 PARAMETER Experiment Name: At_Shoots__P Parameter: Age (day) Value: 7
  misc_feature: MA Experiment 20000184 PARAMETER Experiment Name: At_Shoots__P Parameter: Tissue Value: Shoots vs. Whole Plant
  misc_feature: MA Experiment ID: 20000794 Result: Up-regulated in Transcription
  misc_feature: MA Experiment 20000794 PARAMETER Experiment Name: At_Petals_P Parameter: Age (day) Value: 23-25 days
  misc_feature: MA Experiment 20000794 PARAMETER Experiment Name: At_Petals_P Parameter: Plant Line Value: WS
  misc_feature: MA Experiment 20000794 PARAMETER Experiment Name: At_Petals_P Parameter: Tissue Value: Petals vs. Whole plant
  misc_feature: MA Experiment ID: 20001247 Result: Up-regulated in Transcription
  misc_feature: MA Experiment 20001247 PARAMETER Experiment Name: At_Far-red-induction_P Parameter: Age (day) Value: 7
  misc_feature: MA Experiment 20001247 PARAMETER Experiment Name: At_Far-red-induction_P Parameter: Light Value: Far-red vs. White
  misc_feature: MA Experiment 20001247 PARAMETER Experiment Name: At_Far-red-induction_P Parameter: Organism Value: A. thaliana
  misc_feature: MA Experiment 20001247 PARAMETER Experiment Name: At_Far-red-induction_P Parameter: Plant Line Value: Columbia
  misc_feature: MA Experiment 20001247 PARAMETER Experiment Name: At_Far-red-induction_P Parameter: Timepoint (hr) Value: 1
  misc_feature: MA Experiment 20001247 PARAMETER Experiment Name: At_Far-red-induction_P Parameter: Tissue Value: Whole Plant
  misc_feature: MA Experiment ID: 20001557 Result: Down-regulated in Transcription
  misc_feature: MA Experiment 20001557 PARAMETER Experiment Name: At_Drought_Soil_Dry_P Parameter: Age (day) Value: 27
  misc_feature: MA Experiment 20001557 PARAMETER Experiment Name: At_Drought_Soil_Dry_P Parameter: Organism Value: A. thaliana
  misc_feature: MA Experiment 20001557 PARAMETER Experiment Name: At_Drought_Soil_Dry_P Parameter: Plant Line Value: WS
  misc_feature: MA Experiment 20001557 PARAMETER Experiment Name: At_Drought_Soil_Dry_P Parameter: Post Timepoint (hr) Value: 3
  misc_feature: MA Experiment 20001557 PARAMETER Experiment Name: At_Drought_Soil_Dry_P Parameter: Post-Treatment Value: Re-Water vs. No Drought
  misc_feature: MA Experiment 20001557 PARAMETER Experiment Name: At_Drought_Soil_Dry_P Parameter: Timepoint (day) Value: 13
  misc_feature: MA Experiment 20001557 PARAMETER Experiment Name: At_Drought_Soil_Dry_P Parameter: Treatment Value: Drought vs. No Drought
  misc_feature: MA Experiment ID: 20001560 Result: Down-regulated in Transcription
  misc_feature: MA Experiment 20001560 PARAMETER Experiment Name: At_Drought_Soil_Dry_P Parameter: Age (day) Value: 28
  misc_feature: MA Experiment 20001560 PARAMETER Experiment Name: At_Drought_Soil_Dry_P Parameter: Organism Value: A. thaliana
  misc_feature: MA Experiment 20001560 PARAMETER Experiment Name: At_Drought_Soil_Dry_P Parameter: Plant Line Value: WS
  misc_feature: MA Experiment 20001560 PARAMETER Experiment Name: At_Drought_Soil_Dry_P Parameter: Post Timepoint (hr) Value: None
  misc_feature: MA Experiment 20001560 PARAMETER Experiment Name: At_Drought_Soil_Dry_P Parameter: Post-Treatment Value: None
  misc_feature: MA Experiment 20001560 PARAMETER Experiment Name: At_Drought_Soil_Dry_P Parameter: Timepoint (day) Value: 14
  misc_feature: MA Experiment 20001560 PARAMETER Experiment Name: At_Drought_Soil_Dry_P Parameter: Treatment Value: Drought vs. No Drought
  misc_feature: MA Experiment ID: 20001905 Result: Down-regulated in Transcription
  misc_feature: MA Experiment 20001905 PARAMETER Experiment Name: At_Drought_Reproduction_P Parameter: Age (day) Value: 40
  misc_feature: MA Experiment 20001905 PARAMETER Experiment Name: At_Drought_Reproduction_P Parameter: Organism Value: A. thaliana
  misc_feature: MA Experiment 20001905 PARAMETER Experiment Name: At_Drought_Reproduction_P Parameter: Plant Line Value: WS
  misc_feature: MA Experiment 20001905 PARAMETER Experiment Name: At_Drought_Reproduction_P Parameter: Timepoint (day) Value: 10
  misc_feature: MA Experiment 20001905 PARAMETER Experiment Name: At_Drought_Reproduction_P Parameter: Tissue Value: Rosettes
  misc_feature: MA Experiment 20001905 PARAMETER Experiment Name: At_Drought_Reproduction_P Parameter: Treatment Value: Drought vs. No Drought
tcactagtccccccccccccatccatttatcaagagaagaaaaaaaatctgaattccaattcgaagaagaagaagaagaagaaaggagatgactatggggaatttcttaaagagatttggaagtggaaaaagcagaagcagtagaaatatgactctgggaacgacgtcgtctcaatctcatgaaccatcaccgtcggatccttcactctcccttgccgataataccaacgccaccaagaagaagtacgctctcatccctgaccgcttctcttccctcgaccaggtatcaaaagctctaagagaagctggtcttgaatcatccaatctcattctcggagttgatttcacaaagagcaacgagtggactgggaaaacttctttcgatagaaaatgtctgcacgcgctcggcgaaacttcgaatccatatgaaaaggcgatttttgtaatcggccaaacgttggctccttttgatgaagacaatctcatcccttgtttcggctttggcgattcaacaactcatgacgaggaagtgttcggtttccatagcgacaattctccatgtcatggcttcgaagaggtcttagcatgttacaggagaattgcacccaacttgcgtctatcagggccaacgtcgtatggaccgctcatcgatgctgctgtcgacattgtggagaagaacaacggacaattccatgttctggtgattgttgcagatggacaggtaacgagaggtacggatatggccgagggagaactcagtcaacaagagaaaacaaccatcgacgcgattgtaaatgcaagctcgtatgctttgtcgattgttttagtcggtgttggagacggaccatgggaagacatgaggaagttcgatgataagatccctaagcgtgaattcgacaactttcagtttgtgaatttcacagagattatgacgagaaactcaccagagtctgccaaagaaactgcttttgctctagctgctctaatggagattccctttcagtatcaagcagccatcgaactccgcttactcgggaagcagacgggcttagcgaagacaatagttccgaggccaccaccaattccgtacacacctccaactaatgctgaactaccatcaactgcatcacctgcatcacctgaacaaacccagagttgcccgatttgtctgactaaccgaaaagacgtggctttcagctgtggccacatgacttgtggagattgcggatccaaaatatcaaattgcccgatctgtcgagtaaggatcacgaaccggctaaagctttacacatgatcaatggccacgaactttttttctgaccacggctttacacgtgatcaatgccaacaaactttatctctgcacataacaaatcgcttgcacatagccatctcctttgtagaatctacaatttggtttgccaagtgtttctgacaatgttccacaatcagcgtgtaccatgtaattctgtatgtactgtaaaacattaactttgcaaacaagaatgaagaagcaatgtacaaattacaaaaaaaaaaaaaaaaaaaactcgagggggggcccggtacccaattcgccctat

SEQ ID NO: 50589 - protein, 401 aa, Arabidopsis thaliana
  peptide (1)..(401): Ceres Seq. ID no. 15220528
  misc_feature (46)..(401): Homolog of NCBI NO: 22328041 NR Description: copine-related [Arabidopsis thaliana]
  misc_feature (333)..(400): Homolog of NCBI NO: 30697566 NR Description: copine-related [Arabidopsis thaliana]
  misc_feature (333)..(400): Homolog of NCBI NO: 18408863 NR Description: copine-related [Arabidopsis thaliana]
  misc_feature (11)..(350): Homolog of NCBI NO: 30697566 NR Description: copine-related [Arabidopsis thaliana]
  misc_feature (11)..(350): Homolog of NCBI NO: 18408863 NR Description: copine-related [Arabidopsis thaliana]
  misc_feature (24)..(400): Homolog of NCBI NO: 15232157 NR Description: copine-related [Arabidopsis thaliana]
  misc_feature (330)..(400): Homolog of NCBI NO: 15241400 NR Description: copine-related [Arabidopsis thaliana]
  misc_feature (27)..(355): Homolog of NCBI NO: 15241400 NR Description: copine-related [Arabidopsis thaliana]
  misc_feature (3)..(399): Homolog of NCBI NO: 18481708 NR Description: hypothetical protein [Sorghum bicolor]
  misc_feature (1)..(401): Homolog of NCBI NO: 18412353 NR Description: copine-related [Arabidopsis thaliana]
MTMGNFLKRFGSGKSRSSRNMTLGTTSSQSHEPSPSDPSLSLADNTNATKKKYALIPDRFSSLDQVSKALREAGLESSNLILGVDFTKSNEWTGKTSFDRKCLHALGETSNPYEKAIFVIGQTLAPFDEDNLIPCFGFGDSTTHDEEVFGFHSDNSPCHGFEEVLACYRRIAPNLRLSGPTSYGPLIDAAVDIVEKNNGQFHVLVIVADGQVTRGTDMAEGELSQQEKTTIDAIVNASSYALSIVLVGVGDGPWEDMRKFDDKIPKREFDNFQFVNFTEIMTRNSPESAKETAFALAALMEIPFQYQAAIELRLLGKQTGLAKTIVPRPPPIPYTPPTNAELPSTASPASPEQTQSCPICLTNRKDVAFSCGHMTCGDCGSKISNCPICRVRITNRLKLYT

SEQ ID NO: 50590 - protein, 399 aa, Arabidopsis thaliana
  peptide (1)..(399): Ceres Seq. ID no. 15220529
  misc_feature (44)..(399): Homolog of NCBI NO: 22328041 NR Description: copine-related [Arabidopsis thaliana]
  misc_feature (331)..(398): Homolog of NCBI NO: 30697566 NR Description: copine-related [Arabidopsis thaliana]
  misc_feature (331)..(398): Homolog of NCBI NO: 18408863 NR Description: copine-related [Arabidopsis thaliana]
  misc_feature (9)..(348): Homolog of NCBI NO: 30697566 NR Description: copine-related [Arabidopsis thaliana]
  misc_feature (9)..(348): Homolog of NCBI NO: 18408863 NR Description: copine-related [Arabidopsis thaliana]
  misc_feature (22)..(398): Homolog of NCBI NO: 15232157 NR Description: copine-related [Arabidopsis thaliana]
  misc_feature (328)..(398): Homolog of NCBI NO: 15241400 NR Description: copine-related [Arabidopsis thaliana]
  misc_feature (25)..(353): Homolog of NCBI NO: 15241400 NR Description: copine-related [Arabidopsis thaliana]
  misc_feature (1)..(397): Homolog of NCBI NO: 18481708 NR Description: hypothetical protein [Sorghum bicolor]
  misc_feature (1)..(399): Homolog of NCBI NO: 18412353 NR Description: copine-related [Arabidopsis thaliana]
MGNFLKRFGSGKSRSSRNMTLGTTSSQSHEPSPSDPSLSLADNTNATKKKYALIPDRFSSLDQVSKALREAGLESSNLILGVDFTKSNEWTGKTSFDRKCLHALGETSNPYEKAIFVIGQTLAPFDEDNLIPCFGFGDSTTHDEEVFGFHSDNSPCHGFEEVLACYRRIAPNLRLSGPTSYGPLIDAAVDIVEKNNGQFHVLVIVADGQVTRGTDMAEGELSQQEKTTIDAIVNASSYALSIVLVGVGDGPWEDMRKFDDKIPKREFDNFQFVNFTEIMTRNSPESAKETAFALAALMEIPFQYQAAIELRLLGKQTGLAKTIVPRPPPIPYTPPTNAELPSTASPASPEQTQSCPICLTNRKDVAFSCGHMTCGDCGSKISNCPICRVRITNRLKLYT

SEQ ID NO: 50591 - protein, 381 aa, Arabidopsis thaliana
  peptide (1)..(381): Ceres Seq. ID no. 15220530
  misc_feature (26)..(381): Homolog of NCBI NO: 22328041 NR Description: copine-related [Arabidopsis thaliana]
  misc_feature (313)..(380): Homolog of NCBI NO: 30697566 NR Description: copine-related [Arabidopsis thaliana]
  misc_feature (313)..(380): Homolog of NCBI NO: 18408863 NR Description: copine-related [Arabidopsis thaliana]
  misc_feature (1)..(330): Homolog of NCBI NO: 30697566 NR Description: copine-related [Arabidopsis thaliana]
  misc_feature (1)..(330): Homolog of NCBI NO: 18408863 NR Description: copine-related [Arabidopsis thaliana]
  misc_feature (4)..(380): Homolog of NCBI NO: 15232157 NR Description: copine-related [Arabidopsis thaliana]
  misc_feature (310)..(380): Homolog of NCBI NO: 15241400 NR Description: copine-related [Arabidopsis thaliana]
  misc_feature (7)..(335): Homolog of NCBI NO: 15241400 NR Description: copine-related [Arabidopsis thaliana]
  misc_feature (1)..(379): Homolog of NCBI NO: 18481708 NR Description: hypothetical protein [Sorghum bicolor]
  misc_feature (1)..(381): Homolog of NCBI NO: 18412353 NR Description: copine-related [Arabidopsis thaliana]
MTLGTTSSQSHEPSPSDPSLSLADNTNATKKKYALIPDRFSSLDQVSKALREAGLESSNLILGVDFTKSNEWTGKTSFDRKCLHALGETSNPYEKAIFVIGQTLAPFDEDNLIPCFGFGDSTTHDEEVFGFHSDNSPCHGFEEVLACYRRIAPNLRLSGPTSYGPLIDAAVDIVEKNNGQFHVLVIVADGQVTRGTDMAEGELSQQEKTTIDAIVNASSYALSIVLVGVGDGPWEDMRKFDDKIPKREFDNFQFVNFTEIMTRNSPESAKETAFALAALMEIPFQYQAAIELRLLGKQTGLAKTIVPRPPPIPYTPPTNAELPSTASPASPEQTQSCPICLTNRKDVAFSCGHMTCGDCGSKISNCPICRVRITNRLKLYT

SEQ ID NO: 50592 - DNA, 1681 bp, Arabidopsis thaliana
  misc_feature (1)..(1681): Ceres Seq. ID no. 13588234
  misc_feature: MA Experiment ID: 20000440 Result: Up-regulated in Transcription
  misc_feature: MA Experiment 20000440 PARAMETER Experiment Name: At_Closed-Flower__Sub_P Parameter: Tissue Value: Closed Flower vs. Whole Plant
atatcattcatgggcccctacgcattactcggtaccaatctcgctctctctctctaagtcttgaaactctatcaagaatctcaagccaccattttttcttcatcttcataaagagaaagagagagatcctcttgtttggcaagaacccaatttgagttctaagtcctgatttgctttgctcttttctttccttgatttcattctatataaagtcaacggaaagatatacatatatagttttcttccgattctagggttttcatatttcctctaaattttcatggtcaaagaagaaaatctaagaaacaatcgaaccagcaagagaaagaagacttcaatatcaacatctctctctctcttatattataagatctcgagttgagtcatcatcatcgtcaatggctttgaaaaacatccgcaacaattcaccaattgaagaacaagagaaaggtttaaacttcatcaagattcactaagacccactaagagccaactcaagactaaacggagcaaggttttgccaaaaaccaaaaaaaaaaaaaaaaaagattcaagaaccatctcgtaaatcaagatttctccaaggaaaatcagataggtcataatggatctatccctggctccgacaacaacaacaagttccgaccaagaacaagacagagaccaagaattaacctccaacatcggagcaagcagcagctccggtcccagcggaaacaacaacaaccttccgatgatgatgattccacctccggagaaagaacacatgttcgacaaagtggtaacaccaagcgacgtcggaaaactcaacagactcgtgatccctaaacaacacgctgagaggtatttccctctagactcctcaaacaaccaaaacggcacgcttttgaacttccaagacagaaacggcaagatgtggagattccgttactcgtattggaactctagccagagctacgttatgaccaaaggatggagccgtttcgtcaaagagaaaaagctcgatgcaggagacattgtctctttccaacgaggcatcggagatgagtcagaaagatccaaactttacatagattggaggcatagacccgacatgagcctcgttcaagcacatcagtttggtaattttggtttcaatttcaatttcccgaccacttctcaatattccaacagatttcatccattgccagaatataactccgtcccgattcaccggggcttaaacatcggaaatcaccaacgttcctattataacacccagcgtcaagagttcgtagggtatggttatgggaatttagctggaaggtgttactacacgggatcaccgttggatcataggaacattgttggatcagagccgttggttatagactcagtccctgtggttcccgggagattaactccggtgatgttaccgccgcttcctccgcctccttctacggcgggaaagagactaaggctctttggggtgaatatggaatgtggcaatgactataatcaacaagaagagtcatggttggtgccacgtggcgaaattggtgcatcttcttcttcttcttcagctctacgactaaatttatcgactgatcatgatgatgataatgatgatggtgatgatggcgatgatgatcaatttgctaagaaagggaagtcttcactttctctcaatttcaatccatga

SEQ ID NO: 50593 - protein, 358 aa, Arabidopsis thaliana
  peptide (1)..(358): Ceres Seq. ID no. 13588235
  misc_feature (55)..(164): Pfam Name: B3 DNA binding domain Pfam Description: B3 DNA binding domain
  misc_feature (53)..(186): Homolog of NCBI NO: 15222217 NR Description: AP2 domain transcription factor, putative  (RAV1)
  misc_feature (51)..(229): Homolog of NCBI NO: 37536454 NR Description: putative DNA-binding protein
  misc_feature (51)..(214): Homolog of NCBI NO: 26450371 NR Description: putative RAV [Arabidopsis thaliana]
  misc_feature (51)..(214): Homolog of NCBI NO: 21618252 NR Description: RAV-like protein [Arabidopsis thaliana]
  misc_feature (51)..(214): Homolog of NCBI NO: 15228649 NR Description: DNA-binding protein, putative [Arabidopsis
  misc_feature (4)..(187): Homolog of NCBI NO: 32492293 NR Description: OSJNBa0088A01.1 [Oryza sativa (japonica
  misc_feature (51)..(228): Homolog of NCBI NO: 18407193 NR Description: DNA-binding protein, putative [Arabidopsis
  misc_feature (51)..(328): Homolog of NCBI NO: 34902226 NR Description: Putative RAV-like B3 domain DNA binding protein
  misc_feature (20)..(320): Homolog of NCBI NO: 15234209 NR Description: DNA-binding protein, putative [Arabidopsis
  misc_feature (1)..(358): Homolog of NCBI NO: 15223284 NR Description: DNA-binding protein, putative [Arabidopsis
MDLSLAPTTTTSSDQEQDRDQELTSNIGASSSSGPSGNNNNLPMMMIPPPEKEHMFDKVVTPSDVGKLNRLVIPKQHAERYFPLDSSNNQNGTLLNFQDRNGKMWRFRYSYWNSSQSYVMTKGWSRFVKEKKLDAGDIVSFQRGIGDESERSKLYIDWRHRPDMSLVQAHQFGNFGFNFNFPTTSQYSNRFHPLPEYNSVPIHRGLNIGNHQRSYYNTQRQEFVGYGYGNLAGRCYYTGSPLDHRNIVGSEPLVIDSVPVVPGRLTPVMLPPLPPPPSTAGKRLRLFGVNMECGNDYNQQEESWLVPRGEIGASSSSSSALRLNLSTDHDDDNDDGDDGDDDQFAKKGKSSLSLNFNP

SEQ ID NO: 50594 - protein, 315 aa, Arabidopsis thaliana
  peptide (1)..(315): Ceres Seq. ID no. 13588236
  misc_feature (12)..(121): Pfam Name: B3 DNA binding domain Pfam Description: B3 DNA binding domain
  misc_feature (10)..(143): Homolog of NCBI NO: 15222217 NR Description: AP2 domain transcription factor, putative  (RAV1)
  misc_feature (8)..(186): Homolog of NCBI NO: 37536454 NR Description: putative DNA-binding protein
  misc_feature (8)..(171): Homolog of NCBI NO: 26450371 NR Description: putative RAV [Arabidopsis thaliana]
  misc_feature (8)..(171): Homolog of NCBI NO: 21618252 NR Description: RAV-like protein [Arabidopsis thaliana]
  misc_feature (8)..(171): Homolog of NCBI NO: 15228649 NR Description: DNA-binding protein, putative [Arabidopsis
  misc_feature (1)..(144): Homolog of NCBI NO: 32492293 NR Description: OSJNBa0088A01.1 [Oryza sativa (japonica
  misc_feature (8)..(185): Homolog of NCBI NO: 18407193 NR Description: DNA-binding protein, putative [Arabidopsis
  misc_feature (8)..(285): Homolog of NCBI NO: 34902226 NR Description: Putative RAV-like B3 domain DNA binding protein
  misc_feature (1)..(277): Homolog of NCBI NO: 15234209 NR Description: DNA-binding protein, putative [Arabidopsis
  misc_feature (1)..(315): Homolog of NCBI NO: 15223284 NR Description: DNA-binding protein, putative [Arabidopsis
MMMIPPPEKEHMFDKVVTPSDVGKLNRLVIPKQHAERYFPLDSSNNQNGTLLNFQDRNGKMWRFRYSYWNSSQSYVMTKGWSRFVKEKKLDAGDIVSFQRGIGDESERSKLYIDWRHRPDMSLVQAHQFGNFGFNFNFPTTSQYSNRFHPLPEYNSVPIHRGLNIGNHQRSYYNTQRQEFVGYGYGNLAGRCYYTGSPLDHRNIVGSEPLVIDSVPVVPGRLTPVMLPPLPPPPSTAGKRLRLFGVNMECGNDYNQQEESWLVPRGEIGASSSSSSALRLNLSTDHDDDNDDGDDGDDDQFAKKGKSSLSLNFNP

SEQ ID NO: 50595 - protein, 314 aa, Arabidopsis thaliana
  peptide (1)..(314): Ceres Seq. ID no. 13588237
  misc_feature (11)..(120): Pfam Name: B3 DNA binding domain Pfam Description: B3 DNA binding domain
  misc_feature (9)..(142): Homolog of NCBI NO: 15222217 NR Description: AP2 domain transcription factor, putative  (RAV1)
  misc_feature (7)..(185): Homolog of NCBI NO: 37536454 NR Description: putative DNA-binding protein
  misc_feature (7)..(170): Homolog of NCBI NO: 21618252 NR Description: RAV-like protein [Arabidopsis thaliana]
  misc_feature (7)..(170): Homolog of NCBI NO: 26450371 NR Description: putative RAV [Arabidopsis thaliana]
  misc_feature (7)..(170): Homolog of NCBI NO: 15228649 NR Description: DNA-binding protein, putative [Arabidopsis
  misc_feature (1)..(143): Homolog of NCBI NO: 32492293 NR Description: OSJNBa0088A01.1 [Oryza sativa (japonica
  misc_feature (7)..(184): Homolog of NCBI NO: 18407193 NR Description: DNA-binding protein, putative [Arabidopsis
  misc_feature (7)..(284): Homolog of NCBI NO: 34902226 NR Description: Putative RAV-like B3 domain DNA binding protein
  misc_feature (1)..(276): Homolog of NCBI NO: 15234209 NR Description: DNA-binding protein, putative [Arabidopsis
  misc_feature (1)..(314): Homolog of NCBI NO: 15223284 NR Description: DNA-binding protein, putative [Arabidopsis
MMIPPPEKEHMFDKVVTPSDVGKLNRLVIPKQHAERYFPLDSSNNQNGTLLNFQDRNGKMWRFRYSYWNSSQSYVMTKGWSRFVKEKKLDAGDIVSFQRGIGDESERSKLYIDWRHRPDMSLVQAHQFGNFGFNFNFPTTSQYSNRFHPLPEYNSVPIHRGLNIGNHQRSYYNTQRQEFVGYGYGNLAGRCYYTGSPLDHRNIVGSEPLVIDSVPVVPGRLTPVMLPPLPPPPSTAGKRLRLFGVNMECGNDYNQQEESWLVPRGEIGASSSSSSALRLNLSTDHDDDNDDGDDGDDDQFAKKGKSSLSLNFNP

SEQ ID NO: 50596 - DNA, 1422 bp, Arabidopsis thaliana
  misc_feature (1)..(1422): Ceres Seq. ID no. 13588409
  misc_feature: MA Experiment ID: 20000234 Result: Up-regulated in Transcription
  misc_feature: MA Experiment 20000234 PARAMETER Experiment Name: At_Siliques_P Parameter: Age (day) Value: 21
  misc_feature: MA Experiment 20000234 PARAMETER Experiment Name: At_Siliques_P Parameter: Organism Value: A. thaliana
  misc_feature: MA Experiment 20000234 PARAMETER Experiment Name: At_Siliques_P Parameter: Plant Line Value: WS
  misc_feature: MA Experiment 20000234 PARAMETER Experiment Name: At_Siliques_P Parameter: Tissue Value: Less Than 5mm Siliques vs. Whole Plant
aaaacccaaaaccaaacaatccaaacaaaaaacaaagctgcaagctttttgctctctctctctgctttcatggcgtcttttactaacctctctcttctcctcctctttctcttcaccgctacactcatcaccagccaacaaagcgacgacgacgaaaatgcgtcaccacaactcgctctagacccgtcggagcaagaagcggtctaccgagttctcgactcagtcaactcagccatctcatggcgaaccatcttccccgacgacatctgcgcttcaccacctgacggcgtcgtttgcgataacctctacgcttctcaaaacggcgtcgcaacgtctgttcacgtcacggagttccatttaggctacctctcggattacactcaaaaccctccttgctcttctaatgccacgcttgatcctctcctctttactgctttcaaacaccttcgtaagcttttcttctacaaatgcttcaccgacgctcgtgcctcgttgccgttaacagtcccggaggatttcggctctgttctcgaagagttggtgttcatcgaaaacccatctctcgtcggcgagatcggagccatgatcggtaatttcacaaagctgagaagattagttcttaccggtaacgggtttcacgggtcaattccgggtcaaatcggcgatttggtgagtctagaggagattacactctccagaaacagcttgaccggtgggtttccggcgaacgcaacgtctcgtctgaagaatctaaaagttctagactttagccataactttatcaacggaaacgcccctgattccatcggagacttgacagagcttctcaagctagacctcagcttcaatgagttcaccggagaggtcccttccggcgtcggaaatttgaaaaagctcgtatttttagacttgagttacaaccgtttcgggaatttcggcgttcctctgtttctagcggagatgtccagtttgagagaggttcatctgagtgggaacaagctcggtggtcgtataccggcgatttggaagaatctcgagggtatttcggggattggattctcaaggatgggtcttgaaggaaacatcccagcttcaatgggttcgagtcttaaaaatctctgctttctagctcttgacaacaacaatctcgacggacaaatcccggaggagtttgggtttctggactctgctcgtgaaatcaatctagagaacaataacctcaccggaaaagctccattctccgacagtttcagagatagaatcgggaaaaagctcaaactgagcgggaatgtaaatctccaagtcaagaattccgatcctcatctcgccggaagagctctatattcatcggcgagaaaggttttacctttgatttacttcccggcgactttattggctctttacatttcaataacacagtga

SEQ ID NO: 50597 - protein, 473 aa, Arabidopsis thaliana
  peptide (1)..(473): Ceres Seq. ID no. 13588410
  misc_feature (250)..(273): Pfam Name: Leucine Rich Repeat Pfam Description: Leucine Rich Repeat
  misc_feature (61)..(439): Homolog of NCBI NO: 15220050 NR Description: leucine rich repeat protein family [Arabidopsis
  misc_feature (32)..(442): Homolog of NCBI NO: 18409119 NR Description: leucine rich repeat protein family [Arabidopsis
  misc_feature (60)..(433): Homolog of NCBI NO: 11994758 NR Description: contains similarity to elicitor-inducible
  misc_feature (30)..(438): Homolog of NCBI NO: 34894182 NR Description: P0439B06.12 [Oryza sativa (japonica
  misc_feature (38)..(433): Homolog of NCBI NO: 34912808 NR Description: P0501G01.13 [Oryza sativa (japonica
  misc_feature (33)..(433): Homolog of NCBI NO: 15230865 NR Description: leucine rich repeat protein family [Arabidopsis
  misc_feature (54)..(433): Homolog of NCBI NO: 34910824 NR Description: putative Hcr2-0B [Oryza sativa (japonica
  misc_feature (60)..(433): Homolog of NCBI NO: 15222215 NR Description: leucine rich repeat protein family [Arabidopsis
  misc_feature (24)..(472): Homolog of NCBI NO: 7487680 NR Description: hypothetical protein T5F17.10 - Arabidopsis
  misc_feature (24)..(473): Homolog of NCBI NO: 15236148 NR Description: leucine rich repeat protein family (fragment)
KTQNQTIQTKNKAASFLLSLSAFMASFTNLSLLLLFLFTATLITSQQSDDDENASPQLALDPSEQEAVYRVLDSVNSAISWRTIFPDDICASPPDGVVCDNLYASQNGVATSVHVTEFHLGYLSDYTQNPPCSSNATLDPLLFTAFKHLRKLFFYKCFTDARASLPLTVPEDFGSVLEELVFIENPSLVGEIGAMIGNFTKLRRLVLTGNGFHGSIPGQIGDLVSLEEITLSRNSLTGGFPANATSRLKNLKVLDFSHNFINGNAPDSIGDLTELLKLDLSFNEFTGEVPSGVGNLKKLVFLDLSYNRFGNFGVPLFLAEMSSLREVHLSGNKLGGRIPAIWKNLEGISGIGFSRMGLEGNIPASMGSSLKNLCFLALDNNNLDGQIPEEFGFLDSAREINLENNNLTGKAPFSDSFRDRIGKKLKLSGNVNLQVKNSDPHLAGRALYSSARKVLPLIYFPATLLALYISITQ

SEQ ID NO: 50598 - protein, 450 aa, Arabidopsis thaliana
  peptide (1)..(450): Ceres Seq. ID no. 13588411
  misc_feature (227)..(250): Pfam Name: Leucine Rich Repeat Pfam Description: Leucine Rich Repeat
  misc_feature (38)..(416): Homolog of NCBI NO: 15220050 NR Description: leucine rich repeat protein family [Arabidopsis
  misc_feature (9)..(419): Homolog of NCBI NO: 18409119 NR Description: leucine rich repeat protein family [Arabidopsis
  misc_feature (37)..(410): Homolog of NCBI NO: 11994758 NR Description: contains similarity to elicitor-inducible
  misc_feature (7)..(415): Homolog of NCBI NO: 34894182 NR Description: P0439B06.12 [Oryza sativa (japonica
  misc_feature (15)..(410): Homolog of NCBI NO: 34912808 NR Description: P0501G01.13 [Oryza sativa (japonica
  misc_feature (10)..(410): Homolog of NCBI NO: 15230865 NR Description: leucine rich repeat protein family [Arabidopsis
  misc_feature (31)..(410): Homolog of NCBI NO: 34910824 NR Description: putative Hcr2-0B [Oryza sativa (japonica
  misc_feature (37)..(410): Homolog of NCBI NO: 15222215 NR Description: leucine rich repeat protein family [Arabidopsis
  misc_feature (1)..(449): Homolog of NCBI NO: 7487680 NR Description: hypothetical protein T5F17.10 - Arabidopsis
  misc_feature (1)..(450): Homolog of NCBI NO: 15236148 NR Description: leucine rich repeat protein family (fragment)
MASFTNLSLLLLFLFTATLITSQQSDDDENASPQLALDPSEQEAVYRVLDSVNSAISWRTIFPDDICASPPDGVVCDNLYASQNGVATSVHVTEFHLGYLSDYTQNPPCSSNATLDPLLFTAFKHLRKLFFYKCFTDARASLPLTVPEDFGSVLEELVFIENPSLVGEIGAMIGNFTKLRRLVLTGNGFHGSIPGQIGDLVSLEEITLSRNSLTGGFPANATSRLKNLKVLDFSHNFINGNAPDSIGDLTELLKLDLSFNEFTGEVPSGVGNLKKLVFLDLSYNRFGNFGVPLFLAEMSSLREVHLSGNKLGGRIPAIWKNLEGISGIGFSRMGLEGNIPASMGSSLKNLCFLALDNNNLDGQIPEEFGFLDSAREINLENNNLTGKAPFSDSFRDRIGKKLKLSGNVNLQVKNSDPHLAGRALYSSARKVLPLIYFPATLLALYISITQ

SEQ ID NO: 50599 - protein, 279 aa, Arabidopsis thaliana
  peptide (1)..(279): Ceres Seq. ID no. 13588412
  misc_feature (56)..(79): Pfam Name: Leucine Rich Repeat Pfam Description: Leucine Rich Repeat
  misc_feature (1)..(245): Homolog of NCBI NO: 15220050 NR Description: leucine rich repeat protein family [Arabidopsis
  misc_feature (1)..(248): Homolog of NCBI NO: 18409119 NR Description: leucine rich repeat protein family [Arabidopsis
  misc_feature (1)..(239): Homolog of NCBI NO: 11994758 NR Description: contains similarity to elicitor-inducible
  misc_feature (1)..(244): Homolog of NCBI NO: 34894182 NR Description: P0439B06.12 [Oryza sativa (japonica
  misc_feature (1)..(239): Homolog of NCBI NO: 34912808 NR Description: P0501G01.13 [Oryza sativa (japonica
  misc_feature (1)..(239): Homolog of NCBI NO: 15230865 NR Description: leucine rich repeat protein family [Arabidopsis
  misc_feature (1)..(239): Homolog of NCBI NO: 34910824 NR Description: putative Hcr2-0B [Oryza sativa (japonica
  misc_feature (1)..(239): Homolog of NCBI NO: 15222215 NR Description: leucine rich repeat protein family [Arabidopsis
  misc_feature (1)..(278): Homolog of NCBI NO: 7487680 NR Description: hypothetical protein T5F17.10 - Arabidopsis
  misc_feature (1)..(279): Homolog of NCBI NO: 15236148 NR Description: leucine rich repeat protein family (fragment)
MIGNFTKLRRLVLTGNGFHGSIPGQIGDLVSLEEITLSRNSLTGGFPANATSRLKNLKVLDFSHNFINGNAPDSIGDLTELLKLDLSFNEFTGEVPSGVGNLKKLVFLDLSYNRFGNFGVPLFLAEMSSLREVHLSGNKLGGRIPAIWKNLEGISGIGFSRMGLEGNIPASMGSSLKNLCFLALDNNNLDGQIPEEFGFLDSAREINLENNNLTGKAPFSDSFRDRIGKKLKLSGNVNLQVKNSDPHLAGRALYSSARKVLPLIYFPATLLALYISITQ

SEQ ID NO: 50600 - DNA, 3666 bp, Arabidopsis thaliana
  misc_feature (1)..(3666): Ceres Seq. ID no. 13611878
  misc_feature: MA Experiment ID: 20000173 Result: Up-regulated in Transcription
  misc_feature: MA Experiment 20000173 PARAMETER Experiment Name: At_42deg_Heat_P Parameter: Age (day) Value: 14
  misc_feature: MA Experiment 20000173 PARAMETER Experiment Name: At_42deg_Heat_P Parameter: Organism Value: A. thaliana
  misc_feature: MA Experiment 20000173 PARAMETER Experiment Name: At_42deg_Heat_P Parameter: Plant Line Value: WS
  misc_feature: MA Experiment 20000173 PARAMETER Experiment Name: At_42deg_Heat_P Parameter: Temperature (deg C) Value: 42 vs. 22
  misc_feature: MA Experiment 20000173 PARAMETER Experiment Name: At_42deg_Heat_P Parameter: Timepoint (hr) Value: 6
  misc_feature: MA Experiment 20000173 PARAMETER Experiment Name: At_42deg_Heat_P Parameter: Tissue Value: Aerial
  misc_feature: MA Experiment ID: 20000794 Result: Up-regulated in Transcription
  misc_feature: MA Experiment 20000794 PARAMETER Experiment Name: At_Petals_P Parameter: Age (day) Value: 23-25 days
  misc_feature: MA Experiment 20000794 PARAMETER Experiment Name: At_Petals_P Parameter: Plant Line Value: WS
  misc_feature: MA Experiment 20000794 PARAMETER Experiment Name: At_Petals_P Parameter: Tissue Value: Petals vs. Whole plant
atggttgatacgagacgtagctcttctgcttccaagcgtttttgtgctgcaacaagttcatcctcacgtcctaccaaacgatccaaggcggcggcggaaccggcatcgtcttcgtcggcgagtgaggtgccgattgataatcaagcaccggtttcggatcctggatcaatatctggagacccggaacttagaacttctgatccgcagagtaacgatgcggagaggccagttactaccaccgatgtgccggcgatggagaccgacacaaatccagaacttgaaggcttggtgacgcctacacctgcaggtgaagtggtggtggaagctgagaaatcgaaatcctcaaagaagcggattgctaaggctccttgggccaagcttctttctcagtttcctcagaaccctcatcttgtcatgagaggctctgtgtttactgttggacggcgagcctgcgatttatgtatcagagatcattctatgcccaatgttctatgtgaactaaggcagtctgagcacggaggtccatcagttgcatcgctggagataatagggaatggagtacttgttcaggtcaatggcaagatttaccaaaggagtacttgtgttcatctacggggtggcgatgaaattatcttcaccacccctgggaaacatgcttatgtatccttttacaagttctttgaaaatgttcagatatttcagcctcttaaagatgaaaatctagctgctccagacagaacttcttccttgagcctttttgaagcgcagagtgcccctctgaaagggcttcacgttgagacaagagcaagagactcttcatctgttgatggaactgcctctttattggcgtctatatcaaagttacaaaatgtcccttttctaccacctactgctaaaagtgtcaaaaggcagcaaaattcagaggtccctgtgttaccttctagctgcgatgattttattctggatgttgacttgaacgatgctgatagtaataatgatcatgctgctattgcttcaatggagaaaactgttgcttcgacttcttgtgctgccaacgatgaccatgatgcagatgggaatggaatggatccttttcaagaacctgaggctggaaatattcctgatcctgcttatgaaattagaccaattttgagtttacttggggatccttctgaatttgatttaaggggtagcatttccaaaatactggtggatgaacgaagggaagtgagggaaatgccgaaagaatatgaacgtccatcagcttcggtattaactagacgtcaagcgcataaggatagtctgcgaggaggaatactcaatcctcaggacatagaagtttcttttgagaacttcccatatttcttaagtggcacaactaaggatgttttgatgatatccacatatgcccatataaagtatggaaaggaatatgcagagtatgcatcagatttgccaacagcgtgtccccgtatcttactctctggaccatctggctctgagatatatcaggaaatgttagcaaaagcgcttgcgaaacaatgtggggccaaattgatgattgttgactctctcttgttacctgggcataagaaaccaatttcaagtgtagaggctggtataacaggtggatcaacattgagctctcaggctgttcggaggcaagaagtatcaactgcaacctctaaaagttacaccttcaaagcaggtgatcgagtaaggtttttaggcccttcaacttcttctcttgcttctctccgagctccacctaggggaccggcaacaggttttcaaggaaaagtactccttgcgtttgaaggcaatggatcttcaaaaatcggggttagatttgatagatcgataccagatggcaatgatcttggtggtctatgcgaagaagaccatggttttttttgtactgcgagttctcttcggttagaaagttcttccagtgacgatgctgataaacttgccattaatgaaatctttgaggtagcttttaatgaaagtgaaagagggtcattgatattgttcctcaaagacattgagaaatctgtgtcggggaacactgatgtgtatataactttgaagagcaagcttgagaatttaccggagaatattgttgtcatagcttcgcaaacccagttggacaaccgaaaggaaaaatcccaccctggaggtttcttgttcacaaagtttggcagcaaccagacagcactgctggaccttgcatttccggatacttttggtggtagactgcaggataggaacacagaaatgcctaaagcagtgaaacaaatcactaggctatttccaaacaaagtgaccatccaattacctgaggatgaagcttcgctggtcgactggaaggataaacttgaacgtgatactgagatcctgaaggctcaagctaatattacaagcatccgtgcggtccttagcaaaaatcagctagtctgccctgacattgaaatcttgtgcatcaaagatcaaacccttccttctgatagtgtggagaaagtggttggctttgctttcaatcaccatcttatgaactgctcagaacctacagtcaaggacaacaagcttatcatctcggcagaaagcatcacatatggcctgcagctgttgcatgagattcaaaacgaaaacaagagcacaaagaaatctctgaaagatgttgttacagagaatgaattcgagaaaaaactactatcagacgtcattcctccaagtgatatcggtgtttctttcagtgatattggggctttggaaaatgtgaaagataccttgaaggagttggtgatgcttcctcttcaaagacccgaattgtttggcaaaggtcaacttacaaagcctacaaagggtatactattgtttggaccgcctggtacggggaagacaatgctggcaaaagctgtagcaaccgaggctggggcaaactttatcaatatttcaatgtccagcattacttcaaagtggtttggtgagggagagaagtacgttaaagctgttttctctttagcaagtaagatagctccaagcgtcatttttgttgatgaggttgatagcatgctgggaagacgtgagaatccaggagaacatgaagctatgcgtaagatgaagaacgaattcatgataaactgggacggcttacgcacaaaggataaagaaagggttttagtattggctgctaccaacagaccatttgaccttgacgaagcagtaattagacggcttccccgaaggttgatggttaatctgccggattcagcaaacagatcgaagatcttgagcgtgattttggcgaaagaagagatggcagaagacgtagacttagaagcaatagcaaatatgacagatgggtactcagggagtgacttaaagaatctttgcgtgaccgcggcacatcttcctatccgagagattcttgaaaaagaaaagaaggagagaagtgtggctcaagccgaaaaccgagcaatgccacagctatatagcagtacagacgttagacccttgaacatgaatgatttcaaaaccgcacatgatcaggtatgtgcgagtgtggcgtctgattcatcgaacatgaatgagctccagcaatggaacgagctctatggagaaggaggctcgaggaagaagacatcactgagttacttcatgtaa

SEQ ID NO: 50601 - protein, 1221 aa, Arabidopsis thaliana
  peptide (1)..(1221): Ceres Seq. ID no. 13611879
  misc_feature (956)..(1141): Pfam Name: ATPase family associated with various cellular Pfam Description: ATPase family associated with various cellular
  misc_feature (582)..(713): Homolog of NCBI NO: 34904204 NR Description: P0492F05.26 [Oryza sativa (japonica
  misc_feature (750)..(889): Homolog of NCBI NO: 34904204 NR Description: P0492F05.26 [Oryza sativa (japonica
  misc_feature (881)..(1221): Homolog of NCBI NO: 34904204 NR Description: P0492F05.26 [Oryza sativa (japonica
  misc_feature (779)..(1220): Homolog of NCBI NO: 15234019 NR Description: expressed protein [Arabidopsis thaliana]
  misc_feature (851)..(1221): Homolog of NCBI NO: 7487016 NR Description: hypothetical protein T14P8.7 - Arabidopsis
  misc_feature (530)..(664): Homolog of NCBI NO: 7487017 NR Description: hypothetical protein T14P8.8 - Arabidopsis
  misc_feature (1)..(557): Homolog of NCBI NO: 7487017 NR Description: hypothetical protein T14P8.8 - Arabidopsis
  misc_feature (425)..(539): Homolog of NCBI NO: 33146850 NR Description: putative MSP1(mitochondrial sorting of proteins)
  misc_feature (1)..(221): Homolog of NCBI NO: 33146850 NR Description: putative MSP1(mitochondrial sorting of proteins)
  misc_feature (558)..(1221): Homolog of NCBI NO: 33146850 NR Description: putative MSP1(mitochondrial sorting of proteins)
MVDTRRSSSASKRFCAATSSSSRPTKRSKAAAEPASSSSASEVPIDNQAPVSDPGSISGDPELRTSDPQSNDAERPVTTTDVPAMETDTNPELEGLVTPTPAGEVVVEAEKSKSSKKRIAKAPWAKLLSQFPQNPHLVMRGSVFTVGRRACDLCIRDHSMPNVLCELRQSEHGGPSVASLEIIGNGVLVQVNGKIYQRSTCVHLRGGDEIIFTTPGKHAYVSFYKFFENVQIFQPLKDENLAAPDRTSSLSLFEAQSAPLKGLHVETRARDSSSVDGTASLLASISKLQNVPFLPPTAKSVKRQQNSEVPVLPSSCDDFILDVDLNDADSNNDHAAIASMEKTVASTSCAANDDHDADGNGMDPFQEPEAGNIPDPAYEIRPILSLLGDPSEFDLRGSISKILVDERREVREMPKEYERPSASVLTRRQAHKDSLRGGILNPQDIEVSFENFPYFLSGTTKDVLMISTYAHIKYGKEYAEYASDLPTACPRILLSGPSGSEIYQEMLAKALAKQCGAKLMIVDSLLLPGHKKPISSVEAGITGGSTLSSQAVRRQEVSTATSKSYTFKAGDRVRFLGPSTSSLASLRAPPRGPATGFQGKVLLAFEGNGSSKIGVRFDRSIPDGNDLGGLCEEDHGFFCTASSLRLESSSSDDADKLAINEIFEVAFNESERGSLILFLKDIEKSVSGNTDVYITLKSKLENLPENIVVIASQTQLDNRKEKSHPGGFLFTKFGSNQTALLDLAFPDTFGGRLQDRNTEMPKAVKQITRLFPNKVTIQLPEDEASLVDWKDKLERDTEILKAQANITSIRAVLSKNQLVCPDIEILCIKDQTLPSDSVEKVVGFAFNHHLMNCSEPTVKDNKLIISAESITYGLQLLHEIQNENKSTKKSLKDVVTENEFEKKLLSDVIPPSDIGVSFSDIGALENVKDTLKELVMLPLQRPELFGKGQLTKPTKGILLFGPPGTGKTMLAKAVATEAGANFINISMSSITSKWFGEGEKYVKAVFSLASKIAPSVIFVDEVDSMLGRRENPGEHEAMRKMKNEFMINWDGLRTKDKERVLVLAATNRPFDLDEAVIRRLPRRLMVNLPDSANRSKILSVILAKEEMAEDVDLEAIANMTDGYSGSDLKNLCVTAAHLPIREILEKEKKERSVAQAENRAMPQLYSSTDVRPLNMNDFKTAHDQVCASVASDSSNMNELQQWNELYGEGGSRKKTSLSYFM

SEQ ID NO: 50602 - protein, 1137 aa, Arabidopsis thaliana
  peptide (1)..(1137): Ceres Seq. ID no. 13611880
  misc_feature (872)..(1057): Pfam Name: ATPase family associated with various cellular Pfam Description: ATPase family associated with various cellular
  misc_feature (498)..(629): Homolog of NCBI NO: 34904204 NR Description: P0492F05.26 [Oryza sativa (japonica
  misc_feature (666)..(805): Homolog of NCBI NO: 34904204 NR Description: P0492F05.26 [Oryza sativa (japonica
  misc_feature (797)..(1137): Homolog of NCBI NO: 34904204 NR Description: P0492F05.26 [Oryza sativa (japonica
  misc_feature (695)..(1136): Homolog of NCBI NO: 15234019 NR Description: expressed protein [Arabidopsis thaliana]
  misc_feature (767)..(1137): Homolog of NCBI NO: 7487016 NR Description: hypothetical protein T14P8.7 - Arabidopsis
  misc_feature (446)..(580): Homolog of NCBI NO: 7487017 NR Description: hypothetical protein T14P8.8 - Arabidopsis
  misc_feature (1)..(473): Homolog of NCBI NO: 7487017 NR Description: hypothetical protein T14P8.8 - Arabidopsis
  misc_feature (341)..(455): Homolog of NCBI NO: 33146850 NR Description: putative MSP1(mitochondrial sorting of proteins)
  misc_feature (1)..(137): Homolog of NCBI NO: 33146850 NR Description: putative MSP1(mitochondrial sorting of proteins)
  misc_feature (474)..(1137): Homolog of NCBI NO: 33146850 NR Description: putative MSP1(mitochondrial sorting of proteins)
METDTNPELEGLVTPTPAGEVVVEAEKSKSSKKRIAKAPWAKLLSQFPQNPHLVMRGSVFTVGRRACDLCIRDHSMPNVLCELRQSEHGGPSVASLEIIGNGVLVQVNGKIYQRSTCVHLRGGDEIIFTTPGKHAYVSFYKFFENVQIFQPLKDENLAAPDRTSSLSLFEAQSAPLKGLHVETRARDSSSVDGTASLLASISKLQNVPFLPPTAKSVKRQQNSEVPVLPSSCDDFILDVDLNDADSNNDHAAIASMEKTVASTSCAANDDHDADGNGMDPFQEPEAGNIPDPAYEIRPILSLLGDPSEFDLRGSISKILVDERREVREMPKEYERPSASVLTRRQAHKDSLRGGILNPQDIEVSFENFPYFLSGTTKDVLMISTYAHIKYGKEYAEYASDLPTACPRILLSGPSGSEIYQEMLAKALAKQCGAKLMIVDSLLLPGHKKPISSVEAGITGGSTLSSQAVRRQEVSTATSKSYTFKAGDRVRFLGPSTSSLASLRAPPRGPATGFQGKVLLAFEGNGSSKIGVRFDRSIPDGNDLGGLCEEDHGFFCTASSLRLESSSSDDADKLAINEIFEVAFNESERGSLILFLKDIEKSVSGNTDVYITLKSKLENLPENIVVIASQTQLDNRKEKSHPGGFLFTKFGSNQTALLDLAFPDTFGGRLQDRNTEMPKAVKQITRLFPNKVTIQLPEDEASLVDWKDKLERDTEILKAQANITSIRAVLSKNQLVCPDIEILCIKDQTLPSDSVEKVVGFAFNHHLMNCSEPTVKDNKLIISAESITYGLQLLHEIQNENKSTKKSLKDVVTENEFEKKLLSDVIPPSDIGVSFSDIGALENVKDTLKELVMLPLQRPELFGKGQLTKPTKGILLFGPPGTGKTMLAKAVATEAGANFINISMSSITSKWFGEGEKYVKAVFSLASKIAPSVIFVDEVDSMLGRRENPGEHEAMRKMKNEFMINWDGLRTKDKERVLVLAATNRPFDLDEAVIRRLPRRLMVNLPDSANRSKILSVILAKEEMAEDVDLEAIANMTDGYSGSDLKNLCVTAAHLPIREILEKEKKERSVAQAENRAMPQLYSSTDVRPLNMNDFKTAHDQVCASVASDSSNMNELQQWNELYGEGGSRKKTSLSYFM

SEQ ID NO: 50603 - protein, 1083 aa, Arabidopsis thaliana
  peptide (1)..(1083): Ceres Seq. ID no. 13611881
  misc_feature (818)..(1003): Pfam Name: ATPase family associated with various cellular Pfam Description: ATPase family associated with various cellular
  misc_feature (444)..(575): Homolog of NCBI NO: 34904204 NR Description: P0492F05.26 [Oryza sativa (japonica
  misc_feature (612)..(751): Homolog of NCBI NO: 34904204 NR Description: P0492F05.26 [Oryza sativa (japonica
  misc_feature (743)..(1083): Homolog of NCBI NO: 34904204 NR Description: P0492F05.26 [Oryza sativa (japonica
  misc_feature (641)..(1082): Homolog of NCBI NO: 15234019 NR Description: expressed protein [Arabidopsis thaliana]
  misc_feature (713)..(1083): Homolog of NCBI NO: 7487016 NR Description: hypothetical protein T14P8.7 - Arabidopsis
  misc_feature (392)..(526): Homolog of NCBI NO: 7487017 NR Description: hypothetical protein T14P8.8 - Arabidopsis
  misc_feature (1)..(419): Homolog of NCBI NO: 7487017 NR Description: hypothetical protein T14P8.8 - Arabidopsis
  misc_feature (287)..(401): Homolog of NCBI NO: 33146850 NR Description: putative MSP1(mitochondrial sorting of proteins)
  misc_feature (1)..(83): Homolog of NCBI NO: 33146850 NR Description: putative MSP1(mitochondrial sorting of proteins)
  misc_feature (420)..(1083): Homolog of NCBI NO: 33146850 NR Description: putative MSP1(mitochondrial sorting of proteins)
MRGSVFTVGRRACDLCIRDHSMPNVLCELRQSEHGGPSVASLEIIGNGVLVQVNGKIYQRSTCVHLRGGDEIIFTTPGKHAYVSFYKFFENVQIFQPLKDENLAAPDRTSSLSLFEAQSAPLKGLHVETRARDSSSVDGTASLLASISKLQNVPFLPPTAKSVKRQQNSEVPVLPSSCDDFILDVDLNDADSNNDHAAIASMEKTVASTSCAANDDHDADGNGMDPFQEPEAGNIPDPAYEIRPILSLLGDPSEFDLRGSISKILVDERREVREMPKEYERPSASVLTRRQAHKDSLRGGILNPQDIEVSFENFPYFLSGTTKDVLMISTYAHIKYGKEYAEYASDLPTACPRILLSGPSGSEIYQEMLAKALAKQCGAKLMIVDSLLLPGHKKPISSVEAGITGGSTLSSQAVRRQEVSTATSKSYTFKAGDRVRFLGPSTSSLASLRAPPRGPATGFQGKVLLAFEGNGSSKIGVRFDRSIPDGNDLGGLCEEDHGFFCTASSLRLESSSSDDADKLAINEIFEVAFNESERGSLILFLKDIEKSVSGNTDVYITLKSKLENLPENIVVIASQTQLDNRKEKSHPGGFLFTKFGSNQTALLDLAFPDTFGGRLQDRNTEMPKAVKQITRLFPNKVTIQLPEDEASLVDWKDKLERDTEILKAQANITSIRAVLSKNQLVCPDIEILCIKDQTLPSDSVEKVVGFAFNHHLMNCSEPTVKDNKLIISAESITYGLQLLHEIQNENKSTKKSLKDVVTENEFEKKLLSDVIPPSDIGVSFSDIGALENVKDTLKELVMLPLQRPELFGKGQLTKPTKGILLFGPPGTGKTMLAKAVATEAGANFINISMSSITSKWFGEGEKYVKAVFSLASKIAPSVIFVDEVDSMLGRRENPGEHEAMRKMKNEFMINWDGLRTKDKERVLVLAATNRPFDLDEAVIRRLPRRLMVNLPDSANRSKILSVILAKEEMAEDVDLEAIANMTDGYSGSDLKNLCVTAAHLPIREILEKEKKERSVAQAENRAMPQLYSSTDVRPLNMNDFKTAHDQVCASVASDSSNMNELQQWNELYGEGGSRKKTSLSYFM

SEQ ID NO: 50604 - DNA, 1253 bp, Arabidopsis thaliana
  misc_feature (1)..(1253): Ceres Seq. ID no. 15179691
  misc_feature: MA Experiment ID: 20000794 Result: Down-regulated in Transcription
  misc_feature: MA Experiment 20000794 PARAMETER Experiment Name: At_Petals_P Parameter: Age (day) Value: 23-25 days
  misc_feature: MA Experiment 20000794 PARAMETER Experiment Name: At_Petals_P Parameter: Plant Line Value: WS
  misc_feature: MA Experiment 20000794 PARAMETER Experiment Name: At_Petals_P Parameter: Tissue Value: Petals vs. Whole plant
gttcaatcatcatcatcactcatctgtcaaattaaaccactccactcgaccactccaattcaaaactcgccattgatacacgagagatagagagagagatttgtgtgagagaaatccatggcggaatcttgcagagtgaggaggataaagctaggaagccaaggcctagaggtatcggcgcaaggccttggttgcatgggactcaccggtcattacggtgcttccaagccggaaactgaagccatcgctctcatccaccacgctattcactccggtgttactttccttgacacttctgacatgtatggtcctgaaaccaatgaaattctcctcggaaaggctcttaaggatggtgtgagggagaaagtggagcttgcgaccaaatttggaatcagttatgcagagggaaacagagagattaagggagatcctgcttatgttagagctgcctgtgaggctagtttaaagagactagatgttacctgcattgatctgtattatcagcatcggattgatactcgtgttcctattgaaatcactatgggagaactgaagaagctaattgaagagggtaaaataaagtacataggtttgtctgaggcctctgcctcaactatcagaagagcgcatactgttcacccaatcaccgccgtgcagttagagtggtccttgtggacaagagacgtggaagaagaaattgtcccaacctgcagggaacttggaattgggattgtttcttacagtcctctaggaagaggtttctttgcatcaggacctaagcttgttgagaacctagacaataatgacttcagaaaggctctaccaagattccaacaggaaaacttggatcacaacaagattctctatgagaaagtttctgcaatgtctgagaagaaagggtgcactcccgcacaactagccctcgcttgggttcaccaccagggagatgatgtttgtcccattccaggaaccactaagattgaaaacctcaaccagaacattagagctttatcagtgaaactcactcctgaagagatgtctgagcttgagaccattgcccaaccagagtctgtgaaaggagaaagatacatggccacagtgccaaccttcaaaaactccgacactccaccattgtcttcttggaatgctgtgtaaaactgtctgagagtttctctggccaaaggatgatttatgtatagaatatgttattttcttctacccatcttatatatacggtgaccattctctgtaag

SEQ ID NO: 50605 - protein, 345 aa, Arabidopsis thaliana
  peptide (1)..(345): Ceres Seq. ID no. 15179692
  misc_feature (3)..(229): Homolog of NCBI NO: 15219805 NR Description: aldo/keto reductase family [Arabidopsis thaliana]
  misc_feature (1)..(344): Homolog of NCBI NO: 15220214 NR Description: aldo/keto reductase family [Arabidopsis thaliana]
  misc_feature (10)..(344): Homolog of NCBI NO: 25316214 NR Description: hypothetical protein F8A5.20 [imported] -
  misc_feature (1)..(344): Homolog of NCBI NO: 30696451 NR Description: aldo/keto reductase family [Arabidopsis thaliana]
  misc_feature (1)..(344): Homolog of NCBI NO: 30102704 NR Description: At1g60680 [Arabidopsis thaliana]
  misc_feature (1)..(344): Homolog of NCBI NO: 25316216 NR Description: hypothetical protein F8A5.24 [imported] -
  misc_feature (1)..(344): Homolog of NCBI NO: 6562980 NR Description: auxin-induced atb2 [Arabidopsis thaliana]
  misc_feature (1)..(344): Homolog of NCBI NO: 30696459 NR Description: aldo/keto reductase family [Arabidopsis thaliana]
  misc_feature (1)..(344): Homolog of NCBI NO: 18406861 NR Description: aldo/keto reductase family [Arabidopsis thaliana]
  misc_feature (1)..(345): Homolog of NCBI NO: 15219786 NR Description: aldo/keto reductase family [Arabidopsis thaliana]
MAESCRVRRIKLGSQGLEVSAQGLGCMGLTGHYGASKPETEAIALIHHAIHSGVTFLDTSDMYGPETNEILLGKALKDGVREKVELATKFGISYAEGNREIKGDPAYVRAACEASLKRLDVTCIDLYYQHRIDTRVPIEITMGELKKLIEEGKIKYIGLSEASASTIRRAHTVHPITAVQLEWSLWTRDVEEEIVPTCRELGIGIVSYSPLGRGFFASGPKLVENLDNNDFRKALPRFQQENLDHNKILYEKVSAMSEKKGCTPAQLALAWVHHQGDDVCPIPGTTKIENLNQNIRALSVKLTPEEMSELETIAQPESVKGERYMATVPTFKNSDTPPLSSWNAV

SEQ ID NO: 50606 - protein, 319 aa, Arabidopsis thaliana
  peptide (1)..(319): Ceres Seq. ID no. 15179693
  misc_feature (1)..(203): Homolog of NCBI NO: 15219805 NR Description: aldo/keto reductase family [Arabidopsis thaliana]
  misc_feature (1)..(318): Homolog of NCBI NO: 15220214 NR Description: aldo/keto reductase family [Arabidopsis thaliana]
  misc_feature (1)..(318): Homolog of NCBI NO: 25316214 NR Description: hypothetical protein F8A5.20 [imported] -
  misc_feature (1)..(318): Homolog of NCBI NO: 30696451 NR Description: aldo/keto reductase family [Arabidopsis thaliana]
  misc_feature (1)..(318): Homolog of NCBI NO: 30102704 NR Description: At1g60680 [Arabidopsis thaliana]
  misc_feature (1)..(318): Homolog of NCBI NO: 25316216 NR Description: hypothetical protein F8A5.24 [imported] -
  misc_feature (1)..(318): Homolog of NCBI NO: 6562980 NR Description: auxin-induced atb2 [Arabidopsis thaliana]
  misc_feature (1)..(318): Homolog of NCBI NO: 30696459 NR Description: aldo/keto reductase family [Arabidopsis thaliana]
  misc_feature (1)..(318): Homolog of NCBI NO: 18406861 NR Description: aldo/keto reductase family [Arabidopsis thaliana]
  misc_feature (1)..(319): Homolog of NCBI NO: 15219786 NR Description: aldo/keto reductase family [Arabidopsis thaliana]
MGLTGHYGASKPETEAIALIHHAIHSGVTFLDTSDMYGPETNEILLGKALKDGVREKVELATKFGISYAEGNREIKGDPAYVRAACEASLKRLDVTCIDLYYQHRIDTRVPIEITMGELKKLIEEGKIKYIGLSEASASTIRRAHTVHPITAVQLEWSLWTRDVEEEIVPTCRELGIGIVSYSPLGRGFFASGPKLVENLDNNDFRKALPRFQQENLDHNKILYEKVSAMSEKKGCTPAQLALAWVHHQGDDVCPIPGTTKIENLNQNIRALSVKLTPEEMSELETIAQPESVKGERYMATVPTFKNSDTPPLSSWNAV

SEQ ID NO: 50607 - protein, 284 aa, Arabidopsis thaliana
  peptide (1)..(284): Ceres Seq. ID no. 15179694
  misc_feature (1)..(168): Homolog of NCBI NO: 15219805 NR Description: aldo/keto reductase family [Arabidopsis thaliana]
  misc_feature (1)..(283): Homolog of NCBI NO: 15220214 NR Description: aldo/keto reductase family [Arabidopsis thaliana]
  misc_feature (1)..(283): Homolog of NCBI NO: 25316214 NR Description: hypothetical protein F8A5.20 [imported] -
  misc_feature (1)..(283): Homolog of NCBI NO: 30696451 NR Description: aldo/keto reductase family [Arabidopsis thaliana]
  misc_feature (1)..(283): Homolog of NCBI NO: 30102704 NR Description: At1g60680 [Arabidopsis thaliana]
  misc_feature (1)..(283): Homolog of NCBI NO: 25316216 NR Description: hypothetical protein F8A5.24 [imported] -
  misc_feature (1)..(283): Homolog of NCBI NO: 6562980 NR Description: auxin-induced atb2 [Arabidopsis thaliana]
  misc_feature (1)..(283): Homolog of NCBI NO: 30696459 NR Description: aldo/keto reductase family [Arabidopsis thaliana]
  misc_feature (1)..(283): Homolog of NCBI NO: 18406861 NR Description: aldo/keto reductase family [Arabidopsis thaliana]
  misc_feature (1)..(284): Homolog of NCBI NO: 15219786 NR Description: aldo/keto reductase family [Arabidopsis thaliana]
MYGPETNEILLGKALKDGVREKVELATKFGISYAEGNREIKGDPAYVRAACEASLKRLDVTCIDLYYQHRIDTRVPIEITMGELKKLIEEGKIKYIGLSEASASTIRRAHTVHPITAVQLEWSLWTRDVEEEIVPTCRELGIGIVSYSPLGRGFFASGPKLVENLDNNDFRKALPRFQQENLDHNKILYEKVSAMSEKKGCTPAQLALAWVHHQGDDVCPIPGTTKIENLNQNIRALSVKLTPEEMSELETIAQPESVKGERYMATVPTFKNSDTPPLSSWNAV

SEQ ID NO: 50608 - DNA, 1647 bp, Arabidopsis thaliana
  misc_feature (1)..(1647): Ceres Seq. ID no. 13592410
  misc_feature: MA Experiment ID: 20000171 Result: Down-regulated in Transcription
  misc_feature: MA Experiment 20000171 PARAMETER Experiment Name: At_42deg_Heat_P Parameter: Age (day) Value: 14
  misc_feature: MA Experiment 20000171 PARAMETER Experiment Name: At_42deg_Heat_P Parameter: Organism Value: A. thaliana
  misc_feature: MA Experiment 20000171 PARAMETER Experiment Name: At_42deg_Heat_P Parameter: Plant Line Value: WS
  misc_feature: MA Experiment 20000171 PARAMETER Experiment Name: At_42deg_Heat_P Parameter: Temperature (deg C) Value: 42 vs. 22
  misc_feature: MA Experiment 20000171 PARAMETER Experiment Name: At_42deg_Heat_P Parameter: Timepoint (hr) Value: 1
  misc_feature: MA Experiment 20000171 PARAMETER Experiment Name: At_42deg_Heat_P Parameter: Tissue Value: Aerial
  misc_feature: MA Experiment ID: 20000173 Result: Down-regulated in Transcription
  misc_feature: MA Experiment 20000173 PARAMETER Experiment Name: At_42deg_Heat_P Parameter: Age (day) Value: 14
  misc_feature: MA Experiment 20000173 PARAMETER Experiment Name: At_42deg_Heat_P Parameter: Organism Value: A. thaliana
  misc_feature: MA Experiment 20000173 PARAMETER Experiment Name: At_42deg_Heat_P Parameter: Plant Line Value: WS
  misc_feature: MA Experiment 20000173 PARAMETER Experiment Name: At_42deg_Heat_P Parameter: Temperature (deg C) Value: 42 vs. 22
  misc_feature: MA Experiment 20000173 PARAMETER Experiment Name: At_42deg_Heat_P Parameter: Timepoint (hr) Value: 6
  misc_feature: MA Experiment 20000173 PARAMETER Experiment Name: At_42deg_Heat_P Parameter: Tissue Value: Aerial
  misc_feature: MA Experiment ID: 20000180 Result: Up-regulated in Transcription
  misc_feature: MA Experiment 20000180 PARAMETER Experiment Name: At_Germinating_Seeds_P Parameter: Age (hr) Value: 24 vs. 0
  misc_feature: MA Experiment 20000180 PARAMETER Experiment Name: At_Germinating_Seeds_P Parameter: Tissue Value: Germinating Seeds
  misc_feature: MA Experiment ID: 20000234 Result: Up-regulated in Transcription
  misc_feature: MA Experiment 20000234 PARAMETER Experiment Name: At_Siliques_P Parameter: Age (day) Value: 21
  misc_feature: MA Experiment 20000234 PARAMETER Experiment Name: At_Siliques_P Parameter: Organism Value: A. thaliana
  misc_feature: MA Experiment 20000234 PARAMETER Experiment Name: At_Siliques_P Parameter: Plant Line Value: WS
  misc_feature: MA Experiment 20000234 PARAMETER Experiment Name: At_Siliques_P Parameter: Tissue Value: Less Than 5mm Siliques vs. Whole Plant
  misc_feature: MA Experiment ID: 20000235 Result: Up-regulated in Transcription
  misc_feature: MA Experiment 20000235 PARAMETER Experiment Name: At_Siliques_P Parameter: Age (day) Value: 21
  misc_feature: MA Experiment 20000235 PARAMETER Experiment Name: At_Siliques_P Parameter: Organism Value: A. thaliana
  misc_feature: MA Experiment 20000235 PARAMETER Experiment Name: At_Siliques_P Parameter: Plant Line Value: WS
  misc_feature: MA Experiment 20000235 PARAMETER Experiment Name: At_Siliques_P Parameter: Tissue Value: 5-10mm Siliques vs. Whole Plant
  misc_feature: MA Experiment ID: 20000264 Result: Up-regulated in Transcription
  misc_feature: MA Experiment 20000264 PARAMETER Experiment Name: At_Open_Flower_P Parameter: Age (day) Value: 21
  misc_feature: MA Experiment 20000264 PARAMETER Experiment Name: At_Open_Flower_P Parameter: Plant Line Value: WS
  misc_feature: MA Experiment 20000264 PARAMETER Experiment Name: At_Open_Flower_P Parameter: Tissue Value: Open Flower vs. Whole Plant
  misc_feature: MA Experiment ID: 20000265 Result: Up-regulated in Transcription
  misc_feature: MA Experiment 20000265 PARAMETER Experiment Name: At_Open_Flower_P Parameter: Age (day) Value: 21
  misc_feature: MA Experiment 20000265 PARAMETER Experiment Name: At_Open_Flower_P Parameter: Plant Line Value: WS
  misc_feature: MA Experiment 20000265 PARAMETER Experiment Name: At_Open_Flower_P Parameter: Tissue Value: Closed Flower vs. Whole Plant
  misc_feature: MA Experiment ID: 20000286 Result: Up-regulated in Transcription
  misc_feature: MA Experiment 20000286 PARAMETER Experiment Name: At_Open_Flower_P Parameter: Age (day) Value: 21
  misc_feature: MA Experiment 20000286 PARAMETER Experiment Name: At_Open_Flower_P Parameter: Plant Line Value: WS
  misc_feature: MA Experiment 20000286 PARAMETER Experiment Name: At_Open_Flower_P Parameter: Tissue Value: Half Open vs. Whole Plant
  misc_feature: MA Experiment ID: 20000436 Result: Down-regulated in Transcription
  misc_feature: MA Experiment 20000436 PARAMETER Experiment Name: At_Drought_P Parameter: Age (day) Value: 7
  misc_feature: MA Experiment 20000436 PARAMETER Experiment Name: At_Drought_P Parameter: Organism Value: A. thaliana
  misc_feature: MA Experiment 20000436 PARAMETER Experiment Name: At_Drought_P Parameter: Plant Line Value: WS
  misc_feature: MA Experiment 20000436 PARAMETER Experiment Name: At_Drought_P Parameter: Timepoint (hr) Value: 12
  misc_feature: MA Experiment 20000436 PARAMETER Experiment Name: At_Drought_P Parameter: Tissue Value: Whole Plant
  misc_feature: MA Experiment 20000436 PARAMETER Experiment Name: At_Drought_P Parameter: Treatment Value: Drought vs. No Drought
  misc_feature: MA Experiment ID: 20000437 Result: Down-regulated in Transcription
  misc_feature: MA Experiment 20000437 PARAMETER Experiment Name: At_Drought_P Parameter: Age (day) Value: 8
  misc_feature: MA Experiment 20000437 PARAMETER Experiment Name: At_Drought_P Parameter: Organism Value: A. thaliana
  misc_feature: MA Experiment 20000437 PARAMETER Experiment Name: At_Drought_P Parameter: Plant Line Value: WS
  misc_feature: MA Experiment 20000437 PARAMETER Experiment Name: At_Drought_P Parameter: Timepoint (hr) Value: 24
  misc_feature: MA Experiment 20000437 PARAMETER Experiment Name: At_Drought_P Parameter: Tissue Value: Whole Plant
  misc_feature: MA Experiment 20000437 PARAMETER Experiment Name: At_Drought_P Parameter: Treatment Value: Drought vs. No Drought
  misc_feature: MA Experiment ID: 20000453 Result: Down-regulated in Transcription
  misc_feature: MA Experiment 20000453 PARAMETER Experiment Name: At_100uM_ABA_P Parameter: Age (day) Value: 15
  misc_feature: MA Experiment 20000453 PARAMETER Experiment Name: At_100uM_ABA_P Parameter: Organism Value: A. thaliana
  misc_feature: MA Experiment 20000453 PARAMETER Experiment Name: At_100uM_ABA_P Parameter: Plant Line Value: WS
  misc_feature: MA Experiment 20000453 PARAMETER Experiment Name: At_100uM_ABA_P Parameter: Timepoint (hr) Value: 24
  misc_feature: MA Experiment 20000453 PARAMETER Experiment Name: At_100uM_ABA_P Parameter: Tissue Value: Aerial
  misc_feature: MA Experiment 20000453 PARAMETER Experiment Name: At_100uM_ABA_P Parameter: Treatment Value: 100uM ABA vs. No Treatment
  misc_feature: MA Experiment ID: 20001248 Result: Down-regulated in Transcription
  misc_feature: MA Experiment 20001248 PARAMETER Experiment Name: At_Far-red-induction_P Parameter: Age (day) Value: 7
  misc_feature: MA Experiment 20001248 PARAMETER Experiment Name: At_Far-red-induction_P Parameter: Light Value: Far-red vs. White
  misc_feature: MA Experiment 20001248 PARAMETER Experiment Name: At_Far-red-induction_P Parameter: Organism Value: A. thaliana
  misc_feature: MA Experiment 20001248 PARAMETER Experiment Name: At_Far-red-induction_P Parameter: Plant Line Value: Columbia
  misc_feature: MA Experiment 20001248 PARAMETER Experiment Name: At_Far-red-induction_P Parameter: Timepoint (hr) Value: 4
  misc_feature: MA Experiment 20001248 PARAMETER Experiment Name: At_Far-red-induction_P Parameter: Tissue Value: Whole Plant
  misc_feature: MA Experiment ID: 20001450 Result: Down-regulated in Transcription
  misc_feature: MA Experiment 20001450 PARAMETER Experiment Name: At_Far-red-induction_P Parameter: Age (day) Value: 7
  misc_feature: MA Experiment 20001450 PARAMETER Experiment Name: At_Far-red-induction_P Parameter: Light Value: Far-red vs. White
  misc_feature: MA Experiment 20001450 PARAMETER Experiment Name: At_Far-red-induction_P Parameter: Organism Value: A. thaliana
  misc_feature: MA Experiment 20001450 PARAMETER Experiment Name: At_Far-red-induction_P Parameter: Plant Line Value: Columbia
  misc_feature: MA Experiment 20001450 PARAMETER Experiment Name: At_Far-red-induction_P Parameter: Timepoint (hr) Value: 8
  misc_feature: MA Experiment 20001450 PARAMETER Experiment Name: At_Far-red-induction_P Parameter: Tissue Value: Whole Plant
  misc_feature: MA Experiment ID: 20001451 Result: Down-regulated in Transcription
  misc_feature: MA Experiment 20001451 PARAMETER Experiment Name: At_Far-red-induction_P Parameter: Age (day) Value: 7
  misc_feature: MA Experiment 20001451 PARAMETER Experiment Name: At_Far-red-induction_P Parameter: Light Value: Far-red vs. White
  misc_feature: MA Experiment 20001451 PARAMETER Experiment Name: At_Far-red-induction_P Parameter: Organism Value: A. thaliana
  misc_feature: MA Experiment 20001451 PARAMETER Experiment Name: At_Far-red-induction_P Parameter: Plant Line Value: Columbia
  misc_feature: MA Experiment 20001451 PARAMETER Experiment Name: At_Far-red-induction_P Parameter: Timepoint (hr) Value: 24
  misc_feature: MA Experiment 20001451 PARAMETER Experiment Name: At_Far-red-induction_P Parameter: Tissue Value: Whole Plant
atgtttaaaccccaacatatgtatgacagggaatttggtaccggcaacggctacagcaacgggaacggctacaccaatggaaacggccacaccaacggaaacggcaattacaacggcaatggccacgttaatggtaacggaaaagctaacggagccaaggtggtaaagatgaaaccaatggacagtgagttgctgagagagcaaggtcacataatggttgattttattgctgattattacaaaaaccttcaagactcgcctcaagatttccctgttctgtcccaagttcagcctggttatctccgtgacatgttgcctgattcagcacctgaacgacctgaatcgttaaaagaacttctcgacgatgtttcgaagaagataatgccggggataactcattggcaaagcccgagttactttgcatactatgcatcaagcacgagtgtggctggattcttaggagagatgcttaacgccggcctgagcgtcgtcggttttacctggctcacttctcctgccgctactgagctcgaaatcatcgttcttgattggcttgctaaattgctacaactccccgaccattttctctccacaggaaatggaggaggagtaatccaagggacaggatgtgaagcagtgcttgtggtagtattagctgctagagacagaattctgaagaaagttggcaaaacattacttcctcaacttgttgtctatggctctgaccaaacccattctagtttccgaaaagcttgtctgattggtgggatacatgaagaaaacattaggctgctcaaaactgattcttccacaaactatggaatgcctccagaatcacttgaggaagctatttctcatgatctcgctaagggttttatccctttcttcatttgtgccactgttggcacaacgtcttcagcagcggttgatcctttggtcccattggggaacatcgcaaagaaatatgggatatggttgcatgtggatgcagcttatgcagggaatgcatgtatatgtccagaatatcgaaaatttattgacgggattgaaaacgcagactcctttaacatgaatgctcataaatggttatttgctaatcaaacttgttcacctctttgggttaaggatcgatactctctcattgatgctctcaaaacaaatcccgagtatctagaattcaaggtttccaaaaaagatacggtcgtaaattataaagattggcaaatttctctctctcggagattcagatcactgaagttatggatggttttacggctctatggttccgagaacttaagaaactttataagagaccatgtcaatctcgctaagcattttgaagattatgtagctcaagatccaagttttgaggttgtcactactcggtacttttcactcgtttgctttcgccttgcgccagttgacggcgatgaagaccaatgtaacgaacgtaaccgtgaactgcttgcggctgttaactccactggcaagatattcatctctcacacggctctatctggaaaattcgttttacgatttgctgttggtgcaccgttaacggaagagaagcatgtcactgaagcatggcagattatacagaaacatgcctccaaatttacacgcaacgaccattattaataatatttc

SEQ ID NO: 50609 - protein, 545 aa, Arabidopsis thaliana
  peptide (1)..(545): Ceres Seq. ID no. 15221098
  misc_feature (98)..(472): Pfam Name: Pyridoxal-dependent decarboxylase conserved domain Pfam Description: Pyridoxal-dependent decarboxylase conserved
  misc_feature (57)..(536): Homolog of NCBI NO: 1174828 NR Description: TYROSINE DECARBOXYLASE 2
  misc_feature (59)..(535): Homolog of NCBI NO: 3282527 NR Description: tyrosine/dopa decarboxylase [Papaver somniferum]
  misc_feature (59)..(535): Homolog of NCBI NO: 3282523 NR Description: tyrosine/dopa decarboxylase [Papaver somniferum]
  misc_feature (477)..(536): Homolog of NCBI NO: 12620328 NR Description: tyrosine/dopa decarboxylase [Thalictrum flavum
  misc_feature (50)..(473): Homolog of NCBI NO: 12620328 NR Description: tyrosine/dopa decarboxylase [Thalictrum flavum
  misc_feature (43)..(538): Homolog of NCBI NO: 33147039 NR Description: putative tyrosine decarboxylase
  misc_feature (50)..(537): Homolog of NCBI NO: 5911780 NR Description: tyrosine decarboxylase [Arabidopsis thaliana]
  misc_feature (60)..(537): Homolog of NCBI NO: 25290992 NR Description: probable tyrosine decarboxylase [imported] -
  misc_feature (50)..(537): Homolog of NCBI NO: 30680963 NR Description: tyrosine decarboxylase -related [Arabidopsis
  misc_feature (1)..(545): Homolog of NCBI NO: 15235393 NR Description: aromatic amino-acid decarboxylase - like protein
MFKPQHMYDREFGTGNGYSNGNGYTNGNGHTNGNGNYNGNGHVNGNGKANGAKVVKMKPMDSELLREQGHIMVDFIADYYKNLQDSPQDFPVLSQVQPGYLRDMLPDSAPERPESLKELLDDVSKKIMPGITHWQSPSYFAYYASSTSVAGFLGEMLNAGLSVVGFTWLTSPAATELEIIVLDWLAKLLQLPDHFLSTGNGGGVIQGTGCEAVLVVVLAARDRILKKVGKTLLPQLVVYGSDQTHSSFRKACLIGGIHEENIRLLKTDSSTNYGMPPESLEEAISHDLAKGFIPFFICATVGTTSSAAVDPLVPLGNIAKKYGIWLHVDAAYAGNACICPEYRKFIDGIENADSFNMNAHKWLFANQTCSPLWVKDRYSLIDALKTNPEYLEFKVSKKDTVVNYKDWQISLSRRFRSLKLWMVLRLYGSENLRNFIRDHVNLAKHFEDYVAQDPSFEVVTTRYFSLVCFRLAPVDGDEDQCNERNRELLAAVNSTGKIFISHTALSGKFVLRFAVGAPLTEEKHVTEAWQIIQKHASKFTRNDHY

SEQ ID NO: 50610 - protein, 539 aa, Arabidopsis thaliana
  peptide (1)..(539): Ceres Seq. ID no. 15221099
  misc_feature (92)..(466): Pfam Name: Pyridoxal-dependent decarboxylase conserved domain Pfam Description: Pyridoxal-dependent decarboxylase conserved
  misc_feature (51)..(530): Homolog of NCBI NO: 1174828 NR Description: TYROSINE DECARBOXYLASE 2
  misc_feature (53)..(529): Homolog of NCBI NO: 3282527 NR Description: tyrosine/dopa decarboxylase [Papaver somniferum]
  misc_feature (53)..(529): Homolog of NCBI NO: 3282523 NR Description: tyrosine/dopa decarboxylase [Papaver somniferum]
  misc_feature (471)..(530): Homolog of NCBI NO: 12620328 NR Description: tyrosine/dopa decarboxylase [Thalictrum flavum
  misc_feature (44)..(467): Homolog of NCBI NO: 12620328 NR Description: tyrosine/dopa decarboxylase [Thalictrum flavum
  misc_feature (37)..(532): Homolog of NCBI NO: 33147039 NR Description: putative tyrosine decarboxylase
  misc_feature (44)..(531): Homolog of NCBI NO: 5911780 NR Description: tyrosine decarboxylase [Arabidopsis thaliana]
  misc_feature (54)..(531): Homolog of NCBI NO: 25290992 NR Description: probable tyrosine decarboxylase [imported] -
  misc_feature (44)..(531): Homolog of NCBI NO: 30680963 NR Description: tyrosine decarboxylase -related [Arabidopsis
  misc_feature (1)..(539): Homolog of NCBI NO: 15235393 NR Description: aromatic amino-acid decarboxylase - like protein
MYDREFGTGNGYSNGNGYTNGNGHTNGNGNYNGNGHVNGNGKANGAKVVKMKPMDSELLREQGHIMVDFIADYYKNLQDSPQDFPVLSQVQPGYLRDMLPDSAPERPESLKELLDDVSKKIMPGITHWQSPSYFAYYASSTSVAGFLGEMLNAGLSVVGFTWLTSPAATELEIIVLDWLAKLLQLPDHFLSTGNGGGVIQGTGCEAVLVVVLAARDRILKKVGKTLLPQLVVYGSDQTHSSFRKACLIGGIHEENIRLLKTDSSTNYGMPPESLEEAISHDLAKGFIPFFICATVGTTSSAAVDPLVPLGNIAKKYGIWLHVDAAYAGNACICPEYRKFIDGIENADSFNMNAHKWLFANQTCSPLWVKDRYSLIDALKTNPEYLEFKVSKKDTVVNYKDWQISLSRRFRSLKLWMVLRLYGSENLRNFIRDHVNLAKHFEDYVAQDPSFEVVTTRYFSLVCFRLAPVDGDEDQCNERNRELLAAVNSTGKIFISHTALSGKFVLRFAVGAPLTEEKHVTEAWQIIQKHASKFTRNDHY

SEQ ID NO: 50611 - protein, 489 aa, Arabidopsis thaliana
  peptide (1)..(489): Ceres Seq. ID no. 15221100
  misc_feature (42)..(416): Pfam Name: Pyridoxal-dependent decarboxylase conserved domain Pfam Description: Pyridoxal-dependent decarboxylase conserved
  misc_feature (1)..(480): Homolog of NCBI NO: 1174828 NR Description: TYROSINE DECARBOXYLASE 2
  misc_feature (3)..(479): Homolog of NCBI NO: 3282527 NR Description: tyrosine/dopa decarboxylase [Papaver somniferum]
  misc_feature (3)..(479): Homolog of NCBI NO: 3282523 NR Description: tyrosine/dopa decarboxylase [Papaver somniferum]
  misc_feature (421)..(480): Homolog of NCBI NO: 12620328 NR Description: tyrosine/dopa decarboxylase [Thalictrum flavum
  misc_feature (1)..(417): Homolog of NCBI NO: 12620328 NR Description: tyrosine/dopa decarboxylase [Thalictrum flavum
  misc_feature (1)..(482): Homolog of NCBI NO: 33147039 NR Description: putative tyrosine decarboxylase
  misc_feature (1)..(481): Homolog of NCBI NO: 5911780 NR Description: tyrosine decarboxylase [Arabidopsis thaliana]
  misc_feature (4)..(481): Homolog of NCBI NO: 25290992 NR Description: probable tyrosine decarboxylase [imported] -
  misc_feature (1)..(481): Homolog of NCBI NO: 30680963 NR Description: tyrosine decarboxylase -related [Arabidopsis
  misc_feature (1)..(489): Homolog of NCBI NO: 15235393 NR Description: aromatic amino-acid decarboxylase - like protein
MKPMDSELLREQGHIMVDFIADYYKNLQDSPQDFPVLSQVQPGYLRDMLPDSAPERPESLKELLDDVSKKIMPGITHWQSPSYFAYYASSTSVAGFLGEMLNAGLSVVGFTWLTSPAATELEIIVLDWLAKLLQLPDHFLSTGNGGGVIQGTGCEAVLVVVLAARDRILKKVGKTLLPQLVVYGSDQTHSSFRKACLIGGIHEENIRLLKTDSSTNYGMPPESLEEAISHDLAKGFIPFFICATVGTTSSAAVDPLVPLGNIAKKYGIWLHVDAAYAGNACICPEYRKFIDGIENADSFNMNAHKWLFANQTCSPLWVKDRYSLIDALKTNPEYLEFKVSKKDTVVNYKDWQISLSRRFRSLKLWMVLRLYGSENLRNFIRDHVNLAKHFEDYVAQDPSFEVVTTRYFSLVCFRLAPVDGDEDQCNERNRELLAAVNSTGKIFISHTALSGKFVLRFAVGAPLTEEKHVTEAWQIIQKHASKFTRNDHY

SEQ ID NO: 50612 - DNA, 1159 bp, Arabidopsis thaliana
  misc_feature (1)..(1159): Ceres Seq. ID no. 13588871
  misc_feature: MA Experiment ID: 20000440 Result: Up-regulated in Transcription
  misc_feature: MA Experiment 20000440 PARAMETER Experiment Name: At_Closed-Flower__Sub_P Parameter: Tissue Value: Closed Flower vs. Whole Plant
gaagagagaaagattacaagaaacaaatatggtagatcaaaataaagcatttggttgggcggccaacgacgaatcgggcgtcctctctccatttcatttctctagaagagaaaatggtgagaacgatgtaacagtgaagatcttgttctgtggtgtttgtcactctgatcttcataccatcaagaaccattggggattctctcgttaccccattattcccgggcatgaaatcgttggaatagcaacaaaagttgggaagaatgtgacaaagtttaaagaaggagaccgagtaggagtaggcgtaataatcggttcatgccaatcatgtgaatcatgtaaccaagacttagaaaactattgtcctaaagtcgttttcacatacaactctcgttcctctgacggaaccagcagaaaccaaggtggttattccgacgtaattgttgtcgatcaccgctttgtcctaagcattcccgatggtttaccaagcgattcaggcgcgccgctgctctgtgctggaatcactgtgtacagtcccatgaagtattatggcatgactaaagaatcagggaaacgtttaggtgtgaatggacttggtggacttggtcatatcgctgttaagattggtaaagcctttggtttaagagttactgtgattagtaggtcatcagaaaaagagagagaagcaattgatcggcttggtgctgattcgtttcttgttacaacggattctcaaaagatgaaggaagcggttggaactatggatttcattatcgatacggtatcagcagaacatgctctattaccgttgtttagtttgcttaaagtgaatggaaagcttgtggctttaggcttaccggagaagccactcgacctgccaattttctctctagttctcggaaggaaaatggtgggaggaagtcagattggagggatgaaggagacacaagagatgcttgagttctgtgccaagcataaaatcgtttcggatattgagctcataaagatgagtgatatcaactctgcgatggaccgtttggctaaatctgatgtcaggtaccggttcgtgatcgatgtggccaactctttactccctgagtcgtcagctgagattttaacggagcaggtggaccatggagtctcgatcacgtctagattctga

SEQ ID NO: 50613 - protein, 385 aa, Arabidopsis thaliana
  peptide (1)..(385): Ceres Seq. ID no. 13588872
  misc_feature (13)..(362): Homolog of NCBI NO: 10720093 NR Description: Probable mannitol dehydrogenase (NAD-dependent
  misc_feature (14)..(362): Homolog of NCBI NO: 3913193 NR Description: Probable mannitol dehydrogenase 1 (NAD-dependent
  misc_feature (15)..(361): Homolog of NCBI NO: 10720088 NR Description: Probable mannitol dehydrogenase (NAD-dependent
  misc_feature (13)..(362): Homolog of NCBI NO: 22475166 NR Description: putative sinapyl alcohol dehydrogenase
  misc_feature (14)..(364): Homolog of NCBI NO: 1168728 NR Description: Probable mannitol dehydrogenase (NAD-dependent
  misc_feature (14)..(364): Homolog of NCBI NO: 21592964 NR Description: cinnamyl-alcohol dehydrogenase CAD1 [Arabidopsis
  misc_feature (14)..(364): Homolog of NCBI NO: 15235022 NR Description: mannitol dehydrogenase, putative [Arabidopsis
  misc_feature (14)..(364): Homolog of NCBI NO: 2146727 NR Description: cinnamyl-alcohol dehydrogenase (EC 1.1.1.195)
  misc_feature (10)..(385): Homolog of NCBI NO: 15227106 NR Description: mannitol dehydrogenase, putative [Arabidopsis
  misc_feature (10)..(385): Homolog of NCBI NO: 15227091 NR Description: mannitol dehydrogenase, putative [Arabidopsis
KRERLQETNMVDQNKAFGWAANDESGVLSPFHFSRRENGENDVTVKILFCGVCHSDLHTIKNHWGFSRYPIIPGHEIVGIATKVGKNVTKFKEGDRVGVGVIIGSCQSCESCNQDLENYCPKVVFTYNSRSSDGTSRNQGGYSDVIVVDHRFVLSIPDGLPSDSGAPLLCAGITVYSPMKYYGMTKESGKRLGVNGLGGLGHIAVKIGKAFGLRVTVISRSSEKEREAIDRLGADSFLVTTDSQKMKEAVGTMDFIIDTVSAEHALLPLFSLLKVNGKLVALGLPEKPLDLPIFSLVLGRKMVGGSQIGGMKETQEMLEFCAKHKIVSDIELIKMSDINSAMDRLAKSDVRYRFVIDVANSLLPESSAEILTEQVDHGVSITSRF

SEQ ID NO: 50614 - protein, 376 aa, Arabidopsis thaliana
  peptide (1)..(376): Ceres Seq. ID no. 13588873
  misc_feature (4)..(353): Homolog of NCBI NO: 10720093 NR Description: Probable mannitol dehydrogenase (NAD-dependent
  misc_feature (5)..(353): Homolog of NCBI NO: 3913193 NR Description: Probable mannitol dehydrogenase 1 (NAD-dependent
  misc_feature (6)..(352): Homolog of NCBI NO: 10720088 NR Description: Probable mannitol dehydrogenase (NAD-dependent
  misc_feature (4)..(353): Homolog of NCBI NO: 22475166 NR Description: putative sinapyl alcohol dehydrogenase
  misc_feature (5)..(355): Homolog of NCBI NO: 1168728 NR Description: Probable mannitol dehydrogenase (NAD-dependent
  misc_feature (5)..(355): Homolog of NCBI NO: 21592964 NR Description: cinnamyl-alcohol dehydrogenase CAD1 [Arabidopsis
  misc_feature (5)..(355): Homolog of NCBI NO: 15235022 NR Description: mannitol dehydrogenase, putative [Arabidopsis
  misc_feature (5)..(355): Homolog of NCBI NO: 2146727 NR Description: cinnamyl-alcohol dehydrogenase (EC 1.1.1.195)
  misc_feature (1)..(376): Homolog of NCBI NO: 15227106 NR Description: mannitol dehydrogenase, putative [Arabidopsis
  misc_feature (1)..(376): Homolog of NCBI NO: 15227091 NR Description: mannitol dehydrogenase, putative [Arabidopsis
MVDQNKAFGWAANDESGVLSPFHFSRRENGENDVTVKILFCGVCHSDLHTIKNHWGFSRYPIIPGHEIVGIATKVGKNVTKFKEGDRVGVGVIIGSCQSCESCNQDLENYCPKVVFTYNSRSSDGTSRNQGGYSDVIVVDHRFVLSIPDGLPSDSGAPLLCAGITVYSPMKYYGMTKESGKRLGVNGLGGLGHIAVKIGKAFGLRVTVISRSSEKEREAIDRLGADSFLVTTDSQKMKEAVGTMDFIIDTVSAEHALLPLFSLLKVNGKLVALGLPEKPLDLPIFSLVLGRKMVGGSQIGGMKETQEMLEFCAKHKIVSDIELIKMSDINSAMDRLAKSDVRYRFVIDVANSLLPESSAEILTEQVDHGVSITSRF

SEQ ID NO: 50615 - protein, 207 aa, Arabidopsis thaliana
  peptide (1)..(207): Ceres Seq. ID no. 13588874
  misc_feature (1)..(184): Homolog of NCBI NO: 10720093 NR Description: Probable mannitol dehydrogenase (NAD-dependent
  misc_feature (1)..(184): Homolog of NCBI NO: 3913193 NR Description: Probable mannitol dehydrogenase 1 (NAD-dependent
  misc_feature (1)..(183): Homolog of NCBI NO: 10720088 NR Description: Probable mannitol dehydrogenase (NAD-dependent
  misc_feature (1)..(184): Homolog of NCBI NO: 22475166 NR Description: putative sinapyl alcohol dehydrogenase
  misc_feature (1)..(186): Homolog of NCBI NO: 1168728 NR Description: Probable mannitol dehydrogenase (NAD-dependent
  misc_feature (1)..(186): Homolog of NCBI NO: 21592964 NR Description: cinnamyl-alcohol dehydrogenase CAD1 [Arabidopsis
  misc_feature (1)..(186): Homolog of NCBI NO: 15235022 NR Description: mannitol dehydrogenase, putative [Arabidopsis
  misc_feature (1)..(186): Homolog of NCBI NO: 2146727 NR Description: cinnamyl-alcohol dehydrogenase (EC 1.1.1.195)
  misc_feature (1)..(207): Homolog of NCBI NO: 15227106 NR Description: mannitol dehydrogenase, putative [Arabidopsis
  misc_feature (1)..(207): Homolog of NCBI NO: 15227091 NR Description: mannitol dehydrogenase, putative [Arabidopsis
MKYYGMTKESGKRLGVNGLGGLGHIAVKIGKAFGLRVTVISRSSEKEREAIDRLGADSFLVTTDSQKMKEAVGTMDFIIDTVSAEHALLPLFSLLKVNGKLVALGLPEKPLDLPIFSLVLGRKMVGGSQIGGMKETQEMLEFCAKHKIVSDIELIKMSDINSAMDRLAKSDVRYRFVIDVANSLLPESSAEILTEQVDHGVSITSRF

SEQ ID NO: 50616 - DNA, 2001 bp, Arabidopsis thaliana
  misc_feature (1)..(2001): Ceres Seq. ID no. 13647912
  misc_feature: MA Experiment ID: 20000179 Result: Up-regulated in Transcription
  misc_feature: MA Experiment 20000179 PARAMETER Experiment Name: At_Germinating_Seeds_P Parameter: Age (hr) Value: 6 vs. 0
  misc_feature: MA Experiment 20000179 PARAMETER Experiment Name: At_Germinating_Seeds_P Parameter: Tissue Value: Germinating Seeds
  misc_feature: MA Experiment ID: 20000180 Result: Up-regulated in Transcription
  misc_feature: MA Experiment 20000180 PARAMETER Experiment Name: At_Germinating_Seeds_P Parameter: Age (hr) Value: 24 vs. 0
  misc_feature: MA Experiment 20000180 PARAMETER Experiment Name: At_Germinating_Seeds_P Parameter: Tissue Value: Germinating Seeds
  misc_feature: MA Experiment ID: 20000184 Result: Up-regulated in Transcription
  misc_feature: MA Experiment 20000184 PARAMETER Experiment Name: At_Shoots__P Parameter: Age (day) Value: 7
  misc_feature: MA Experiment 20000184 PARAMETER Experiment Name: At_Shoots__P Parameter: Tissue Value: Shoots vs. Whole Plant
  misc_feature: MA Experiment ID: 20000185 Result: Down-regulated in Transcription
  misc_feature: MA Experiment 20000185 PARAMETER Experiment Name: At_Roots__P Parameter: Age (day) Value: 7 vs. 21
  misc_feature: MA Experiment 20000185 PARAMETER Experiment Name: At_Roots__P Parameter: Organism Value: A. thaliana
  misc_feature: MA Experiment 20000185 PARAMETER Experiment Name: At_Roots__P Parameter: Tissue Value: Roots vs. Whole Plant
  misc_feature: MA Experiment ID: 20000234 Result: Up-regulated in Transcription
  misc_feature: MA Experiment 20000234 PARAMETER Experiment Name: At_Siliques_P Parameter: Age (day) Value: 21
  misc_feature: MA Experiment 20000234 PARAMETER Experiment Name: At_Siliques_P Parameter: Organism Value: A. thaliana
  misc_feature: MA Experiment 20000234 PARAMETER Experiment Name: At_Siliques_P Parameter: Plant Line Value: WS
  misc_feature: MA Experiment 20000234 PARAMETER Experiment Name: At_Siliques_P Parameter: Tissue Value: Less Than 5mm Siliques vs. Whole Plant
  misc_feature: MA Experiment ID: 20000235 Result: Up-regulated in Transcription
  misc_feature: MA Experiment 20000235 PARAMETER Experiment Name: At_Siliques_P Parameter: Age (day) Value: 21
  misc_feature: MA Experiment 20000235 PARAMETER Experiment Name: At_Siliques_P Parameter: Organism Value: A. thaliana
  misc_feature: MA Experiment 20000235 PARAMETER Experiment Name: At_Siliques_P Parameter: Plant Line Value: WS
  misc_feature: MA Experiment 20000235 PARAMETER Experiment Name: At_Siliques_P Parameter: Tissue Value: 5-10mm Siliques vs. Whole Plant
  misc_feature: MA Experiment ID: 20000264 Result: Up-regulated in Transcription
  misc_feature: MA Experiment 20000264 PARAMETER Experiment Name: At_Open_Flower_P Parameter: Age (day) Value: 21
  misc_feature: MA Experiment 20000264 PARAMETER Experiment Name: At_Open_Flower_P Parameter: Plant Line Value: WS
  misc_feature: MA Experiment 20000264 PARAMETER Experiment Name: At_Open_Flower_P Parameter: Tissue Value: Open Flower vs. Whole Plant
  misc_feature: MA Experiment ID: 20000437 Result: Down-regulated in Transcription
  misc_feature: MA Experiment 20000437 PARAMETER Experiment Name: At_Drought_P Parameter: Age (day) Value: 8
  misc_feature: MA Experiment 20000437 PARAMETER Experiment Name: At_Drought_P Parameter: Organism Value: A. thaliana
  misc_feature: MA Experiment 20000437 PARAMETER Experiment Name: At_Drought_P Parameter: Plant Line Value: WS
  misc_feature: MA Experiment 20000437 PARAMETER Experiment Name: At_Drought_P Parameter: Timepoint (hr) Value: 24
  misc_feature: MA Experiment 20000437 PARAMETER Experiment Name: At_Drought_P Parameter: Tissue Value: Whole Plant
  misc_feature: MA Experiment 20000437 PARAMETER Experiment Name: At_Drought_P Parameter: Treatment Value: Drought vs. No Drought
  misc_feature: MA Experiment ID: 20000438 Result: Up-regulated in Transcription
  misc_feature: MA Experiment 20000438 PARAMETER Experiment Name: At_Shoots__P Parameter: Age (day) Value: 14
  misc_feature: MA Experiment 20000438 PARAMETER Experiment Name: At_Shoots__P Parameter: Tissue Value: Shoots vs. Whole Plant
  misc_feature: MA Experiment ID: 20000439 Result: Down-regulated in Transcription
  misc_feature: MA Experiment 20000439 PARAMETER Experiment Name: At_Roots__P Parameter: Age (day) Value: 14 vs. 21
  misc_feature: MA Experiment 20000439 PARAMETER Experiment Name: At_Roots__P Parameter: Organism Value: A. thaliana
  misc_feature: MA Experiment 20000439 PARAMETER Experiment Name: At_Roots__P Parameter: Tissue Value: Roots vs. Whole Plant
  misc_feature: MA Experiment ID: 20001248 Result: Down-regulated in Transcription
  misc_feature: MA Experiment 20001248 PARAMETER Experiment Name: At_Far-red-induction_P Parameter: Age (day) Value: 7
  misc_feature: MA Experiment 20001248 PARAMETER Experiment Name: At_Far-red-induction_P Parameter: Light Value: Far-red vs. White
  misc_feature: MA Experiment 20001248 PARAMETER Experiment Name: At_Far-red-induction_P Parameter: Organism Value: A. thaliana
  misc_feature: MA Experiment 20001248 PARAMETER Experiment Name: At_Far-red-induction_P Parameter: Plant Line Value: Columbia
  misc_feature: MA Experiment 20001248 PARAMETER Experiment Name: At_Far-red-induction_P Parameter: Timepoint (hr) Value: 4
  misc_feature: MA Experiment 20001248 PARAMETER Experiment Name: At_Far-red-induction_P Parameter: Tissue Value: Whole Plant
  misc_feature: MA Experiment ID: 20001450 Result: Down-regulated in Transcription
  misc_feature: MA Experiment 20001450 PARAMETER Experiment Name: At_Far-red-induction_P Parameter: Age (day) Value: 7
  misc_feature: MA Experiment 20001450 PARAMETER Experiment Name: At_Far-red-induction_P Parameter: Light Value: Far-red vs. White
  misc_feature: MA Experiment 20001450 PARAMETER Experiment Name: At_Far-red-induction_P Parameter: Organism Value: A. thaliana
  misc_feature: MA Experiment 20001450 PARAMETER Experiment Name: At_Far-red-induction_P Parameter: Plant Line Value: Columbia
  misc_feature: MA Experiment 20001450 PARAMETER Experiment Name: At_Far-red-induction_P Parameter: Timepoint (hr) Value: 8
  misc_feature: MA Experiment 20001450 PARAMETER Experiment Name: At_Far-red-induction_P Parameter: Tissue Value: Whole Plant
  misc_feature: MA Experiment ID: 20001559 Result: Down-regulated in Transcription
  misc_feature: MA Experiment 20001559 PARAMETER Experiment Name: At_Drought_Soil_Dry_P Parameter: Age (day) Value: 28
  misc_feature: MA Experiment 20001559 PARAMETER Experiment Name: At_Drought_Soil_Dry_P Parameter: Organism Value: A. thaliana
  misc_feature: MA Experiment 20001559 PARAMETER Experiment Name: At_Drought_Soil_Dry_P Parameter: Plant Line Value: WS
  misc_feature: MA Experiment 20001559 PARAMETER Experiment Name: At_Drought_Soil_Dry_P Parameter: Post Timepoint (hr) Value: 29
  misc_feature: MA Experiment 20001559 PARAMETER Experiment Name: At_Drought_Soil_Dry_P Parameter: Post-Treatment Value: Re-Water vs. No Drought
  misc_feature: MA Experiment 20001559 PARAMETER Experiment Name: At_Drought_Soil_Dry_P Parameter: Timepoint (day) Value: 14
  misc_feature: MA Experiment 20001559 PARAMETER Experiment Name: At_Drought_Soil_Dry_P Parameter: Treatment Value: Drought vs. No Drought
  misc_feature: MA Experiment ID: 20001904 Result: Down-regulated in Transcription
  misc_feature: MA Experiment 20001904 PARAMETER Experiment Name: At_Drought_Reproduction_P Parameter: Age (day) Value: 37
  misc_feature: MA Experiment 20001904 PARAMETER Experiment Name: At_Drought_Reproduction_P Parameter: Organism Value: A. thaliana
  misc_feature: MA Experiment 20001904 PARAMETER Experiment Name: At_Drought_Reproduction_P Parameter: Plant Line Value: WS
  misc_feature: MA Experiment 20001904 PARAMETER Experiment Name: At_Drought_Reproduction_P Parameter: Timepoint (day) Value: 7
  misc_feature: MA Experiment 20001904 PARAMETER Experiment Name: At_Drought_Reproduction_P Parameter: Tissue Value: Rosettes
  misc_feature: MA Experiment 20001904 PARAMETER Experiment Name: At_Drought_Reproduction_P Parameter: Treatment Value: Drought vs. No Drought
  misc_feature: MA Experiment ID: 20001905 Result: Down-regulated in Transcription
  misc_feature: MA Experiment 20001905 PARAMETER Experiment Name: At_Drought_Reproduction_P Parameter: Age (day) Value: 40
  misc_feature: MA Experiment 20001905 PARAMETER Experiment Name: At_Drought_Reproduction_P Parameter: Organism Value: A. thaliana
  misc_feature: MA Experiment 20001905 PARAMETER Experiment Name: At_Drought_Reproduction_P Parameter: Plant Line Value: WS
  misc_feature: MA Experiment 20001905 PARAMETER Experiment Name: At_Drought_Reproduction_P Parameter: Timepoint (day) Value: 10
  misc_feature: MA Experiment 20001905 PARAMETER Experiment Name: At_Drought_Reproduction_P Parameter: Tissue Value: Rosettes
  misc_feature: MA Experiment 20001905 PARAMETER Experiment Name: At_Drought_Reproduction_P Parameter: Treatment Value: Drought vs. No Drought
gcatggsccatttctcatctatgkagattctcatctctctacctcctcctcattttctcctcttgattcactaattcttcttcttcttcttcttttcagacatgactcttccttatcgtttctcttctgttagaaaccactcacttctacttaagacttctcatctctacacacccagatcagctcttgattgtttctcacccaaggaatctcctttcttcaagaagaacactgcccaattcctttctcctcagaaacgcacttctcttcctctgaaacttgtctgccctttagctagtttctcttcttatgcggattctgagggagaagagcaacaccatgctgatcaaccgatacagaaccctcacgaatcttctaccgtttcaaacgaatcagatgggaaaggtaatgcagaagctactggagacttttctggaatggctcaagcctttcacatttcttccacaacagcaagggcaatctctatagtcatcgccttctctgctctcacccttycmatcttcatgaagtccctgggacaaggactggctctcaagaccaagcttctctcttacgcaacactactctttggtttctacatggcctggrncatcggagctaatgatgtcgcaaatgccatggggacttctgttggatctggagccttgacaatccggcaagctgtgatgacagctgcagttctcgaattctcaggtgctcttttgatgggaactcacgtgactagcacgatgcagaaaggaattctcatggctaatgtgttccaagggaaagatatgttgctctttgctggtctcctctcttccttagctgcagctggaacttggttacaggtagcttcttactatggatggccagtatcaacaactcactgtatcgtcggatcaatggttgggtttgggcttgtatatggaggagctggtgccgttttctggagttccctagctaaagtagcttcatcttgggtcatctctcctatactgggagctcttgtctccttcctagtctacaaatgcatcaggagatttgtttacagtgcaccaaacccaggacaagcagcggctgctgccgctcccgtcgctgtatttgtaggtgtggccagtatctcctcagccgcattgcctctaagtaagatctttccaatagctctatcacaagccttagcctgtggagtagcaggagccatagtattcgacagaatcatccgcaaacagctcggtcacctcctagctaaaacaaaatcaccagaaacatctcaaaaccaacccaaaaccattggtttcctctccgatatcgcaggaccaacaggtacacaactcgaaatagtctacggaatctttggctatatgcaagtcctctccgcttgcttcatgtcattcgctcacggaggcaacgacgtctccaacgcaatcggaccattagccgccgcattaagcattctccaaaacggagcagctgcaggaggagccgagatcgttatcccaatggatgttctcgcttggggaggattcggaatcgttgctggtctcacaatgtggggatacagagtcatcgcaacgatagggaagaagatcactgagctaacaccaacaagaggattcgctgcggaattcgccgccgcgtcggttgttttgtttgcttcgaaattagggcttccgatttctgcgactcatacacttgttggtgctgtgatgggtgttggtttcgctagagggcttratagtgtgagagctgagactgtgagagagatcgttgcttcgtggcttgtcaccattcccgttggtgctacactcgccgttatctacacttggattttcaccaagatcttatcttttgtattgtgagtttctgtttcttttggttttgttatacgaagaacatgaaattgatcttcttcttctatgttcgtttgaatgattcgagtttgaaaaaaccctaaagttatcatctttcgattttttcacccatcggtgaagtatgatc

SEQ ID NO: 50617 - protein, 586 aa, Arabidopsis thaliana
  peptide (1)..(586): Ceres Seq. ID no. 15219502
  misc_feature (171)..(571): Pfam Name: Phosphate transporter family Pfam Description: Phosphate transporter family
  misc_feature (415)..(574): Homolog of NCBI NO: 28897192 NR Description: pho4 family protein [Vibrio parahaemolyticus RIMD
  misc_feature (155)..(336): Homolog of NCBI NO: 28897192 NR Description: pho4 family protein [Vibrio parahaemolyticus RIMD
  misc_feature (415)..(574): Homolog of NCBI NO: 15642438 NR Description: pho4 family protein [Vibrio cholerae]
  misc_feature (147)..(336): Homolog of NCBI NO: 15642438 NR Description: pho4 family protein [Vibrio cholerae]
  misc_feature (95)..(586): Homolog of NCBI NO: 31580630 NR Description: phosphate transporter 2-1 [Triticum aestivum]
  misc_feature (38)..(586): Homolog of NCBI NO: 22450125 NR Description: phosphate hydrogen transporter [Spinacia oleracea]
  misc_feature (48)..(586): Homolog of NCBI NO: 24079961 NR Description: phosphate transporter PHT2-1 [Medicago truncatula]
  misc_feature (1)..(586): Homolog of NCBI NO: 7522208 NR Description: probable phosphate permease - common ice plant
  misc_feature (1)..(586): Homolog of NCBI NO: 30688383 NR Description: phosphate transporter -related [Arabidopsis
  misc_feature (1)..(586): Homolog of NCBI NO: 30688378 NR Description: phosphate transporter -related [Arabidopsis
  misc_feature (139)..(139): Xaa is any aa, unknown or other
  misc_feature (170)..(170): Xaa is any aa, unknown or other
  misc_feature (546)..(546): Xaa is any aa, unknown or other
MTLPYRFSSVRNHSLLLKTSHLYTPRSALDCFSPKESPFFKKNTAQFLSPQKRTSLPLKLVCPLASFSSYADSEGEEQHHADQPIQNPHESSTVSNESDGKGNAEATGDFSGMAQAFHISSTTARAISIVIAFSALTLXIFMKSLGQGLALKTKLLSYATLLFGFYMAWXIGANDVANAMGTSVGSGALTIRQAVMTAAVLEFSGALLMGTHVTSTMQKGILMANVFQGKDMLLFAGLLSSLAAAGTWLQVASYYGWPVSTTHCIVGSMVGFGLVYGGAGAVFWSSLAKVASSWVISPILGALVSFLVYKCIRRFVYSAPNPGQAAAAAAPVAVFVGVASISSAALPLSKIFPIALSQALACGVAGAIVFDRIIRKQLGHLLAKTKSPETSQNQPKTIGFLSDIAGPTGTQLEIVYGIFGYMQVLSACFMSFAHGGNDVSNAIGPLAAALSILQNGAAAGGAEIVIPMDVLAWGGFGIVAGLTMWGYRVIATIGKKITELTPTRGFAAEFAAASVVLFASKLGLPISATHTLVGAVMGVGFARGLXSVRAETVREIVASWLVTIPVGATLAVIYTWIFTKILSFVL

SEQ ID NO: 50618 - protein, 474 aa, Arabidopsis thaliana
  peptide (1)..(474): Ceres Seq. ID no. 15219503
  misc_feature (59)..(459): Pfam Name: Phosphate transporter family Pfam Description: Phosphate transporter family
  misc_feature (303)..(462): Homolog of NCBI NO: 28897192 NR Description: pho4 family protein [Vibrio parahaemolyticus RIMD
  misc_feature (43)..(224): Homolog of NCBI NO: 28897192 NR Description: pho4 family protein [Vibrio parahaemolyticus RIMD
  misc_feature (303)..(462): Homolog of NCBI NO: 15642438 NR Description: pho4 family protein [Vibrio cholerae]
  misc_feature (35)..(224): Homolog of NCBI NO: 15642438 NR Description: pho4 family protein [Vibrio cholerae]
  misc_feature (1)..(474): Homolog of NCBI NO: 31580630 NR Description: phosphate transporter 2-1 [Triticum aestivum]
  misc_feature (1)..(474): Homolog of NCBI NO: 22450125 NR Description: phosphate hydrogen transporter [Spinacia oleracea]
  misc_feature (1)..(474): Homolog of NCBI NO: 24079961 NR Description: phosphate transporter PHT2-1 [Medicago truncatula]
  misc_feature (1)..(474): Homolog of NCBI NO: 7522208 NR Description: probable phosphate permease - common ice plant
  misc_feature (1)..(474): Homolog of NCBI NO: 30688383 NR Description: phosphate transporter -related [Arabidopsis
  misc_feature (1)..(474): Homolog of NCBI NO: 30688378 NR Description: phosphate transporter -related [Arabidopsis
  misc_feature (27)..(27): Xaa is any aa, unknown or other
  misc_feature (58)..(58): Xaa is any aa, unknown or other
  misc_feature (434)..(434): Xaa is any aa, unknown or other
MAQAFHISSTTARAISIVIAFSALTLXIFMKSLGQGLALKTKLLSYATLLFGFYMAWXIGANDVANAMGTSVGSGALTIRQAVMTAAVLEFSGALLMGTHVTSTMQKGILMANVFQGKDMLLFAGLLSSLAAAGTWLQVASYYGWPVSTTHCIVGSMVGFGLVYGGAGAVFWSSLAKVASSWVISPILGALVSFLVYKCIRRFVYSAPNPGQAAAAAAPVAVFVGVASISSAALPLSKIFPIALSQALACGVAGAIVFDRIIRKQLGHLLAKTKSPETSQNQPKTIGFLSDIAGPTGTQLEIVYGIFGYMQVLSACFMSFAHGGNDVSNAIGPLAAALSILQNGAAAGGAEIVIPMDVLAWGGFGIVAGLTMWGYRVIATIGKKITELTPTRGFAAEFAAASVVLFASKLGLPISATHTLVGAVMGVGFARGLXSVRAETVREIVASWLVTIPVGATLAVIYTWIFTKILSFVL

SEQ ID NO: 50619 - protein, 445 aa, Arabidopsis thaliana
  peptide (1)..(445): Ceres Seq. ID no. 15219504
  misc_feature (30)..(430): Pfam Name: Phosphate transporter family Pfam Description: Phosphate transporter family
  misc_feature (274)..(433): Homolog of NCBI NO: 28897192 NR Description: pho4 family protein [Vibrio parahaemolyticus RIMD
  misc_feature (14)..(195): Homolog of NCBI NO: 28897192 NR Description: pho4 family protein [Vibrio parahaemolyticus RIMD
  misc_feature (274)..(433): Homolog of NCBI NO: 15642438 NR Description: pho4 family protein [Vibrio cholerae]
  misc_feature (6)..(195): Homolog of NCBI NO: 15642438 NR Description: pho4 family protein [Vibrio cholerae]
  misc_feature (1)..(445): Homolog of NCBI NO: 31580630 NR Description: phosphate transporter 2-1 [Triticum aestivum]
  misc_feature (1)..(445): Homolog of NCBI NO: 22450125 NR Description: phosphate hydrogen transporter [Spinacia oleracea]
  misc_feature (1)..(445): Homolog of NCBI NO: 24079961 NR Description: phosphate transporter PHT2-1 [Medicago truncatula]
  misc_feature (1)..(445): Homolog of NCBI NO: 7522208 NR Description: probable phosphate permease - common ice plant
  misc_feature (1)..(445): Homolog of NCBI NO: 30688383 NR Description: phosphate transporter -related [Arabidopsis
  misc_feature (1)..(445): Homolog of NCBI NO: 30688378 NR Description: phosphate transporter -related [Arabidopsis
  misc_feature (29)..(29): Xaa is any aa, unknown or other
  misc_feature (405)..(405): Xaa is any aa, unknown or other
MKSLGQGLALKTKLLSYATLLFGFYMAWXIGANDVANAMGTSVGSGALTIRQAVMTAAVLEFSGALLMGTHVTSTMQKGILMANVFQGKDMLLFAGLLSSLAAAGTWLQVASYYGWPVSTTHCIVGSMVGFGLVYGGAGAVFWSSLAKVASSWVISPILGALVSFLVYKCIRRFVYSAPNPGQAAAAAAPVAVFVGVASISSAALPLSKIFPIALSQALACGVAGAIVFDRIIRKQLGHLLAKTKSPETSQNQPKTIGFLSDIAGPTGTQLEIVYGIFGYMQVLSACFMSFAHGGNDVSNAIGPLAAALSILQNGAAAGGAEIVIPMDVLAWGGFGIVAGLTMWGYRVIATIGKKITELTPTRGFAAEFAAASVVLFASKLGLPISATHTLVGAVMGVGFARGLXSVRAETVREIVASWLVTIPVGATLAVIYTWIFTKILSFVL

SEQ ID NO: 50620 - DNA, 3302 bp, Arabidopsis thaliana
  misc_feature (1)..(3302): Ceres Seq. ID no. 13588242
  misc_feature: MA Experiment ID: 20000173 Result: Down-regulated in Transcription
  misc_feature: MA Experiment 20000173 PARAMETER Experiment Name: At_42deg_Heat_P Parameter: Age (day) Value: 14
  misc_feature: MA Experiment 20000173 PARAMETER Experiment Name: At_42deg_Heat_P Parameter: Organism Value: A. thaliana
  misc_feature: MA Experiment 20000173 PARAMETER Experiment Name: At_42deg_Heat_P Parameter: Plant Line Value: WS
  misc_feature: MA Experiment 20000173 PARAMETER Experiment Name: At_42deg_Heat_P Parameter: Temperature (deg C) Value: 42 vs. 22
  misc_feature: MA Experiment 20000173 PARAMETER Experiment Name: At_42deg_Heat_P Parameter: Timepoint (hr) Value: 6
  misc_feature: MA Experiment 20000173 PARAMETER Experiment Name: At_42deg_Heat_P Parameter: Tissue Value: Aerial
  misc_feature: MA Experiment ID: 20000179 Result: Up-regulated in Transcription
  misc_feature: MA Experiment 20000179 PARAMETER Experiment Name: At_Germinating_Seeds_P Parameter: Age (hr) Value: 6 vs. 0
  misc_feature: MA Experiment 20000179 PARAMETER Experiment Name: At_Germinating_Seeds_P Parameter: Tissue Value: Germinating Seeds
  misc_feature: MA Experiment ID: 20000180 Result: Up-regulated in Transcription
  misc_feature: MA Experiment 20000180 PARAMETER Experiment Name: At_Germinating_Seeds_P Parameter: Age (hr) Value: 24 vs. 0
  misc_feature: MA Experiment 20000180 PARAMETER Experiment Name: At_Germinating_Seeds_P Parameter: Tissue Value: Germinating Seeds
  misc_feature: MA Experiment ID: 20000184 Result: Down-regulated in Transcription
  misc_feature: MA Experiment 20000184 PARAMETER Experiment Name: At_Shoots__P Parameter: Age (day) Value: 7
  misc_feature: MA Experiment 20000184 PARAMETER Experiment Name: At_Shoots__P Parameter: Tissue Value: Shoots vs. Whole Plant
  misc_feature: MA Experiment ID: 20000495 Result: Down-regulated in Transcription
  misc_feature: MA Experiment 20000495 PARAMETER Experiment Name: At_Guard_Cells_P Parameter: Harvest Date Value: 8/2/2002
  misc_feature: MA Experiment 20000495 PARAMETER Experiment Name: At_Guard_Cells_P Parameter: Organism Value: A. thaliana
  misc_feature: MA Experiment 20000495 PARAMETER Experiment Name: At_Guard_Cells_P Parameter: Tissue Value: Guard Cells vs. Leaves
  misc_feature: MA Experiment ID: 20000496 Result: Down-regulated in Transcription
  misc_feature: MA Experiment 20000496 PARAMETER Experiment Name: At_Guard_Cells_P Parameter: Harvest Date Value: 7/19/2002
  misc_feature: MA Experiment 20000496 PARAMETER Experiment Name: At_Guard_Cells_P Parameter: Organism Value: Canola
  misc_feature: MA Experiment 20000496 PARAMETER Experiment Name: At_Guard_Cells_P Parameter: Tissue Value: Guard Cells vs. Leaves
  misc_feature: MA Experiment ID: 20000794 Result: Up-regulated in Transcription
  misc_feature: MA Experiment 20000794 PARAMETER Experiment Name: At_Petals_P Parameter: Age (day) Value: 23-25 days
  misc_feature: MA Experiment 20000794 PARAMETER Experiment Name: At_Petals_P Parameter: Plant Line Value: WS
  misc_feature: MA Experiment 20000794 PARAMETER Experiment Name: At_Petals_P Parameter: Tissue Value: Petals vs. Whole plant
  misc_feature: MA Experiment ID: 20001451 Result: Up-regulated in Transcription
  misc_feature: MA Experiment 20001451 PARAMETER Experiment Name: At_Far-red-induction_P Parameter: Age (day) Value: 7
  misc_feature: MA Experiment 20001451 PARAMETER Experiment Name: At_Far-red-induction_P Parameter: Light Value: Far-red vs. White
  misc_feature: MA Experiment 20001451 PARAMETER Experiment Name: At_Far-red-induction_P Parameter: Organism Value: A. thaliana
  misc_feature: MA Experiment 20001451 PARAMETER Experiment Name: At_Far-red-induction_P Parameter: Plant Line Value: Columbia
  misc_feature: MA Experiment 20001451 PARAMETER Experiment Name: At_Far-red-induction_P Parameter: Timepoint (hr) Value: 24
  misc_feature: MA Experiment 20001451 PARAMETER Experiment Name: At_Far-red-induction_P Parameter: Tissue Value: Whole Plant
atgccgctcagactcgagatcaagagaaaattagcgcaaaggtctgagagagttaaatctgtggatcttcatcctacagaaccatggattcttgcaagtttgtattctggaaccttgtgtatttggaactaccagacgcaggtgatggcaaaatcctttgaggtgactgaattaccagttcggtcagccaagtttgtagcacgaaagcaatgggttgtcgcaggagctgatgatatgtatatccgtgtatacaattacaacaccatggacaaggttaaagtgtttgaggctcattcagactacattaggtgtgtggctgttcatccaacccttccatatgtgctgtcatcttctgatgatatgctcataaagctttgggactgggaaaagggttgggcttgcactcagatattcgagggacactcacactatgtgatgcaagtcacatttaatccaaaagacaccaacacttttgccagtgcatcccttgatcgtaccataaagatttggaatcttggttccccagacccaaattttacattggatgcccatcagaaaggagtaaattgtgtagattatttcaccggtggtgataagccctatttaattaccggctctgatgatcacactgctaaggtctgggactaccaaacaaaaagttgtgtacagaccctggaggggcacacacacaatgtatctgcagtatgtttccatccagagcttccaattataatcacaggttctgaagatggcaccgttcgcatttggcatgcaaccacatacaggctagagaacacattgaattatggccttgagagagtctgggcaattggttacattaaaagttcacgccgggttgtgatcggatatgatgaaggaaccatcatggttaaacttggacgagaaattcctgtcgctagcatggacaataccggaaaaatcatatgggctaagcataatgaaattcaaactgcaaacatcaaaagtattggtgcagattacgaggttactgatggagaaaggttgcccttgagtgttaaagagttggggacctgtgatctttatccacaaagcttgaagcacaaccctaatgggaggtttgtcgtagtctgtggtgacggagaatatataatctacacggctttggcttggagaaataggtcatttggttctggactggaatttgtttggtcatccgagggggagtgtgcggttagagaaagctcatcaaagattaaaatatttagcaaaaatttccaggaaaagaggagtatccgccctactttttcagctgagaagatctttggaggaaccttgttagctatgtgttcaagtgatttcatctgcttttatgattgggctgaatgtaggctgattcaacgtattgacgtcactgtaaagaatctatattgggctgacagtggtgatttagtagccattgctagtgacacatcattctacatcttgaaattcaaccgcgacttagttacctcacattttgatagcggaagacctactgaggaagaaggtgttgaggatgcttttgaggttctccatgaaaatgatgaacgtgttaggacaggtatatgggttggtgactgtttcatttacaacaactcttcctggaagcttaactactgtgttggaggcgaggtaaccacaatgtatcatttggaccgcccaatgtatttgttgggatatcttgcaagtcaaagtcgggttttcttggtagacaaagaattcaatgttatagggtacaccttgttgctaagcctgattgagtacaagactcttgtgatgcggggtgatttagacaaagccagtgaaatcttacctacaattcctaaagatcagcataacagtgttgctcatttcttggagtcacggggaatgattgaagatgctctggaaattgcaacagatcctgactacagatttgagttggccatacaactgggtagacttgaaattgcacaggaaatcgctgtggaagtacagagcgaatctaagtggaaacaattaggagagttagctatgtcctccggaaagctgcaaatggctgaggaatgcatgaagtatgcgatggatttgagtggtttgttacttctttattcttctctgggagatgctgaaggtgtaacaaaacttgcaacacttgctaaagaacaagggaagaacaatgtcgcctttctttgcctattcatgctgggtaaactggaagattgtttgcagttattggtggagagtaaccggataccagaagctgctctgatggcacgatcatatcttccgagcaaagtttctgagatagtagctctttggaggaaagatctcagcaaggttaattcaaaagcagcagaatctttggctgatcctgaggagtactcaaatctttttgaagattggcaagttgctctttctgtggaagctaaagctgtagagacaaggggagtttacacaggtgcaaaagattatcctagccatgctgataaatcttccatgaccctcgtggaagccttccgaaacttgcaagttgaggaagaggaatcacttgaaaatggagatatggatcacgaggaggtagtagcagaagaaaatggaaatgaacaaaggaatgaggatgatgtagcggagcatgtagaggagcatcatgaagagaaagaagcagaagaagaagagggaattgttgatggagactctacggatggagctgtacttgttaatggaagtgaggctgacgaagagtggggtacgaataatgaaggaaacccatcagcctaatagcaagtcggtcaaggccaatgttgaaaagtctgaaaattttgtctctgtgcttacaccgcgtcagtagagtttacagtttatgggaatggtgaaagttccagcaacaatggagagaggtgagagaactttcattcttttactgaggattgaaaggtcaaatccgagcagcctggaaccacattttgaaaccattttgtaataaaagtttgaatttcttaagaaaatgaaaatcgagtaggactcagttctttgctggagagactggaagatttagatgaaagagaggctgatgagtttttaagcaagtgtggtcgttcctttttgtcttttgcactcacagggaggtttattattattatcatatggttttttttttttttttttcctacaaatatctacttagatttcatcagattgttttttttttttccttttcttttgtctggcctgtaacatgattttttcacttttcatcgttgcatatataattcttttgaagacttgatctctaaaaatat

SEQ ID NO: 50621 - protein, 926 aa, Arabidopsis thaliana
  peptide (1)..(926): Ceres Seq. ID no. 13588243
  misc_feature (319)..(779): Pfam Name: Coatomer WD associated region Pfam Description: Coatomer WD associated region
  misc_feature (3)..(762): Homolog of NCBI NO: 6321301 NR Description: Involved in endoplasmic-to-Golgi protein
  misc_feature (1)..(919): Homolog of NCBI NO: 3287963 NR Description: PROBABLE COATOMER BETA' SUBUNIT (BETA'-COAT
  misc_feature (1)..(919): Homolog of NCBI NO: 17540286 NR Description: Coatomer (111.1 kD) [Caenorhabditis elegans]
  misc_feature (1)..(816): Homolog of NCBI NO: 3204159 NR Description: coatomer, beta-prime subunit [Drosophila
  misc_feature (1)..(816): Homolog of NCBI NO: 24584107 NR Description: beta'-coatomer protein CG6699-PA [Drosophila
  misc_feature (1)..(825): Homolog of NCBI NO: 27697187 NR Description: Similar to coatomer protein complex, subunit beta
  misc_feature (1)..(844): Homolog of NCBI NO: 27805865 NR Description: coatomer protein complex, subunit beta 2 (beta
  misc_feature (1)..(844): Homolog of NCBI NO: 486784 NR Description: Golgi-associated particle 102K chain - human
  misc_feature (1)..(844): Homolog of NCBI NO: 4758032 NR Description: coatomer protein complex, subunit beta 2 (beta
  misc_feature (1)..(855): Homolog of NCBI NO: 29789080 NR Description: coatomer protein complex, subunit beta 2 (beta
MPLRLEIKRKLAQRSERVKSVDLHPTEPWILASLYSGTLCIWNYQTQVMAKSFEVTELPVRSAKFVARKQWVVAGADDMYIRVYNYNTMDKVKVFEAHSDYIRCVAVHPTLPYVLSSSDDMLIKLWDWEKGWACTQIFEGHSHYVMQVTFNPKDTNTFASASLDRTIKIWNLGSPDPNFTLDAHQKGVNCVDYFTGGDKPYLITGSDDHTAKVWDYQTKSCVQTLEGHTHNVSAVCFHPELPIIITGSEDGTVRIWHATTYRLENTLNYGLERVWAIGYIKSSRRVVIGYDEGTIMVKLGREIPVASMDNTGKIIWAKHNEIQTANIKSIGADYEVTDGERLPLSVKELGTCDLYPQSLKHNPNGRFVVVCGDGEYIIYTALAWRNRSFGSGLEFVWSSEGECAVRESSSKIKIFSKNFQEKRSIRPTFSAEKIFGGTLLAMCSSDFICFYDWAECRLIQRIDVTVKNLYWADSGDLVAIASDTSFYILKFNRDLVTSHFDSGRPTEEEGVEDAFEVLHENDERVRTGIWVGDCFIYNNSSWKLNYCVGGEVTTMYHLDRPMYLLGYLASQSRVFLVDKEFNVIGYTLLLSLIEYKTLVMRGDLDKASEILPTIPKDQHNSVAHFLESRGMIEDALEIATDPDYRFELAIQLGRLEIAQEIAVEVQSESKWKQLGELAMSSGKLQMAEECMKYAMDLSGLLLLYSSLGDAEGVTKLATLAKEQGKNNVAFLCLFMLGKLEDCLQLLVESNRIPEAALMARSYLPSKVSEIVALWRKDLSKVNSKAAESLADPEEYSNLFEDWQVALSVEAKAVETRGVYTGAKDYPSHADKSSMTLVEAFRNLQVEEEESLENGDMDHEEVVAEENGNEQRNEDDVAEHVEEHHEEKEAEEEEGIVDGDSTDGAVLVNGSEADEEWGTNNEGNPSA

SEQ ID NO: 50622 - protein, 878 aa, Arabidopsis thaliana
  peptide (1)..(878): Ceres Seq. ID no. 13588244
  misc_feature (271)..(731): Pfam Name: Coatomer WD associated region Pfam Description: Coatomer WD associated region
  misc_feature (1)..(714): Homolog of NCBI NO: 6321301 NR Description: Involved in endoplasmic-to-Golgi protein
  misc_feature (1)..(871): Homolog of NCBI NO: 3287963 NR Description: PROBABLE COATOMER BETA' SUBUNIT (BETA'-COAT
  misc_feature (1)..(871): Homolog of NCBI NO: 17540286 NR Description: Coatomer (111.1 kD) [Caenorhabditis elegans]
  misc_feature (1)..(768): Homolog of NCBI NO: 3204159 NR Description: coatomer, beta-prime subunit [Drosophila
  misc_feature (1)..(768): Homolog of NCBI NO: 24584107 NR Description: beta'-coatomer protein CG6699-PA [Drosophila
  misc_feature (1)..(777): Homolog of NCBI NO: 27697187 NR Description: Similar to coatomer protein complex, subunit beta
  misc_feature (1)..(796): Homolog of NCBI NO: 27805865 NR Description: coatomer protein complex, subunit beta 2 (beta
  misc_feature (1)..(796): Homolog of NCBI NO: 486784 NR Description: Golgi-associated particle 102K chain - human
  misc_feature (1)..(796): Homolog of NCBI NO: 4758032 NR Description: coatomer protein complex, subunit beta 2 (beta
  misc_feature (1)..(807): Homolog of NCBI NO: 29789080 NR Description: coatomer protein complex, subunit beta 2 (beta
MAKSFEVTELPVRSAKFVARKQWVVAGADDMYIRVYNYNTMDKVKVFEAHSDYIRCVAVHPTLPYVLSSSDDMLIKLWDWEKGWACTQIFEGHSHYVMQVTFNPKDTNTFASASLDRTIKIWNLGSPDPNFTLDAHQKGVNCVDYFTGGDKPYLITGSDDHTAKVWDYQTKSCVQTLEGHTHNVSAVCFHPELPIIITGSEDGTVRIWHATTYRLENTLNYGLERVWAIGYIKSSRRVVIGYDEGTIMVKLGREIPVASMDNTGKIIWAKHNEIQTANIKSIGADYEVTDGERLPLSVKELGTCDLYPQSLKHNPNGRFVVVCGDGEYIIYTALAWRNRSFGSGLEFVWSSEGECAVRESSSKIKIFSKNFQEKRSIRPTFSAEKIFGGTLLAMCSSDFICFYDWAECRLIQRIDVTVKNLYWADSGDLVAIASDTSFYILKFNRDLVTSHFDSGRPTEEEGVEDAFEVLHENDERVRTGIWVGDCFIYNNSSWKLNYCVGGEVTTMYHLDRPMYLLGYLASQSRVFLVDKEFNVIGYTLLLSLIEYKTLVMRGDLDKASEILPTIPKDQHNSVAHFLESRGMIEDALEIATDPDYRFELAIQLGRLEIAQEIAVEVQSESKWKQLGELAMSSGKLQMAEECMKYAMDLSGLLLLYSSLGDAEGVTKLATLAKEQGKNNVAFLCLFMLGKLEDCLQLLVESNRIPEAALMARSYLPSKVSEIVALWRKDLSKVNSKAAESLADPEEYSNLFEDWQVALSVEAKAVETRGVYTGAKDYPSHADKSSMTLVEAFRNLQVEEEESLENGDMDHEEVVAEENGNEQRNEDDVAEHVEEHHEEKEAEEEEGIVDGDSTDGAVLVNGSEADEEWGTNNEGNPSA

SEQ ID NO: 50623 - protein, 848 aa, Arabidopsis thaliana
  peptide (1)..(848): Ceres Seq. ID no. 13588245
  misc_feature (241)..(701): Pfam Name: Coatomer WD associated region Pfam Description: Coatomer WD associated region
  misc_feature (1)..(684): Homolog of NCBI NO: 6321301 NR Description: Involved in endoplasmic-to-Golgi protein
  misc_feature (1)..(841): Homolog of NCBI NO: 3287963 NR Description: PROBABLE COATOMER BETA' SUBUNIT (BETA'-COAT
  misc_feature (1)..(841): Homolog of NCBI NO: 17540286 NR Description: Coatomer (111.1 kD) [Caenorhabditis elegans]
  misc_feature (1)..(738): Homolog of NCBI NO: 3204159 NR Description: coatomer, beta-prime subunit [Drosophila
  misc_feature (1)..(738): Homolog of NCBI NO: 24584107 NR Description: beta'-coatomer protein CG6699-PA [Drosophila
  misc_feature (1)..(747): Homolog of NCBI NO: 27697187 NR Description: Similar to coatomer protein complex, subunit beta
  misc_feature (1)..(766): Homolog of NCBI NO: 27805865 NR Description: coatomer protein complex, subunit beta 2 (beta
  misc_feature (1)..(766): Homolog of NCBI NO: 486784 NR Description: Golgi-associated particle 102K chain - human
  misc_feature (1)..(766): Homolog of NCBI NO: 4758032 NR Description: coatomer protein complex, subunit beta 2 (beta
  misc_feature (1)..(777): Homolog of NCBI NO: 29789080 NR Description: coatomer protein complex, subunit beta 2 (beta
MYIRVYNYNTMDKVKVFEAHSDYIRCVAVHPTLPYVLSSSDDMLIKLWDWEKGWACTQIFEGHSHYVMQVTFNPKDTNTFASASLDRTIKIWNLGSPDPNFTLDAHQKGVNCVDYFTGGDKPYLITGSDDHTAKVWDYQTKSCVQTLEGHTHNVSAVCFHPELPIIITGSEDGTVRIWHATTYRLENTLNYGLERVWAIGYIKSSRRVVIGYDEGTIMVKLGREIPVASMDNTGKIIWAKHNEIQTANIKSIGADYEVTDGERLPLSVKELGTCDLYPQSLKHNPNGRFVVVCGDGEYIIYTALAWRNRSFGSGLEFVWSSEGECAVRESSSKIKIFSKNFQEKRSIRPTFSAEKIFGGTLLAMCSSDFICFYDWAECRLIQRIDVTVKNLYWADSGDLVAIASDTSFYILKFNRDLVTSHFDSGRPTEEEGVEDAFEVLHENDERVRTGIWVGDCFIYNNSSWKLNYCVGGEVTTMYHLDRPMYLLGYLASQSRVFLVDKEFNVIGYTLLLSLIEYKTLVMRGDLDKASEILPTIPKDQHNSVAHFLESRGMIEDALEIATDPDYRFELAIQLGRLEIAQEIAVEVQSESKWKQLGELAMSSGKLQMAEECMKYAMDLSGLLLLYSSLGDAEGVTKLATLAKEQGKNNVAFLCLFMLGKLEDCLQLLVESNRIPEAALMARSYLPSKVSEIVALWRKDLSKVNSKAAESLADPEEYSNLFEDWQVALSVEAKAVETRGVYTGAKDYPSHADKSSMTLVEAFRNLQVEEEESLENGDMDHEEVVAEENGNEQRNEDDVAEHVEEHHEEKEAEEEEGIVDGDSTDGAVLVNGSEADEEWGTNNEGNPSA

SEQ ID NO: 50624 - DNA, 1604 bp, Arabidopsis thaliana
  misc_feature (1)..(1604): Ceres Seq. ID no. 13648518
  misc_feature: MA Experiment ID: 20000234 Result: Down-regulated in Transcription
  misc_feature: MA Experiment 20000234 PARAMETER Experiment Name: At_Siliques_P Parameter: Age (day) Value: 21
  misc_feature: MA Experiment 20000234 PARAMETER Experiment Name: At_Siliques_P Parameter: Organism Value: A. thaliana
  misc_feature: MA Experiment 20000234 PARAMETER Experiment Name: At_Siliques_P Parameter: Plant Line Value: WS
  misc_feature: MA Experiment 20000234 PARAMETER Experiment Name: At_Siliques_P Parameter: Tissue Value: Less Than 5mm Siliques vs. Whole Plant
  misc_feature: MA Experiment ID: 20000235 Result: Down-regulated in Transcription
  misc_feature: MA Experiment 20000235 PARAMETER Experiment Name: At_Siliques_P Parameter: Age (day) Value: 21
  misc_feature: MA Experiment 20000235 PARAMETER Experiment Name: At_Siliques_P Parameter: Organism Value: A. thaliana
  misc_feature: MA Experiment 20000235 PARAMETER Experiment Name: At_Siliques_P Parameter: Plant Line Value: WS
  misc_feature: MA Experiment 20000235 PARAMETER Experiment Name: At_Siliques_P Parameter: Tissue Value: 5-10mm Siliques vs. Whole Plant
  misc_feature: MA Experiment ID: 20000286 Result: Up-regulated in Transcription
  misc_feature: MA Experiment 20000286 PARAMETER Experiment Name: At_Open_Flower_P Parameter: Age (day) Value: 21
  misc_feature: MA Experiment 20000286 PARAMETER Experiment Name: At_Open_Flower_P Parameter: Plant Line Value: WS
  misc_feature: MA Experiment 20000286 PARAMETER Experiment Name: At_Open_Flower_P Parameter: Tissue Value: Half Open vs. Whole Plant
  misc_feature: MA Experiment ID: 20000495 Result: Down-regulated in Transcription
  misc_feature: MA Experiment 20000495 PARAMETER Experiment Name: At_Guard_Cells_P Parameter: Harvest Date Value: 8/2/2002
  misc_feature: MA Experiment 20000495 PARAMETER Experiment Name: At_Guard_Cells_P Parameter: Organism Value: A. thaliana
  misc_feature: MA Experiment 20000495 PARAMETER Experiment Name: At_Guard_Cells_P Parameter: Tissue Value: Guard Cells vs. Leaves
  misc_feature: MA Experiment ID: 20000496 Result: Down-regulated in Transcription
  misc_feature: MA Experiment 20000496 PARAMETER Experiment Name: At_Guard_Cells_P Parameter: Harvest Date Value: 7/19/2002
  misc_feature: MA Experiment 20000496 PARAMETER Experiment Name: At_Guard_Cells_P Parameter: Organism Value: Canola
  misc_feature: MA Experiment 20000496 PARAMETER Experiment Name: At_Guard_Cells_P Parameter: Tissue Value: Guard Cells vs. Leaves
  misc_feature: MA Experiment ID: 20001451 Result: Down-regulated in Transcription
  misc_feature: MA Experiment 20001451 PARAMETER Experiment Name: At_Far-red-induction_P Parameter: Age (day) Value: 7
  misc_feature: MA Experiment 20001451 PARAMETER Experiment Name: At_Far-red-induction_P Parameter: Light Value: Far-red vs. White
  misc_feature: MA Experiment 20001451 PARAMETER Experiment Name: At_Far-red-induction_P Parameter: Organism Value: A. thaliana
  misc_feature: MA Experiment 20001451 PARAMETER Experiment Name: At_Far-red-induction_P Parameter: Plant Line Value: Columbia
  misc_feature: MA Experiment 20001451 PARAMETER Experiment Name: At_Far-red-induction_P Parameter: Timepoint (hr) Value: 24
  misc_feature: MA Experiment 20001451 PARAMETER Experiment Name: At_Far-red-induction_P Parameter: Tissue Value: Whole Plant
agctctcattttctctctcatcttcaaccttaactctcttttctctctactctttctttggacgaatctgtctattgtttgtaagttttcaaggaaggtaaagaaacagagagatctaacttcgtctgcagggtttaagcagaggttggtttgtggattcttcgatttcttcttcagatttagtctacaatgaagtgagaatttctaaagataaacaaagaaaaacttgagactttagcaagatggagactgtgagaccaatggttgttgctcctaagggtaacaaactcagacgcaagtttgctaaagttcttaacattcataagctaacgggtgttgctccagaaggagaaatgaagaagataaagttcgattccaaaaccgctaagttgtctgagtcgttctacaagcttgaggaagagtatgagagaagtcagggattggaagctcttcttgcgaagctttttgctacggtttcttcgatcaaagcggcttatgcgcagttacagcattctcagtctccgtatgactctatcgggattcaaaaagcagataacttggtagtcgccgagcttaagactttgtctgagctgaaacaatgtttcatgaagaaacaagtggatccaaatcccgaaagaactctggttctcgcggagattcaagagctgaggagtctattgaaaacgtatgagataatggggaagaagctggagtctcagtacaagcttaaagactcagagattatatttctgagagagaaacttgatgaatcgatgaaacagaacaagttgacagagaagagacttaaccaaagcggacaactttgcaatccacttgacaatcttcacctatctgcgctaaatccaacacatttcgttacttatctgcaccacacagtcaagtccaccagaggtttcgtcaagctaatgatcgaacaaatgaaactcgctggatgggatatttcatcagctgctaattcgatccatcccggtgtgttctactacaagcaagaccacaagtgtttcactttcgaacactttgtctccaatgtgatgttcgaagcgtttcatctaccgtacttctcaacttcaagcgagtcaagaagctacaagaagaagaaacagagcaatgcagatagagaaatgttctttgaaaggtttaaagaactcaggtcgatgaaagcgaaagattatctaaccgcgaggcctaaatcaagattcgctaggttctgtcgagccaagtacttgcagcttatacatccaaagatggagcaagctttcttcggacatttgcatttgagaaaccaagtttctgctggtgaattcccggagacgagcttattctctggatttcttgaaatggcgaaacgaatttggcttttgcattgcttggctctctcttttgaacgtgaagctgagatctttcgagtacctaaaggttgtagattctctgaagtgtatatgaagagtgtagcagaagaagcgtttttcccggcggcggagagttcgccggagtctgagccacgtgtcgcgttcacggttgttccagggtttagaattgggaagacttcaatacaatgcgaggtctatctctcgctttcatga

SEQ ID NO: 50625 - protein, 453 aa, Arabidopsis thaliana
  peptide (1)..(453): Ceres Seq. ID no. 13648519
  misc_feature (56)..(188): Pfam Name: Plant protein of unknown function (DUF641) Pfam Description: Plant protein of unknown function (DUF641)
  misc_feature (57)..(338): Homolog of NCBI NO: 15234143 NR Description: hypothetical protein [Arabidopsis thaliana]
  misc_feature (57)..(346): Homolog of NCBI NO: 15235221 NR Description: expressed protein [Arabidopsis thaliana]
  misc_feature (36)..(451): Homolog of NCBI NO: 15232398 NR Description: expressed protein [Arabidopsis thaliana]
  misc_feature (43)..(421): Homolog of NCBI NO: 22329840 NR Description: expressed protein [Arabidopsis thaliana]
  misc_feature (43)..(421): Homolog of NCBI NO: 20466324 NR Description: unknown protein [Arabidopsis thaliana]
  misc_feature (57)..(451): Homolog of NCBI NO: 15225441 NR Description: expressed protein [Arabidopsis thaliana]
  misc_feature (68)..(451): Homolog of NCBI NO: 34903732 NR Description: unnamed protein product [Oryza sativa (japonica
  misc_feature (1)..(453): Homolog of NCBI NO: 15231944 NR Description: expressed protein [Arabidopsis thaliana]
  misc_feature (1)..(453): Homolog of NCBI NO: 8777470 NR Description: gb|AAB82637.1~gene_id:K15M2.1~similar to unknown
  misc_feature (1)..(453): Homolog of NCBI NO: 15219282 NR Description: expressed protein [Arabidopsis thaliana]
METVRPMVVAPKGNKLRRKFAKVLNIHKLTGVAPEGEMKKIKFDSKTAKLSESFYKLEEEYERSQGLEALLAKLFATVSSIKAAYAQLQHSQSPYDSIGIQKADNLVVAELKTLSELKQCFMKKQVDPNPERTLVLAEIQELRSLLKTYEIMGKKLESQYKLKDSEIIFLREKLDESMKQNKLTEKRLNQSGQLCNPLDNLHLSALNPTHFVTYLHHTVKSTRGFVKLMIEQMKLAGWDISSAANSIHPGVFYYKQDHKCFTFEHFVSNVMFEAFHLPYFSTSSESRSYKKKKQSNADREMFFERFKELRSMKAKDYLTARPKSRFARFCRAKYLQLIHPKMEQAFFGHLHLRNQVSAGEFPETSLFSGFLEMAKRIWLLHCLALSFEREAEIFRVPKGCRFSEVYMKSVAEEAFFPAAESSPESEPRVAFTVVPGFRIGKTSIQCEVYLSLS

SEQ ID NO: 50626 - protein, 447 aa, Arabidopsis thaliana
  peptide (1)..(447): Ceres Seq. ID no. 13648520
  misc_feature (50)..(182): Pfam Name: Plant protein of unknown function (DUF641) Pfam Description: Plant protein of unknown function (DUF641)
  misc_feature (51)..(332): Homolog of NCBI NO: 15234143 NR Description: hypothetical protein [Arabidopsis thaliana]
  misc_feature (51)..(340): Homolog of NCBI NO: 15235221 NR Description: expressed protein [Arabidopsis thaliana]
  misc_feature (30)..(445): Homolog of NCBI NO: 15232398 NR Description: expressed protein [Arabidopsis thaliana]
  misc_feature (37)..(415): Homolog of NCBI NO: 22329840 NR Description: expressed protein [Arabidopsis thaliana]
  misc_feature (37)..(415): Homolog of NCBI NO: 20466324 NR Description: unknown protein [Arabidopsis thaliana]
  misc_feature (51)..(445): Homolog of NCBI NO: 15225441 NR Description: expressed protein [Arabidopsis thaliana]
  misc_feature (62)..(445): Homolog of NCBI NO: 34903732 NR Description: unnamed protein product [Oryza sativa (japonica
  misc_feature (1)..(447): Homolog of NCBI NO: 15231944 NR Description: expressed protein [Arabidopsis thaliana]
  misc_feature (1)..(447): Homolog of NCBI NO: 8777470 NR Description: gb|AAB82637.1~gene_id:K15M2.1~similar to unknown
  misc_feature (1)..(447): Homolog of NCBI NO: 15219282 NR Description: expressed protein [Arabidopsis thaliana]
MVVAPKGNKLRRKFAKVLNIHKLTGVAPEGEMKKIKFDSKTAKLSESFYKLEEEYERSQGLEALLAKLFATVSSIKAAYAQLQHSQSPYDSIGIQKADNLVVAELKTLSELKQCFMKKQVDPNPERTLVLAEIQELRSLLKTYEIMGKKLESQYKLKDSEIIFLREKLDESMKQNKLTEKRLNQSGQLCNPLDNLHLSALNPTHFVTYLHHTVKSTRGFVKLMIEQMKLAGWDISSAANSIHPGVFYYKQDHKCFTFEHFVSNVMFEAFHLPYFSTSSESRSYKKKKQSNADREMFFERFKELRSMKAKDYLTARPKSRFARFCRAKYLQLIHPKMEQAFFGHLHLRNQVSAGEFPETSLFSGFLEMAKRIWLLHCLALSFEREAEIFRVPKGCRFSEVYMKSVAEEAFFPAAESSPESEPRVAFTVVPGFRIGKTSIQCEVYLSLS

SEQ ID NO: 50627 - protein, 416 aa, Arabidopsis thaliana
  peptide (1)..(416): Ceres Seq. ID no. 13648521
  misc_feature (19)..(151): Pfam Name: Plant protein of unknown function (DUF641) Pfam Description: Plant protein of unknown function (DUF641)
  misc_feature (20)..(301): Homolog of NCBI NO: 15234143 NR Description: hypothetical protein [Arabidopsis thaliana]
  misc_feature (20)..(309): Homolog of NCBI NO: 15235221 NR Description: expressed protein [Arabidopsis thaliana]
  misc_feature (1)..(414): Homolog of NCBI NO: 15232398 NR Description: expressed protein [Arabidopsis thaliana]
  misc_feature (6)..(384): Homolog of NCBI NO: 22329840 NR Description: expressed protein [Arabidopsis thaliana]
  misc_feature (6)..(384): Homolog of NCBI NO: 20466324 NR Description: unknown protein [Arabidopsis thaliana]
  misc_feature (20)..(414): Homolog of NCBI NO: 15225441 NR Description: expressed protein [Arabidopsis thaliana]
  misc_feature (31)..(414): Homolog of NCBI NO: 34903732 NR Description: unnamed protein product [Oryza sativa (japonica
  misc_feature (1)..(416): Homolog of NCBI NO: 15231944 NR Description: expressed protein [Arabidopsis thaliana]
  misc_feature (1)..(416): Homolog of NCBI NO: 8777470 NR Description: gb|AAB82637.1~gene_id:K15M2.1~similar to unknown
  misc_feature (1)..(416): Homolog of NCBI NO: 15219282 NR Description: expressed protein [Arabidopsis thaliana]
MKKIKFDSKTAKLSESFYKLEEEYERSQGLEALLAKLFATVSSIKAAYAQLQHSQSPYDSIGIQKADNLVVAELKTLSELKQCFMKKQVDPNPERTLVLAEIQELRSLLKTYEIMGKKLESQYKLKDSEIIFLREKLDESMKQNKLTEKRLNQSGQLCNPLDNLHLSALNPTHFVTYLHHTVKSTRGFVKLMIEQMKLAGWDISSAANSIHPGVFYYKQDHKCFTFEHFVSNVMFEAFHLPYFSTSSESRSYKKKKQSNADREMFFERFKELRSMKAKDYLTARPKSRFARFCRAKYLQLIHPKMEQAFFGHLHLRNQVSAGEFPETSLFSGFLEMAKRIWLLHCLALSFEREAEIFRVPKGCRFSEVYMKSVAEEAFFPAAESSPESEPRVAFTVVPGFRIGKTSIQCEVYLSLS

SEQ ID NO: 50628 - DNA, 1212 bp, Arabidopsis thaliana; identical to SEQ ID NO: 49998
  misc_feature (1)..(1212): Ceres Seq. ID no. 13592406
  misc_feature: MA Experiment ID: 20000314 Result: Down-regulated in Transcription
  misc_feature: MA Experiment 20000314 PARAMETER Experiment Name: At_14day_Shoots-Roots_Sub_P Parameter: Age (day) Value: 14
  misc_feature: MA Experiment 20000314 PARAMETER Experiment Name: At_14day_Shoots-Roots_Sub_P Parameter: Organism Value: A. thaliana
  misc_feature: MA Experiment 20000314 PARAMETER Experiment Name: At_14day_Shoots-Roots_Sub_P Parameter: Plant Line Value: WS
  misc_feature: MA Experiment 20000314 PARAMETER Experiment Name: At_14day_Shoots-Roots_Sub_P Parameter: Tissue Value: Roots vs. Whole Plant
  misc_feature: MA Experiment ID: 20000315 Result: Up-regulated in Transcription
  misc_feature: MA Experiment 20000315 PARAMETER Experiment Name: At_14day_Shoots-Roots_Sub_P Parameter: Age (day) Value: 14
  misc_feature: MA Experiment 20000315 PARAMETER Experiment Name: At_14day_Shoots-Roots_Sub_P Parameter: Organism Value: A. thaliana
  misc_feature: MA Experiment 20000315 PARAMETER Experiment Name: At_14day_Shoots-Roots_Sub_P Parameter: Plant Line Value: WS
  misc_feature: MA Experiment 20000315 PARAMETER Experiment Name: At_14day_Shoots-Roots_Sub_P Parameter: Tissue Value: Shoots vs. Whole Plant
  misc_feature: MA Experiment ID: 20000355 Result: Down-regulated in Transcription
  misc_feature: MA Experiment 20000355 PARAMETER Experiment Name: At_Siliques_Sub_P Parameter: Age (day) Value: 21
  misc_feature: MA Experiment 20000355 PARAMETER Experiment Name: At_Siliques_Sub_P Parameter: Organism Value: A. thaliana
  misc_feature: MA Experiment 20000355 PARAMETER Experiment Name: At_Siliques_Sub_P Parameter: Plant Line Value: WS
  misc_feature: MA Experiment 20000355 PARAMETER Experiment Name: At_Siliques_Sub_P Parameter: Tissue Value: Less Than 5mm Siliques vs. Whole Plant
  misc_feature: MA Experiment ID: 20000440 Result: Up-regulated in Transcription
  misc_feature: MA Experiment 20000440 PARAMETER Experiment Name: At_Closed-Flower__Sub_P Parameter: Tissue Value: Closed Flower vs. Whole Plant

SEQ ID NO: 50629 - protein, 279 aa, Arabidopsis thaliana; identical to SEQ ID NO: 49999
  peptide (1)..(279): Ceres Seq. ID no. 13592407
  misc_feature (70)..(129): Pfam Name: ZF-HD protein dimerisation region Pfam Description: ZF-HD protein dimerisation region
  misc_feature (70)..(129): Pfam Name: ZF-HD protein dimerisation region Pfam Description: ZF-HD protein dimerisation region
  misc_feature (47)..(252): Homolog of NCBI NO: 13277216 NR Description: ZF-HD homeobox protein [Flaveria trinervia]
  misc_feature (74)..(247): Homolog of NCBI NO: 15223757 NR Description: expressed protein [Arabidopsis thaliana]
  misc_feature (75)..(250): Homolog of NCBI NO: 15222382 NR Description: hypothetical protein [Arabidopsis thaliana]
  misc_feature (75)..(252): Homolog of NCBI NO: 13277218 NR Description: ZF-HD homeobox protein [Flaveria bidentis]
  misc_feature (40)..(278): Homolog of NCBI NO: 5091602 NR Description: 10A19I.6 [Oryza sativa]
  misc_feature (47)..(252): Homolog of NCBI NO: 13277216 NR Description: ZF-HD homeobox protein [Flaveria trinervia]
  misc_feature (75)..(250): Homolog of NCBI NO: 15222382 NR Description: hypothetical protein [Arabidopsis thaliana]
  misc_feature (40)..(278): Homolog of NCBI NO: 5091602 NR Description: 10A19I.6 [Oryza sativa]
  misc_feature (1)..(279): Homolog of NCBI NO: 15238445 NR Description: expressed protein [Arabidopsis thaliana]
  misc_feature (36)..(254): Homolog of NCBI NO: 15233925 NR Description: expressed protein [Arabidopsis thaliana]
  misc_feature (21)..(254): Homolog of NCBI NO: 13374061 NR Description: ZF-HD homeobox protein [Flaveria bidentis]
  misc_feature (4)..(189): Homolog of NCBI NO: 18410804 NR Description: expressed protein [Arabidopsis thaliana]
  misc_feature (191)..(256): Homolog of NCBI NO: 18410804 NR Description: expressed protein [Arabidopsis thaliana]
  misc_feature (75)..(252): Homolog of NCBI NO: 13277218 NR Description: ZF-HD homeobox protein [Flaveria bidentis]
  misc_feature (74)..(247): Homolog of NCBI NO: 15223757 NR Description: expressed protein [Arabidopsis thaliana]
  misc_feature (191)..(256): Homolog of NCBI NO: 18410804 NR Description: expressed protein [Arabidopsis thaliana]
  misc_feature (4)..(189): Homolog of NCBI NO: 18410804 NR Description: expressed protein [Arabidopsis thaliana]
  misc_feature (21)..(254): Homolog of NCBI NO: 13374061 NR Description: ZF-HD homeobox protein [Flaveria bidentis]
  misc_feature (36)..(254): Homolog of NCBI NO: 15233925 NR Description: expressed protein [Arabidopsis thaliana]
  misc_feature (1)..(279): Homolog of NCBI NO: 15238445 NR Description: expressed protein [Arabidopsis thaliana]

SEQ ID NO: 50630 - protein, 262 aa, Arabidopsis thaliana; identical to SEQ ID NO: 50000
  peptide (1)..(262): Ceres Seq. ID no. 13592408
  misc_feature (53)..(112): Pfam Name: ZF-HD protein dimerisation region Pfam Description: ZF-HD protein dimerisation region
  misc_feature (53)..(112): Pfam Name: ZF-HD protein dimerisation region Pfam Description: ZF-HD protein dimerisation region
  misc_feature (30)..(235): Homolog of NCBI NO: 13277216 NR Description: ZF-HD homeobox protein [Flaveria trinervia]
  misc_feature (57)..(230): Homolog of NCBI NO: 15223757 NR Description: expressed protein [Arabidopsis thaliana]
  misc_feature (58)..(233): Homolog of NCBI NO: 15222382 NR Description: hypothetical protein [Arabidopsis thaliana]
  misc_feature (58)..(235): Homolog of NCBI NO: 13277218 NR Description: ZF-HD homeobox protein [Flaveria bidentis]
  misc_feature (23)..(261): Homolog of NCBI NO: 5091602 NR Description: 10A19I.6 [Oryza sativa]
  misc_feature (30)..(235): Homolog of NCBI NO: 13277216 NR Description: ZF-HD homeobox protein [Flaveria trinervia]
  misc_feature (58)..(233): Homolog of NCBI NO: 15222382 NR Description: hypothetical protein [Arabidopsis thaliana]
  misc_feature (23)..(261): Homolog of NCBI NO: 5091602 NR Description: 10A19I.6 [Oryza sativa]
  misc_feature (1)..(262): Homolog of NCBI NO: 15238445 NR Description: expressed protein [Arabidopsis thaliana]
  misc_feature (19)..(237): Homolog of NCBI NO: 15233925 NR Description: expressed protein [Arabidopsis thaliana]
  misc_feature (4)..(237): Homolog of NCBI NO: 13374061 NR Description: ZF-HD homeobox protein [Flaveria bidentis]
  misc_feature (1)..(172): Homolog of NCBI NO: 18410804 NR Description: expressed protein [Arabidopsis thaliana]
  misc_feature (174)..(239): Homolog of NCBI NO: 18410804 NR Description: expressed protein [Arabidopsis thaliana]
  misc_feature (58)..(235): Homolog of NCBI NO: 13277218 NR Description: ZF-HD homeobox protein [Flaveria bidentis]
  misc_feature (57)..(230): Homolog of NCBI NO: 15223757 NR Description: expressed protein [Arabidopsis thaliana]
  misc_feature (174)..(239): Homolog of NCBI NO: 18410804 NR Description: expressed protein [Arabidopsis thaliana]
  misc_feature (1)..(172): Homolog of NCBI NO: 18410804 NR Description: expressed protein [Arabidopsis thaliana]
  misc_feature (4)..(237): Homolog of NCBI NO: 13374061 NR Description: ZF-HD homeobox protein [Flaveria bidentis]
  misc_feature (19)..(237): Homolog of NCBI NO: 15233925 NR Description: expressed protein [Arabidopsis thaliana]
  misc_feature (1)..(262): Homolog of NCBI NO: 15238445 NR Description: expressed protein [Arabidopsis thaliana]

SEQ ID NO: 50631 - protein, 217 aa, Arabidopsis thaliana; identical to SEQ ID NO: 50001
  peptide (1)..(217): Ceres Seq. ID no. 13592409
  misc_feature (8)..(67): Pfam Name: ZF-HD protein dimerisation region Pfam Description: ZF-HD protein dimerisation region
  misc_feature (8)..(67): Pfam Name: ZF-HD protein dimerisation region Pfam Description: ZF-HD protein dimerisation region
  misc_feature (1)..(190): Homolog of NCBI NO: 13277216 NR Description: ZF-HD homeobox protein [Flaveria trinervia]
  misc_feature (12)..(185): Homolog of NCBI NO: 15223757 NR Description: expressed protein [Arabidopsis thaliana]
  misc_feature (13)..(188): Homolog of NCBI NO: 15222382 NR Description: hypothetical protein [Arabidopsis thaliana]
  misc_feature (13)..(190): Homolog of NCBI NO: 13277218 NR Description: ZF-HD homeobox protein [Flaveria bidentis]
  misc_feature (1)..(216): Homolog of NCBI NO: 5091602 NR Description: 10A19I.6 [Oryza sativa]
  misc_feature (1)..(190): Homolog of NCBI NO: 13277216 NR Description: ZF-HD homeobox protein [Flaveria trinervia]
  misc_feature (13)..(188): Homolog of NCBI NO: 15222382 NR Description: hypothetical protein [Arabidopsis thaliana]
  misc_feature (1)..(216): Homolog of NCBI NO: 5091602 NR Description: 10A19I.6 [Oryza sativa]
  misc_feature (1)..(217): Homolog of NCBI NO: 15238445 NR Description: expressed protein [Arabidopsis thaliana]
  misc_feature (1)..(192): Homolog of NCBI NO: 15233925 NR Description: expressed protein [Arabidopsis thaliana]
  misc_feature (1)..(192): Homolog of NCBI NO: 13374061 NR Description: ZF-HD homeobox protein [Flaveria bidentis]
  misc_feature (1)..(127): Homolog of NCBI NO: 18410804 NR Description: expressed protein [Arabidopsis thaliana]
  misc_feature (129)..(194): Homolog of NCBI NO: 18410804 NR Description: expressed protein [Arabidopsis thaliana]
  misc_feature (13)..(190): Homolog of NCBI NO: 13277218 NR Description: ZF-HD homeobox protein [Flaveria bidentis]
  misc_feature (12)..(185): Homolog of NCBI NO: 15223757 NR Description: expressed protein [Arabidopsis thaliana]
  misc_feature (129)..(194): Homolog of NCBI NO: 18410804 NR Description: expressed protein [Arabidopsis thaliana]
  misc_feature (1)..(127): Homolog of NCBI NO: 18410804 NR Description: expressed protein [Arabidopsis thaliana]
  misc_feature (1)..(192): Homolog of NCBI NO: 13374061 NR Description: ZF-HD homeobox protein [Flaveria bidentis]
  misc_feature (1)..(192): Homolog of NCBI NO: 15233925 NR Description: expressed protein [Arabidopsis thaliana]
  misc_feature (1)..(217): Homolog of NCBI NO: 15238445 NR Description: expressed protein [Arabidopsis thaliana]

SEQ ID NO: 50632 - DNA, 1357 bp, Arabidopsis thaliana
  misc_feature (1)..(1357): Ceres Seq. ID no. 14304311
  misc_feature: MA Experiment ID: 20000179 Result: Up-regulated in Transcription
  misc_feature: MA Experiment 20000179 PARAMETER Experiment Name: At_Germinating_Seeds_P Parameter: Age (hr) Value: 6 vs. 0
  misc_feature: MA Experiment 20000179 PARAMETER Experiment Name: At_Germinating_Seeds_P Parameter: Tissue Value: Germinating Seeds
  misc_feature: MA Experiment ID: 20000184 Result: Down-regulated in Transcription
  misc_feature: MA Experiment 20000184 PARAMETER Experiment Name: At_Shoots__P Parameter: Age (day) Value: 7
  misc_feature: MA Experiment 20000184 PARAMETER Experiment Name: At_Shoots__P Parameter: Tissue Value: Shoots vs. Whole Plant
  misc_feature: MA Experiment ID: 20000234 Result: Up-regulated in Transcription
  misc_feature: MA Experiment 20000234 PARAMETER Experiment Name: At_Siliques_P Parameter: Age (day) Value: 21
  misc_feature: MA Experiment 20000234 PARAMETER Experiment Name: At_Siliques_P Parameter: Organism Value: A. thaliana
  misc_feature: MA Experiment 20000234 PARAMETER Experiment Name: At_Siliques_P Parameter: Plant Line Value: WS
  misc_feature: MA Experiment 20000234 PARAMETER Experiment Name: At_Siliques_P Parameter: Tissue Value: Less Than 5mm Siliques vs. Whole Plant
  misc_feature: MA Experiment ID: 20000265 Result: Up-regulated in Transcription
  misc_feature: MA Experiment 20000265 PARAMETER Experiment Name: At_Open_Flower_P Parameter: Age (day) Value: 21
  misc_feature: MA Experiment 20000265 PARAMETER Experiment Name: At_Open_Flower_P Parameter: Plant Line Value: WS
  misc_feature: MA Experiment 20000265 PARAMETER Experiment Name: At_Open_Flower_P Parameter: Tissue Value: Closed Flower vs. Whole Plant
gacccttctgttaccgcttttacgttcgactccagattcctcctttgccggaatattccatacgtaagagatattgaaatcgccgatgatggaaagttcgattccgtctgagaacggctccgttacctctgatcgtgatagatcggctctaatattcctaggaactggatgttcaagcgcggtacctaacgcaatgtgcttgatccagcgatctgataatccctgctatgtttgttcccagtctctttcaatcccgcctgagaaaaatcctaattacagggggaatacttcactgctcattgattattgccaaagtgatggcaaacataaatacattcaaatcgatgttggcaagactttcagagaacaagtccttcgttggtttactcttcacaagattcctcaagttgattctataattttgactcatgaacatgctgatgcagtacttggcctggatgatatacgttcagtgcaaccatttagtcctactaatgatattgatcctactccaatttttgtaagccaatatgctatggaaagccttgctgtgaagttcccgtatttggttcagaagaaacttaaagaaggccaagaagttaggcgagtagcacagctagattggagagtaattgaagaagattgtgagaagccatttgtagcttcaggtttatcattcacgccacttccagtgatgcatggagaagactatgtatgtcttggcttcctttttggtgaaaaatcaagagtggcttatatatccgatgtttcacggtttcctccaaacaccgagtatgctatatcaaaatctggtggtggacaattggatctccttattttggatacattatataagacaggatcccacaacactcacttatgtttcccgcagacactagacacaatcaaaagactgagtccaaaaagggctcttctgattggaatgactcacgagtttgatcatcacaaggacaacgagtttcttgaagaatggtctaaaagggaagggatttcagtaaaactcgctcatgatggcttgagagtcccaatagacctatgaagaggtgaaaatgattacttggctttctcattaacgaaactaagatcattgccttattttttatctgacttctgattcactcaatgaggaagcttgtaggtctccttgtgttatagagagatagagagcggagtgaaacggttttgttcaagatgcataatgctcgcatggcttcatatcaacattatcactaatgtttttgtttcttcttcaagttttagctaggatttctgactaaacgacgattttttaatattatcagatatacatgttaaaataaaaacaaagaaacaagac

SEQ ID NO: 50633 - protein, 324 aa, Arabidopsis thaliana
  peptide (1)..(324): Ceres Seq. ID no. 14304312
  misc_feature (67)..(287): Pfam Name: Metallo-beta-lactamase superfamily Pfam Description: Metallo-beta-lactamase superfamily
  misc_feature (43)..(185): Homolog of NCBI NO: 23479436 NR Description: hypothetical protein [Plasmodium yoelii yoelii]
  misc_feature (201)..(323): Homolog of NCBI NO: 23509056 NR Description: hypothetical protein [Plasmodium falciparum 3D7]
  misc_feature (44)..(186): Homolog of NCBI NO: 23509056 NR Description: hypothetical protein [Plasmodium falciparum 3D7]
  misc_feature (20)..(317): Homolog of NCBI NO: 19075752 NR Description: putative hydrolase [Schizosaccharomyces pombe]
  misc_feature (84)..(324): Homolog of NCBI NO: 9294602 NR Description: hydrolase-like protein [Arabidopsis thaliana]
  misc_feature (279)..(324): Homolog of NCBI NO: 15231379 NR Description: hydrolase, putative [Arabidopsis thaliana]
  misc_feature (6)..(241): Homolog of NCBI NO: 15231379 NR Description: hydrolase, putative [Arabidopsis thaliana]
  misc_feature (15)..(307): Homolog of NCBI NO: 15236346 NR Description: hydrolase -related [Arabidopsis thaliana]
  misc_feature (2)..(324): Homolog of NCBI NO: 25513552 NR Description: 36.3K hypothetical protein F12P21.8 - Arabidopsis
  misc_feature (1)..(324): Homolog of NCBI NO: 30691663 NR Description: expressed protein [Arabidopsis thaliana]
MMESSIPSENGSVTSDRDRSALIFLGTGCSSAVPNAMCLIQRSDNPCYVCSQSLSIPPEKNPNYRGNTSLLIDYCQSDGKHKYIQIDVGKTFREQVLRWFTLHKIPQVDSIILTHEHADAVLGLDDIRSVQPFSPTNDIDPTPIFVSQYAMESLAVKFPYLVQKKLKEGQEVRRVAQLDWRVIEEDCEKPFVASGLSFTPLPVMHGEDYVCLGFLFGEKSRVAYISDVSRFPPNTEYAISKSGGGQLDLLILDTLYKTGSHNTHLCFPQTLDTIKRLSPKRALLIGMTHEFDHHKDNEFLEEWSKREGISVKLAHDGLRVPIDL

SEQ ID NO: 50634 - protein, 323 aa, Arabidopsis thaliana
  peptide (1)..(323): Ceres Seq. ID no. 14304313
  misc_feature (66)..(286): Pfam Name: Metallo-beta-lactamase superfamily Pfam Description: Metallo-beta-lactamase superfamily
  misc_feature (42)..(184): Homolog of NCBI NO: 23479436 NR Description: hypothetical protein [Plasmodium yoelii yoelii]
  misc_feature (200)..(322): Homolog of NCBI NO: 23509056 NR Description: hypothetical protein [Plasmodium falciparum 3D7]
  misc_feature (43)..(185): Homolog of NCBI NO: 23509056 NR Description: hypothetical protein [Plasmodium falciparum 3D7]
  misc_feature (19)..(316): Homolog of NCBI NO: 19075752 NR Description: putative hydrolase [Schizosaccharomyces pombe]
  misc_feature (83)..(323): Homolog of NCBI NO: 9294602 NR Description: hydrolase-like protein [Arabidopsis thaliana]
  misc_feature (278)..(323): Homolog of NCBI NO: 15231379 NR Description: hydrolase, putative [Arabidopsis thaliana]
  misc_feature (5)..(240): Homolog of NCBI NO: 15231379 NR Description: hydrolase, putative [Arabidopsis thaliana]
  misc_feature (14)..(306): Homolog of NCBI NO: 15236346 NR Description: hydrolase -related [Arabidopsis thaliana]
  misc_feature (1)..(323): Homolog of NCBI NO: 25513552 NR Description: 36.3K hypothetical protein F12P21.8 - Arabidopsis
  misc_feature (1)..(323): Homolog of NCBI NO: 30691663 NR Description: expressed protein [Arabidopsis thaliana]
MESSIPSENGSVTSDRDRSALIFLGTGCSSAVPNAMCLIQRSDNPCYVCSQSLSIPPEKNPNYRGNTSLLIDYCQSDGKHKYIQIDVGKTFREQVLRWFTLHKIPQVDSIILTHEHADAVLGLDDIRSVQPFSPTNDIDPTPIFVSQYAMESLAVKFPYLVQKKLKEGQEVRRVAQLDWRVIEEDCEKPFVASGLSFTPLPVMHGEDYVCLGFLFGEKSRVAYISDVSRFPPNTEYAISKSGGGQLDLLILDTLYKTGSHNTHLCFPQTLDTIKRLSPKRALLIGMTHEFDHHKDNEFLEEWSKREGISVKLAHDGLRVPIDL

SEQ ID NO: 50635 - protein, 288 aa, Arabidopsis thaliana
  peptide (1)..(288): Ceres Seq. ID no. 14304314
  misc_feature (31)..(251): Pfam Name: Metallo-beta-lactamase superfamily Pfam Description: Metallo-beta-lactamase superfamily
  misc_feature (7)..(149): Homolog of NCBI NO: 23479436 NR Description: hypothetical protein [Plasmodium yoelii yoelii]
  misc_feature (165)..(287): Homolog of NCBI NO: 23509056 NR Description: hypothetical protein [Plasmodium falciparum 3D7]
  misc_feature (8)..(150): Homolog of NCBI NO: 23509056 NR Description: hypothetical protein [Plasmodium falciparum 3D7]
  misc_feature (1)..(281): Homolog of NCBI NO: 19075752 NR Description: putative hydrolase [Schizosaccharomyces pombe]
  misc_feature (48)..(288): Homolog of NCBI NO: 9294602 NR Description: hydrolase-like protein [Arabidopsis thaliana]
  misc_feature (243)..(288): Homolog of NCBI NO: 15231379 NR Description: hydrolase, putative [Arabidopsis thaliana]
  misc_feature (1)..(205): Homolog of NCBI NO: 15231379 NR Description: hydrolase, putative [Arabidopsis thaliana]
  misc_feature (1)..(271): Homolog of NCBI NO: 15236346 NR Description: hydrolase -related [Arabidopsis thaliana]
  misc_feature (1)..(288): Homolog of NCBI NO: 25513552 NR Description: 36.3K hypothetical protein F12P21.8 - Arabidopsis
  misc_feature (1)..(288): Homolog of NCBI NO: 30691663 NR Description: expressed protein [Arabidopsis thaliana]
MCLIQRSDNPCYVCSQSLSIPPEKNPNYRGNTSLLIDYCQSDGKHKYIQIDVGKTFREQVLRWFTLHKIPQVDSIILTHEHADAVLGLDDIRSVQPFSPTNDIDPTPIFVSQYAMESLAVKFPYLVQKKLKEGQEVRRVAQLDWRVIEEDCEKPFVASGLSFTPLPVMHGEDYVCLGFLFGEKSRVAYISDVSRFPPNTEYAISKSGGGQLDLLILDTLYKTGSHNTHLCFPQTLDTIKRLSPKRALLIGMTHEFDHHKDNEFLEEWSKREGISVKLAHDGLRVPIDL

SEQ ID NO: 50636 - DNA, 1752 bp, Arabidopsis thaliana; identical to SEQ ID NO: 50408
  misc_feature (1)..(1752): Ceres Seq. ID no. 13648147
  misc_feature: MA Experiment ID: 20000179 Result: Up-regulated in Transcription
  misc_feature: MA Experiment 20000179 PARAMETER Experiment Name: At_Germinating_Seeds_P Parameter: Age (hr) Value: 6 vs. 0
  misc_feature: MA Experiment 20000179 PARAMETER Experiment Name: At_Germinating_Seeds_P Parameter: Tissue Value: Germinating Seeds
  misc_feature: MA Experiment ID: 20000185 Result: Down-regulated in Transcription
  misc_feature: MA Experiment 20000185 PARAMETER Experiment Name: At_Roots__P Parameter: Age (day) Value: 7 vs. 21
  misc_feature: MA Experiment 20000185 PARAMETER Experiment Name: At_Roots__P Parameter: Organism Value: A. thaliana
  misc_feature: MA Experiment 20000185 PARAMETER Experiment Name: At_Roots__P Parameter: Tissue Value: Roots vs. Whole Plant
  misc_feature: MA Experiment ID: 20000439 Result: Down-regulated in Transcription
  misc_feature: MA Experiment 20000439 PARAMETER Experiment Name: At_Roots__P Parameter: Age (day) Value: 14 vs. 21
  misc_feature: MA Experiment 20000439 PARAMETER Experiment Name: At_Roots__P Parameter: Organism Value: A. thaliana
  misc_feature: MA Experiment 20000439 PARAMETER Experiment Name: At_Roots__P Parameter: Tissue Value: Roots vs. Whole Plant
  misc_feature: MA Experiment ID: 20000495 Result: Down-regulated in Transcription
  misc_feature: MA Experiment 20000495 PARAMETER Experiment Name: At_Guard_Cells_P Parameter: Harvest Date Value: 8/2/2002
  misc_feature: MA Experiment 20000495 PARAMETER Experiment Name: At_Guard_Cells_P Parameter: Organism Value: A. thaliana
  misc_feature: MA Experiment 20000495 PARAMETER Experiment Name: At_Guard_Cells_P Parameter: Tissue Value: Guard Cells vs. Leaves
  misc_feature: MA Experiment ID: 20000496 Result: Down-regulated in Transcription
  misc_feature: MA Experiment 20000496 PARAMETER Experiment Name: At_Guard_Cells_P Parameter: Harvest Date Value: 7/19/2002
  misc_feature: MA Experiment 20000496 PARAMETER Experiment Name: At_Guard_Cells_P Parameter: Organism Value: Canola
  misc_feature: MA Experiment 20000496 PARAMETER Experiment Name: At_Guard_Cells_P Parameter: Tissue Value: Guard Cells vs. Leaves
  misc_feature: MA Experiment ID: 20000527 Result: Up-regulated in Transcription
  misc_feature: MA Experiment 20000527 PARAMETER Experiment Name: At_10percent_PEG_P Parameter: Age (day) Value: 20
  misc_feature: MA Experiment 20000527 PARAMETER Experiment Name: At_10percent_PEG_P Parameter: Organism Value: A. thaliana
  misc_feature: MA Experiment 20000527 PARAMETER Experiment Name: At_10percent_PEG_P Parameter: Plant Line Value: WS
  misc_feature: MA Experiment 20000527 PARAMETER Experiment Name: At_10percent_PEG_P Parameter: Timepoint (day) Value: 20
  misc_feature: MA Experiment 20000527 PARAMETER Experiment Name: At_10percent_PEG_P Parameter: Tissue Value: Whole Plant
  misc_feature: MA Experiment 20000527 PARAMETER Experiment Name: At_10percent_PEG_P Parameter: Treatment Value: 10percent PEG vs. No Treatment
  misc_feature: MA Experiment ID: 20001247 Result: Down-regulated in Transcription
  misc_feature: MA Experiment 20001247 PARAMETER Experiment Name: At_Far-red-induction_P Parameter: Age (day) Value: 7
  misc_feature: MA Experiment 20001247 PARAMETER Experiment Name: At_Far-red-induction_P Parameter: Light Value: Far-red vs. White
  misc_feature: MA Experiment 20001247 PARAMETER Experiment Name: At_Far-red-induction_P Parameter: Organism Value: A. thaliana
  misc_feature: MA Experiment 20001247 PARAMETER Experiment Name: At_Far-red-induction_P Parameter: Plant Line Value: Columbia
  misc_feature: MA Experiment 20001247 PARAMETER Experiment Name: At_Far-red-induction_P Parameter: Timepoint (hr) Value: 1
  misc_feature: MA Experiment 20001247 PARAMETER Experiment Name: At_Far-red-induction_P Parameter: Tissue Value: Whole Plant
  misc_feature: MA Experiment ID: 20001248 Result: Down-regulated in Transcription
  misc_feature: MA Experiment 20001248 PARAMETER Experiment Name: At_Far-red-induction_P Parameter: Age (day) Value: 7
  misc_feature: MA Experiment 20001248 PARAMETER Experiment Name: At_Far-red-induction_P Parameter: Light Value: Far-red vs. White
  misc_feature: MA Experiment 20001248 PARAMETER Experiment Name: At_Far-red-induction_P Parameter: Organism Value: A. thaliana
  misc_feature: MA Experiment 20001248 PARAMETER Experiment Name: At_Far-red-induction_P Parameter: Plant Line Value: Columbia
  misc_feature: MA Experiment 20001248 PARAMETER Experiment Name: At_Far-red-induction_P Parameter: Timepoint (hr) Value: 4
  misc_feature: MA Experiment 20001248 PARAMETER Experiment Name: At_Far-red-induction_P Parameter: Tissue Value: Whole Plant
  misc_feature: MA Experiment ID: 20001450 Result: Down-regulated in Transcription
  misc_feature: MA Experiment 20001450 PARAMETER Experiment Name: At_Far-red-induction_P Parameter: Age (day) Value: 7
  misc_feature: MA Experiment 20001450 PARAMETER Experiment Name: At_Far-red-induction_P Parameter: Light Value: Far-red vs. White
  misc_feature: MA Experiment 20001450 PARAMETER Experiment Name: At_Far-red-induction_P Parameter: Organism Value: A. thaliana
  misc_feature: MA Experiment 20001450 PARAMETER Experiment Name: At_Far-red-induction_P Parameter: Plant Line Value: Columbia
  misc_feature: MA Experiment 20001450 PARAMETER Experiment Name: At_Far-red-induction_P Parameter: Timepoint (hr) Value: 8
  misc_feature: MA Experiment 20001450 PARAMETER Experiment Name: At_Far-red-induction_P Parameter: Tissue Value: Whole Plant

SEQ ID NO: 50637 - protein, 516 aa, Arabidopsis thaliana; identical to SEQ ID NO: 50409
  peptide (1)..(516): Ceres Seq. ID no. 13648148
  misc_feature (198)..(397): Pfam Name: Monooxygenase Pfam Description: Monooxygenase
  misc_feature (198)..(397): Pfam Name: Monooxygenase Pfam Description: Monooxygenase
  misc_feature (43)..(509): Homolog of NCBI NO: 27311240 NR Description: Putative Squalene monooxygenase
  misc_feature (43)..(509): Homolog of NCBI NO: 27475612 NR Description: squalene monooxygenase 1 [Medicago truncatula]
  misc_feature (23)..(509): Homolog of NCBI NO: 27475610 NR Description: squalene monooxygenase 2 [Medicago truncatula]
  misc_feature (43)..(509): Homolog of NCBI NO: 27311241 NR Description: Putative Squalene monooxygenase
  misc_feature (4)..(516): Homolog of NCBI NO: 15237900 NR Description: squalene monooxygenase 2 (squalene epoxidase 2)
  misc_feature (43)..(509): Homolog of NCBI NO: 27311240 NR Description: Putative Squalene monooxygenase
  misc_feature (23)..(509): Homolog of NCBI NO: 27475610 NR Description: squalene monooxygenase 2 [Medicago truncatula]
  misc_feature (4)..(516): Homolog of NCBI NO: 15237900 NR Description: squalene monooxygenase 2 (squalene epoxidase 2)
  misc_feature (1)..(516): Homolog of NCBI NO: 15237902 NR Description: squalene monooxygenase 1,1 (squalene epoxidase
  misc_feature (3)..(516): Homolog of NCBI NO: 11358675 NR Description: probable squalene monooxygenase (EC 1.14.99.7)
  misc_feature (1)..(516): Homolog of NCBI NO: 15237903 NR Description: squalene monooxygenase 1,2 (squalene epoxidase
  misc_feature (1)..(516): Homolog of NCBI NO: 6685411 NR Description: Squalene monooxygenase 1,1 (Squalene epoxidase
  misc_feature (1)..(516): Homolog of NCBI NO: 6685410 NR Description: Squalene monooxygenase 1,2 (Squalene epoxidase
  misc_feature (43)..(509): Homolog of NCBI NO: 27311241 NR Description: Putative Squalene monooxygenase
  misc_feature (43)..(509): Homolog of NCBI NO: 27475612 NR Description: squalene monooxygenase 1 [Medicago truncatula]
  misc_feature (1)..(516): Homolog of NCBI NO: 6685410 NR Description: Squalene monooxygenase 1,2 (Squalene epoxidase
  misc_feature (1)..(516): Homolog of NCBI NO: 6685411 NR Description: Squalene monooxygenase 1,1 (Squalene epoxidase
  misc_feature (1)..(516): Homolog of NCBI NO: 15237903 NR Description: squalene monooxygenase 1,2 (squalene epoxidase
  misc_feature (3)..(516): Homolog of NCBI NO: 11358675 NR Description: probable squalene monooxygenase (EC 1.14.99.7)
  misc_feature (1)..(516): Homolog of NCBI NO: 15237902 NR Description: squalene monooxygenase 1,1 (squalene epoxidase

SEQ ID NO: 50638 - protein, 502 aa, Arabidopsis thaliana; identical to SEQ ID NO: 50410
  peptide (1)..(502): Ceres Seq. ID no. 13648149
  misc_feature (184)..(383): Pfam Name: Monooxygenase Pfam Description: Monooxygenase
  misc_feature (184)..(383): Pfam Name: Monooxygenase Pfam Description: Monooxygenase
  misc_feature (29)..(495): Homolog of NCBI NO: 27311240 NR Description: Putative Squalene monooxygenase
  misc_feature (29)..(495): Homolog of NCBI NO: 27475612 NR Description: squalene monooxygenase 1 [Medicago truncatula]
  misc_feature (9)..(495): Homolog of NCBI NO: 27475610 NR Description: squalene monooxygenase 2 [Medicago truncatula]
  misc_feature (29)..(495): Homolog of NCBI NO: 27311241 NR Description: Putative Squalene monooxygenase
  misc_feature (1)..(502): Homolog of NCBI NO: 15237900 NR Description: squalene monooxygenase 2 (squalene epoxidase 2)
  misc_feature (29)..(495): Homolog of NCBI NO: 27311240 NR Description: Putative Squalene monooxygenase
  misc_feature (9)..(495): Homolog of NCBI NO: 27475610 NR Description: squalene monooxygenase 2 [Medicago truncatula]
  misc_feature (1)..(502): Homolog of NCBI NO: 15237900 NR Description: squalene monooxygenase 2 (squalene epoxidase 2)
  misc_feature (1)..(502): Homolog of NCBI NO: 15237902 NR Description: squalene monooxygenase 1,1 (squalene epoxidase
  misc_feature (1)..(502): Homolog of NCBI NO: 11358675 NR Description: probable squalene monooxygenase (EC 1.14.99.7)
  misc_feature (1)..(502): Homolog of NCBI NO: 15237903 NR Description: squalene monooxygenase 1,2 (squalene epoxidase
  misc_feature (1)..(502): Homolog of NCBI NO: 6685411 NR Description: Squalene monooxygenase 1,1 (Squalene epoxidase
  misc_feature (1)..(502): Homolog of NCBI NO: 6685410 NR Description: Squalene monooxygenase 1,2 (Squalene epoxidase
  misc_feature (29)..(495): Homolog of NCBI NO: 27311241 NR Description: Putative Squalene monooxygenase
  misc_feature (29)..(495): Homolog of NCBI NO: 27475612 NR Description: squalene monooxygenase 1 [Medicago truncatula]
  misc_feature (1)..(502): Homolog of NCBI NO: 6685410 NR Description: Squalene monooxygenase 1,2 (Squalene epoxidase
  misc_feature (1)..(502): Homolog of NCBI NO: 6685411 NR Description: Squalene monooxygenase 1,1 (Squalene epoxidase
  misc_feature (1)..(502): Homolog of NCBI NO: 15237903 NR Description: squalene monooxygenase 1,2 (squalene epoxidase
  misc_feature (1)..(502): Homolog of NCBI NO: 11358675 NR Description: probable squalene monooxygenase (EC 1.14.99.7)
  misc_feature (1)..(502): Homolog of NCBI NO: 15237902 NR Description: squalene monooxygenase 1,1 (squalene epoxidase

SEQ ID NO: 50639 - protein, 432 aa, Arabidopsis thaliana; identical to SEQ ID NO: 50411
  peptide (1)..(432): Ceres Seq. ID no. 13648150
  misc_feature (114)..(313): Pfam Name: Monooxygenase Pfam Description: Monooxygenase
  misc_feature (114)..(313): Pfam Name: Monooxygenase Pfam Description: Monooxygenase
  misc_feature (1)..(425): Homolog of NCBI NO: 27311240 NR Description: Putative Squalene monooxygenase
  misc_feature (1)..(425): Homolog of NCBI NO: 27475612 NR Description: squalene monooxygenase 1 [Medicago truncatula]
  misc_feature (1)..(425): Homolog of NCBI NO: 27475610 NR Description: squalene monooxygenase 2 [Medicago truncatula]
  misc_feature (1)..(425): Homolog of NCBI NO: 27311241 NR Description: Putative Squalene monooxygenase
  misc_feature (1)..(432): Homolog of NCBI NO: 15237900 NR Description: squalene monooxygenase 2 (squalene epoxidase 2)
  misc_feature (1)..(425): Homolog of NCBI NO: 27311240 NR Description: Putative Squalene monooxygenase
  misc_feature (1)..(425): Homolog of NCBI NO: 27475610 NR Description: squalene monooxygenase 2 [Medicago truncatula]
  misc_feature (1)..(432): Homolog of NCBI NO: 15237900 NR Description: squalene monooxygenase 2 (squalene epoxidase 2)
  misc_feature (1)..(432): Homolog of NCBI NO: 15237902 NR Description: squalene monooxygenase 1,1 (squalene epoxidase
  misc_feature (1)..(432): Homolog of NCBI NO: 11358675 NR Description: probable squalene monooxygenase (EC 1.14.99.7)
  misc_feature (1)..(432): Homolog of NCBI NO: 15237903 NR Description: squalene monooxygenase 1,2 (squalene epoxidase
  misc_feature (1)..(432): Homolog of NCBI NO: 6685411 NR Description: Squalene monooxygenase 1,1 (Squalene epoxidase
  misc_feature (1)..(432): Homolog of NCBI NO: 6685410 NR Description: Squalene monooxygenase 1,2 (Squalene epoxidase
  misc_feature (1)..(425): Homolog of NCBI NO: 27311241 NR Description: Putative Squalene monooxygenase
  misc_feature (1)..(425): Homolog of NCBI NO: 27475612 NR Description: squalene monooxygenase 1 [Medicago truncatula]
  misc_feature (1)..(432): Homolog of NCBI NO: 6685410 NR Description: Squalene monooxygenase 1,2 (Squalene epoxidase
  misc_feature (1)..(432): Homolog of NCBI NO: 6685411 NR Description: Squalene monooxygenase 1,1 (Squalene epoxidase
  misc_feature (1)..(432): Homolog of NCBI NO: 15237903 NR Description: squalene monooxygenase 1,2 (squalene epoxidase
  misc_feature (1)..(432): Homolog of NCBI NO: 11358675 NR Description: probable squalene monooxygenase (EC 1.14.99.7)
  misc_feature (1)..(432): Homolog of NCBI NO: 15237902 NR Description: squalene monooxygenase 1,1 (squalene epoxidase

SEQ ID NO: 50640 - DNA, 2121 bp, Arabidopsis thaliana; identical to SEQ ID NO: 24365
  misc_feature (1)..(2121): Ceres Seq. ID no. 12601883
  misc_feature: MA Experiment ID: 20000169 Result: Down-regulated in Transcription
  misc_feature: MA Experiment 20000169 PARAMETER Experiment Name: At_100uM_ABA_P Parameter: Age (day) Value: 14
  misc_feature: MA Experiment 20000169 PARAMETER Experiment Name: At_100uM_ABA_P Parameter: Organism Value: A. thaliana
  misc_feature: MA Experiment 20000169 PARAMETER Experiment Name: At_100uM_ABA_P Parameter: Plant Line Value: WS
  misc_feature: MA Experiment 20000169 PARAMETER Experiment Name: At_100uM_ABA_P Parameter: Timepoint (hr) Value: 6
  misc_feature: MA Experiment 20000169 PARAMETER Experiment Name: At_100uM_ABA_P Parameter: Tissue Value: Aerial
  misc_feature: MA Experiment 20000169 PARAMETER Experiment Name: At_100uM_ABA_P Parameter: Treatment Value: 100uM ABA vs. No Treatment
  misc_feature: MA Experiment ID: 20000180 Result: Up-regulated in Transcription
  misc_feature: MA Experiment 20000180 PARAMETER Experiment Name: At_Germinating_Seeds_P Parameter: Age (hr) Value: 24 vs. 0
  misc_feature: MA Experiment 20000180 PARAMETER Experiment Name: At_Germinating_Seeds_P Parameter: Tissue Value: Germinating Seeds
  misc_feature: MA Experiment ID: 20000214 Result: Up-regulated in Transcription
  misc_feature: MA Experiment 20000214 PARAMETER Experiment Name: At_4deg_Cold_P Parameter: Timepoint (hr) Value: 6
  misc_feature: MA Experiment ID: 20000234 Result: Up-regulated in Transcription
  misc_feature: MA Experiment 20000234 PARAMETER Experiment Name: At_Siliques_P Parameter: Age (day) Value: 21
  misc_feature: MA Experiment 20000234 PARAMETER Experiment Name: At_Siliques_P Parameter: Organism Value: A. thaliana
  misc_feature: MA Experiment 20000234 PARAMETER Experiment Name: At_Siliques_P Parameter: Plant Line Value: WS
  misc_feature: MA Experiment 20000234 PARAMETER Experiment Name: At_Siliques_P Parameter: Tissue Value: Less Than 5mm Siliques vs. Whole Plant
  misc_feature: MA Experiment ID: 20000436 Result: Down-regulated in Transcription
  misc_feature: MA Experiment 20000436 PARAMETER Experiment Name: At_Drought_P Parameter: Age (day) Value: 7
  misc_feature: MA Experiment 20000436 PARAMETER Experiment Name: At_Drought_P Parameter: Organism Value: A. thaliana
  misc_feature: MA Experiment 20000436 PARAMETER Experiment Name: At_Drought_P Parameter: Plant Line Value: WS
  misc_feature: MA Experiment 20000436 PARAMETER Experiment Name: At_Drought_P Parameter: Timepoint (hr) Value: 12
  misc_feature: MA Experiment 20000436 PARAMETER Experiment Name: At_Drought_P Parameter: Tissue Value: Whole Plant
  misc_feature: MA Experiment 20000436 PARAMETER Experiment Name: At_Drought_P Parameter: Treatment Value: Drought vs. No Drought
  misc_feature: MA Experiment ID: 20000437 Result: Down-regulated in Transcription
  misc_feature: MA Experiment 20000437 PARAMETER Experiment Name: At_Drought_P Parameter: Age (day) Value: 8
  misc_feature: MA Experiment 20000437 PARAMETER Experiment Name: At_Drought_P Parameter: Organism Value: A. thaliana
  misc_feature: MA Experiment 20000437 PARAMETER Experiment Name: At_Drought_P Parameter: Plant Line Value: WS
  misc_feature: MA Experiment 20000437 PARAMETER Experiment Name: At_Drought_P Parameter: Timepoint (hr) Value: 24
  misc_feature: MA Experiment 20000437 PARAMETER Experiment Name: At_Drought_P Parameter: Tissue Value: Whole Plant
  misc_feature: MA Experiment 20000437 PARAMETER Experiment Name: At_Drought_P Parameter: Treatment Value: Drought vs. No Drought
  misc_feature: MA Experiment ID: 20000438 Result: Up-regulated in Transcription
  misc_feature: MA Experiment 20000438 PARAMETER Experiment Name: At_Shoots__P Parameter: Age (day) Value: 14
  misc_feature: MA Experiment 20000438 PARAMETER Experiment Name: At_Shoots__P Parameter: Tissue Value: Shoots vs. Whole Plant
  misc_feature: MA Experiment ID: 20000439 Result: Down-regulated in Transcription
  misc_feature: MA Experiment 20000439 PARAMETER Experiment Name: At_Roots__P Parameter: Age (day) Value: 14 vs. 21
  misc_feature: MA Experiment 20000439 PARAMETER Experiment Name: At_Roots__P Parameter: Organism Value: A. thaliana
  misc_feature: MA Experiment 20000439 PARAMETER Experiment Name: At_Roots__P Parameter: Tissue Value: Roots vs. Whole Plant
  misc_feature: MA Experiment ID: 20000451 Result: Up-regulated in Transcription
  misc_feature: MA Experiment 20000451 PARAMETER Experiment Name: At_CS6879_Shoots-Roots_P Parameter: Age (day) Value: 14
  misc_feature: MA Experiment 20000451 PARAMETER Experiment Name: At_CS6879_Shoots-Roots_P Parameter: Organism Value: A. thaliana
  misc_feature: MA Experiment 20000451 PARAMETER Experiment Name: At_CS6879_Shoots-Roots_P Parameter: Plant Line Value: CS6879 vs. WS
  misc_feature: MA Experiment 20000451 PARAMETER Experiment Name: At_CS6879_Shoots-Roots_P Parameter: Tissue Value: Roots
  misc_feature: MA Experiment ID: 20000794 Result: Down-regulated in Transcription
  misc_feature: MA Experiment 20000794 PARAMETER Experiment Name: At_Petals_P Parameter: Age (day) Value: 23-25 days
  misc_feature: MA Experiment 20000794 PARAMETER Experiment Name: At_Petals_P Parameter: Plant Line Value: WS
  misc_feature: MA Experiment 20000794 PARAMETER Experiment Name: At_Petals_P Parameter: Tissue Value: Petals vs. Whole plant
  misc_feature: MA Experiment ID: 20001248 Result: Down-regulated in Transcription
  misc_feature: MA Experiment 20001248 PARAMETER Experiment Name: At_Far-red-induction_P Parameter: Age (day) Value: 7
  misc_feature: MA Experiment 20001248 PARAMETER Experiment Name: At_Far-red-induction_P Parameter: Light Value: Far-red vs. White
  misc_feature: MA Experiment 20001248 PARAMETER Experiment Name: At_Far-red-induction_P Parameter: Organism Value: A. thaliana
  misc_feature: MA Experiment 20001248 PARAMETER Experiment Name: At_Far-red-induction_P Parameter: Plant Line Value: Columbia
  misc_feature: MA Experiment 20001248 PARAMETER Experiment Name: At_Far-red-induction_P Parameter: Timepoint (hr) Value: 4
  misc_feature: MA Experiment 20001248 PARAMETER Experiment Name: At_Far-red-induction_P Parameter: Tissue Value: Whole Plant
  misc_feature: MA Experiment ID: 20001450 Result: Down-regulated in Transcription
  misc_feature: MA Experiment 20001450 PARAMETER Experiment Name: At_Far-red-induction_P Parameter: Age (day) Value: 7
  misc_feature: MA Experiment 20001450 PARAMETER Experiment Name: At_Far-red-induction_P Parameter: Light Value: Far-red vs. White
  misc_feature: MA Experiment 20001450 PARAMETER Experiment Name: At_Far-red-induction_P Parameter: Organism Value: A. thaliana
  misc_feature: MA Experiment 20001450 PARAMETER Experiment Name: At_Far-red-induction_P Parameter: Plant Line Value: Columbia
  misc_feature: MA Experiment 20001450 PARAMETER Experiment Name: At_Far-red-induction_P Parameter: Timepoint (hr) Value: 8
  misc_feature: MA Experiment 20001450 PARAMETER Experiment Name: At_Far-red-induction_P Parameter: Tissue Value: Whole Plant
  misc_feature: MA Experiment ID: 20001451 Result: Down-regulated in Transcription
  misc_feature: MA Experiment 20001451 PARAMETER Experiment Name: At_Far-red-induction_P Parameter: Age (day) Value: 7
  misc_feature: MA Experiment 20001451 PARAMETER Experiment Name: At_Far-red-induction_P Parameter: Light Value: Far-red vs. White
  misc_feature: MA Experiment 20001451 PARAMETER Experiment Name: At_Far-red-induction_P Parameter: Organism Value: A. thaliana
  misc_feature: MA Experiment 20001451 PARAMETER Experiment Name: At_Far-red-induction_P Parameter: Plant Line Value: Columbia
  misc_feature: MA Experiment 20001451 PARAMETER Experiment Name: At_Far-red-induction_P Parameter: Timepoint (hr) Value: 24
  misc_feature: MA Experiment 20001451 PARAMETER Experiment Name: At_Far-red-induction_P Parameter: Tissue Value: Whole Plant
  misc_feature: MA Experiment ID: 20001757 Result: Up-regulated in Transcription
  misc_feature: MA Experiment 20001757 PARAMETER Experiment Name: At_50mM_NH4NO3_L-to-H_P Parameter: Timepoint (hr) Value: 6
  misc_feature: MA Experiment 20001757 PARAMETER Experiment Name: At_50mM_NH4NO3_L-to-H_P Parameter: Tissue Value: Leaf
  misc_feature: MA Experiment 20001757 PARAMETER Experiment Name: At_50mM_NH4NO3_L-to-H_P Parameter: Treatment Value: 50mM NH4NO3 vs 100mM Mannitol
  misc_feature: MA Experiment ID: 20001904 Result: Down-regulated in Transcription
  misc_feature: MA Experiment 20001904 PARAMETER Experiment Name: At_Drought_Reproduction_P Parameter: Age (day) Value: 37
  misc_feature: MA Experiment 20001904 PARAMETER Experiment Name: At_Drought_Reproduction_P Parameter: Organism Value: A. thaliana
  misc_feature: MA Experiment 20001904 PARAMETER Experiment Name: At_Drought_Reproduction_P Parameter: Plant Line Value: WS
  misc_feature: MA Experiment 20001904 PARAMETER Experiment Name: At_Drought_Reproduction_P Parameter: Timepoint (day) Value: 7
  misc_feature: MA Experiment 20001904 PARAMETER Experiment Name: At_Drought_Reproduction_P Parameter: Tissue Value: Rosettes
  misc_feature: MA Experiment 20001904 PARAMETER Experiment Name: At_Drought_Reproduction_P Parameter: Treatment Value: Drought vs. No Drought
  misc_feature: MA Experiment ID: 20001906 Result: Down-regulated in Transcription
  misc_feature: MA Experiment 20001906 PARAMETER Experiment Name: At_Drought_Reproduction_P Parameter: Age (day) Value: 35
  misc_feature: MA Experiment 20001906 PARAMETER Experiment Name: At_Drought_Reproduction_P Parameter: Organism Value: A. thaliana
  misc_feature: MA Experiment 20001906 PARAMETER Experiment Name: At_Drought_Reproduction_P Parameter: Plant Line Value: WS
  misc_feature: MA Experiment 20001906 PARAMETER Experiment Name: At_Drought_Reproduction_P Parameter: Timepoint (day) Value: 5
  misc_feature: MA Experiment 20001906 PARAMETER Experiment Name: At_Drought_Reproduction_P Parameter: Tissue Value: Siliques
  misc_feature: MA Experiment 20001906 PARAMETER Experiment Name: At_Drought_Reproduction_P Parameter: Treatment Value: Drought vs. No Drought

SEQ ID NO: 50641 - protein, 181 aa, Arabidopsis thaliana; identical to SEQ ID NO: 24366
  peptide (1)..(181): Ceres Seq. ID no. 12601884
  misc_feature (56)..(175): Pfam Name: Ribulose bisphosphate carboxylase, small chain Pfam Description: Ribulose bisphosphate carboxylase, small chain
  misc_feature (56)..(175): Pfam Name: Ribulose bisphosphate carboxylase, small chain Pfam Description: Ribulose bisphosphate carboxylase, small chain
  misc_feature (56)..(175): Pfam Name: Ribulose bisphosphate carboxylase, small chain Pfam Description: Ribulose bisphosphate carboxylase, small chain
  misc_feature (56)..(175): Pfam Name: Ribulose bisphosphate carboxylase, small chain Pfam Description: Ribulose bisphosphate carboxylase, small chain
  misc_feature (1)..(179): Homolog of NCBI NO: 68063 NR Description: ribulose-bisphosphate carboxylase (EC 4.1.1.39)
  misc_feature (1)..(181): Homolog of NCBI NO: 132154 NR Description: Ribulose bisphosphate carboxylase small chain,
  misc_feature (1)..(179): Homolog of NCBI NO: 15219826 NR Description: ribulose-bisphosphate carboxylase small unit,
  misc_feature (1)..(181): Homolog of NCBI NO: 266891 NR Description: Ribulose bisphosphate carboxylase small chain,
  misc_feature (1)..(181): Homolog of NCBI NO: 132091 NR Description: Ribulose bisphosphate carboxylase small chain F1,
  misc_feature (1)..(179): Homolog of NCBI NO: 68063 NR Description: ribulose-bisphosphate carboxylase (EC 4.1.1.39)
  misc_feature (1)..(179): Homolog of NCBI NO: 15219826 NR Description: ribulose-bisphosphate carboxylase small unit,
  misc_feature (1)..(181): Homolog of NCBI NO: 132091 NR Description: Ribulose bisphosphate carboxylase small chain F1,
  misc_feature (1)..(181): Homolog of NCBI NO: 266891 NR Description: Ribulose bisphosphate carboxylase small chain,
  misc_feature (1)..(179): Homolog of NCBI NO: 15219826 NR Description: ribulose-bisphosphate carboxylase small unit,
  misc_feature (1)..(181): Homolog of NCBI NO: 132154 NR Description: Ribulose bisphosphate carboxylase small chain,
  misc_feature (1)..(179): Homolog of NCBI NO: 68063 NR Description: ribulose-bisphosphate carboxylase (EC 4.1.1.39)
  misc_feature (1)..(181): Homolog of NCBI NO: 15240912 NR Description: ribulose bisphosphate carboxylase small chain 1b
  misc_feature (1)..(181): Homolog of NCBI NO: 68061 NR Description: ribulose-bisphosphate carboxylase (EC 4.1.1.39)
  misc_feature (1)..(181): Homolog of NCBI NO: 15240903 NR Description: ribulose bisphosphate carboxylase small chain 2b
  misc_feature (1)..(181): Homolog of NCBI NO: 68060 NR Description: ribulose-bisphosphate carboxylase (EC 4.1.1.39)
  misc_feature (1)..(181): Homolog of NCBI NO: 15240901 NR Description: ribulose bisphosphate carboxylase small chain 3b
  misc_feature (1)..(181): Homolog of NCBI NO: 15240912 NR Description: ribulose bisphosphate carboxylase small chain 1b
  misc_feature (1)..(181): Homolog of NCBI NO: 68061 NR Description: ribulose-bisphosphate carboxylase (EC 4.1.1.39)
  misc_feature (1)..(181): Homolog of NCBI NO: 15240903 NR Description: ribulose bisphosphate carboxylase small chain 2b
  misc_feature (1)..(181): Homolog of NCBI NO: 68060 NR Description: ribulose-bisphosphate carboxylase (EC 4.1.1.39)
  misc_feature (1)..(181): Homolog of NCBI NO: 15240901 NR Description: ribulose bisphosphate carboxylase small chain 3b
  misc_feature (1)..(181): Homolog of NCBI NO: 132091 NR Description: Ribulose bisphosphate carboxylase small chain F1,
  misc_feature (1)..(181): Homolog of NCBI NO: 266891 NR Description: Ribulose bisphosphate carboxylase small chain,
  misc_feature (1)..(179): Homolog of NCBI NO: 15219826 NR Description: ribulose-bisphosphate carboxylase small unit,
  misc_feature (1)..(181): Homolog of NCBI NO: 132154 NR Description: Ribulose bisphosphate carboxylase small chain,
  misc_feature (1)..(179): Homolog of NCBI NO: 68063 NR Description: ribulose-bisphosphate carboxylase (EC 4.1.1.39)
  misc_feature (1)..(181): Homolog of NCBI NO: 15240912 NR Description: ribulose bisphosphate carboxylase small chain 1b
  misc_feature (1)..(181): Homolog of NCBI NO: 68061 NR Description: ribulose-bisphosphate carboxylase (EC 4.1.1.39)
  misc_feature (1)..(181): Homolog of NCBI NO: 15240903 NR Description: ribulose bisphosphate carboxylase small chain 2b
  misc_feature (1)..(181): Homolog of NCBI NO: 68060 NR Description: ribulose-bisphosphate carboxylase (EC 4.1.1.39)
  misc_feature (1)..(181): Homolog of NCBI NO: 15240901 NR Description: ribulose bisphosphate carboxylase small chain 3b
  misc_feature (1)..(181): Homolog of NCBI NO: 132091 NR Description: Ribulose bisphosphate carboxylase small chain F1,
  misc_feature (1)..(181): Homolog of NCBI NO: 266891 NR Description: Ribulose bisphosphate carboxylase small chain,
  misc_feature (1)..(181): Homolog of NCBI NO: 132154 NR Description: Ribulose bisphosphate carboxylase small chain,
  misc_feature (1)..(181): Homolog of NCBI NO: 15240901 NR Description: ribulose bisphosphate carboxylase small chain 3b
  misc_feature (1)..(181): Homolog of NCBI NO: 68060 NR Description: ribulose-bisphosphate carboxylase (EC 4.1.1.39)
  misc_feature (1)..(181): Homolog of NCBI NO: 15240903 NR Description: ribulose bisphosphate carboxylase small chain 2b
  misc_feature (1)..(181): Homolog of NCBI NO: 68061 NR Description: ribulose-bisphosphate carboxylase (EC 4.1.1.39)
  misc_feature (1)..(181): Homolog of NCBI NO: 15240912 NR Description: ribulose bisphosphate carboxylase small chain 1b

SEQ ID NO: 50642 - protein, 177 aa, Arabidopsis thaliana; identical to SEQ ID NO: 24367
  peptide (1)..(177): Ceres Seq. ID no. 12601885
  misc_feature (52)..(171): Pfam Name: Ribulose bisphosphate carboxylase, small chain Pfam Description: Ribulose bisphosphate carboxylase, small chain
  misc_feature (52)..(171): Pfam Name: Ribulose bisphosphate carboxylase, small chain Pfam Description: Ribulose bisphosphate carboxylase, small chain
  misc_feature (52)..(171): Pfam Name: Ribulose bisphosphate carboxylase, small chain Pfam Description: Ribulose bisphosphate carboxylase, small chain
  misc_feature (52)..(171): Pfam Name: Ribulose bisphosphate carboxylase, small chain Pfam Description: Ribulose bisphosphate carboxylase, small chain
  misc_feature (1)..(175): Homolog of NCBI NO: 68063 NR Description: ribulose-bisphosphate carboxylase (EC 4.1.1.39)
  misc_feature (1)..(177): Homolog of NCBI NO: 132154 NR Description: Ribulose bisphosphate carboxylase small chain,
  misc_feature (1)..(175): Homolog of NCBI NO: 15219826 NR Description: ribulose-bisphosphate carboxylase small unit,
  misc_feature (1)..(177): Homolog of NCBI NO: 266891 NR Description: Ribulose bisphosphate carboxylase small chain,
  misc_feature (1)..(177): Homolog of NCBI NO: 132091 NR Description: Ribulose bisphosphate carboxylase small chain F1,
  misc_feature (1)..(175): Homolog of NCBI NO: 68063 NR Description: ribulose-bisphosphate carboxylase (EC 4.1.1.39)
  misc_feature (1)..(175): Homolog of NCBI NO: 15219826 NR Description: ribulose-bisphosphate carboxylase small unit,
  misc_feature (1)..(177): Homolog of NCBI NO: 132091 NR Description: Ribulose bisphosphate carboxylase small chain F1,
  misc_feature (1)..(177): Homolog of NCBI NO: 266891 NR Description: Ribulose bisphosphate carboxylase small chain,
  misc_feature (1)..(175): Homolog of NCBI NO: 15219826 NR Description: ribulose-bisphosphate carboxylase small unit,
  misc_feature (1)..(177): Homolog of NCBI NO: 132154 NR Description: Ribulose bisphosphate carboxylase small chain,
  misc_feature (1)..(175): Homolog of NCBI NO: 68063 NR Description: ribulose-bisphosphate carboxylase (EC 4.1.1.39)
  misc_feature (1)..(177): Homolog of NCBI NO: 15240912 NR Description: ribulose bisphosphate carboxylase small chain 1b
  misc_feature (1)..(177): Homolog of NCBI NO: 68061 NR Description: ribulose-bisphosphate carboxylase (EC 4.1.1.39)
  misc_feature (1)..(177): Homolog of NCBI NO: 15240903 NR Description: ribulose bisphosphate carboxylase small chain 2b
  misc_feature (1)..(177): Homolog of NCBI NO: 68060 NR Description: ribulose-bisphosphate carboxylase (EC 4.1.1.39)
  misc_feature (1)..(177): Homolog of NCBI NO: 15240901 NR Description: ribulose bisphosphate carboxylase small chain 3b
  misc_feature (1)..(177): Homolog of NCBI NO: 15240901 NR Description: ribulose bisphosphate carboxylase small chain 3b
  misc_feature (1)..(177): Homolog of NCBI NO: 132091 NR Description: Ribulose bisphosphate carboxylase small chain F1,
  misc_feature (1)..(177): Homolog of NCBI NO: 266891 NR Description: Ribulose bisphosphate carboxylase small chain,
  misc_feature (1)..(175): Homolog of NCBI NO: 15219826 NR Description: ribulose-bisphosphate carboxylase small unit,
  misc_feature (1)..(177): Homolog of NCBI NO: 132154 NR Description: Ribulose bisphosphate carboxylase small chain,
  misc_feature (1)..(175): Homolog of NCBI NO: 68063 NR Description: ribulose-bisphosphate carboxylase (EC 4.1.1.39)
  misc_feature (1)..(177): Homolog of NCBI NO: 15240912 NR Description: ribulose bisphosphate carboxylase small chain 1b
  misc_feature (1)..(177): Homolog of NCBI NO: 68061 NR Description: ribulose-bisphosphate carboxylase (EC 4.1.1.39)
  misc_feature (1)..(177): Homolog of NCBI NO: 15240903 NR Description: ribulose bisphosphate carboxylase small chain 2b
  misc_feature (1)..(177): Homolog of NCBI NO: 68060 NR Description: ribulose-bisphosphate carboxylase (EC 4.1.1.39)
  misc_feature (1)..(177): Homolog of NCBI NO: 15240912 NR Description: ribulose bisphosphate carboxylase small chain 1b
  misc_feature (1)..(177): Homolog of NCBI NO: 68061 NR Description: ribulose-bisphosphate carboxylase (EC 4.1.1.39)
  misc_feature (1)..(177): Homolog of NCBI NO: 15240903 NR Description: ribulose bisphosphate carboxylase small chain 2b
  misc_feature (1)..(177): Homolog of NCBI NO: 68060 NR Description: ribulose-bisphosphate carboxylase (EC 4.1.1.39)
  misc_feature (1)..(177): Homolog of NCBI NO: 15240901 NR Description: ribulose bisphosphate carboxylase small chain 3b
  misc_feature (1)..(177): Homolog of NCBI NO: 132091 NR Description: Ribulose bisphosphate carboxylase small chain F1,
  misc_feature (1)..(177): Homolog of NCBI NO: 266891 NR Description: Ribulose bisphosphate carboxylase small chain,
  misc_feature (1)..(177): Homolog of NCBI NO: 132154 NR Description: Ribulose bisphosphate carboxylase small chain,
  misc_feature (1)..(177): Homolog of NCBI NO: 15240901 NR Description: ribulose bisphosphate carboxylase small chain 3b
  misc_feature (1)..(177): Homolog of NCBI NO: 68060 NR Description: ribulose-bisphosphate carboxylase (EC 4.1.1.39)
  misc_feature (1)..(177): Homolog of NCBI NO: 15240903 NR Description: ribulose bisphosphate carboxylase small chain 2b
  misc_feature (1)..(177): Homolog of NCBI NO: 68061 NR Description: ribulose-bisphosphate carboxylase (EC 4.1.1.39)
  misc_feature (1)..(177): Homolog of NCBI NO: 15240912 NR Description: ribulose bisphosphate carboxylase small chain 1b

SEQ ID NO: 50643 - protein, 162 aa, Arabidopsis thaliana; identical to SEQ ID NO: 24368
  peptide (1)..(162): Ceres Seq. ID no. 12601886
  misc_feature (37)..(156): Pfam Name: Ribulose bisphosphate carboxylase, small chain Pfam Description: Ribulose bisphosphate carboxylase, small chain
  misc_feature (37)..(156): Pfam Name: Ribulose bisphosphate carboxylase, small chain Pfam Description: Ribulose bisphosphate carboxylase, small chain
  misc_feature (37)..(156): Pfam Name: Ribulose bisphosphate carboxylase, small chain Pfam Description: Ribulose bisphosphate carboxylase, small chain
  misc_feature (37)..(156): Pfam Name: Ribulose bisphosphate carboxylase, small chain Pfam Description: Ribulose bisphosphate carboxylase, small chain
  misc_feature (1)..(160): Homolog of NCBI NO: 68063 NR Description: ribulose-bisphosphate carboxylase (EC 4.1.1.39)
  misc_feature (1)..(162): Homolog of NCBI NO: 132154 NR Description: Ribulose bisphosphate carboxylase small chain,
  misc_feature (1)..(160): Homolog of NCBI NO: 15219826 NR Description: ribulose-bisphosphate carboxylase small unit,
  misc_feature (1)..(162): Homolog of NCBI NO: 266891 NR Description: Ribulose bisphosphate carboxylase small chain,
  misc_feature (1)..(162): Homolog of NCBI NO: 132091 NR Description: Ribulose bisphosphate carboxylase small chain F1,
  misc_feature (1)..(160): Homolog of NCBI NO: 68063 NR Description: ribulose-bisphosphate carboxylase (EC 4.1.1.39)
  misc_feature (1)..(160): Homolog of NCBI NO: 15219826 NR Description: ribulose-bisphosphate carboxylase small unit,
  misc_feature (1)..(162): Homolog of NCBI NO: 132091 NR Description: Ribulose bisphosphate carboxylase small chain F1,
  misc_feature (1)..(162): Homolog of NCBI NO: 266891 NR Description: Ribulose bisphosphate carboxylase small chain,
  misc_feature (1)..(160): Homolog of NCBI NO: 15219826 NR Description: ribulose-bisphosphate carboxylase small unit,
  misc_feature (1)..(162): Homolog of NCBI NO: 132154 NR Description: Ribulose bisphosphate carboxylase small chain,
  misc_feature (1)..(160): Homolog of NCBI NO: 68063 NR Description: ribulose-bisphosphate carboxylase (EC 4.1.1.39)
  misc_feature (1)..(162): Homolog of NCBI NO: 15240912 NR Description: ribulose bisphosphate carboxylase small chain 1b
  misc_feature (1)..(162): Homolog of NCBI NO: 68061 NR Description: ribulose-bisphosphate carboxylase (EC 4.1.1.39)
  misc_feature (1)..(162): Homolog of NCBI NO: 15240903 NR Description: ribulose bisphosphate carboxylase small chain 2b
  misc_feature (1)..(162): Homolog of NCBI NO: 68060 NR Description: ribulose-bisphosphate carboxylase (EC 4.1.1.39)
  misc_feature (1)..(162): Homolog of NCBI NO: 15240901 NR Description: ribulose bisphosphate carboxylase small chain 3b
  misc_feature (1)..(162): Homolog of NCBI NO: 15240912 NR Description: ribulose bisphosphate carboxylase small chain 1b
  misc_feature (1)..(162): Homolog of NCBI NO: 68061 NR Description: ribulose-bisphosphate carboxylase (EC 4.1.1.39)
  misc_feature (1)..(162): Homolog of NCBI NO: 15240903 NR Description: ribulose bisphosphate carboxylase small chain 2b
  misc_feature (1)..(162): Homolog of NCBI NO: 68060 NR Description: ribulose-bisphosphate carboxylase (EC 4.1.1.39)
  misc_feature (1)..(162): Homolog of NCBI NO: 15240901 NR Description: ribulose bisphosphate carboxylase small chain 3b
  misc_feature (1)..(162): Homolog of NCBI NO: 132091 NR Description: Ribulose bisphosphate carboxylase small chain F1,
  misc_feature (1)..(162): Homolog of NCBI NO: 266891 NR Description: Ribulose bisphosphate carboxylase small chain,
  misc_feature (1)..(160): Homolog of NCBI NO: 15219826 NR Description: ribulose-bisphosphate carboxylase small unit,
  misc_feature (1)..(162): Homolog of NCBI NO: 132154 NR Description: Ribulose bisphosphate carboxylase small chain,
  misc_feature (1)..(160): Homolog of NCBI NO: 68063 NR Description: ribulose-bisphosphate carboxylase (EC 4.1.1.39)
  misc_feature (1)..(162): Homolog of NCBI NO: 15240912 NR Description: ribulose bisphosphate carboxylase small chain 1b
  misc_feature (1)..(162): Homolog of NCBI NO: 68061 NR Description: ribulose-bisphosphate carboxylase (EC 4.1.1.39)
  misc_feature (1)..(162): Homolog of NCBI NO: 15240903 NR Description: ribulose bisphosphate carboxylase small chain 2b
  misc_feature (1)..(162): Homolog of NCBI NO: 68060 NR Description: ribulose-bisphosphate carboxylase (EC 4.1.1.39)
  misc_feature (1)..(162): Homolog of NCBI NO: 15240901 NR Description: ribulose bisphosphate carboxylase small chain 3b
  misc_feature (1)..(162): Homolog of NCBI NO: 132091 NR Description: Ribulose bisphosphate carboxylase small chain F1,
  misc_feature (1)..(162): Homolog of NCBI NO: 266891 NR Description: Ribulose bisphosphate carboxylase small chain,
  misc_feature (1)..(162): Homolog of NCBI NO: 132154 NR Description: Ribulose bisphosphate carboxylase small chain,
  misc_feature (1)..(162): Homolog of NCBI NO: 15240901 NR Description: ribulose bisphosphate carboxylase small chain 3b
  misc_feature (1)..(162): Homolog of NCBI NO: 68060 NR Description: ribulose-bisphosphate carboxylase (EC 4.1.1.39)
  misc_feature (1)..(162): Homolog of NCBI NO: 15240903 NR Description: ribulose bisphosphate carboxylase small chain 2b
  misc_feature (1)..(162): Homolog of NCBI NO: 68061 NR Description: ribulose-bisphosphate carboxylase (EC 4.1.1.39)
  misc_feature (1)..(162): Homolog of NCBI NO: 15240912 NR Description: ribulose bisphosphate carboxylase small chain 1b

SEQ ID NO: 50644 - DNA, 1415 bp, Arabidopsis thaliana
  misc_feature (1)..(1415): Ceres Seq. ID no. 13588571
  misc_feature: MA Experiment ID: 20000182 Result: Up-regulated in Transcription
  misc_feature: MA Experiment 20000182 PARAMETER Experiment Name: At_2mM_SA_P Parameter: Age (day) Value: 14
  misc_feature: MA Experiment 20000182 PARAMETER Experiment Name: At_2mM_SA_P Parameter: Organism Value: A. thaliana
  misc_feature: MA Experiment 20000182 PARAMETER Experiment Name: At_2mM_SA_P Parameter: Plant Line Value: WS
  misc_feature: MA Experiment 20000182 PARAMETER Experiment Name: At_2mM_SA_P Parameter: Timepoint (hr) Value: 6
  misc_feature: MA Experiment 20000182 PARAMETER Experiment Name: At_2mM_SA_P Parameter: Tissue Value: Aerial
  misc_feature: MA Experiment 20000182 PARAMETER Experiment Name: At_2mM_SA_P Parameter: Treatment Value: 2mM SA vs. No Treatment
  misc_feature: MA Experiment ID: 20000495 Result: Up-regulated in Transcription
  misc_feature: MA Experiment 20000495 PARAMETER Experiment Name: At_Guard_Cells_P Parameter: Harvest Date Value: 8/2/2002
  misc_feature: MA Experiment 20000495 PARAMETER Experiment Name: At_Guard_Cells_P Parameter: Organism Value: A. thaliana
  misc_feature: MA Experiment 20000495 PARAMETER Experiment Name: At_Guard_Cells_P Parameter: Tissue Value: Guard Cells vs. Leaves
gaacgacgacgaatcttcgtcttccccttgttcttcttcttcctcttcattttactttctcttcccgatttctctctgtccgattcaccttttcctccgatctcggtctccttagattccggaataatcccctcaaggcttggcttagtaatcgtcgttttctccgccatgagttccaatacggcgtcgtccagcgcgggggcagccggatcgggagattcttccgccgctaggaagaattcaaagcgacccaagtattcgaagttcacacagcaggagcttccagcttgcaagccaattctaacccctggttgggtcatttcgacatttttgatagtcagtgttatctttattccccttggagttatctcccttttcgcttcccaggatgttgtggagatcgttgatcggtatgatactgagtgcattccggcacctgctaggactaacaaggttgcatatattcaaggagatggagataaagtttgtaaccgggatcttaaagtgacaaagcgtatgaagcaacctatctatgtttattaccaacttgagaatttctaccagaatcaccgaaggtatgtaaaaagtcgaagtgattcacagttgagaagtacaaaatacgagaatcaaataagtgcatgcaagcctgaggatgatgttggtgggcagccgattgtgccgtgtggtctaattgcttggagtctttttaacgacacatacgcgttatcaagaaacaatgtaagcctagctgtgaacaaaaaaggcattgcatggaagagtgacaaggaacacaagtttgggaacaaggtcttccccaagaattttcaaaaggggaatatcacaggtggtgctactttagatccaagaataccgcttagtgaacaagaagatctcattgtgtggatgagaaccgcagcattgccaacatttagaaaactttacggaaagatagagtctgacctcgagatgggtgacaccatacacgttaagctgaacaacaactacaacacgtacagcttcaatggaaagaagaagcttgttttgtcaaccactagttggctgggtgggaagaacgatttccttggcattgcttacctgacagttggcgggatctgtttcattttggccctcgcatttaccatcatgtaccttgtgaaacccaggcgtcttggagatccgtcctacttgtcatggaatagaaatcctggaggtcggtaacaagcttggaaagggagagagagagctctaatctgcgtgtgtaaatcttatccatccatgtacacatacaatgtaatttttgcttacatactatgtaatccttgcttgcaaaatggtttcttcggtgagagcttaaatcccacataatactttgttgttgttgttccaaaccagtctaatatattacttttgtcccc

SEQ ID NO: 50645 - protein, 405 aa, Arabidopsis thaliana
  peptide (1)..(405): Ceres Seq. ID no. 13588572
  misc_feature (124)..(394): Pfam Name: LEM3 (ligand-effect modulator 3) family / CDC50 family Pfam Description: LEM3 (ligand-effect modulator 3) family / CDC50
  misc_feature (74)..(388): Homolog of NCBI NO: 9757735 NR Description: gb|AAD25612.1~gene_id:MCL19.21~similar to unknown
  misc_feature (74)..(400): Homolog of NCBI NO: 21554054 NR Description: unknown [Arabidopsis thaliana]
  misc_feature (74)..(400): Homolog of NCBI NO: 18422638 NR Description: membrane protein common family [Arabidopsis
  misc_feature (101)..(404): Homolog of NCBI NO: 15219220 NR Description: membrane protein common family [Arabidopsis
  misc_feature (89)..(404): Homolog of NCBI NO: 25347301 NR Description: T8K14.13 [imported] - Arabidopsis thaliana
  misc_feature (87)..(131): Homolog of NCBI NO: 25347303 NR Description: protein F3O9.16 [imported] - Arabidopsis thaliana
  misc_feature (100)..(404): Homolog of NCBI NO: 25347303 NR Description: protein F3O9.16 [imported] - Arabidopsis thaliana
  misc_feature (57)..(404): Homolog of NCBI NO: 18412377 NR Description: membrane protein common family [Arabidopsis
  misc_feature (58)..(405): Homolog of NCBI NO: 18399730 NR Description: membrane protein common family [Arabidopsis
  misc_feature (57)..(405): Homolog of NCBI NO: 18404877 NR Description: membrane protein common family [Arabidopsis
ERRRIFVFPLFFFFLFILLSLPDFSLSDSPFPPISVSLDSGIIPSRLGLVIVVFSAMSSNTASSSAGAAGSGDSSAARKNSKRPKYSKFTQQELPACKPILTPGWVISTFLIVSVIFIPLGVISLFASQDVVEIVDRYDTECIPAPARTNKVAYIQGDGDKVCNRDLKVTKRMKQPIYVYYQLENFYQNHRRYVKSRSDSQLRSTKYENQISACKPEDDVGGQPIVPCGLIAWSLFNDTYALSRNNVSLAVNKKGIAWKSDKEHKFGNKVFPKNFQKGNITGGATLDPRIPLSEQEDLIVWMRTAALPTFRKLYGKIESDLEMGDTIHVKLNNNYNTYSFNGKKKLVLSTTSWLGGKNDFLGIAYLTVGGICFILALAFTIMYLVKPRRLGDPSYLSWNRNPGGR

SEQ ID NO: 50646 - protein, 349 aa, Arabidopsis thaliana
  peptide (1)..(349): Ceres Seq. ID no. 13588573
  misc_feature (68)..(338): Pfam Name: LEM3 (ligand-effect modulator 3) family / CDC50 family Pfam Description: LEM3 (ligand-effect modulator 3) family / CDC50
  misc_feature (18)..(332): Homolog of NCBI NO: 9757735 NR Description: gb|AAD25612.1~gene_id:MCL19.21~similar to unknown
  misc_feature (18)..(344): Homolog of NCBI NO: 21554054 NR Description: unknown [Arabidopsis thaliana]
  misc_feature (18)..(344): Homolog of NCBI NO: 18422638 NR Description: membrane protein common family [Arabidopsis
  misc_feature (45)..(348): Homolog of NCBI NO: 15219220 NR Description: membrane protein common family [Arabidopsis
  misc_feature (33)..(348): Homolog of NCBI NO: 25347301 NR Description: T8K14.13 [imported] - Arabidopsis thaliana
  misc_feature (31)..(75): Homolog of NCBI NO: 25347303 NR Description: protein F3O9.16 [imported] - Arabidopsis thaliana
  misc_feature (44)..(348): Homolog of NCBI NO: 25347303 NR Description: protein F3O9.16 [imported] - Arabidopsis thaliana
  misc_feature (1)..(348): Homolog of NCBI NO: 18412377 NR Description: membrane protein common family [Arabidopsis
  misc_feature (2)..(349): Homolog of NCBI NO: 18399730 NR Description: membrane protein common family [Arabidopsis
  misc_feature (1)..(349): Homolog of NCBI NO: 18404877 NR Description: membrane protein common family [Arabidopsis
MSSNTASSSAGAAGSGDSSAARKNSKRPKYSKFTQQELPACKPILTPGWVISTFLIVSVIFIPLGVISLFASQDVVEIVDRYDTECIPAPARTNKVAYIQGDGDKVCNRDLKVTKRMKQPIYVYYQLENFYQNHRRYVKSRSDSQLRSTKYENQISACKPEDDVGGQPIVPCGLIAWSLFNDTYALSRNNVSLAVNKKGIAWKSDKEHKFGNKVFPKNFQKGNITGGATLDPRIPLSEQEDLIVWMRTAALPTFRKLYGKIESDLEMGDTIHVKLNNNYNTYSFNGKKKLVLSTTSWLGGKNDFLGIAYLTVGGICFILALAFTIMYLVKPRRLGDPSYLSWNRNPGGR

SEQ ID NO: 50647 - protein, 233 aa, Arabidopsis thaliana
  peptide (1)..(233): Ceres Seq. ID no. 13588574
  misc_feature (1)..(222): Pfam Name: LEM3 (ligand-effect modulator 3) family / CDC50 family Pfam Description: LEM3 (ligand-effect modulator 3) family / CDC50
  misc_feature (1)..(96): Homolog of NCBI NO: 8922720 NR Description: hypothetical protein FLJ10856 [Homo sapiens]
  misc_feature (1)..(216): Homolog of NCBI NO: 9757735 NR Description: gb|AAD25612.1~gene_id:MCL19.21~similar to unknown
  misc_feature (1)..(228): Homolog of NCBI NO: 21554054 NR Description: unknown [Arabidopsis thaliana]
  misc_feature (1)..(228): Homolog of NCBI NO: 18422638 NR Description: membrane protein common family [Arabidopsis
  misc_feature (1)..(232): Homolog of NCBI NO: 15219220 NR Description: membrane protein common family [Arabidopsis
  misc_feature (1)..(232): Homolog of NCBI NO: 25347301 NR Description: T8K14.13 [imported] - Arabidopsis thaliana
  misc_feature (1)..(232): Homolog of NCBI NO: 25347303 NR Description: protein F3O9.16 [imported] - Arabidopsis thaliana
  misc_feature (1)..(232): Homolog of NCBI NO: 18412377 NR Description: membrane protein common family [Arabidopsis
  misc_feature (1)..(233): Homolog of NCBI NO: 18399730 NR Description: membrane protein common family [Arabidopsis
  misc_feature (1)..(233): Homolog of NCBI NO: 18404877 NR Description: membrane protein common family [Arabidopsis
MKQPIYVYYQLENFYQNHRRYVKSRSDSQLRSTKYENQISACKPEDDVGGQPIVPCGLIAWSLFNDTYALSRNNVSLAVNKKGIAWKSDKEHKFGNKVFPKNFQKGNITGGATLDPRIPLSEQEDLIVWMRTAALPTFRKLYGKIESDLEMGDTIHVKLNNNYNTYSFNGKKKLVLSTTSWLGGKNDFLGIAYLTVGGICFILALAFTIMYLVKPRRLGDPSYLSWNRNPGGR

SEQ ID NO: 50648 - DNA, 1287 bp, Arabidopsis thaliana; identical to SEQ ID NO: 22141
  misc_feature (1)..(1287): Ceres Seq. ID no. 13588473
  misc_feature: MA Experiment ID: 20000185 Result: Down-regulated in Transcription
  misc_feature: MA Experiment 20000185 PARAMETER Experiment Name: At_Roots__P Parameter: Age (day) Value: 7 vs. 21
  misc_feature: MA Experiment 20000185 PARAMETER Experiment Name: At_Roots__P Parameter: Organism Value: A. thaliana
  misc_feature: MA Experiment 20000185 PARAMETER Experiment Name: At_Roots__P Parameter: Tissue Value: Roots vs. Whole Plant
  misc_feature: MA Experiment ID: 20000437 Result: Down-regulated in Transcription
  misc_feature: MA Experiment 20000437 PARAMETER Experiment Name: At_Drought_P Parameter: Age (day) Value: 8
  misc_feature: MA Experiment 20000437 PARAMETER Experiment Name: At_Drought_P Parameter: Organism Value: A. thaliana
  misc_feature: MA Experiment 20000437 PARAMETER Experiment Name: At_Drought_P Parameter: Plant Line Value: WS
  misc_feature: MA Experiment 20000437 PARAMETER Experiment Name: At_Drought_P Parameter: Timepoint (hr) Value: 24
  misc_feature: MA Experiment 20000437 PARAMETER Experiment Name: At_Drought_P Parameter: Tissue Value: Whole Plant
  misc_feature: MA Experiment 20000437 PARAMETER Experiment Name: At_Drought_P Parameter: Treatment Value: Drought vs. No Drought
  misc_feature: MA Experiment ID: 20000439 Result: Down-regulated in Transcription
  misc_feature: MA Experiment 20000439 PARAMETER Experiment Name: At_Roots__P Parameter: Age (day) Value: 14 vs. 21
  misc_feature: MA Experiment 20000439 PARAMETER Experiment Name: At_Roots__P Parameter: Organism Value: A. thaliana
  misc_feature: MA Experiment 20000439 PARAMETER Experiment Name: At_Roots__P Parameter: Tissue Value: Roots vs. Whole Plant
  misc_feature: MA Experiment ID: 20001905 Result: Down-regulated in Transcription
  misc_feature: MA Experiment 20001905 PARAMETER Experiment Name: At_Drought_Reproduction_P Parameter: Age (day) Value: 40
  misc_feature: MA Experiment 20001905 PARAMETER Experiment Name: At_Drought_Reproduction_P Parameter: Organism Value: A. thaliana
  misc_feature: MA Experiment 20001905 PARAMETER Experiment Name: At_Drought_Reproduction_P Parameter: Plant Line Value: WS
  misc_feature: MA Experiment 20001905 PARAMETER Experiment Name: At_Drought_Reproduction_P Parameter: Timepoint (day) Value: 10
  misc_feature: MA Experiment 20001905 PARAMETER Experiment Name: At_Drought_Reproduction_P Parameter: Tissue Value: Rosettes
  misc_feature: MA Experiment 20001905 PARAMETER Experiment Name: At_Drought_Reproduction_P Parameter: Treatment Value: Drought vs. No Drought

SEQ ID NO: 50649 - protein, 346 aa, Arabidopsis thaliana; identical to SEQ ID NO: 22142
  peptide (1)..(346): Ceres Seq. ID no. 13588474
  misc_feature (125)..(329): Pfam Name: Ribosomal protein L1p/L10e family Pfam Description: Ribosomal protein L1p/L10e family
  misc_feature (125)..(329): Pfam Name: Ribosomal protein L1p/L10e family Pfam Description: Ribosomal protein L1p/L10e family
  misc_feature (113)..(341): Homolog of NCBI NO: 33239681 NR Description: Ribosomal protein L1
  misc_feature (113)..(341): Homolog of NCBI NO: 37521169 NR Description: 50S ribosomal protein L1 [Gloeobacter violaceus]
  misc_feature (113)..(341): Homolog of NCBI NO: 16330010 NR Description: 50S ribosomal protein L1 [Synechocystis sp. PCC
  misc_feature (113)..(339): Homolog of NCBI NO: 11467612 NR Description: ribosomal protein L1 [Guillardia theta]
  misc_feature (113)..(341): Homolog of NCBI NO: 17232793 NR Description: 50S ribosomal protein L1 [Nostoc sp. PCC 7120]
  misc_feature (113)..(341): Homolog of NCBI NO: 33239681 NR Description: Ribosomal protein L1
  misc_feature (113)..(341): Homolog of NCBI NO: 16330010 NR Description: 50S ribosomal protein L1 [Synechocystis sp. PCC
  misc_feature (113)..(341): Homolog of NCBI NO: 17232793 NR Description: 50S ribosomal protein L1 [Nostoc sp. PCC 7120]
  misc_feature (1)..(346): Homolog of NCBI NO: 15229443 NR Description: ribosomal protein L1p family [Arabidopsis
  misc_feature (1)..(346): Homolog of NCBI NO: 25456457 NR Description: ribosomal protein L1 protein [imported] -
  misc_feature (3)..(344): Homolog of NCBI NO: 25453504 NR Description: ribosomal protein L1 [imported] - spinach
  misc_feature (110)..(341): Homolog of NCBI NO: 22297840 NR Description: 50S ribosomal protein L1 [Thermosynechococcus
  misc_feature (89)..(264): Homolog of NCBI NO: 1350625 NR Description: 50S RIBOSOMAL PROTEIN L1, CHLOROPLAST PRECURSOR
  misc_feature (113)..(339): Homolog of NCBI NO: 11467612 NR Description: ribosomal protein L1 [Guillardia theta]
  misc_feature (113)..(341): Homolog of NCBI NO: 37521169 NR Description: 50S ribosomal protein L1 [Gloeobacter violaceus]
  misc_feature (89)..(264): Homolog of NCBI NO: 1350625 NR Description: 50S RIBOSOMAL PROTEIN L1, CHLOROPLAST PRECURSOR
  misc_feature (110)..(341): Homolog of NCBI NO: 22297840 NR Description: 50S ribosomal protein L1 [Thermosynechococcus
  misc_feature (3)..(344): Homolog of NCBI NO: 25453504 NR Description: ribosomal protein L1 [imported] - spinach
  misc_feature (1)..(346): Homolog of NCBI NO: 25456457 NR Description: ribosomal protein L1 protein [imported] -
  misc_feature (1)..(346): Homolog of NCBI NO: 15229443 NR Description: ribosomal protein L1p family [Arabidopsis

SEQ ID NO: 50650 - protein, 336 aa, Arabidopsis thaliana; identical to SEQ ID NO: 22143
  peptide (1)..(336): Ceres Seq. ID no. 13588475
  misc_feature (115)..(319): Pfam Name: Ribosomal protein L1p/L10e family Pfam Description: Ribosomal protein L1p/L10e family
  misc_feature (115)..(319): Pfam Name: Ribosomal protein L1p/L10e family Pfam Description: Ribosomal protein L1p/L10e family
  misc_feature (103)..(331): Homolog of NCBI NO: 33239681 NR Description: Ribosomal protein L1
  misc_feature (103)..(331): Homolog of NCBI NO: 37521169 NR Description: 50S ribosomal protein L1 [Gloeobacter violaceus]
  misc_feature (103)..(331): Homolog of NCBI NO: 16330010 NR Description: 50S ribosomal protein L1 [Synechocystis sp. PCC
  misc_feature (103)..(329): Homolog of NCBI NO: 11467612 NR Description: ribosomal protein L1 [Guillardia theta]
  misc_feature (103)..(331): Homolog of NCBI NO: 17232793 NR Description: 50S ribosomal protein L1 [Nostoc sp. PCC 7120]
  misc_feature (103)..(331): Homolog of NCBI NO: 33239681 NR Description: Ribosomal protein L1
  misc_feature (103)..(331): Homolog of NCBI NO: 16330010 NR Description: 50S ribosomal protein L1 [Synechocystis sp. PCC
  misc_feature (103)..(331): Homolog of NCBI NO: 17232793 NR Description: 50S ribosomal protein L1 [Nostoc sp. PCC 7120]
  misc_feature (1)..(336): Homolog of NCBI NO: 15229443 NR Description: ribosomal protein L1p family [Arabidopsis
  misc_feature (1)..(336): Homolog of NCBI NO: 25456457 NR Description: ribosomal protein L1 protein [imported] -
  misc_feature (1)..(334): Homolog of NCBI NO: 25453504 NR Description: ribosomal protein L1 [imported] - spinach
  misc_feature (100)..(331): Homolog of NCBI NO: 22297840 NR Description: 50S ribosomal protein L1 [Thermosynechococcus
  misc_feature (79)..(254): Homolog of NCBI NO: 1350625 NR Description: 50S RIBOSOMAL PROTEIN L1, CHLOROPLAST PRECURSOR
  misc_feature (103)..(329): Homolog of NCBI NO: 11467612 NR Description: ribosomal protein L1 [Guillardia theta]
  misc_feature (103)..(331): Homolog of NCBI NO: 37521169 NR Description: 50S ribosomal protein L1 [Gloeobacter violaceus]
  misc_feature (79)..(254): Homolog of NCBI NO: 1350625 NR Description: 50S RIBOSOMAL PROTEIN L1, CHLOROPLAST PRECURSOR
  misc_feature (100)..(331): Homolog of NCBI NO: 22297840 NR Description: 50S ribosomal protein L1 [Thermosynechococcus
  misc_feature (1)..(334): Homolog of NCBI NO: 25453504 NR Description: ribosomal protein L1 [imported] - spinach
  misc_feature (1)..(336): Homolog of NCBI NO: 25456457 NR Description: ribosomal protein L1 protein [imported] -
  misc_feature (1)..(336): Homolog of NCBI NO: 15229443 NR Description: ribosomal protein L1p family [Arabidopsis

SEQ ID NO: 50651 - DNA, 1889 bp, Arabidopsis thaliana
  misc_feature (1)..(1889): Ceres Seq. ID no. 12591570
  misc_feature: MA Experiment ID: 108463 Result: Down-regulated in Transcription
  misc_feature: MA Experiment 108463 PARAMETER Experiment Name: At_Germinating_Seeds_cDNA_P Parameter: Age (day) Value: 3 vs. 0
  misc_feature: MA Experiment 108463 PARAMETER Experiment Name: At_Germinating_Seeds_cDNA_P Parameter: Tissue Value: Germinating Seeds
  misc_feature: MA Experiment ID: 108464 Result: Down-regulated in Transcription
  misc_feature: MA Experiment 108464 PARAMETER Experiment Name: At_Germinating_Seeds_cDNA_P Parameter: Age (day) Value: 4 vs. 0
  misc_feature: MA Experiment 108464 PARAMETER Experiment Name: At_Germinating_Seeds_cDNA_P Parameter: Tissue Value: Germinating Seeds
  misc_feature: MA Experiment ID: 108608 Result: Up-regulated in Transcription
  misc_feature: MA Experiment 108608 PARAMETER Experiment Name: At_100uM_ABA_cDNA_P Parameter: Timepoint (hr) Value: 1
  misc_feature: MA Experiment 108608 PARAMETER Experiment Name: At_100uM_ABA_cDNA_P Parameter: Tissue Value: Aerial
  misc_feature: MA Experiment 108608 PARAMETER Experiment Name: At_100uM_ABA_cDNA_P Parameter: Treatment Value: 100uM ABA vs. No Treatment
  misc_feature: MA Experiment ID: 108668 Result: Up-regulated in Transcription
  misc_feature: MA Experiment 108668 PARAMETER Experiment Name: At_2mM_SA_cDNA_P Parameter: Plant Line Value: WS
  misc_feature: MA Experiment 108668 PARAMETER Experiment Name: At_2mM_SA_cDNA_P Parameter: Timepoint (hr) Value: 6
  misc_feature: MA Experiment 108668 PARAMETER Experiment Name: At_2mM_SA_cDNA_P Parameter: Treatment Value: 2mM SA vs. No Treatment
  misc_feature: MA Experiment ID: 20000070 Result: Up-regulated in Transcription
  misc_feature: MA Experiment 20000070 PARAMETER Experiment Name: At_100uM_ABA_Mutants_cDNA_P Parameter: Plant Line Value: CS24
  misc_feature: MA Experiment 20000070 PARAMETER Experiment Name: At_100uM_ABA_Mutants_cDNA_P Parameter: Timepoint (hr) Value: 6
  misc_feature: MA Experiment 20000070 PARAMETER Experiment Name: At_100uM_ABA_Mutants_cDNA_P Parameter: Tissue Value: Aerial
  misc_feature: MA Experiment 20000070 PARAMETER Experiment Name: At_100uM_ABA_Mutants_cDNA_P Parameter: Treatment Value: 100uM ABA vs. No Treatment
  misc_feature: MA Experiment ID: 20000090 Result: Up-regulated in Transcription
  misc_feature: MA Experiment ID: 20000144 Result: Down-regulated in Transcription
  misc_feature: MA Experiment 20000144 PARAMETER Experiment Name: At_42deg_Heat_cDNA_P Parameter: Temperature (deg C) Value: 42 vs. 22
  misc_feature: MA Experiment 20000144 PARAMETER Experiment Name: At_42deg_Heat_cDNA_P Parameter: Timepoint (hr) Value: 1
  misc_feature: MA Experiment 20000144 PARAMETER Experiment Name: At_42deg_Heat_cDNA_P Parameter: Tissue Value: Aerial
  misc_feature: MA Experiment ID: 20000166 Result: Up-regulated in Transcription
  misc_feature: MA Experiment 20000166 PARAMETER Experiment Name: At_100uM_ABA_P Parameter: Age (day) Value: 14
  misc_feature: MA Experiment 20000166 PARAMETER Experiment Name: At_100uM_ABA_P Parameter: Organism Value: A. thaliana
  misc_feature: MA Experiment 20000166 PARAMETER Experiment Name: At_100uM_ABA_P Parameter: Plant Line Value: WS
  misc_feature: MA Experiment 20000166 PARAMETER Experiment Name: At_100uM_ABA_P Parameter: Timepoint (hr) Value: 1
  misc_feature: MA Experiment 20000166 PARAMETER Experiment Name: At_100uM_ABA_P Parameter: Tissue Value: Aerial
  misc_feature: MA Experiment 20000166 PARAMETER Experiment Name: At_100uM_ABA_P Parameter: Treatment Value: 100uM ABA vs. No Treatment
  misc_feature: MA Experiment ID: 20000171 Result: Down-regulated in Transcription
  misc_feature: MA Experiment 20000171 PARAMETER Experiment Name: At_42deg_Heat_P Parameter: Age (day) Value: 14
  misc_feature: MA Experiment 20000171 PARAMETER Experiment Name: At_42deg_Heat_P Parameter: Organism Value: A. thaliana
  misc_feature: MA Experiment 20000171 PARAMETER Experiment Name: At_42deg_Heat_P Parameter: Plant Line Value: WS
  misc_feature: MA Experiment 20000171 PARAMETER Experiment Name: At_42deg_Heat_P Parameter: Temperature (deg C) Value: 42 vs. 22
  misc_feature: MA Experiment 20000171 PARAMETER Experiment Name: At_42deg_Heat_P Parameter: Timepoint (hr) Value: 1
  misc_feature: MA Experiment 20000171 PARAMETER Experiment Name: At_42deg_Heat_P Parameter: Tissue Value: Aerial
  misc_feature: MA Experiment ID: 20000173 Result: Down-regulated in Transcription
  misc_feature: MA Experiment 20000173 PARAMETER Experiment Name: At_42deg_Heat_P Parameter: Age (day) Value: 14
  misc_feature: MA Experiment 20000173 PARAMETER Experiment Name: At_42deg_Heat_P Parameter: Organism Value: A. thaliana
  misc_feature: MA Experiment 20000173 PARAMETER Experiment Name: At_42deg_Heat_P Parameter: Plant Line Value: WS
  misc_feature: MA Experiment 20000173 PARAMETER Experiment Name: At_42deg_Heat_P Parameter: Temperature (deg C) Value: 42 vs. 22
  misc_feature: MA Experiment 20000173 PARAMETER Experiment Name: At_42deg_Heat_P Parameter: Timepoint (hr) Value: 6
  misc_feature: MA Experiment 20000173 PARAMETER Experiment Name: At_42deg_Heat_P Parameter: Tissue Value: Aerial
  misc_feature: MA Experiment ID: 20000182 Result: Up-regulated in Transcription
  misc_feature: MA Experiment 20000182 PARAMETER Experiment Name: At_2mM_SA_P Parameter: Age (day) Value: 14
  misc_feature: MA Experiment 20000182 PARAMETER Experiment Name: At_2mM_SA_P Parameter: Organism Value: A. thaliana
  misc_feature: MA Experiment 20000182 PARAMETER Experiment Name: At_2mM_SA_P Parameter: Plant Line Value: WS
  misc_feature: MA Experiment 20000182 PARAMETER Experiment Name: At_2mM_SA_P Parameter: Timepoint (hr) Value: 6
  misc_feature: MA Experiment 20000182 PARAMETER Experiment Name: At_2mM_SA_P Parameter: Tissue Value: Aerial
  misc_feature: MA Experiment 20000182 PARAMETER Experiment Name: At_2mM_SA_P Parameter: Treatment Value: 2mM SA vs. No Treatment
  misc_feature: MA Experiment ID: 20000185 Result: Up-regulated in Transcription
  misc_feature: MA Experiment 20000185 PARAMETER Experiment Name: At_Roots__P Parameter: Age (day) Value: 7 vs. 21
  misc_feature: MA Experiment 20000185 PARAMETER Experiment Name: At_Roots__P Parameter: Organism Value: A. thaliana
  misc_feature: MA Experiment 20000185 PARAMETER Experiment Name: At_Roots__P Parameter: Tissue Value: Roots vs. Whole Plant
  misc_feature: MA Experiment ID: 20000227 Result: Up-regulated in Transcription
  misc_feature: MA Experiment 20000227 PARAMETER Experiment Name: At_Root-Tips-vs-Tops_P Parameter: Tissue Value: Root Tips vs. Root Tops
  misc_feature: MA Experiment ID: 20000438 Result: Down-regulated in Transcription
  misc_feature: MA Experiment 20000438 PARAMETER Experiment Name: At_Shoots__P Parameter: Age (day) Value: 14
  misc_feature: MA Experiment 20000438 PARAMETER Experiment Name: At_Shoots__P Parameter: Tissue Value: Shoots vs. Whole Plant
  misc_feature: MA Experiment ID: 20000527 Result: Down-regulated in Transcription
  misc_feature: MA Experiment 20000527 PARAMETER Experiment Name: At_10percent_PEG_P Parameter: Age (day) Value: 20
  misc_feature: MA Experiment 20000527 PARAMETER Experiment Name: At_10percent_PEG_P Parameter: Organism Value: A. thaliana
  misc_feature: MA Experiment 20000527 PARAMETER Experiment Name: At_10percent_PEG_P Parameter: Plant Line Value: WS
  misc_feature: MA Experiment 20000527 PARAMETER Experiment Name: At_10percent_PEG_P Parameter: Timepoint (day) Value: 20
  misc_feature: MA Experiment 20000527 PARAMETER Experiment Name: At_10percent_PEG_P Parameter: Tissue Value: Whole Plant
  misc_feature: MA Experiment 20000527 PARAMETER Experiment Name: At_10percent_PEG_P Parameter: Treatment Value: 10percent PEG vs. No Treatment
acacacttacatacaacaatggcttcgtcatctacaagtatctctctccttctcttcgtctctttccttcttcttctcgttaactcgcgtgcagagaatgcgtccagtggatcggatctcgacgaagaattggctttcctcgccgcggaggaatccaaggaacaaagccacggcggcggttcgtaccacgaggaggagcacgatcatcagcaccgagacttcgagaattacgatgatctcgagcaaggaggcggcgagtttcatcacggcgatcacggttacgaggaggagccgttaccaccagtcgacgagaaagacgtggcggttctgaccaaggacaatttcaccgagttcgtcggcaacaatagcttcgcgatggtggagttttacgctccgtggtgcggcgcttgtcaggctttgactccggagtacgccgcggctgcgacggagttgaaaggccttgcggcgctcgcgaagatcgacgcgacggaggaaggggatttggctcagaagtacgagattcagggcttccccaccgttttcttgtttgtcgacggagaaatgcgcaagacctacgaaggtgaaagaacaaaggatggtattgtgacttggctgaagaagaaggccagtcctagcatccacaacatcactactaaagaggaggctgaacgtgttttgtccgctgaacctaaacttgtctttggttttctcaactcattagtggggtcagagagtgaggagctcgcggctgcgtccagactggaagacgatctcagtttttaccaaactgcaagccctgatattgcaaagctatttgaaattgaaacccaagtcaagcgtcctgccttagttttactgaaaaaggaggaagagaaacttgcccgttttgatggaaacttcactaaaacggctatagcagagtttgtgtcagccaacaaagtcccattggtgatcaacttcacaagggaaggtgcatcactgattttcgagagctcagtgaaaaaccaactcattctttttgccaaggcaaatgaatcagagaagcaccttcccactctgagggaggtggcaaagtccttcaagggaaagtttgttttcgtttatgtgcaaatggacaatgaagattatggagaagcagtttctggattctttggtgttaccggcgctgcccccaaggttcttgtatacactggtaatgaagatatgaggaagtttattctggacggtgaattgaccgtaaataacattaagacacttgcggaagatttcctagcagacaaactgaagcctttctacaagtcagatccactaccggaaaataacgatggtgatgttaaggtcattgtgggaaacaattttgatgagattgttcttgacgagtcaaaggatgttcttctcgagatatatgctccttggtgtggccactgccaatcatttgagccgatttacaacaagcttggaaagtatttaaaaggcattgactcgttagttgtagcaaagatggatggtaccagcaatgagcatcctagagcaaaggctgatgggttcccaacaatcctgttcttccctggtggaaacaaaagcttcgatccgatcgctgtggatgttgaccgtacagtagtggaactgtacaaattcctgaagaagcacgcatcaatcccatttaaacttgagaaaccggcgacacctgaaccggtgatctcgaccatgaaatctgatgagaagatcgagggtgatagttccaaggatgagttgtgatgatcggaacagagtgtgtaacaaggctatagatgatgactcttctataaatgatagaaaatgttttgccctttgtttttttccattgttgtatgctatgaaatgaataattaaagaagttttggtttctc

SEQ ID NO: 50652 - protein, 585 aa, Arabidopsis thaliana
  peptide (1)..(585): Ceres Seq. ID no. 12591571
  misc_feature (444)..(552): Pfam Name: Thioredoxin Pfam Description: Thioredoxin
  misc_feature (444)..(552): Pfam Name: Thioredoxin Pfam Description: Thioredoxin
  misc_feature (86)..(585): Homolog of NCBI NO: 7437394 NR Description: protein disulfide-isomerase (EC 5.3.4.1) RB60 -
  misc_feature (95)..(585): Homolog of NCBI NO: 5902592 NR Description: protein disulfide isomerase precursor
  misc_feature (103)..(585): Homolog of NCBI NO: 20805287 NR Description: protein disulfide isomerase-like PDI-M
  misc_feature (102)..(565): Homolog of NCBI NO: 20805285 NR Description: protein disulfide isomerase-like PDI-H
  misc_feature (16)..(533): Homolog of NCBI NO: 30697408 NR Description: protein disulfide isomerase family [Arabidopsis
  misc_feature (86)..(585): Homolog of NCBI NO: 7437394 NR Description: protein disulfide-isomerase (EC 5.3.4.1) RB60 -
  misc_feature (103)..(585): Homolog of NCBI NO: 20805287 NR Description: protein disulfide isomerase-like PDI-M
  misc_feature (16)..(533): Homolog of NCBI NO: 30697408 NR Description: protein disulfide isomerase family [Arabidopsis
  misc_feature (7)..(585): Homolog of NCBI NO: 22331799 NR Description: protein disulfide-isomerase-like protein
  misc_feature (7)..(585): Homolog of NCBI NO: 7437396 NR Description: protein disulfide-isomerase homolog F28P10.60 -
  misc_feature (16)..(583): Homolog of NCBI NO: 21593313 NR Description: protein disulfide isomerase precursor-like
  misc_feature (16)..(583): Homolog of NCBI NO: 30697404 NR Description: protein disulfide isomerase family [Arabidopsis
  misc_feature (143)..(585): Homolog of NCBI NO: 28140231 NR Description: protein disulphide isomerase [Elaeis guineensis]
  misc_feature (102)..(565): Homolog of NCBI NO: 20805285 NR Description: protein disulfide isomerase-like PDI-H
  misc_feature (95)..(585): Homolog of NCBI NO: 5902592 NR Description: protein disulfide isomerase precursor
  misc_feature (143)..(585): Homolog of NCBI NO: 28140231 NR Description: protein disulphide isomerase [Elaeis guineensis]
  misc_feature (16)..(583): Homolog of NCBI NO: 30697404 NR Description: protein disulfide isomerase family [Arabidopsis
  misc_feature (16)..(583): Homolog of NCBI NO: 21593313 NR Description: protein disulfide isomerase precursor-like
  misc_feature (7)..(585): Homolog of NCBI NO: 7437396 NR Description: protein disulfide-isomerase homolog F28P10.60 -
  misc_feature (7)..(585): Homolog of NCBI NO: 22331799 NR Description: protein disulfide-isomerase-like protein
THLHTTMASSSTSISLLLFVSFLLLLVNSRAENASSGSDLDEELAFLAAEESKEQSHGGGSYHEEEHDHQHRDFENYDDLEQGGGEFHHGDHGYEEEPLPPVDEKDVAVLTKDNFTEFVGNNSFAMVEFYAPWCGACQALTPEYAAAATELKGLAALAKIDATEEGDLAQKYEIQGFPTVFLFVDGEMRKTYEGERTKDGIVTWLKKKASPSIHNITTKEEAERVLSAEPKLVFGFLNSLVGSESEELAAASRLEDDLSFYQTASPDIAKLFEIETQVKRPALVLLKKEEEKLARFDGNFTKTAIAEFVSANKVPLVINFTREGASLIFESSVKNQLILFAKANESEKHLPTLREVAKSFKGKFVFVYVQMDNEDYGEAVSGFFGVTGAAPKVLVYTGNEDMRKFILDGELTVNNIKTLAEDFLADKLKPFYKSDPLPENNDGDVKVIVGNNFDEIVLDESKDVLLEIYAPWCGHCQSFEPIYNKLGKYLKGIDSLVVAKMDGTSNEHPRAKADGFPTILFFPGGNKSFDPIAVDVDRTVVELYKFLKKHASIPFKLEKPATPEPVISTMKSDEKIEGDSSKDEL

SEQ ID NO: 50653 - protein, 579 aa, Arabidopsis thaliana
  peptide (1)..(579): Ceres Seq. ID no. 12591572
  misc_feature (438)..(546): Pfam Name: Thioredoxin Pfam Description: Thioredoxin
  misc_feature (438)..(546): Pfam Name: Thioredoxin Pfam Description: Thioredoxin
  misc_feature (80)..(579): Homolog of NCBI NO: 7437394 NR Description: protein disulfide-isomerase (EC 5.3.4.1) RB60 -
  misc_feature (89)..(579): Homolog of NCBI NO: 5902592 NR Description: protein disulfide isomerase precursor
  misc_feature (97)..(579): Homolog of NCBI NO: 20805287 NR Description: protein disulfide isomerase-like PDI-M
  misc_feature (96)..(559): Homolog of NCBI NO: 20805285 NR Description: protein disulfide isomerase-like PDI-H
  misc_feature (10)..(527): Homolog of NCBI NO: 30697408 NR Description: protein disulfide isomerase family [Arabidopsis
  misc_feature (80)..(579): Homolog of NCBI NO: 7437394 NR Description: protein disulfide-isomerase (EC 5.3.4.1) RB60 -
  misc_feature (97)..(579): Homolog of NCBI NO: 20805287 NR Description: protein disulfide isomerase-like PDI-M
  misc_feature (10)..(527): Homolog of NCBI NO: 30697408 NR Description: protein disulfide isomerase family [Arabidopsis
  misc_feature (1)..(579): Homolog of NCBI NO: 22331799 NR Description: protein disulfide-isomerase-like protein
  misc_feature (1)..(579): Homolog of NCBI NO: 7437396 NR Description: protein disulfide-isomerase homolog F28P10.60 -
  misc_feature (10)..(577): Homolog of NCBI NO: 21593313 NR Description: protein disulfide isomerase precursor-like
  misc_feature (10)..(577): Homolog of NCBI NO: 30697404 NR Description: protein disulfide isomerase family [Arabidopsis
  misc_feature (137)..(579): Homolog of NCBI NO: 28140231 NR Description: protein disulphide isomerase [Elaeis guineensis]
  misc_feature (96)..(559): Homolog of NCBI NO: 20805285 NR Description: protein disulfide isomerase-like PDI-H
  misc_feature (89)..(579): Homolog of NCBI NO: 5902592 NR Description: protein disulfide isomerase precursor
  misc_feature (137)..(579): Homolog of NCBI NO: 28140231 NR Description: protein disulphide isomerase [Elaeis guineensis]
  misc_feature (10)..(577): Homolog of NCBI NO: 30697404 NR Description: protein disulfide isomerase family [Arabidopsis
  misc_feature (10)..(577): Homolog of NCBI NO: 21593313 NR Description: protein disulfide isomerase precursor-like
  misc_feature (1)..(579): Homolog of NCBI NO: 7437396 NR Description: protein disulfide-isomerase homolog F28P10.60 -
  misc_feature (1)..(579): Homolog of NCBI NO: 22331799 NR Description: protein disulfide-isomerase-like protein
MASSSTSISLLLFVSFLLLLVNSRAENASSGSDLDEELAFLAAEESKEQSHGGGSYHEEEHDHQHRDFENYDDLEQGGGEFHHGDHGYEEEPLPPVDEKDVAVLTKDNFTEFVGNNSFAMVEFYAPWCGACQALTPEYAAAATELKGLAALAKIDATEEGDLAQKYEIQGFPTVFLFVDGEMRKTYEGERTKDGIVTWLKKKASPSIHNITTKEEAERVLSAEPKLVFGFLNSLVGSESEELAAASRLEDDLSFYQTASPDIAKLFEIETQVKRPALVLLKKEEEKLARFDGNFTKTAIAEFVSANKVPLVINFTREGASLIFESSVKNQLILFAKANESEKHLPTLREVAKSFKGKFVFVYVQMDNEDYGEAVSGFFGVTGAAPKVLVYTGNEDMRKFILDGELTVNNIKTLAEDFLADKLKPFYKSDPLPENNDGDVKVIVGNNFDEIVLDESKDVLLEIYAPWCGHCQSFEPIYNKLGKYLKGIDSLVVAKMDGTSNEHPRAKADGFPTILFFPGGNKSFDPIAVDVDRTVVELYKFLKKHASIPFKLEKPATPEPVISTMKSDEKIEGDSSKDEL

SEQ ID NO: 50654 - protein, 460 aa, Arabidopsis thaliana
  peptide (1)..(460): Ceres Seq. ID no. 12591573
  misc_feature (319)..(427): Pfam Name: Thioredoxin Pfam Description: Thioredoxin
  misc_feature (319)..(427): Pfam Name: Thioredoxin Pfam Description: Thioredoxin
  misc_feature (1)..(460): Homolog of NCBI NO: 7437394 NR Description: protein disulfide-isomerase (EC 5.3.4.1) RB60 -
  misc_feature (1)..(460): Homolog of NCBI NO: 5902592 NR Description: protein disulfide isomerase precursor
  misc_feature (1)..(460): Homolog of NCBI NO: 20805287 NR Description: protein disulfide isomerase-like PDI-M
  misc_feature (1)..(440): Homolog of NCBI NO: 20805285 NR Description: protein disulfide isomerase-like PDI-H
  misc_feature (1)..(408): Homolog of NCBI NO: 30697408 NR Description: protein disulfide isomerase family [Arabidopsis
  misc_feature (1)..(460): Homolog of NCBI NO: 7437394 NR Description: protein disulfide-isomerase (EC 5.3.4.1) RB60 -
  misc_feature (1)..(460): Homolog of NCBI NO: 20805287 NR Description: protein disulfide isomerase-like PDI-M
  misc_feature (1)..(408): Homolog of NCBI NO: 30697408 NR Description: protein disulfide isomerase family [Arabidopsis
  misc_feature (1)..(460): Homolog of NCBI NO: 22331799 NR Description: protein disulfide-isomerase-like protein
  misc_feature (1)..(460): Homolog of NCBI NO: 7437396 NR Description: protein disulfide-isomerase homolog F28P10.60 -
  misc_feature (1)..(458): Homolog of NCBI NO: 21593313 NR Description: protein disulfide isomerase precursor-like
  misc_feature (1)..(458): Homolog of NCBI NO: 30697404 NR Description: protein disulfide isomerase family [Arabidopsis
  misc_feature (18)..(460): Homolog of NCBI NO: 28140231 NR Description: protein disulphide isomerase [Elaeis guineensis]
  misc_feature (1)..(440): Homolog of NCBI NO: 20805285 NR Description: protein disulfide isomerase-like PDI-H
  misc_feature (1)..(460): Homolog of NCBI NO: 5902592 NR Description: protein disulfide isomerase precursor
  misc_feature (18)..(460): Homolog of NCBI NO: 28140231 NR Description: protein disulphide isomerase [Elaeis guineensis]
  misc_feature (1)..(458): Homolog of NCBI NO: 30697404 NR Description: protein disulfide isomerase family [Arabidopsis
  misc_feature (1)..(458): Homolog of NCBI NO: 21593313 NR Description: protein disulfide isomerase precursor-like
  misc_feature (1)..(460): Homolog of NCBI NO: 7437396 NR Description: protein disulfide-isomerase homolog F28P10.60 -
  misc_feature (1)..(460): Homolog of NCBI NO: 22331799 NR Description: protein disulfide-isomerase-like protein
MVEFYAPWCGACQALTPEYAAAATELKGLAALAKIDATEEGDLAQKYEIQGFPTVFLFVDGEMRKTYEGERTKDGIVTWLKKKASPSIHNITTKEEAERVLSAEPKLVFGFLNSLVGSESEELAAASRLEDDLSFYQTASPDIAKLFEIETQVKRPALVLLKKEEEKLARFDGNFTKTAIAEFVSANKVPLVINFTREGASLIFESSVKNQLILFAKANESEKHLPTLREVAKSFKGKFVFVYVQMDNEDYGEAVSGFFGVTGAAPKVLVYTGNEDMRKFILDGELTVNNIKTLAEDFLADKLKPFYKSDPLPENNDGDVKVIVGNNFDEIVLDESKDVLLEIYAPWCGHCQSFEPIYNKLGKYLKGIDSLVVAKMDGTSNEHPRAKADGFPTILFFPGGNKSFDPIAVDVDRTVVELYKFLKKHASIPFKLEKPATPEPVISTMKSDEKIEGDSSKDEL

SEQ ID NO: 50655 - DNA, 1184 bp, Arabidopsis thaliana
  misc_feature (1)..(1184): Ceres Seq. ID no. 13592432
  misc_feature: MA Experiment ID: 20000184 Result: Down-regulated in Transcription
  misc_feature: MA Experiment 20000184 PARAMETER Experiment Name: At_Shoots__P Parameter: Age (day) Value: 7
  misc_feature: MA Experiment 20000184 PARAMETER Experiment Name: At_Shoots__P Parameter: Tissue Value: Shoots vs. Whole Plant
  misc_feature: MA Experiment ID: 20000227 Result: Up-regulated in Transcription
  misc_feature: MA Experiment 20000227 PARAMETER Experiment Name: At_Root-Tips-vs-Tops_P Parameter: Tissue Value: Root Tips vs. Root Tops
  misc_feature: MA Experiment ID: 20000438 Result: Down-regulated in Transcription
  misc_feature: MA Experiment 20000438 PARAMETER Experiment Name: At_Shoots__P Parameter: Age (day) Value: 14
  misc_feature: MA Experiment 20000438 PARAMETER Experiment Name: At_Shoots__P Parameter: Tissue Value: Shoots vs. Whole Plant
  misc_feature: MA Experiment ID: 20000451 Result: Up-regulated in Transcription
  misc_feature: MA Experiment 20000451 PARAMETER Experiment Name: At_CS6879_Shoots-Roots_P Parameter: Age (day) Value: 14
  misc_feature: MA Experiment 20000451 PARAMETER Experiment Name: At_CS6879_Shoots-Roots_P Parameter: Organism Value: A. thaliana
  misc_feature: MA Experiment 20000451 PARAMETER Experiment Name: At_CS6879_Shoots-Roots_P Parameter: Plant Line Value: CS6879 vs. WS
  misc_feature: MA Experiment 20000451 PARAMETER Experiment Name: At_CS6879_Shoots-Roots_P Parameter: Tissue Value: Roots
  misc_feature: MA Experiment ID: 20000573 Result: Down-regulated in Transcription
  misc_feature: MA Experiment 20000573 PARAMETER Experiment Name: At_100uM_ABA_Mutants__P Parameter: Organism Value: A. thaliana
  misc_feature: MA Experiment 20000573 PARAMETER Experiment Name: At_100uM_ABA_Mutants__P Parameter: Plant Line Value: CS22 vs. Ler wt
  misc_feature: MA Experiment 20000573 PARAMETER Experiment Name: At_100uM_ABA_Mutants__P Parameter: Timepoint (hr) Value: N/A
  misc_feature: MA Experiment 20000573 PARAMETER Experiment Name: At_100uM_ABA_Mutants__P Parameter: Tissue Value: Whole Plant
  misc_feature: MA Experiment 20000573 PARAMETER Experiment Name: At_100uM_ABA_Mutants__P Parameter: Treatment Value: None
  misc_feature: MA Experiment ID: 20000574 Result: Down-regulated in Transcription
  misc_feature: MA Experiment 20000574 PARAMETER Experiment Name: At_100uM_ABA_Mutants__P Parameter: Organism Value: A. thaliana
  misc_feature: MA Experiment 20000574 PARAMETER Experiment Name: At_100uM_ABA_Mutants__P Parameter: Plant Line Value: CS23 vs. Ler wt
  misc_feature: MA Experiment 20000574 PARAMETER Experiment Name: At_100uM_ABA_Mutants__P Parameter: Timepoint (hr) Value: N/A
  misc_feature: MA Experiment 20000574 PARAMETER Experiment Name: At_100uM_ABA_Mutants__P Parameter: Tissue Value: Whole Plant
  misc_feature: MA Experiment 20000574 PARAMETER Experiment Name: At_100uM_ABA_Mutants__P Parameter: Treatment Value: None
  misc_feature: MA Experiment ID: 20001248 Result: Up-regulated in Transcription
  misc_feature: MA Experiment 20001248 PARAMETER Experiment Name: At_Far-red-induction_P Parameter: Age (day) Value: 7
  misc_feature: MA Experiment 20001248 PARAMETER Experiment Name: At_Far-red-induction_P Parameter: Light Value: Far-red vs. White
  misc_feature: MA Experiment 20001248 PARAMETER Experiment Name: At_Far-red-induction_P Parameter: Organism Value: A. thaliana
  misc_feature: MA Experiment 20001248 PARAMETER Experiment Name: At_Far-red-induction_P Parameter: Plant Line Value: Columbia
  misc_feature: MA Experiment 20001248 PARAMETER Experiment Name: At_Far-red-induction_P Parameter: Timepoint (hr) Value: 4
  misc_feature: MA Experiment 20001248 PARAMETER Experiment Name: At_Far-red-induction_P Parameter: Tissue Value: Whole Plant
  misc_feature: MA Experiment ID: 20001450 Result: Up-regulated in Transcription
  misc_feature: MA Experiment 20001450 PARAMETER Experiment Name: At_Far-red-induction_P Parameter: Age (day) Value: 7
  misc_feature: MA Experiment 20001450 PARAMETER Experiment Name: At_Far-red-induction_P Parameter: Light Value: Far-red vs. White
  misc_feature: MA Experiment 20001450 PARAMETER Experiment Name: At_Far-red-induction_P Parameter: Organism Value: A. thaliana
  misc_feature: MA Experiment 20001450 PARAMETER Experiment Name: At_Far-red-induction_P Parameter: Plant Line Value: Columbia
  misc_feature: MA Experiment 20001450 PARAMETER Experiment Name: At_Far-red-induction_P Parameter: Timepoint (hr) Value: 8
  misc_feature: MA Experiment 20001450 PARAMETER Experiment Name: At_Far-red-induction_P Parameter: Tissue Value: Whole Plant
  misc_feature: MA Experiment ID: 20001451 Result: Up-regulated in Transcription
  misc_feature: MA Experiment 20001451 PARAMETER Experiment Name: At_Far-red-induction_P Parameter: Age (day) Value: 7
  misc_feature: MA Experiment 20001451 PARAMETER Experiment Name: At_Far-red-induction_P Parameter: Light Value: Far-red vs. White
  misc_feature: MA Experiment 20001451 PARAMETER Experiment Name: At_Far-red-induction_P Parameter: Organism Value: A. thaliana
  misc_feature: MA Experiment 20001451 PARAMETER Experiment Name: At_Far-red-induction_P Parameter: Plant Line Value: Columbia
  misc_feature: MA Experiment 20001451 PARAMETER Experiment Name: At_Far-red-induction_P Parameter: Timepoint (hr) Value: 24
  misc_feature: MA Experiment 20001451 PARAMETER Experiment Name: At_Far-red-induction_P Parameter: Tissue Value: Whole Plant
  misc_feature: MA Experiment ID: 20001906 Result: Up-regulated in Transcription
  misc_feature: MA Experiment 20001906 PARAMETER Experiment Name: At_Drought_Reproduction_P Parameter: Age (day) Value: 35
  misc_feature: MA Experiment 20001906 PARAMETER Experiment Name: At_Drought_Reproduction_P Parameter: Organism Value: A. thaliana
  misc_feature: MA Experiment 20001906 PARAMETER Experiment Name: At_Drought_Reproduction_P Parameter: Plant Line Value: WS
  misc_feature: MA Experiment 20001906 PARAMETER Experiment Name: At_Drought_Reproduction_P Parameter: Timepoint (day) Value: 5
  misc_feature: MA Experiment 20001906 PARAMETER Experiment Name: At_Drought_Reproduction_P Parameter: Tissue Value: Siliques
  misc_feature: MA Experiment 20001906 PARAMETER Experiment Name: At_Drought_Reproduction_P Parameter: Treatment Value: Drought vs. No Drought
  misc_feature: MA Experiment ID: 20001908 Result: Up-regulated in Transcription
  misc_feature: MA Experiment 20001908 PARAMETER Experiment Name: At_Drought_Reproduction_P Parameter: Age (day) Value: 40
  misc_feature: MA Experiment 20001908 PARAMETER Experiment Name: At_Drought_Reproduction_P Parameter: Organism Value: A. thaliana
  misc_feature: MA Experiment 20001908 PARAMETER Experiment Name: At_Drought_Reproduction_P Parameter: Plant Line Value: WS
  misc_feature: MA Experiment 20001908 PARAMETER Experiment Name: At_Drought_Reproduction_P Parameter: Timepoint (day) Value: 10
  misc_feature: MA Experiment 20001908 PARAMETER Experiment Name: At_Drought_Reproduction_P Parameter: Tissue Value: Siliques
  misc_feature: MA Experiment 20001908 PARAMETER Experiment Name: At_Drought_Reproduction_P Parameter: Treatment Value: Drought vs. No Drought
  misc_feature: MA Experiment ID: 20001909 Result: Up-regulated in Transcription
  misc_feature: MA Experiment 20001909 PARAMETER Experiment Name: At_Drought_Reproduction_P Parameter: Age (day) Value: 35
  misc_feature: MA Experiment 20001909 PARAMETER Experiment Name: At_Drought_Reproduction_P Parameter: Organism Value: A. thaliana
  misc_feature: MA Experiment 20001909 PARAMETER Experiment Name: At_Drought_Reproduction_P Parameter: Plant Line Value: WS
  misc_feature: MA Experiment 20001909 PARAMETER Experiment Name: At_Drought_Reproduction_P Parameter: Timepoint (day) Value: 5
  misc_feature: MA Experiment 20001909 PARAMETER Experiment Name: At_Drought_Reproduction_P Parameter: Tissue Value: Flowers
  misc_feature: MA Experiment 20001909 PARAMETER Experiment Name: At_Drought_Reproduction_P Parameter: Treatment Value: Drought vs. No Drought
gaactcacacatttagcatcatcaaggatcgaaaacattaagtagctagttaagagagagagagagagatggagatgaacattaagtttccagttatagacttgtctaagctcaatggtgaagagagagaccaaaccatggctttgatcgacgatgcttgtcaaaactggggcttcttcgagctggtgaaccatggactaccatatgatctaatggacaacattgagaggatgacaaaggaacactacaagaaacatatggaacaaaagttcaaagaaatgcttcgttccaaaggtttagataccctcgagaccgaagttgaagatgtcgattgggaaagcactttctacctccatcatctccctcaatctaacctatacgacatccctgatatgtcaaatgaataccgattggcaatgaaggattttgggaagaggcttgagattctagctgaagagctattggacttgttgtgtgagaatctagggttggagaaagggtacttgaagaaggtgtttcatgggacaacgggtccaacttttgcgacaaagcttagcaactatccaccatgtcctaaaccagagatgatcaaagggcttagggctcacacagatgcaggaggcctcattttgctgtttcaagatgataaggtcagtggtctccagcttcttaaagatggtgattgggttgatgttcctcctctcaagcattccattgtcatcaaccttggtgaccaacttgaggtgataacaaacgggaagtacaagagtgtaatgcaccgtgtgatgacccagaaagaaggaaacaggatgtctatcgcgtcgttttacaaccccggaagcgatgctgagatctctccggcaacatctcttgtggataaagactcaaaatacccaagctttgtgtttgatgactacatgaaactctatgccggactcaagtttcaggccaaggagccacggttcgaggcgatgaaaaatgctgaagcagctgcggatttgaatccggtggctgtggttgagacattctaaatggatgtgggatcttctacgaaagctaaaagtatatgatgataaaaagatgtgtggtaatgtcaataaaaggattggggttgatgttagtaaaatcaataactaagtgatgaatattatgtgttaagcgtgggagtgagtgactatttatgc

SEQ ID NO: 50656 - protein, 320 aa, Arabidopsis thaliana
  peptide (1)..(320): Ceres Seq. ID no. 13592433
  misc_feature (156)..(256): Pfam Name: 2OG-Fe(II) oxygenase superfamily Pfam Description: 2OG-Fe(II) oxygenase superfamily
  misc_feature (7)..(317): Homolog of NCBI NO: 4090533 NR Description: ACC oxidase [Carica papaya]
  misc_feature (1)..(320): Homolog of NCBI NO: 7638440 NR Description: 1-aminocyclopropane-1-carboxylate oxidase
  misc_feature (1)..(320): Homolog of NCBI NO: 25285704 NR Description: 1-aminocyclopropane-1-carboxylate oxidase (EC
  misc_feature (1)..(320): Homolog of NCBI NO: 728780 NR Description: 1-aminocyclopropane-1-carboxylate oxidase (ACC
  misc_feature (1)..(320): Homolog of NCBI NO: 15220770 NR Description: 1-aminocyclopropane-1-carboxylate oxidase (ACC
  misc_feature (1)..(320): Homolog of NCBI NO: 587086 NR Description: ACC oxidase [Brassica oleracea]
  misc_feature (1)..(320): Homolog of NCBI NO: 14148975 NR Description: ACC oxidase [Brassica rapa subsp. rapa]
  misc_feature (1)..(320): Homolog of NCBI NO: 7433194 NR Description: probable 1-aminocyclopropane-1-carboxylate
  misc_feature (1)..(320): Homolog of NCBI NO: 7433206 NR Description: probable 1-aminocyclopropane-1-carboxylate
  misc_feature (1)..(320): Homolog of NCBI NO: 15221170 NR Description: 1-aminocyclopropane-1-carboxylate oxidase (ACC
MEMNIKFPVIDLSKLNGEERDQTMALIDDACQNWGFFELVNHGLPYDLMDNIERMTKEHYKKHMEQKFKEMLRSKGLDTLETEVEDVDWESTFYLHHLPQSNLYDIPDMSNEYRLAMKDFGKRLEILAEELLDLLCENLGLEKGYLKKVFHGTTGPTFATKLSNYPPCPKPEMIKGLRAHTDAGGLILLFQDDKVSGLQLLKDGDWVDVPPLKHSIVINLGDQLEVITNGKYKSVMHRVMTQKEGNRMSIASFYNPGSDAEISPATSLVDKDSKYPSFVFDDYMKLYAGLKFQAKEPRFEAMKNAEAAADLNPVAVVETF

SEQ ID NO: 50657 - protein, 318 aa, Arabidopsis thaliana
  peptide (1)..(318): Ceres Seq. ID no. 13592434
  misc_feature (154)..(254): Pfam Name: 2OG-Fe(II) oxygenase superfamily Pfam Description: 2OG-Fe(II) oxygenase superfamily
  misc_feature (5)..(315): Homolog of NCBI NO: 4090533 NR Description: ACC oxidase [Carica papaya]
  misc_feature (1)..(318): Homolog of NCBI NO: 7638440 NR Description: 1-aminocyclopropane-1-carboxylate oxidase
  misc_feature (1)..(318): Homolog of NCBI NO: 25285704 NR Description: 1-aminocyclopropane-1-carboxylate oxidase (EC
  misc_feature (1)..(318): Homolog of NCBI NO: 728780 NR Description: 1-aminocyclopropane-1-carboxylate oxidase (ACC
  misc_feature (1)..(318): Homolog of NCBI NO: 15220770 NR Description: 1-aminocyclopropane-1-carboxylate oxidase (ACC
  misc_feature (1)..(318): Homolog of NCBI NO: 587086 NR Description: ACC oxidase [Brassica oleracea]
  misc_feature (1)..(318): Homolog of NCBI NO: 14148975 NR Description: ACC oxidase [Brassica rapa subsp. rapa]
  misc_feature (1)..(318): Homolog of NCBI NO: 7433194 NR Description: probable 1-aminocyclopropane-1-carboxylate
  misc_feature (1)..(318): Homolog of NCBI NO: 7433206 NR Description: probable 1-aminocyclopropane-1-carboxylate
  misc_feature (1)..(318): Homolog of NCBI NO: 15221170 NR Description: 1-aminocyclopropane-1-carboxylate oxidase (ACC
MNIKFPVIDLSKLNGEERDQTMALIDDACQNWGFFELVNHGLPYDLMDNIERMTKEHYKKHMEQKFKEMLRSKGLDTLETEVEDVDWESTFYLHHLPQSNLYDIPDMSNEYRLAMKDFGKRLEILAEELLDLLCENLGLEKGYLKKVFHGTTGPTFATKLSNYPPCPKPEMIKGLRAHTDAGGLILLFQDDKVSGLQLLKDGDWVDVPPLKHSIVINLGDQLEVITNGKYKSVMHRVMTQKEGNRMSIASFYNPGSDAEISPATSLVDKDSKYPSFVFDDYMKLYAGLKFQAKEPRFEAMKNAEAAADLNPVAVVETF

SEQ ID NO: 50658 - protein, 297 aa, Arabidopsis thaliana
  peptide (1)..(297): Ceres Seq. ID no. 13592435
  misc_feature (133)..(233): Pfam Name: 2OG-Fe(II) oxygenase superfamily Pfam Description: 2OG-Fe(II) oxygenase superfamily
  misc_feature (1)..(294): Homolog of NCBI NO: 4090533 NR Description: ACC oxidase [Carica papaya]
  misc_feature (1)..(297): Homolog of NCBI NO: 7638440 NR Description: 1-aminocyclopropane-1-carboxylate oxidase
  misc_feature (1)..(297): Homolog of NCBI NO: 25285704 NR Description: 1-aminocyclopropane-1-carboxylate oxidase (EC
  misc_feature (1)..(297): Homolog of NCBI NO: 728780 NR Description: 1-aminocyclopropane-1-carboxylate oxidase (ACC
  misc_feature (1)..(297): Homolog of NCBI NO: 15220770 NR Description: 1-aminocyclopropane-1-carboxylate oxidase (ACC
  misc_feature (1)..(297): Homolog of NCBI NO: 587086 NR Description: ACC oxidase [Brassica oleracea]
  misc_feature (1)..(297): Homolog of NCBI NO: 14148975 NR Description: ACC oxidase [Brassica rapa subsp. rapa]
  misc_feature (1)..(297): Homolog of NCBI NO: 7433194 NR Description: probable 1-aminocyclopropane-1-carboxylate
  misc_feature (1)..(297): Homolog of NCBI NO: 7433206 NR Description: probable 1-aminocyclopropane-1-carboxylate
  misc_feature (1)..(297): Homolog of NCBI NO: 15221170 NR Description: 1-aminocyclopropane-1-carboxylate oxidase (ACC
MALIDDACQNWGFFELVNHGLPYDLMDNIERMTKEHYKKHMEQKFKEMLRSKGLDTLETEVEDVDWESTFYLHHLPQSNLYDIPDMSNEYRLAMKDFGKRLEILAEELLDLLCENLGLEKGYLKKVFHGTTGPTFATKLSNYPPCPKPEMIKGLRAHTDAGGLILLFQDDKVSGLQLLKDGDWVDVPPLKHSIVINLGDQLEVITNGKYKSVMHRVMTQKEGNRMSIASFYNPGSDAEISPATSLVDKDSKYPSFVFDDYMKLYAGLKFQAKEPRFEAMKNAEAAADLNPVAVVETF

SEQ ID NO: 50659 - DNA, 1762 bp, Arabidopsis thaliana
  misc_feature (1)..(1762): Ceres Seq. ID no. 13588476
  misc_feature: MA Experiment ID: 20000179 Result: Up-regulated in Transcription
  misc_feature: MA Experiment 20000179 PARAMETER Experiment Name: At_Germinating_Seeds_P Parameter: Age (hr) Value: 6 vs. 0
  misc_feature: MA Experiment 20000179 PARAMETER Experiment Name: At_Germinating_Seeds_P Parameter: Tissue Value: Germinating Seeds
atgatcttaaaaggaatactgtggcaggtatggttccttggagaaaatgcaaactacgccgcatcagaatatgcatgggaatctgcaactccaccaggcacagcacttatgatgttggatgcagataaaatggttgctgctgctagttctcgcaatcctactctagctggtgcattaactcgcctccagaggtgtgcatttagtggaagctgggaggtcagaattgttgcaattcaagctcttactacaatagccattagatctggtgaacctttcaggctgcagatatacgagtttttgtacaccttagcagagggtggtgtacagtctcaactttctgaaatgcacctgagtaatggggaagaccaaggagctagtggtacaggtcttggagttttaataacaccgatgttaaaagttcttgatgaaatgtatgttggacaagacgaattaatcaaggatatacgccatcacgataatgcaaacaaagaatggaaggacgaggagctgaaaaaactctacgaaaaccatgagaggctgctggattttgtttcaatgttttgctttattcctagagccaagtatttaccactgggcccgataagcgcgaagctcattgacacataccgtacaaagcacaatatcactgcatctactgggtccaccgatccagctgttgttgctactgggatctcggacttaatctatgagtccactcagcctgcccccgctgcctcaaactccagtggtctggatgatgatttggtgaatgcttgggctgcaaaccttggtgatgatggtcttcttggaaacaatgccccagcaatgagtaggaaatggaactcagacctatataatacttgtcaggtcaatgaattcattgctggagtcggaacagatgcaccggatgttgaggaggagaatgtcttctctagaccttcggttgggtatgatgacatgtgggctaaaactcttttagaaacttcagaattggaggaagaagatgcgagatcaggttcatcgtctccagattctgctggatcagtggaaagctcaatatcctctcactttggtggaatgaactacccatcattgttcagttcaaagccttcctcacaagcaacggcaaaatcaggtggaagtaaataccagtccacatatgaaggctatggttccccaattagagaagagcctcctccgccttattcgtattctgagccacaaagtcgtgaatcgtttgagaaccctgtagcagggtctggttctcgaagttatgaatcagatgatgaagaacctaggaaatctactggtacaagatttggaacagcgctctatgacttcacagcaggaggagatgatgagctaaacttgacggcagaagaggaattggagatagagtatgaagttgatggctggttttacgtaaagaagaagcggcctggaagagatgggaagatggcgggacttgttcctgttctatacgtcaatcaatcttgaatttttggggaacggctttagacgtagaagccaacacactttggacatgttaagtggacttgcttagatgccgatagacattatgatccatgatttccttgaagaggtagtgtaaaatcagtgtacatgaaggaatgtatttgttttgttggggtttgatgtgtatgtgtatctcttttgacacttattgctcacatgctattgatgattgatcaacttgagttttaactattgtttcactgaattcataatatatattacatct

SEQ ID NO: 50660 - protein, 498 aa, Arabidopsis thaliana
  peptide (1)..(498): Ceres Seq. ID no. 13588477
  misc_feature (439)..(498): Pfam Name: SH3 domain Pfam Description: SH3 domain
  misc_feature (329)..(496): Homolog of NCBI NO: 34902004 NR Description: unknown protein [Oryza sativa (japonica
  misc_feature (10)..(419): Homolog of NCBI NO: 34902004 NR Description: unknown protein [Oryza sativa (japonica
  misc_feature (10)..(498): Homolog of NCBI NO: 29824397 NR Description: unknown protein [Arabidopsis thaliana]
  misc_feature (1)..(498): Homolog of NCBI NO: 15225702 NR Description: SH3 domain-containing protein [Arabidopsis
MILKGILWQVWFLGENANYAASEYAWESATPPGTALMMLDADKMVAAASSRNPTLAGALTRLQRCAFSGSWEVRIVAIQALTTIAIRSGEPFRLQIYEFLYTLAEGGVQSQLSEMHLSNGEDQGASGTGLGVLITPMLKVLDEMYVGQDELIKDIRHHDNANKEWKDEELKKLYENHERLLDFVSMFCFIPRAKYLPLGPISAKLIDTYRTKHNITASTGSTDPAVVATGISDLIYESTQPAPAASNSSGLDDDLVNAWAANLGDDGLLGNNAPAMSRKWNSDLYNTCQVNEFIAGVGTDAPDVEEENVFSRPSVGYDDMWAKTLLETSELEEEDARSGSSSPDSAGSVESSISSHFGGMNYPSLFSSKPSSQATAKSGGSKYQSTYEGYGSPIREEPPPPYSYSEPQSRESFENPVAGSGSRSYESDDEEPRKSTGTRFGTALYDFTAGGDDELNLTAEEELEIEYEVDGWFYVKKKRPGRDGKMAGLVPVLYVNQS

SEQ ID NO: 50661 - protein, 462 aa, Arabidopsis thaliana
  peptide (1)..(462): Ceres Seq. ID no. 13588478
  misc_feature (403)..(462): Pfam Name: SH3 domain Pfam Description: SH3 domain
  misc_feature (293)..(460): Homolog of NCBI NO: 34902004 NR Description: unknown protein [Oryza sativa (japonica
  misc_feature (1)..(383): Homolog of NCBI NO: 34902004 NR Description: unknown protein [Oryza sativa (japonica
  misc_feature (1)..(462): Homolog of NCBI NO: 29824397 NR Description: unknown protein [Arabidopsis thaliana]
  misc_feature (1)..(462): Homolog of NCBI NO: 15225702 NR Description: SH3 domain-containing protein [Arabidopsis
MMLDADKMVAAASSRNPTLAGALTRLQRCAFSGSWEVRIVAIQALTTIAIRSGEPFRLQIYEFLYTLAEGGVQSQLSEMHLSNGEDQGASGTGLGVLITPMLKVLDEMYVGQDELIKDIRHHDNANKEWKDEELKKLYENHERLLDFVSMFCFIPRAKYLPLGPISAKLIDTYRTKHNITASTGSTDPAVVATGISDLIYESTQPAPAASNSSGLDDDLVNAWAANLGDDGLLGNNAPAMSRKWNSDLYNTCQVNEFIAGVGTDAPDVEEENVFSRPSVGYDDMWAKTLLETSELEEEDARSGSSSPDSAGSVESSISSHFGGMNYPSLFSSKPSSQATAKSGGSKYQSTYEGYGSPIREEPPPPYSYSEPQSRESFENPVAGSGSRSYESDDEEPRKSTGTRFGTALYDFTAGGDDELNLTAEEELEIEYEVDGWFYVKKKRPGRDGKMAGLVPVLYVNQS

SEQ ID NO: 50662 - protein, 461 aa, Arabidopsis thaliana
  peptide (1)..(461): Ceres Seq. ID no. 13588479
  misc_feature (402)..(461): Pfam Name: SH3 domain Pfam Description: SH3 domain
  misc_feature (292)..(459): Homolog of NCBI NO: 34902004 NR Description: unknown protein [Oryza sativa (japonica
  misc_feature (1)..(382): Homolog of NCBI NO: 34902004 NR Description: unknown protein [Oryza sativa (japonica
  misc_feature (1)..(461): Homolog of NCBI NO: 29824397 NR Description: unknown protein [Arabidopsis thaliana]
  misc_feature (1)..(461): Homolog of NCBI NO: 15225702 NR Description: SH3 domain-containing protein [Arabidopsis
MLDADKMVAAASSRNPTLAGALTRLQRCAFSGSWEVRIVAIQALTTIAIRSGEPFRLQIYEFLYTLAEGGVQSQLSEMHLSNGEDQGASGTGLGVLITPMLKVLDEMYVGQDELIKDIRHHDNANKEWKDEELKKLYENHERLLDFVSMFCFIPRAKYLPLGPISAKLIDTYRTKHNITASTGSTDPAVVATGISDLIYESTQPAPAASNSSGLDDDLVNAWAANLGDDGLLGNNAPAMSRKWNSDLYNTCQVNEFIAGVGTDAPDVEEENVFSRPSVGYDDMWAKTLLETSELEEEDARSGSSSPDSAGSVESSISSHFGGMNYPSLFSSKPSSQATAKSGGSKYQSTYEGYGSPIREEPPPPYSYSEPQSRESFENPVAGSGSRSYESDDEEPRKSTGTRFGTALYDFTAGGDDELNLTAEEELEIEYEVDGWFYVKKKRPGRDGKMAGLVPVLYVNQS

SEQ ID NO: 50663 - DNA, 774 bp, Arabidopsis thaliana
  misc_feature (1)..(774): Ceres Seq. ID no. 13588256
  misc_feature: MA Experiment ID: 20000180 Result: Up-regulated in Transcription
  misc_feature: MA Experiment 20000180 PARAMETER Experiment Name: At_Germinating_Seeds_P Parameter: Age (hr) Value: 24 vs. 0
  misc_feature: MA Experiment 20000180 PARAMETER Experiment Name: At_Germinating_Seeds_P Parameter: Tissue Value: Germinating Seeds
  misc_feature: MA Experiment ID: 20000184 Result: Down-regulated in Transcription
  misc_feature: MA Experiment 20000184 PARAMETER Experiment Name: At_Shoots__P Parameter: Age (day) Value: 7
  misc_feature: MA Experiment 20000184 PARAMETER Experiment Name: At_Shoots__P Parameter: Tissue Value: Shoots vs. Whole Plant
  misc_feature: MA Experiment ID: 20000185 Result: Down-regulated in Transcription
  misc_feature: MA Experiment 20000185 PARAMETER Experiment Name: At_Roots__P Parameter: Age (day) Value: 7 vs. 21
  misc_feature: MA Experiment 20000185 PARAMETER Experiment Name: At_Roots__P Parameter: Organism Value: A. thaliana
  misc_feature: MA Experiment 20000185 PARAMETER Experiment Name: At_Roots__P Parameter: Tissue Value: Roots vs. Whole Plant
  misc_feature: MA Experiment ID: 20000234 Result: Up-regulated in Transcription
  misc_feature: MA Experiment 20000234 PARAMETER Experiment Name: At_Siliques_P Parameter: Age (day) Value: 21
  misc_feature: MA Experiment 20000234 PARAMETER Experiment Name: At_Siliques_P Parameter: Organism Value: A. thaliana
  misc_feature: MA Experiment 20000234 PARAMETER Experiment Name: At_Siliques_P Parameter: Plant Line Value: WS
  misc_feature: MA Experiment 20000234 PARAMETER Experiment Name: At_Siliques_P Parameter: Tissue Value: Less Than 5mm Siliques vs. Whole Plant
  misc_feature: MA Experiment ID: 20000235 Result: Up-regulated in Transcription
  misc_feature: MA Experiment 20000235 PARAMETER Experiment Name: At_Siliques_P Parameter: Age (day) Value: 21
  misc_feature: MA Experiment 20000235 PARAMETER Experiment Name: At_Siliques_P Parameter: Organism Value: A. thaliana
  misc_feature: MA Experiment 20000235 PARAMETER Experiment Name: At_Siliques_P Parameter: Plant Line Value: WS
  misc_feature: MA Experiment 20000235 PARAMETER Experiment Name: At_Siliques_P Parameter: Tissue Value: 5-10mm Siliques vs. Whole Plant
  misc_feature: MA Experiment ID: 20000264 Result: Up-regulated in Transcription
  misc_feature: MA Experiment 20000264 PARAMETER Experiment Name: At_Open_Flower_P Parameter: Age (day) Value: 21
  misc_feature: MA Experiment 20000264 PARAMETER Experiment Name: At_Open_Flower_P Parameter: Plant Line Value: WS
  misc_feature: MA Experiment 20000264 PARAMETER Experiment Name: At_Open_Flower_P Parameter: Tissue Value: Open Flower vs. Whole Plant
  misc_feature: MA Experiment ID: 20000438 Result: Down-regulated in Transcription
  misc_feature: MA Experiment 20000438 PARAMETER Experiment Name: At_Shoots__P Parameter: Age (day) Value: 14
  misc_feature: MA Experiment 20000438 PARAMETER Experiment Name: At_Shoots__P Parameter: Tissue Value: Shoots vs. Whole Plant
  misc_feature: MA Experiment ID: 20000439 Result: Down-regulated in Transcription
  misc_feature: MA Experiment 20000439 PARAMETER Experiment Name: At_Roots__P Parameter: Age (day) Value: 14 vs. 21
  misc_feature: MA Experiment 20000439 PARAMETER Experiment Name: At_Roots__P Parameter: Organism Value: A. thaliana
  misc_feature: MA Experiment 20000439 PARAMETER Experiment Name: At_Roots__P Parameter: Tissue Value: Roots vs. Whole Plant
  misc_feature: MA Experiment ID: 20000451 Result: Up-regulated in Transcription
  misc_feature: MA Experiment 20000451 PARAMETER Experiment Name: At_CS6879_Shoots-Roots_P Parameter: Age (day) Value: 14
  misc_feature: MA Experiment 20000451 PARAMETER Experiment Name: At_CS6879_Shoots-Roots_P Parameter: Organism Value: A. thaliana
  misc_feature: MA Experiment 20000451 PARAMETER Experiment Name: At_CS6879_Shoots-Roots_P Parameter: Plant Line Value: CS6879 vs. WS
  misc_feature: MA Experiment 20000451 PARAMETER Experiment Name: At_CS6879_Shoots-Roots_P Parameter: Tissue Value: Roots
  misc_feature: MA Experiment ID: 20000794 Result: Down-regulated in Transcription
  misc_feature: MA Experiment 20000794 PARAMETER Experiment Name: At_Petals_P Parameter: Age (day) Value: 23-25 days
  misc_feature: MA Experiment 20000794 PARAMETER Experiment Name: At_Petals_P Parameter: Plant Line Value: WS
  misc_feature: MA Experiment 20000794 PARAMETER Experiment Name: At_Petals_P Parameter: Tissue Value: Petals vs. Whole plant
ggagcactcaattcgatcactaactctcactcttagtacaaatattttcaagaatggtttctccttctttttcaaccaagcttgtcttctttgcttgctttgttctgttcacattctcacacaaactcgtgacaggagaatccgacaaagttgagctcaatctttactacgaatcactttgtcccggttgtcagagtttcatcgtcgatgaactagtcaaagtctttgactccgatctcgatacaatcaccgatgtcaagctcgttccattcggtaacgccaaagtctccaataatctgaccgtcatttgccagcatggtgaagaggaatgcaaactcaacgctcttgaagcttgcgtcattaacactttgcctaacccgaaatcgcagtacaagttcatacgatgcgttgaaaacaatacggataactgggaatcatcatgtttaaagggctatggaaatgagaaagccatcaatgattgttacaatagtgatctctctaagaagctcatacttggatatgcaaaacaaacctcgagtcttaagccgaaacatgaattcgtaccatgggtcacaatcaacagcaaaccactctatacgaaactagatgatttggtgggtcaagtctgcaaagcttacaaaggaaagactccactcccaatagactgtagttccgctgccttgtccgagaggaaaatgtcgaatgttgaattctcctatgtagatgaaattatcagtcactaagttaataataaaactactaagatgaataatt

SEQ ID NO: 50664 - protein, 229 aa, Arabidopsis thaliana
  peptide (1)..(229): Ceres Seq. ID no. 13588257
  misc_feature (33)..(138): Pfam Name: Gamma interferon inducible lysosomal thiol Pfam Description: Gamma interferon inducible lysosomal thiol
  misc_feature (5)..(209): Homolog of NCBI NO: 18390723 NR Description: expressed protein [Arabidopsis thaliana]
  misc_feature (50)..(228): Homolog of NCBI NO: 18252829 NR Description: putative protein [Arabidopsis thaliana]
  misc_feature (11)..(181): Homolog of NCBI NO: 7487272 NR Description: hypothetical protein T20K18.240 - Arabidopsis
  misc_feature (1)..(229): Homolog of NCBI NO: 21593852 NR Description: unknown [Arabidopsis thaliana]
  misc_feature (1)..(229): Homolog of NCBI NO: 15235540 NR Description: expressed protein [Arabidopsis thaliana]
  misc_feature (1)..(152): Homolog of NCBI NO: 7487271 NR Description: hypothetical protein T20K18.220 - Arabidopsis
  misc_feature (11)..(228): Homolog of NCBI NO: 21593076 NR Description: unknown [Arabidopsis thaliana]
  misc_feature (11)..(228): Homolog of NCBI NO: 18413888 NR Description: expressed protein [Arabidopsis thaliana]
  misc_feature (7)..(229): Homolog of NCBI NO: 15235523 NR Description: hypothetical protein [Arabidopsis thaliana]
  misc_feature (1)..(229): Homolog of NCBI NO: 22328587 NR Description: expressed protein [Arabidopsis thaliana]
MVSPSFSTKLVFFACFVLFTFSHKLVTGESDKVELNLYYESLCPGCQSFIVDELVKVFDSDLDTITDVKLVPFGNAKVSNNLTVICQHGEEECKLNALEACVINTLPNPKSQYKFIRCVENNTDNWESSCLKGYGNEKAINDCYNSDLSKKLILGYAKQTSSLKPKHEFVPWVTINSKPLYTKLDDLVGQVCKAYKGKTPLPIDCSSAALSERKMSNVEFSYVDEIISH

SEQ ID NO: 50665 - DNA, 860 bp, Arabidopsis thaliana; identical to SEQ ID NO: 31045
  misc_feature (1)..(860): Ceres Seq. ID no. 13591956
  misc_feature: MA Experiment ID: 108561 Result: Down-regulated in Transcription
  misc_feature: MA Experiment 108561 PARAMETER Experiment Name: At_100uM_ABA_cDNA_P Parameter: Timepoint (hr) Value: 6
  misc_feature: MA Experiment 108561 PARAMETER Experiment Name: At_100uM_ABA_cDNA_P Parameter: Tissue Value: Aerial
  misc_feature: MA Experiment 108561 PARAMETER Experiment Name: At_100uM_ABA_cDNA_P Parameter: Treatment Value: 100uM ABA vs. No Treatment
  misc_feature: MA Experiment ID: 108572 Result: Down-regulated in Transcription
  misc_feature: MA Experiment 108572 PARAMETER Experiment Name: At_Drought_cDNA_P Parameter: Timepoint (hr) Value: 1
  misc_feature: MA Experiment 108572 PARAMETER Experiment Name: At_Drought_cDNA_P Parameter: Tissue Value: Aerial
  misc_feature: MA Experiment 108572 PARAMETER Experiment Name: At_Drought_cDNA_P Parameter: Treatment Value: Drought vs. No Drought
  misc_feature: MA Experiment ID: 108573 Result: Down-regulated in Transcription
  misc_feature: MA Experiment 108573 PARAMETER Experiment Name: At_Drought_cDNA_P Parameter: Timepoint (hr) Value: 6
  misc_feature: MA Experiment 108573 PARAMETER Experiment Name: At_Drought_cDNA_P Parameter: Tissue Value: Aerial
  misc_feature: MA Experiment 108573 PARAMETER Experiment Name: At_Drought_cDNA_P Parameter: Treatment Value: Drought vs. No Drought
  misc_feature: MA Experiment ID: 108577 Result: Down-regulated in Transcription
  misc_feature: MA Experiment 108577 PARAMETER Experiment Name: At_42deg_Heat_cDNA_P Parameter: Temperature (deg C) Value: 42 vs. 22
  misc_feature: MA Experiment 108577 PARAMETER Experiment Name: At_42deg_Heat_cDNA_P Parameter: Timepoint (hr) Value: 6
  misc_feature: MA Experiment 108577 PARAMETER Experiment Name: At_42deg_Heat_cDNA_P Parameter: Tissue Value: Aerial
  misc_feature: MA Experiment ID: 108595 Result: Down-regulated in Transcription
  misc_feature: MA Experiment 108595 PARAMETER Experiment Name: At_Ler-pi_Ovule_cDNA_P Parameter: Plant Line Value: null
  misc_feature: MA Experiment ID: 20000173 Result: Down-regulated in Transcription
  misc_feature: MA Experiment 20000173 PARAMETER Experiment Name: At_42deg_Heat_P Parameter: Age (day) Value: 14
  misc_feature: MA Experiment 20000173 PARAMETER Experiment Name: At_42deg_Heat_P Parameter: Organism Value: A. thaliana
  misc_feature: MA Experiment 20000173 PARAMETER Experiment Name: At_42deg_Heat_P Parameter: Plant Line Value: WS
  misc_feature: MA Experiment 20000173 PARAMETER Experiment Name: At_42deg_Heat_P Parameter: Temperature (deg C) Value: 42 vs. 22
  misc_feature: MA Experiment 20000173 PARAMETER Experiment Name: At_42deg_Heat_P Parameter: Timepoint (hr) Value: 6
  misc_feature: MA Experiment 20000173 PARAMETER Experiment Name: At_42deg_Heat_P Parameter: Tissue Value: Aerial
  misc_feature: MA Experiment ID: 20000179 Result: Down-regulated in Transcription
  misc_feature: MA Experiment 20000179 PARAMETER Experiment Name: At_Germinating_Seeds_P Parameter: Age (hr) Value: 6 vs. 0
  misc_feature: MA Experiment 20000179 PARAMETER Experiment Name: At_Germinating_Seeds_P Parameter: Tissue Value: Germinating Seeds
  misc_feature: MA Experiment ID: 20000185 Result: Down-regulated in Transcription
  misc_feature: MA Experiment 20000185 PARAMETER Experiment Name: At_Roots__P Parameter: Age (day) Value: 7 vs. 21
  misc_feature: MA Experiment 20000185 PARAMETER Experiment Name: At_Roots__P Parameter: Organism Value: A. thaliana
  misc_feature: MA Experiment 20000185 PARAMETER Experiment Name: At_Roots__P Parameter: Tissue Value: Roots vs. Whole Plant
  misc_feature: MA Experiment ID: 20000264 Result: Down-regulated in Transcription
  misc_feature: MA Experiment 20000264 PARAMETER Experiment Name: At_Open_Flower_P Parameter: Age (day) Value: 21
  misc_feature: MA Experiment 20000264 PARAMETER Experiment Name: At_Open_Flower_P Parameter: Plant Line Value: WS
  misc_feature: MA Experiment 20000264 PARAMETER Experiment Name: At_Open_Flower_P Parameter: Tissue Value: Open Flower vs. Whole Plant
  misc_feature: MA Experiment ID: 20000268 Result: Down-regulated in Transcription
  misc_feature: MA Experiment 20000268 PARAMETER Experiment Name: At_100mM_NaCl__P Parameter: Age (day) Value: 14
  misc_feature: MA Experiment 20000268 PARAMETER Experiment Name: At_100mM_NaCl__P Parameter: Organism Value: A. thaliana
  misc_feature: MA Experiment 20000268 PARAMETER Experiment Name: At_100mM_NaCl__P Parameter: Plant Line Value: WS
  misc_feature: MA Experiment 20000268 PARAMETER Experiment Name: At_100mM_NaCl__P Parameter: Timepoint (hr) Value: 6
  misc_feature: MA Experiment 20000268 PARAMETER Experiment Name: At_100mM_NaCl__P Parameter: Tissue Value: Whole Plant
  misc_feature: MA Experiment 20000268 PARAMETER Experiment Name: At_100mM_NaCl__P Parameter: Treatment Value: 100mM NaCl vs. No Treatment
  misc_feature: MA Experiment ID: 20000286 Result: Down-regulated in Transcription
  misc_feature: MA Experiment 20000286 PARAMETER Experiment Name: At_Open_Flower_P Parameter: Age (day) Value: 21
  misc_feature: MA Experiment 20000286 PARAMETER Experiment Name: At_Open_Flower_P Parameter: Plant Line Value: WS
  misc_feature: MA Experiment 20000286 PARAMETER Experiment Name: At_Open_Flower_P Parameter: Tissue Value: Half Open vs. Whole Plant
  misc_feature: MA Experiment ID: 20000436 Result: Down-regulated in Transcription
  misc_feature: MA Experiment 20000436 PARAMETER Experiment Name: At_Drought_P Parameter: Age (day) Value: 7
  misc_feature: MA Experiment 20000436 PARAMETER Experiment Name: At_Drought_P Parameter: Organism Value: A. thaliana
  misc_feature: MA Experiment 20000436 PARAMETER Experiment Name: At_Drought_P Parameter: Plant Line Value: WS
  misc_feature: MA Experiment 20000436 PARAMETER Experiment Name: At_Drought_P Parameter: Timepoint (hr) Value: 12
  misc_feature: MA Experiment 20000436 PARAMETER Experiment Name: At_Drought_P Parameter: Tissue Value: Whole Plant
  misc_feature: MA Experiment 20000436 PARAMETER Experiment Name: At_Drought_P Parameter: Treatment Value: Drought vs. No Drought
  misc_feature: MA Experiment ID: 20000437 Result: Down-regulated in Transcription
  misc_feature: MA Experiment 20000437 PARAMETER Experiment Name: At_Drought_P Parameter: Age (day) Value: 8
  misc_feature: MA Experiment 20000437 PARAMETER Experiment Name: At_Drought_P Parameter: Organism Value: A. thaliana
  misc_feature: MA Experiment 20000437 PARAMETER Experiment Name: At_Drought_P Parameter: Plant Line Value: WS
  misc_feature: MA Experiment 20000437 PARAMETER Experiment Name: At_Drought_P Parameter: Timepoint (hr) Value: 24
  misc_feature: MA Experiment 20000437 PARAMETER Experiment Name: At_Drought_P Parameter: Tissue Value: Whole Plant
  misc_feature: MA Experiment 20000437 PARAMETER Experiment Name: At_Drought_P Parameter: Treatment Value: Drought vs. No Drought
  misc_feature: MA Experiment ID: 20000439 Result: Down-regulated in Transcription
  misc_feature: MA Experiment 20000439 PARAMETER Experiment Name: At_Roots__P Parameter: Age (day) Value: 14 vs. 21
  misc_feature: MA Experiment 20000439 PARAMETER Experiment Name: At_Roots__P Parameter: Organism Value: A. thaliana
  misc_feature: MA Experiment 20000439 PARAMETER Experiment Name: At_Roots__P Parameter: Tissue Value: Roots vs. Whole Plant
  misc_feature: MA Experiment ID: 20000794 Result: Down-regulated in Transcription
  misc_feature: MA Experiment 20000794 PARAMETER Experiment Name: At_Petals_P Parameter: Age (day) Value: 23-25 days
  misc_feature: MA Experiment 20000794 PARAMETER Experiment Name: At_Petals_P Parameter: Plant Line Value: WS
  misc_feature: MA Experiment 20000794 PARAMETER Experiment Name: At_Petals_P Parameter: Tissue Value: Petals vs. Whole plant
  misc_feature: MA Experiment ID: 20001554 Result: Down-regulated in Transcription
  misc_feature: MA Experiment 20001554 PARAMETER Experiment Name: At_Drought_Soil_Dry_P Parameter: Age (day) Value: 21
  misc_feature: MA Experiment 20001554 PARAMETER Experiment Name: At_Drought_Soil_Dry_P Parameter: Organism Value: A. thaliana
  misc_feature: MA Experiment 20001554 PARAMETER Experiment Name: At_Drought_Soil_Dry_P Parameter: Plant Line Value: WS
  misc_feature: MA Experiment 20001554 PARAMETER Experiment Name: At_Drought_Soil_Dry_P Parameter: Post Timepoint (hr) Value: None
  misc_feature: MA Experiment 20001554 PARAMETER Experiment Name: At_Drought_Soil_Dry_P Parameter: Post-Treatment Value: None
  misc_feature: MA Experiment 20001554 PARAMETER Experiment Name: At_Drought_Soil_Dry_P Parameter: Timepoint (day) Value: 7
  misc_feature: MA Experiment 20001554 PARAMETER Experiment Name: At_Drought_Soil_Dry_P Parameter: Treatment Value: Drought vs. No Drought
  misc_feature: MA Experiment ID: 20001555 Result: Down-regulated in Transcription
  misc_feature: MA Experiment 20001555 PARAMETER Experiment Name: At_Drought_Soil_Dry_P Parameter: Age (day) Value: 24
  misc_feature: MA Experiment 20001555 PARAMETER Experiment Name: At_Drought_Soil_Dry_P Parameter: Organism Value: A. thaliana
  misc_feature: MA Experiment 20001555 PARAMETER Experiment Name: At_Drought_Soil_Dry_P Parameter: Plant Line Value: WS
  misc_feature: MA Experiment 20001555 PARAMETER Experiment Name: At_Drought_Soil_Dry_P Parameter: Post Timepoint (hr) Value: None
  misc_feature: MA Experiment 20001555 PARAMETER Experiment Name: At_Drought_Soil_Dry_P Parameter: Post-Treatment Value: None
  misc_feature: MA Experiment 20001555 PARAMETER Experiment Name: At_Drought_Soil_Dry_P Parameter: Timepoint (day) Value: 10
  misc_feature: MA Experiment 20001555 PARAMETER Experiment Name: At_Drought_Soil_Dry_P Parameter: Treatment Value: Drought vs. No Drought
  misc_feature: MA Experiment ID: 20001556 Result: Down-regulated in Transcription
  misc_feature: MA Experiment 20001556 PARAMETER Experiment Name: At_Drought_Soil_Dry_P Parameter: Age (day) Value: 26
  misc_feature: MA Experiment 20001556 PARAMETER Experiment Name: At_Drought_Soil_Dry_P Parameter: Organism Value: A. thaliana
  misc_feature: MA Experiment 20001556 PARAMETER Experiment Name: At_Drought_Soil_Dry_P Parameter: Plant Line Value: WS
  misc_feature: MA Experiment 20001556 PARAMETER Experiment Name: At_Drought_Soil_Dry_P Parameter: Post Timepoint (hr) Value: None
  misc_feature: MA Experiment 20001556 PARAMETER Experiment Name: At_Drought_Soil_Dry_P Parameter: Post-Treatment Value: None
  misc_feature: MA Experiment 20001556 PARAMETER Experiment Name: At_Drought_Soil_Dry_P Parameter: Timepoint (day) Value: 12
  misc_feature: MA Experiment 20001556 PARAMETER Experiment Name: At_Drought_Soil_Dry_P Parameter: Treatment Value: Drought vs. No Drought
  misc_feature: MA Experiment ID: 20001557 Result: Up-regulated in Transcription
  misc_feature: MA Experiment 20001557 PARAMETER Experiment Name: At_Drought_Soil_Dry_P Parameter: Age (day) Value: 27
  misc_feature: MA Experiment 20001557 PARAMETER Experiment Name: At_Drought_Soil_Dry_P Parameter: Organism Value: A. thaliana
  misc_feature: MA Experiment 20001557 PARAMETER Experiment Name: At_Drought_Soil_Dry_P Parameter: Plant Line Value: WS
  misc_feature: MA Experiment 20001557 PARAMETER Experiment Name: At_Drought_Soil_Dry_P Parameter: Post Timepoint (hr) Value: 3
  misc_feature: MA Experiment 20001557 PARAMETER Experiment Name: At_Drought_Soil_Dry_P Parameter: Post-Treatment Value: Re-Water vs. No Drought
  misc_feature: MA Experiment 20001557 PARAMETER Experiment Name: At_Drought_Soil_Dry_P Parameter: Timepoint (day) Value: 13
  misc_feature: MA Experiment 20001557 PARAMETER Experiment Name: At_Drought_Soil_Dry_P Parameter: Treatment Value: Drought vs. No Drought
  misc_feature: MA Experiment ID: 20001756 Result: Up-regulated in Transcription
  misc_feature: MA Experiment 20001756 PARAMETER Experiment Name: At_50mM_NH4NO3_L-to-H_P Parameter: Timepoint (hr) Value: 4
  misc_feature: MA Experiment 20001756 PARAMETER Experiment Name: At_50mM_NH4NO3_L-to-H_P Parameter: Tissue Value: Leaf
  misc_feature: MA Experiment 20001756 PARAMETER Experiment Name: At_50mM_NH4NO3_L-to-H_P Parameter: Treatment Value: 50mM NH4NO3 vs 100mM Mannitol
  misc_feature: MA Experiment ID: 20001757 Result: Up-regulated in Transcription
  misc_feature: MA Experiment 20001757 PARAMETER Experiment Name: At_50mM_NH4NO3_L-to-H_P Parameter: Timepoint (hr) Value: 6
  misc_feature: MA Experiment 20001757 PARAMETER Experiment Name: At_50mM_NH4NO3_L-to-H_P Parameter: Tissue Value: Leaf
  misc_feature: MA Experiment 20001757 PARAMETER Experiment Name: At_50mM_NH4NO3_L-to-H_P Parameter: Treatment Value: 50mM NH4NO3 vs 100mM Mannitol
  misc_feature: MA Experiment ID: 20001904 Result: Down-regulated in Transcription
  misc_feature: MA Experiment 20001904 PARAMETER Experiment Name: At_Drought_Reproduction_P Parameter: Age (day) Value: 37
  misc_feature: MA Experiment 20001904 PARAMETER Experiment Name: At_Drought_Reproduction_P Parameter: Organism Value: A. thaliana
  misc_feature: MA Experiment 20001904 PARAMETER Experiment Name: At_Drought_Reproduction_P Parameter: Plant Line Value: WS
  misc_feature: MA Experiment 20001904 PARAMETER Experiment Name: At_Drought_Reproduction_P Parameter: Timepoint (day) Value: 7
  misc_feature: MA Experiment 20001904 PARAMETER Experiment Name: At_Drought_Reproduction_P Parameter: Tissue Value: Rosettes
  misc_feature: MA Experiment 20001904 PARAMETER Experiment Name: At_Drought_Reproduction_P Parameter: Treatment Value: Drought vs. No Drought
  misc_feature: MA Experiment ID: 20001906 Result: Down-regulated in Transcription
  misc_feature: MA Experiment 20001906 PARAMETER Experiment Name: At_Drought_Reproduction_P Parameter: Age (day) Value: 35
  misc_feature: MA Experiment 20001906 PARAMETER Experiment Name: At_Drought_Reproduction_P Parameter: Organism Value: A. thaliana
  misc_feature: MA Experiment 20001906 PARAMETER Experiment Name: At_Drought_Reproduction_P Parameter: Plant Line Value: WS
  misc_feature: MA Experiment 20001906 PARAMETER Experiment Name: At_Drought_Reproduction_P Parameter: Timepoint (day) Value: 5
  misc_feature: MA Experiment 20001906 PARAMETER Experiment Name: At_Drought_Reproduction_P Parameter: Tissue Value: Siliques
  misc_feature: MA Experiment 20001906 PARAMETER Experiment Name: At_Drought_Reproduction_P Parameter: Treatment Value: Drought vs. No Drought

SEQ ID NO: 50666 - protein, 208 aa, Arabidopsis thaliana; identical to SEQ ID NO: 23207
  peptide (1)..(208): Ceres Seq. ID no. 13591957
  misc_feature (52)..(198): Pfam Name: Cupin Pfam Description: Cupin
  misc_feature (52)..(198): Pfam Name: Cupin Pfam Description: Cupin
  misc_feature (52)..(198): Pfam Name: Cupin Pfam Description: Cupin
  misc_feature (52)..(198): Pfam Name: Cupin Pfam Description: Cupin
  misc_feature (6)..(207): Homolog of NCBI NO: 18201941 NR Description: Auxin-binding protein ABP19b precursor
  misc_feature (1)..(207): Homolog of NCBI NO: 15242028 NR Description: germin-like protein (AtGER3) [Arabidopsis
  misc_feature (6)..(207): Homolog of NCBI NO: 18203684 NR Description: Auxin-binding protein ABP19a precursor
  misc_feature (5)..(207): Homolog of NCBI NO: 18201940 NR Description: Auxin-binding protein ABP20 precursor
  misc_feature (1)..(208): Homolog of NCBI NO: 13277342 NR Description: Germin-like protein [Pisum sativum]
  misc_feature (6)..(207): Homolog of NCBI NO: 18201941 NR Description: Auxin-binding protein ABP19b precursor
  misc_feature (6)..(207): Homolog of NCBI NO: 18203684 NR Description: Auxin-binding protein ABP19a precursor
  misc_feature (1)..(208): Homolog of NCBI NO: 13277342 NR Description: Germin-like protein [Pisum sativum]
  misc_feature (5)..(207): Homolog of NCBI NO: 18201940 NR Description: Auxin-binding protein ABP20 precursor
  misc_feature (6)..(207): Homolog of NCBI NO: 18203684 NR Description: Auxin-binding protein ABP19a precursor
  misc_feature (1)..(207): Homolog of NCBI NO: 15242028 NR Description: germin-like protein (AtGER3) [Arabidopsis
  misc_feature (6)..(207): Homolog of NCBI NO: 18201941 NR Description: Auxin-binding protein ABP19b precursor
  misc_feature (1)..(208): Homolog of NCBI NO: 15218535 NR Description: germin-like protein (AtGER1) [Arabidopsis
  misc_feature (1)..(208): Homolog of NCBI NO: 17473703 NR Description: germin-like protein [Arabidopsis thaliana]
  misc_feature (1)..(208): Homolog of NCBI NO: 1592672 NR Description: germin1 [Arabidopsis thaliana]
  misc_feature (5)..(208): Homolog of NCBI NO: 1934726 NR Description: germin-like protein [Arabidopsis thaliana]
  misc_feature (1)..(208): Homolog of NCBI NO: 1169941 NR Description: Germin-like protein 1 precursor
  misc_feature (1)..(208): Homolog of NCBI NO: 15218535 NR Description: germin-like protein (AtGER1) [Arabidopsis
  misc_feature (1)..(208): Homolog of NCBI NO: 17473703 NR Description: germin-like protein [Arabidopsis thaliana]
  misc_feature (1)..(208): Homolog of NCBI NO: 1592672 NR Description: germin1 [Arabidopsis thaliana]
  misc_feature (5)..(208): Homolog of NCBI NO: 1934726 NR Description: germin-like protein [Arabidopsis thaliana]
  misc_feature (1)..(208): Homolog of NCBI NO: 1169941 NR Description: Germin-like protein 1 precursor
  misc_feature (1)..(208): Homolog of NCBI NO: 13277342 NR Description: Germin-like protein [Pisum sativum]
  misc_feature (5)..(207): Homolog of NCBI NO: 18201940 NR Description: Auxin-binding protein ABP20 precursor
  misc_feature (6)..(207): Homolog of NCBI NO: 18203684 NR Description: Auxin-binding protein ABP19a precursor
  misc_feature (1)..(207): Homolog of NCBI NO: 15242028 NR Description: germin-like protein (AtGER3) [Arabidopsis
  misc_feature (6)..(207): Homolog of NCBI NO: 18201941 NR Description: Auxin-binding protein ABP19b precursor
  misc_feature (1)..(208): Homolog of NCBI NO: 15218535 NR Description: germin-like protein (AtGER1) [Arabidopsis
  misc_feature (1)..(208): Homolog of NCBI NO: 17473703 NR Description: germin-like protein [Arabidopsis thaliana]
  misc_feature (1)..(208): Homolog of NCBI NO: 1592672 NR Description: germin1 [Arabidopsis thaliana]
  misc_feature (5)..(208): Homolog of NCBI NO: 1934726 NR Description: germin-like protein [Arabidopsis thaliana]
  misc_feature (1)..(208): Homolog of NCBI NO: 1169941 NR Description: Germin-like protein 1 precursor
  misc_feature (1)..(208): Homolog of NCBI NO: 13277342 NR Description: Germin-like protein [Pisum sativum]
  misc_feature (5)..(207): Homolog of NCBI NO: 18201940 NR Description: Auxin-binding protein ABP20 precursor
  misc_feature (1)..(207): Homolog of NCBI NO: 15242028 NR Description: germin-like protein (AtGER3) [Arabidopsis
  misc_feature (1)..(208): Homolog of NCBI NO: 1169941 NR Description: Germin-like protein 1 precursor
  misc_feature (5)..(208): Homolog of NCBI NO: 1934726 NR Description: germin-like protein [Arabidopsis thaliana]
  misc_feature (1)..(208): Homolog of NCBI NO: 1592672 NR Description: germin1 [Arabidopsis thaliana]
  misc_feature (1)..(208): Homolog of NCBI NO: 17473703 NR Description: germin-like protein [Arabidopsis thaliana]
  misc_feature (1)..(208): Homolog of NCBI NO: 15218535 NR Description: germin-like protein (AtGER1) [Arabidopsis

SEQ ID NO: 50667 - protein, 110 aa, Arabidopsis thaliana; identical to SEQ ID NO: 31047
  peptide (1)..(110): Ceres Seq. ID no. 13591958
  misc_feature (1)..(100): Pfam Name: Cupin Pfam Description: Cupin
  misc_feature (1)..(100): Pfam Name: Cupin Pfam Description: Cupin
  misc_feature (1)..(100): Pfam Name: Cupin Pfam Description: Cupin
  misc_feature (1)..(100): Pfam Name: Cupin Pfam Description: Cupin
  misc_feature (1)..(109): Homolog of NCBI NO: 18201941 NR Description: Auxin-binding protein ABP19b precursor
  misc_feature (1)..(109): Homolog of NCBI NO: 15242028 NR Description: germin-like protein (AtGER3) [Arabidopsis
  misc_feature (1)..(109): Homolog of NCBI NO: 18203684 NR Description: Auxin-binding protein ABP19a precursor
  misc_feature (1)..(109): Homolog of NCBI NO: 18201940 NR Description: Auxin-binding protein ABP20 precursor
  misc_feature (1)..(110): Homolog of NCBI NO: 13277342 NR Description: Germin-like protein [Pisum sativum]
  misc_feature (1)..(109): Homolog of NCBI NO: 18201941 NR Description: Auxin-binding protein ABP19b precursor
  misc_feature (1)..(109): Homolog of NCBI NO: 18203684 NR Description: Auxin-binding protein ABP19a precursor
  misc_feature (1)..(110): Homolog of NCBI NO: 13277342 NR Description: Germin-like protein [Pisum sativum]
  misc_feature (1)..(109): Homolog of NCBI NO: 18201940 NR Description: Auxin-binding protein ABP20 precursor
  misc_feature (1)..(109): Homolog of NCBI NO: 18203684 NR Description: Auxin-binding protein ABP19a precursor
  misc_feature (1)..(109): Homolog of NCBI NO: 15242028 NR Description: germin-like protein (AtGER3) [Arabidopsis
  misc_feature (1)..(109): Homolog of NCBI NO: 18201941 NR Description: Auxin-binding protein ABP19b precursor
  misc_feature (1)..(110): Homolog of NCBI NO: 15218535 NR Description: germin-like protein (AtGER1) [Arabidopsis
  misc_feature (1)..(110): Homolog of NCBI NO: 17473703 NR Description: germin-like protein [Arabidopsis thaliana]
  misc_feature (1)..(110): Homolog of NCBI NO: 1592672 NR Description: germin1 [Arabidopsis thaliana]
  misc_feature (1)..(110): Homolog of NCBI NO: 1934726 NR Description: germin-like protein [Arabidopsis thaliana]
  misc_feature (1)..(110): Homolog of NCBI NO: 1169941 NR Description: Germin-like protein 1 precursor
  misc_feature (1)..(110): Homolog of NCBI NO: 15218535 NR Description: germin-like protein (AtGER1) [Arabidopsis
  misc_feature (1)..(110): Homolog of NCBI NO: 17473703 NR Description: germin-like protein [Arabidopsis thaliana]
  misc_feature (1)..(110): Homolog of NCBI NO: 1592672 NR Description: germin1 [Arabidopsis thaliana]
  misc_feature (1)..(110): Homolog of NCBI NO: 1934726 NR Description: germin-like protein [Arabidopsis thaliana]
  misc_feature (1)..(110): Homolog of NCBI NO: 1169941 NR Description: Germin-like protein 1 precursor
  misc_feature (1)..(110): Homolog of NCBI NO: 13277342 NR Description: Germin-like protein [Pisum sativum]
  misc_feature (1)..(109): Homolog of NCBI NO: 18201940 NR Description: Auxin-binding protein ABP20 precursor
  misc_feature (1)..(109): Homolog of NCBI NO: 18203684 NR Description: Auxin-binding protein ABP19a precursor
  misc_feature (1)..(109): Homolog of NCBI NO: 15242028 NR Description: germin-like protein (AtGER3) [Arabidopsis
  misc_feature (1)..(109): Homolog of NCBI NO: 18201941 NR Description: Auxin-binding protein ABP19b precursor
  misc_feature (1)..(110): Homolog of NCBI NO: 15218535 NR Description: germin-like protein (AtGER1) [Arabidopsis
  misc_feature (1)..(110): Homolog of NCBI NO: 17473703 NR Description: germin-like protein [Arabidopsis thaliana]
  misc_feature (1)..(110): Homolog of NCBI NO: 1592672 NR Description: germin1 [Arabidopsis thaliana]
  misc_feature (1)..(110): Homolog of NCBI NO: 1934726 NR Description: germin-like protein [Arabidopsis thaliana]
  misc_feature (1)..(110): Homolog of NCBI NO: 1169941 NR Description: Germin-like protein 1 precursor
  misc_feature (1)..(110): Homolog of NCBI NO: 13277342 NR Description: Germin-like protein [Pisum sativum]
  misc_feature (1)..(109): Homolog of NCBI NO: 18201940 NR Description: Auxin-binding protein ABP20 precursor
  misc_feature (1)..(109): Homolog of NCBI NO: 15242028 NR Description: germin-like protein (AtGER3) [Arabidopsis
  misc_feature (1)..(110): Homolog of NCBI NO: 1169941 NR Description: Germin-like protein 1 precursor
  misc_feature (1)..(110): Homolog of NCBI NO: 1934726 NR Description: germin-like protein [Arabidopsis thaliana]
  misc_feature (1)..(110): Homolog of NCBI NO: 1592672 NR Description: germin1 [Arabidopsis thaliana]
  misc_feature (1)..(110): Homolog of NCBI NO: 17473703 NR Description: germin-like protein [Arabidopsis thaliana]
  misc_feature (1)..(110): Homolog of NCBI NO: 15218535 NR Description: germin-like protein (AtGER1) [Arabidopsis

SEQ ID NO: 50668 - DNA, 1889 bp, Arabidopsis thaliana; identical to SEQ ID NO: 50651
  misc_feature (1)..(1889): Ceres Seq. ID no. 12591570
  misc_feature: MA Experiment ID: 108463 Result: Down-regulated in Transcription
  misc_feature: MA Experiment 108463 PARAMETER Experiment Name: At_Germinating_Seeds_cDNA_P Parameter: Age (day) Value: 3 vs. 0
  misc_feature: MA Experiment 108463 PARAMETER Experiment Name: At_Germinating_Seeds_cDNA_P Parameter: Tissue Value: Germinating Seeds
  misc_feature: MA Experiment ID: 108464 Result: Down-regulated in Transcription
  misc_feature: MA Experiment 108464 PARAMETER Experiment Name: At_Germinating_Seeds_cDNA_P Parameter: Age (day) Value: 4 vs. 0
  misc_feature: MA Experiment 108464 PARAMETER Experiment Name: At_Germinating_Seeds_cDNA_P Parameter: Tissue Value: Germinating Seeds
  misc_feature: MA Experiment ID: 108608 Result: Up-regulated in Transcription
  misc_feature: MA Experiment 108608 PARAMETER Experiment Name: At_100uM_ABA_cDNA_P Parameter: Timepoint (hr) Value: 1
  misc_feature: MA Experiment 108608 PARAMETER Experiment Name: At_100uM_ABA_cDNA_P Parameter: Tissue Value: Aerial
  misc_feature: MA Experiment 108608 PARAMETER Experiment Name: At_100uM_ABA_cDNA_P Parameter: Treatment Value: 100uM ABA vs. No Treatment
  misc_feature: MA Experiment ID: 108668 Result: Up-regulated in Transcription
  misc_feature: MA Experiment 108668 PARAMETER Experiment Name: At_2mM_SA_cDNA_P Parameter: Plant Line Value: WS
  misc_feature: MA Experiment 108668 PARAMETER Experiment Name: At_2mM_SA_cDNA_P Parameter: Timepoint (hr) Value: 6
  misc_feature: MA Experiment 108668 PARAMETER Experiment Name: At_2mM_SA_cDNA_P Parameter: Treatment Value: 2mM SA vs. No Treatment
  misc_feature: MA Experiment ID: 20000070 Result: Up-regulated in Transcription
  misc_feature: MA Experiment 20000070 PARAMETER Experiment Name: At_100uM_ABA_Mutants_cDNA_P Parameter: Plant Line Value: CS24
  misc_feature: MA Experiment 20000070 PARAMETER Experiment Name: At_100uM_ABA_Mutants_cDNA_P Parameter: Timepoint (hr) Value: 6
  misc_feature: MA Experiment 20000070 PARAMETER Experiment Name: At_100uM_ABA_Mutants_cDNA_P Parameter: Tissue Value: Aerial
  misc_feature: MA Experiment 20000070 PARAMETER Experiment Name: At_100uM_ABA_Mutants_cDNA_P Parameter: Treatment Value: 100uM ABA vs. No Treatment
  misc_feature: MA Experiment ID: 20000090 Result: Up-regulated in Transcription
  misc_feature: MA Experiment ID: 20000144 Result: Down-regulated in Transcription
  misc_feature: MA Experiment 20000144 PARAMETER Experiment Name: At_42deg_Heat_cDNA_P Parameter: Temperature (deg C) Value: 42 vs. 22
  misc_feature: MA Experiment 20000144 PARAMETER Experiment Name: At_42deg_Heat_cDNA_P Parameter: Timepoint (hr) Value: 1
  misc_feature: MA Experiment 20000144 PARAMETER Experiment Name: At_42deg_Heat_cDNA_P Parameter: Tissue Value: Aerial
  misc_feature: MA Experiment ID: 20000166 Result: Up-regulated in Transcription
  misc_feature: MA Experiment 20000166 PARAMETER Experiment Name: At_100uM_ABA_P Parameter: Age (day) Value: 14
  misc_feature: MA Experiment 20000166 PARAMETER Experiment Name: At_100uM_ABA_P Parameter: Organism Value: A. thaliana
  misc_feature: MA Experiment 20000166 PARAMETER Experiment Name: At_100uM_ABA_P Parameter: Plant Line Value: WS
  misc_feature: MA Experiment 20000166 PARAMETER Experiment Name: At_100uM_ABA_P Parameter: Timepoint (hr) Value: 1
  misc_feature: MA Experiment 20000166 PARAMETER Experiment Name: At_100uM_ABA_P Parameter: Tissue Value: Aerial
  misc_feature: MA Experiment 20000166 PARAMETER Experiment Name: At_100uM_ABA_P Parameter: Treatment Value: 100uM ABA vs. No Treatment
  misc_feature: MA Experiment ID: 20000171 Result: Down-regulated in Transcription
  misc_feature: MA Experiment 20000171 PARAMETER Experiment Name: At_42deg_Heat_P Parameter: Age (day) Value: 14
  misc_feature: MA Experiment 20000171 PARAMETER Experiment Name: At_42deg_Heat_P Parameter: Organism Value: A. thaliana
  misc_feature: MA Experiment 20000171 PARAMETER Experiment Name: At_42deg_Heat_P Parameter: Plant Line Value: WS
  misc_feature: MA Experiment 20000171 PARAMETER Experiment Name: At_42deg_Heat_P Parameter: Temperature (deg C) Value: 42 vs. 22
  misc_feature: MA Experiment 20000171 PARAMETER Experiment Name: At_42deg_Heat_P Parameter: Timepoint (hr) Value: 1
  misc_feature: MA Experiment 20000171 PARAMETER Experiment Name: At_42deg_Heat_P Parameter: Tissue Value: Aerial
  misc_feature: MA Experiment ID: 20000173 Result: Down-regulated in Transcription
  misc_feature: MA Experiment 20000173 PARAMETER Experiment Name: At_42deg_Heat_P Parameter: Age (day) Value: 14
  misc_feature: MA Experiment 20000173 PARAMETER Experiment Name: At_42deg_Heat_P Parameter: Organism Value: A. thaliana
  misc_feature: MA Experiment 20000173 PARAMETER Experiment Name: At_42deg_Heat_P Parameter: Plant Line Value: WS
  misc_feature: MA Experiment 20000173 PARAMETER Experiment Name: At_42deg_Heat_P Parameter: Temperature (deg C) Value: 42 vs. 22
  misc_feature: MA Experiment 20000173 PARAMETER Experiment Name: At_42deg_Heat_P Parameter: Timepoint (hr) Value: 6
  misc_feature: MA Experiment 20000173 PARAMETER Experiment Name: At_42deg_Heat_P Parameter: Tissue Value: Aerial
  misc_feature: MA Experiment ID: 20000182 Result: Up-regulated in Transcription
  misc_feature: MA Experiment 20000182 PARAMETER Experiment Name: At_2mM_SA_P Parameter: Age (day) Value: 14
  misc_feature: MA Experiment 20000182 PARAMETER Experiment Name: At_2mM_SA_P Parameter: Organism Value: A. thaliana
  misc_feature: MA Experiment 20000182 PARAMETER Experiment Name: At_2mM_SA_P Parameter: Plant Line Value: WS
  misc_feature: MA Experiment 20000182 PARAMETER Experiment Name: At_2mM_SA_P Parameter: Timepoint (hr) Value: 6
  misc_feature: MA Experiment 20000182 PARAMETER Experiment Name: At_2mM_SA_P Parameter: Tissue Value: Aerial
  misc_feature: MA Experiment 20000182 PARAMETER Experiment Name: At_2mM_SA_P Parameter: Treatment Value: 2mM SA vs. No Treatment
  misc_feature: MA Experiment ID: 20000185 Result: Up-regulated in Transcription
  misc_feature: MA Experiment 20000185 PARAMETER Experiment Name: At_Roots__P Parameter: Age (day) Value: 7 vs. 21
  misc_feature: MA Experiment 20000185 PARAMETER Experiment Name: At_Roots__P Parameter: Organism Value: A. thaliana
  misc_feature: MA Experiment 20000185 PARAMETER Experiment Name: At_Roots__P Parameter: Tissue Value: Roots vs. Whole Plant
  misc_feature: MA Experiment ID: 20000227 Result: Up-regulated in Transcription
  misc_feature: MA Experiment 20000227 PARAMETER Experiment Name: At_Root-Tips-vs-Tops_P Parameter: Tissue Value: Root Tips vs. Root Tops
  misc_feature: MA Experiment ID: 20000438 Result: Down-regulated in Transcription
  misc_feature: MA Experiment 20000438 PARAMETER Experiment Name: At_Shoots__P Parameter: Age (day) Value: 14
  misc_feature: MA Experiment 20000438 PARAMETER Experiment Name: At_Shoots__P Parameter: Tissue Value: Shoots vs. Whole Plant
  misc_feature: MA Experiment ID: 20000527 Result: Down-regulated in Transcription
  misc_feature: MA Experiment 20000527 PARAMETER Experiment Name: At_10percent_PEG_P Parameter: Age (day) Value: 20
  misc_feature: MA Experiment 20000527 PARAMETER Experiment Name: At_10percent_PEG_P Parameter: Organism Value: A. thaliana
  misc_feature: MA Experiment 20000527 PARAMETER Experiment Name: At_10percent_PEG_P Parameter: Plant Line Value: WS
  misc_feature: MA Experiment 20000527 PARAMETER Experiment Name: At_10percent_PEG_P Parameter: Timepoint (day) Value: 20
  misc_feature: MA Experiment 20000527 PARAMETER Experiment Name: At_10percent_PEG_P Parameter: Tissue Value: Whole Plant
  misc_feature: MA Experiment 20000527 PARAMETER Experiment Name: At_10percent_PEG_P Parameter: Treatment Value: 10percent PEG vs. No Treatment

SEQ ID NO: 50669 - protein, 585 aa, Arabidopsis thaliana; identical to SEQ ID NO: 50652
  peptide (1)..(585): Ceres Seq. ID no. 12591571
  misc_feature (444)..(552): Pfam Name: Thioredoxin Pfam Description: Thioredoxin
  misc_feature (444)..(552): Pfam Name: Thioredoxin Pfam Description: Thioredoxin
  misc_feature (86)..(585): Homolog of NCBI NO: 7437394 NR Description: protein disulfide-isomerase (EC 5.3.4.1) RB60 -
  misc_feature (95)..(585): Homolog of NCBI NO: 5902592 NR Description: protein disulfide isomerase precursor
  misc_feature (103)..(585): Homolog of NCBI NO: 20805287 NR Description: protein disulfide isomerase-like PDI-M
  misc_feature (102)..(565): Homolog of NCBI NO: 20805285 NR Description: protein disulfide isomerase-like PDI-H
  misc_feature (16)..(533): Homolog of NCBI NO: 30697408 NR Description: protein disulfide isomerase family [Arabidopsis
  misc_feature (86)..(585): Homolog of NCBI NO: 7437394 NR Description: protein disulfide-isomerase (EC 5.3.4.1) RB60 -
  misc_feature (103)..(585): Homolog of NCBI NO: 20805287 NR Description: protein disulfide isomerase-like PDI-M
  misc_feature (16)..(533): Homolog of NCBI NO: 30697408 NR Description: protein disulfide isomerase family [Arabidopsis
  misc_feature (7)..(585): Homolog of NCBI NO: 22331799 NR Description: protein disulfide-isomerase-like protein
  misc_feature (7)..(585): Homolog of NCBI NO: 7437396 NR Description: protein disulfide-isomerase homolog F28P10.60 -
  misc_feature (16)..(583): Homolog of NCBI NO: 21593313 NR Description: protein disulfide isomerase precursor-like
  misc_feature (16)..(583): Homolog of NCBI NO: 30697404 NR Description: protein disulfide isomerase family [Arabidopsis
  misc_feature (143)..(585): Homolog of NCBI NO: 28140231 NR Description: protein disulphide isomerase [Elaeis guineensis]
  misc_feature (102)..(565): Homolog of NCBI NO: 20805285 NR Description: protein disulfide isomerase-like PDI-H
  misc_feature (95)..(585): Homolog of NCBI NO: 5902592 NR Description: protein disulfide isomerase precursor
  misc_feature (143)..(585): Homolog of NCBI NO: 28140231 NR Description: protein disulphide isomerase [Elaeis guineensis]
  misc_feature (16)..(583): Homolog of NCBI NO: 30697404 NR Description: protein disulfide isomerase family [Arabidopsis
  misc_feature (16)..(583): Homolog of NCBI NO: 21593313 NR Description: protein disulfide isomerase precursor-like
  misc_feature (7)..(585): Homolog of NCBI NO: 7437396 NR Description: protein disulfide-isomerase homolog F28P10.60 -
  misc_feature (7)..(585): Homolog of NCBI NO: 22331799 NR Description: protein disulfide-isomerase-like protein

SEQ ID NO: 50670 - protein, 579 aa, Arabidopsis thaliana; identical to SEQ ID NO: 50653
  peptide (1)..(579): Ceres Seq. ID no. 12591572
  misc_feature (438)..(546): Pfam Name: Thioredoxin Pfam Description: Thioredoxin
  misc_feature (438)..(546): Pfam Name: Thioredoxin Pfam Description: Thioredoxin
  misc_feature (80)..(579): Homolog of NCBI NO: 7437394 NR Description: protein disulfide-isomerase (EC 5.3.4.1) RB60 -
  misc_feature (89)..(579): Homolog of NCBI NO: 5902592 NR Description: protein disulfide isomerase precursor
  misc_feature (97)..(579): Homolog of NCBI NO: 20805287 NR Description: protein disulfide isomerase-like PDI-M
  misc_feature (96)..(559): Homolog of NCBI NO: 20805285 NR Description: protein disulfide isomerase-like PDI-H
  misc_feature (10)..(527): Homolog of NCBI NO: 30697408 NR Description: protein disulfide isomerase family [Arabidopsis
  misc_feature (80)..(579): Homolog of NCBI NO: 7437394 NR Description: protein disulfide-isomerase (EC 5.3.4.1) RB60 -
  misc_feature (97)..(579): Homolog of NCBI NO: 20805287 NR Description: protein disulfide isomerase-like PDI-M
  misc_feature (10)..(527): Homolog of NCBI NO: 30697408 NR Description: protein disulfide isomerase family [Arabidopsis
  misc_feature (1)..(579): Homolog of NCBI NO: 22331799 NR Description: protein disulfide-isomerase-like protein
  misc_feature (1)..(579): Homolog of NCBI NO: 7437396 NR Description: protein disulfide-isomerase homolog F28P10.60 -
  misc_feature (10)..(577): Homolog of NCBI NO: 21593313 NR Description: protein disulfide isomerase precursor-like
  misc_feature (10)..(577): Homolog of NCBI NO: 30697404 NR Description: protein disulfide isomerase family [Arabidopsis
  misc_feature (137)..(579): Homolog of NCBI NO: 28140231 NR Description: protein disulphide isomerase [Elaeis guineensis]
  misc_feature (96)..(559): Homolog of NCBI NO: 20805285 NR Description: protein disulfide isomerase-like PDI-H
  misc_feature (89)..(579): Homolog of NCBI NO: 5902592 NR Description: protein disulfide isomerase precursor
  misc_feature (137)..(579): Homolog of NCBI NO: 28140231 NR Description: protein disulphide isomerase [Elaeis guineensis]
  misc_feature (10)..(577): Homolog of NCBI NO: 30697404 NR Description: protein disulfide isomerase family [Arabidopsis
  misc_feature (10)..(577): Homolog of NCBI NO: 21593313 NR Description: protein disulfide isomerase precursor-like
  misc_feature (1)..(579): Homolog of NCBI NO: 7437396 NR Description: protein disulfide-isomerase homolog F28P10.60 -
  misc_feature (1)..(579): Homolog of NCBI NO: 22331799 NR Description: protein disulfide-isomerase-like protein

SEQ ID NO: 50671 - protein, 460 aa, Arabidopsis thaliana; identical to SEQ ID NO: 50654
  peptide (1)..(460): Ceres Seq. ID no. 12591573
  misc_feature (319)..(427): Pfam Name: Thioredoxin Pfam Description: Thioredoxin
  misc_feature (319)..(427): Pfam Name: Thioredoxin Pfam Description: Thioredoxin
  misc_feature (1)..(460): Homolog of NCBI NO: 7437394 NR Description: protein disulfide-isomerase (EC 5.3.4.1) RB60 -
  misc_feature (1)..(460): Homolog of NCBI NO: 5902592 NR Description: protein disulfide isomerase precursor
  misc_feature (1)..(460): Homolog of NCBI NO: 20805287 NR Description: protein disulfide isomerase-like PDI-M
  misc_feature (1)..(440): Homolog of NCBI NO: 20805285 NR Description: protein disulfide isomerase-like PDI-H
  misc_feature (1)..(408): Homolog of NCBI NO: 30697408 NR Description: protein disulfide isomerase family [Arabidopsis
  misc_feature (1)..(460): Homolog of NCBI NO: 7437394 NR Description: protein disulfide-isomerase (EC 5.3.4.1) RB60 -
  misc_feature (1)..(460): Homolog of NCBI NO: 20805287 NR Description: protein disulfide isomerase-like PDI-M
  misc_feature (1)..(408): Homolog of NCBI NO: 30697408 NR Description: protein disulfide isomerase family [Arabidopsis
  misc_feature (1)..(460): Homolog of NCBI NO: 22331799 NR Description: protein disulfide-isomerase-like protein
  misc_feature (1)..(460): Homolog of NCBI NO: 7437396 NR Description: protein disulfide-isomerase homolog F28P10.60 -
  misc_feature (1)..(458): Homolog of NCBI NO: 21593313 NR Description: protein disulfide isomerase precursor-like
  misc_feature (1)..(458): Homolog of NCBI NO: 30697404 NR Description: protein disulfide isomerase family [Arabidopsis
  misc_feature (18)..(460): Homolog of NCBI NO: 28140231 NR Description: protein disulphide isomerase [Elaeis guineensis]
  misc_feature (1)..(440): Homolog of NCBI NO: 20805285 NR Description: protein disulfide isomerase-like PDI-H
  misc_feature (1)..(460): Homolog of NCBI NO: 5902592 NR Description: protein disulfide isomerase precursor
  misc_feature (18)..(460): Homolog of NCBI NO: 28140231 NR Description: protein disulphide isomerase [Elaeis guineensis]
  misc_feature (1)..(458): Homolog of NCBI NO: 30697404 NR Description: protein disulfide isomerase family [Arabidopsis
  misc_feature (1)..(458): Homolog of NCBI NO: 21593313 NR Description: protein disulfide isomerase precursor-like
  misc_feature (1)..(460): Homolog of NCBI NO: 7437396 NR Description: protein disulfide-isomerase homolog F28P10.60 -
  misc_feature (1)..(460): Homolog of NCBI NO: 22331799 NR Description: protein disulfide-isomerase-like protein

SEQ ID NO: 50672 - DNA, 1136 bp, Arabidopsis thaliana
  misc_feature (1)..(1136): Ceres Seq. ID no. 13592427
  misc_feature: MA Experiment ID: 20000171 Result: Down-regulated in Transcription
  misc_feature: MA Experiment 20000171 PARAMETER Experiment Name: At_42deg_Heat_P Parameter: Age (day) Value: 14
  misc_feature: MA Experiment 20000171 PARAMETER Experiment Name: At_42deg_Heat_P Parameter: Organism Value: A. thaliana
  misc_feature: MA Experiment 20000171 PARAMETER Experiment Name: At_42deg_Heat_P Parameter: Plant Line Value: WS
  misc_feature: MA Experiment 20000171 PARAMETER Experiment Name: At_42deg_Heat_P Parameter: Temperature (deg C) Value: 42 vs. 22
  misc_feature: MA Experiment 20000171 PARAMETER Experiment Name: At_42deg_Heat_P Parameter: Timepoint (hr) Value: 1
  misc_feature: MA Experiment 20000171 PARAMETER Experiment Name: At_42deg_Heat_P Parameter: Tissue Value: Aerial
  misc_feature: MA Experiment ID: 20000173 Result: Down-regulated in Transcription
  misc_feature: MA Experiment 20000173 PARAMETER Experiment Name: At_42deg_Heat_P Parameter: Age (day) Value: 14
  misc_feature: MA Experiment 20000173 PARAMETER Experiment Name: At_42deg_Heat_P Parameter: Organism Value: A. thaliana
  misc_feature: MA Experiment 20000173 PARAMETER Experiment Name: At_42deg_Heat_P Parameter: Plant Line Value: WS
  misc_feature: MA Experiment 20000173 PARAMETER Experiment Name: At_42deg_Heat_P Parameter: Temperature (deg C) Value: 42 vs. 22
  misc_feature: MA Experiment 20000173 PARAMETER Experiment Name: At_42deg_Heat_P Parameter: Timepoint (hr) Value: 6
  misc_feature: MA Experiment 20000173 PARAMETER Experiment Name: At_42deg_Heat_P Parameter: Tissue Value: Aerial
  misc_feature: MA Experiment ID: 20000180 Result: Up-regulated in Transcription
  misc_feature: MA Experiment 20000180 PARAMETER Experiment Name: At_Germinating_Seeds_P Parameter: Age (hr) Value: 24 vs. 0
  misc_feature: MA Experiment 20000180 PARAMETER Experiment Name: At_Germinating_Seeds_P Parameter: Tissue Value: Germinating Seeds
  misc_feature: MA Experiment ID: 20000185 Result: Down-regulated in Transcription
  misc_feature: MA Experiment 20000185 PARAMETER Experiment Name: At_Roots__P Parameter: Age (day) Value: 7 vs. 21
  misc_feature: MA Experiment 20000185 PARAMETER Experiment Name: At_Roots__P Parameter: Organism Value: A. thaliana
  misc_feature: MA Experiment 20000185 PARAMETER Experiment Name: At_Roots__P Parameter: Tissue Value: Roots vs. Whole Plant
  misc_feature: MA Experiment ID: 20000227 Result: Down-regulated in Transcription
  misc_feature: MA Experiment 20000227 PARAMETER Experiment Name: At_Root-Tips-vs-Tops_P Parameter: Tissue Value: Root Tips vs. Root Tops
  misc_feature: MA Experiment ID: 20000234 Result: Up-regulated in Transcription
  misc_feature: MA Experiment 20000234 PARAMETER Experiment Name: At_Siliques_P Parameter: Age (day) Value: 21
  misc_feature: MA Experiment 20000234 PARAMETER Experiment Name: At_Siliques_P Parameter: Organism Value: A. thaliana
  misc_feature: MA Experiment 20000234 PARAMETER Experiment Name: At_Siliques_P Parameter: Plant Line Value: WS
  misc_feature: MA Experiment 20000234 PARAMETER Experiment Name: At_Siliques_P Parameter: Tissue Value: Less Than 5mm Siliques vs. Whole Plant
  misc_feature: MA Experiment ID: 20000264 Result: Up-regulated in Transcription
  misc_feature: MA Experiment 20000264 PARAMETER Experiment Name: At_Open_Flower_P Parameter: Age (day) Value: 21
  misc_feature: MA Experiment 20000264 PARAMETER Experiment Name: At_Open_Flower_P Parameter: Plant Line Value: WS
  misc_feature: MA Experiment 20000264 PARAMETER Experiment Name: At_Open_Flower_P Parameter: Tissue Value: Open Flower vs. Whole Plant
  misc_feature: MA Experiment ID: 20000265 Result: Up-regulated in Transcription
  misc_feature: MA Experiment 20000265 PARAMETER Experiment Name: At_Open_Flower_P Parameter: Age (day) Value: 21
  misc_feature: MA Experiment 20000265 PARAMETER Experiment Name: At_Open_Flower_P Parameter: Plant Line Value: WS
  misc_feature: MA Experiment 20000265 PARAMETER Experiment Name: At_Open_Flower_P Parameter: Tissue Value: Closed Flower vs. Whole Plant
  misc_feature: MA Experiment ID: 20000286 Result: Up-regulated in Transcription
  misc_feature: MA Experiment 20000286 PARAMETER Experiment Name: At_Open_Flower_P Parameter: Age (day) Value: 21
  misc_feature: MA Experiment 20000286 PARAMETER Experiment Name: At_Open_Flower_P Parameter: Plant Line Value: WS
  misc_feature: MA Experiment 20000286 PARAMETER Experiment Name: At_Open_Flower_P Parameter: Tissue Value: Half Open vs. Whole Plant
  misc_feature: MA Experiment ID: 20000436 Result: Down-regulated in Transcription
  misc_feature: MA Experiment 20000436 PARAMETER Experiment Name: At_Drought_P Parameter: Age (day) Value: 7
  misc_feature: MA Experiment 20000436 PARAMETER Experiment Name: At_Drought_P Parameter: Organism Value: A. thaliana
  misc_feature: MA Experiment 20000436 PARAMETER Experiment Name: At_Drought_P Parameter: Plant Line Value: WS
  misc_feature: MA Experiment 20000436 PARAMETER Experiment Name: At_Drought_P Parameter: Timepoint (hr) Value: 12
  misc_feature: MA Experiment 20000436 PARAMETER Experiment Name: At_Drought_P Parameter: Tissue Value: Whole Plant
  misc_feature: MA Experiment 20000436 PARAMETER Experiment Name: At_Drought_P Parameter: Treatment Value: Drought vs. No Drought
  misc_feature: MA Experiment ID: 20000437 Result: Down-regulated in Transcription
  misc_feature: MA Experiment 20000437 PARAMETER Experiment Name: At_Drought_P Parameter: Age (day) Value: 8
  misc_feature: MA Experiment 20000437 PARAMETER Experiment Name: At_Drought_P Parameter: Organism Value: A. thaliana
  misc_feature: MA Experiment 20000437 PARAMETER Experiment Name: At_Drought_P Parameter: Plant Line Value: WS
  misc_feature: MA Experiment 20000437 PARAMETER Experiment Name: At_Drought_P Parameter: Timepoint (hr) Value: 24
  misc_feature: MA Experiment 20000437 PARAMETER Experiment Name: At_Drought_P Parameter: Tissue Value: Whole Plant
  misc_feature: MA Experiment 20000437 PARAMETER Experiment Name: At_Drought_P Parameter: Treatment Value: Drought vs. No Drought
  misc_feature: MA Experiment ID: 20000439 Result: Down-regulated in Transcription
  misc_feature: MA Experiment 20000439 PARAMETER Experiment Name: At_Roots__P Parameter: Age (day) Value: 14 vs. 21
  misc_feature: MA Experiment 20000439 PARAMETER Experiment Name: At_Roots__P Parameter: Organism Value: A. thaliana
  misc_feature: MA Experiment 20000439 PARAMETER Experiment Name: At_Roots__P Parameter: Tissue Value: Roots vs. Whole Plant
  misc_feature: MA Experiment ID: 20000495 Result: Up-regulated in Transcription
  misc_feature: MA Experiment 20000495 PARAMETER Experiment Name: At_Guard_Cells_P Parameter: Harvest Date Value: 8/2/2002
  misc_feature: MA Experiment 20000495 PARAMETER Experiment Name: At_Guard_Cells_P Parameter: Organism Value: A. thaliana
  misc_feature: MA Experiment 20000495 PARAMETER Experiment Name: At_Guard_Cells_P Parameter: Tissue Value: Guard Cells vs. Leaves
  misc_feature: MA Experiment ID: 20000496 Result: Up-regulated in Transcription
  misc_feature: MA Experiment 20000496 PARAMETER Experiment Name: At_Guard_Cells_P Parameter: Harvest Date Value: 7/19/2002
  misc_feature: MA Experiment 20000496 PARAMETER Experiment Name: At_Guard_Cells_P Parameter: Organism Value: Canola
  misc_feature: MA Experiment 20000496 PARAMETER Experiment Name: At_Guard_Cells_P Parameter: Tissue Value: Guard Cells vs. Leaves
  misc_feature: MA Experiment ID: 20000794 Result: Up-regulated in Transcription
  misc_feature: MA Experiment 20000794 PARAMETER Experiment Name: At_Petals_P Parameter: Age (day) Value: 23-25 days
  misc_feature: MA Experiment 20000794 PARAMETER Experiment Name: At_Petals_P Parameter: Plant Line Value: WS
  misc_feature: MA Experiment 20000794 PARAMETER Experiment Name: At_Petals_P Parameter: Tissue Value: Petals vs. Whole plant
  misc_feature: MA Experiment ID: 20001558 Result: Up-regulated in Transcription
  misc_feature: MA Experiment 20001558 PARAMETER Experiment Name: At_Drought_Soil_Dry_P Parameter: Age (day) Value: 27
  misc_feature: MA Experiment 20001558 PARAMETER Experiment Name: At_Drought_Soil_Dry_P Parameter: Organism Value: A. thaliana
  misc_feature: MA Experiment 20001558 PARAMETER Experiment Name: At_Drought_Soil_Dry_P Parameter: Plant Line Value: WS
  misc_feature: MA Experiment 20001558 PARAMETER Experiment Name: At_Drought_Soil_Dry_P Parameter: Post Timepoint (hr) Value: 6
  misc_feature: MA Experiment 20001558 PARAMETER Experiment Name: At_Drought_Soil_Dry_P Parameter: Post-Treatment Value: Re-Water vs. No Drought
  misc_feature: MA Experiment 20001558 PARAMETER Experiment Name: At_Drought_Soil_Dry_P Parameter: Timepoint (day) Value: 13
  misc_feature: MA Experiment 20001558 PARAMETER Experiment Name: At_Drought_Soil_Dry_P Parameter: Treatment Value: Drought vs. No Drought
  misc_feature: MA Experiment ID: 20001560 Result: Up-regulated in Transcription
  misc_feature: MA Experiment 20001560 PARAMETER Experiment Name: At_Drought_Soil_Dry_P Parameter: Age (day) Value: 28
  misc_feature: MA Experiment 20001560 PARAMETER Experiment Name: At_Drought_Soil_Dry_P Parameter: Organism Value: A. thaliana
  misc_feature: MA Experiment 20001560 PARAMETER Experiment Name: At_Drought_Soil_Dry_P Parameter: Plant Line Value: WS
  misc_feature: MA Experiment 20001560 PARAMETER Experiment Name: At_Drought_Soil_Dry_P Parameter: Post Timepoint (hr) Value: None
  misc_feature: MA Experiment 20001560 PARAMETER Experiment Name: At_Drought_Soil_Dry_P Parameter: Post-Treatment Value: None
  misc_feature: MA Experiment 20001560 PARAMETER Experiment Name: At_Drought_Soil_Dry_P Parameter: Timepoint (day) Value: 14
  misc_feature: MA Experiment 20001560 PARAMETER Experiment Name: At_Drought_Soil_Dry_P Parameter: Treatment Value: Drought vs. No Drought
  misc_feature: MA Experiment ID: 20001757 Result: Up-regulated in Transcription
  misc_feature: MA Experiment 20001757 PARAMETER Experiment Name: At_50mM_NH4NO3_L-to-H_P Parameter: Timepoint (hr) Value: 6
  misc_feature: MA Experiment 20001757 PARAMETER Experiment Name: At_50mM_NH4NO3_L-to-H_P Parameter: Tissue Value: Leaf
  misc_feature: MA Experiment 20001757 PARAMETER Experiment Name: At_50mM_NH4NO3_L-to-H_P Parameter: Treatment Value: 50mM NH4NO3 vs 100mM Mannitol
  misc_feature: MA Experiment ID: 20001906 Result: Down-regulated in Transcription
  misc_feature: MA Experiment 20001906 PARAMETER Experiment Name: At_Drought_Reproduction_P Parameter: Age (day) Value: 35
  misc_feature: MA Experiment 20001906 PARAMETER Experiment Name: At_Drought_Reproduction_P Parameter: Organism Value: A. thaliana
  misc_feature: MA Experiment 20001906 PARAMETER Experiment Name: At_Drought_Reproduction_P Parameter: Plant Line Value: WS
  misc_feature: MA Experiment 20001906 PARAMETER Experiment Name: At_Drought_Reproduction_P Parameter: Timepoint (day) Value: 5
  misc_feature: MA Experiment 20001906 PARAMETER Experiment Name: At_Drought_Reproduction_P Parameter: Tissue Value: Siliques
  misc_feature: MA Experiment 20001906 PARAMETER Experiment Name: At_Drought_Reproduction_P Parameter: Treatment Value: Drought vs. No Drought
  misc_feature: MA Experiment ID: 20001911 Result: Down-regulated in Transcription
  misc_feature: MA Experiment 20001911 PARAMETER Experiment Name: At_Drought_Reproduction_P Parameter: Age (day) Value: 40
  misc_feature: MA Experiment 20001911 PARAMETER Experiment Name: At_Drought_Reproduction_P Parameter: Organism Value: A. thaliana
  misc_feature: MA Experiment 20001911 PARAMETER Experiment Name: At_Drought_Reproduction_P Parameter: Plant Line Value: WS
  misc_feature: MA Experiment 20001911 PARAMETER Experiment Name: At_Drought_Reproduction_P Parameter: Timepoint (day) Value: 10
  misc_feature: MA Experiment 20001911 PARAMETER Experiment Name: At_Drought_Reproduction_P Parameter: Tissue Value: Flowers
  misc_feature: MA Experiment 20001911 PARAMETER Experiment Name: At_Drought_Reproduction_P Parameter: Treatment Value: Drought vs. No Drought
gatctttagctttaccaatgaatccaatcctatcttctttgtttgctctctctttgctttcttcactatcaccatcaacacatgcccatcaatgccatttcccagcaatctttaactttggtgactctaactccgataccggcggtctctccgctgcttttggccaagctggtcctcctcacggctcttccttcttcggctcacccgcgggacgatactgcgatggtcgcctcgtcattgacttcatagcggagagtcttggattaccatatctaagcgcgtttctagactccgttggttcaaacttcagccacggcgctaacttcgctaccgcgggatctccgataagagctcttaactctactctacgtcaaagtggattcagcccattttcactcgatgtacagttcgtacaattctataacttccacaacagatctcaaactgttcgtagtcgtggaggagtctacaagacaatgttgcctgaatccgacagcttctcaaaagctttgtacacttttgacattggtcagaacgatctcacagcaggttacttcgctaataaaaccgtagaacaagttgaaaccgaagttcctgagatcataagtcagttcatgaatgctatcaagaatatttatggacaaggagggagatacttctggattcataacactggacctattggttgtttagcttatgtgattgaacggtttccgaataaagcatcagactttgattcacatggatgtgtttctcctttgaaccacttagctcaacaattcaatcacgctttgaaacaagctgtgatcgagctaagaagttctctatctgaagcagccatcacttatgtagatgtctactctctcaagcatgagttgtttgttcacgctcagggtcacgggtttaagggatcgttggtttcgtgttgtggacatggagggaagtataactacaacaagggtatcggatgtgggatgaagaagattgtgaaaggtaaagaggtttacattggaaagccgtgcgatgagcctgataaggctgttgtgtgggacggtgtacacttcacgcaggctgctaacaaattcattttcgataagattgctccagggttaagcaaggcctgtaaaaggcagtga

SEQ ID NO: 50673 - protein, 377 aa, Arabidopsis thaliana
  peptide (1)..(377): Ceres Seq. ID no. 13592428
  misc_feature (36)..(366): Pfam Name: GDSL-like Lipase/Acylhydrolase Pfam Description: GDSL-like Lipase/Acylhydrolase
  misc_feature (18)..(370): Homolog of NCBI NO: 25457244 NR Description: early nodule-specific protein ENOD8 [imported] -
  misc_feature (18)..(370): Homolog of NCBI NO: 18390045 NR Description: Enod8.1 [Medicago truncatula]
  misc_feature (7)..(369): Homolog of NCBI NO: 30909057 NR Description: ENSP-like protein [Hevea brasiliensis]
  misc_feature (300)..(376): Homolog of NCBI NO: 34901120 NR Description: contains ESTs
  misc_feature (31)..(310): Homolog of NCBI NO: 34901120 NR Description: contains ESTs
  misc_feature (31)..(376): Homolog of NCBI NO: 33147015 NR Description: putative early nodulin 8 precursor
  misc_feature (9)..(369): Homolog of NCBI NO: 34901122 NR Description: contains ESTs
  misc_feature (9)..(369): Homolog of NCBI NO: 33147016 NR Description: putative early nodulin 8 precursor
  misc_feature (18)..(369): Homolog of NCBI NO: 15231558 NR Description: GDSL-motif lipase/hydrolase protein [Arabidopsis
  misc_feature (6)..(377): Homolog of NCBI NO: 15220550 NR Description: GDSL-motif lipase/hydrolase protein [Arabidopsis
SLALPMNPILSSLFALSLLSSLSPSTHAHQCHFPAIFNFGDSNSDTGGLSAAFGQAGPPHGSSFFGSPAGRYCDGRLVIDFIAESLGLPYLSAFLDSVGSNFSHGANFATAGSPIRALNSTLRQSGFSPFSLDVQFVQFYNFHNRSQTVRSRGGVYKTMLPESDSFSKALYTFDIGQNDLTAGYFANKTVEQVETEVPEIISQFMNAIKNIYGQGGRYFWIHNTGPIGCLAYVIERFPNKASDFDSHGCVSPLNHLAQQFNHALKQAVIELRSSLSEAAITYVDVYSLKHELFVHAQGHGFKGSLVSCCGHGGKYNYNKGIGCGMKKIVKGKEVYIGKPCDEPDKAVVWDGVHFTQAANKFIFDKIAPGLSKACKRQ

SEQ ID NO: 50674 - protein, 372 aa, Arabidopsis thaliana
  peptide (1)..(372): Ceres Seq. ID no. 13592429
  misc_feature (31)..(361): Pfam Name: GDSL-like Lipase/Acylhydrolase Pfam Description: GDSL-like Lipase/Acylhydrolase
  misc_feature (13)..(365): Homolog of NCBI NO: 25457244 NR Description: early nodule-specific protein ENOD8 [imported] -
  misc_feature (13)..(365): Homolog of NCBI NO: 18390045 NR Description: Enod8.1 [Medicago truncatula]
  misc_feature (2)..(364): Homolog of NCBI NO: 30909057 NR Description: ENSP-like protein [Hevea brasiliensis]
  misc_feature (295)..(371): Homolog of NCBI NO: 34901120 NR Description: contains ESTs
  misc_feature (26)..(305): Homolog of NCBI NO: 34901120 NR Description: contains ESTs
  misc_feature (26)..(371): Homolog of NCBI NO: 33147015 NR Description: putative early nodulin 8 precursor
  misc_feature (4)..(364): Homolog of NCBI NO: 34901122 NR Description: contains ESTs
  misc_feature (4)..(364): Homolog of NCBI NO: 33147016 NR Description: putative early nodulin 8 precursor
  misc_feature (13)..(364): Homolog of NCBI NO: 15231558 NR Description: GDSL-motif lipase/hydrolase protein [Arabidopsis
  misc_feature (1)..(372): Homolog of NCBI NO: 15220550 NR Description: GDSL-motif lipase/hydrolase protein [Arabidopsis
MNPILSSLFALSLLSSLSPSTHAHQCHFPAIFNFGDSNSDTGGLSAAFGQAGPPHGSSFFGSPAGRYCDGRLVIDFIAESLGLPYLSAFLDSVGSNFSHGANFATAGSPIRALNSTLRQSGFSPFSLDVQFVQFYNFHNRSQTVRSRGGVYKTMLPESDSFSKALYTFDIGQNDLTAGYFANKTVEQVETEVPEIISQFMNAIKNIYGQGGRYFWIHNTGPIGCLAYVIERFPNKASDFDSHGCVSPLNHLAQQFNHALKQAVIELRSSLSEAAITYVDVYSLKHELFVHAQGHGFKGSLVSCCGHGGKYNYNKGIGCGMKKIVKGKEVYIGKPCDEPDKAVVWDGVHFTQAANKFIFDKIAPGLSKACKRQ

SEQ ID NO: 50675 - protein, 219 aa, Arabidopsis thaliana
  peptide (1)..(219): Ceres Seq. ID no. 13592430
  misc_feature (1)..(208): Pfam Name: GDSL-like Lipase/Acylhydrolase Pfam Description: GDSL-like Lipase/Acylhydrolase
  misc_feature (1)..(212): Homolog of NCBI NO: 25457244 NR Description: early nodule-specific protein ENOD8 [imported] -
  misc_feature (1)..(212): Homolog of NCBI NO: 18390045 NR Description: Enod8.1 [Medicago truncatula]
  misc_feature (1)..(211): Homolog of NCBI NO: 30909057 NR Description: ENSP-like protein [Hevea brasiliensis]
  misc_feature (142)..(218): Homolog of NCBI NO: 34901120 NR Description: contains ESTs
  misc_feature (1)..(152): Homolog of NCBI NO: 34901120 NR Description: contains ESTs
  misc_feature (1)..(218): Homolog of NCBI NO: 33147015 NR Description: putative early nodulin 8 precursor
  misc_feature (1)..(211): Homolog of NCBI NO: 34901122 NR Description: contains ESTs
  misc_feature (1)..(211): Homolog of NCBI NO: 33147016 NR Description: putative early nodulin 8 precursor
  misc_feature (1)..(211): Homolog of NCBI NO: 15231558 NR Description: GDSL-motif lipase/hydrolase protein [Arabidopsis
  misc_feature (1)..(219): Homolog of NCBI NO: 15220550 NR Description: GDSL-motif lipase/hydrolase protein [Arabidopsis
MLPESDSFSKALYTFDIGQNDLTAGYFANKTVEQVETEVPEIISQFMNAIKNIYGQGGRYFWIHNTGPIGCLAYVIERFPNKASDFDSHGCVSPLNHLAQQFNHALKQAVIELRSSLSEAAITYVDVYSLKHELFVHAQGHGFKGSLVSCCGHGGKYNYNKGIGCGMKKIVKGKEVYIGKPCDEPDKAVVWDGVHFTQAANKFIFDKIAPGLSKACKRQ

SEQ ID NO: 50676 - DNA, 1005 bp, Arabidopsis thaliana
  misc_feature (1)..(1005): Ceres Seq. ID no. 13601843
  misc_feature: MA Experiment ID: 20000496 Result: Down-regulated in Transcription
  misc_feature: MA Experiment 20000496 PARAMETER Experiment Name: At_Guard_Cells_P Parameter: Harvest Date Value: 7/19/2002
  misc_feature: MA Experiment 20000496 PARAMETER Experiment Name: At_Guard_Cells_P Parameter: Organism Value: Canola
  misc_feature: MA Experiment 20000496 PARAMETER Experiment Name: At_Guard_Cells_P Parameter: Tissue Value: Guard Cells vs. Leaves
agatagagagaaagacgcttctggtcagttttcgttaaacccgccggagaaactagcgactacggtggtcgaacccgtctgacgtcgtagaattcatcgtaatcttcacttcctttcttccccgacaaaatcatcgatctgtgtttgccaatcagattcaccggaacttctagttaggacgattgtgaaaaatgtcgtcatcgttagaacaagaaatcttcttacagtggggaaacaagaagagattgagatgtcttagagccaaagccaaaaagatctctcgttctaaaaactcttctcgctttctaggtcaagataccgtcctccttcaatcctctagattctccagaggatcagaaggagcaatcctcagatctggactaccagatcgccggagaccgtctccggagaaagaggagaggtattatactacgagaggtgtagtggataacattgggaaagattgtttagatggaaacatcaatggagaagatagcaacaacaaggaagagagtatgtggcctaagctctttataacattatcaaacaaagagaaagaagaagatttcatggctatgaaaggttgcaaaccttctcataggcctaagaagagagctaaactcatccaaagaagcttacttttggtgagtcctggaacatggttggctgatttgtgccctgatagatacgatgttagggtgaagaagagctctaagaagaggcgagcaagagggctaaaagccatgggaaacatggagactgattcagattgacaagttttaagattagtttactagaaatgtttgcgtattgatttaagctaactttcgtgggtttccttaagcaatctttaagaatgtattttagatgaaattattcggttgagcactttgaacacaaggatatatcatttctttgtgacaatgtatgtacctgttgtaacttgtaaccctatcctaatctattgtttcagataatgtactttagtcctatttggcggcactt

SEQ ID NO: 50677 - protein, 193 aa, Arabidopsis thaliana
  peptide (1)..(193): Ceres Seq. ID no. 13601844
  misc_feature (61)..(176): Homolog of NCBI NO: 30685055 NR Description: expressed protein [Arabidopsis thaliana]
  misc_feature (61)..(193): Homolog of NCBI NO: 21553974 NR Description: unknown [Arabidopsis thaliana]
  misc_feature (61)..(193): Homolog of NCBI NO: 30685058 NR Description: expressed protein [Arabidopsis thaliana]
  misc_feature (61)..(193): Homolog of NCBI NO: 7485821 NR Description: hypothetical protein F1C12.211 - Arabidopsis
  misc_feature (6)..(193): Homolog of NCBI NO: 30103017 NR Description: unknown protein [Oryza sativa (japonica
  misc_feature (2)..(181): Homolog of NCBI NO: 25405821 NR Description: unknown protein, 25817-24837 [imported] -
  misc_feature (2)..(193): Homolog of NCBI NO: 30695924 NR Description: expressed protein [Arabidopsis thaliana]
  misc_feature (151)..(193): Homolog of NCBI NO: 6006854 NR Description: hypothetical protein [Arabidopsis thaliana]
  misc_feature (1)..(150): Homolog of NCBI NO: 6006854 NR Description: hypothetical protein [Arabidopsis thaliana]
  misc_feature (1)..(193): Homolog of NCBI NO: 30678969 NR Description: expressed protein [Arabidopsis thaliana]
MSSSLEQEIFLQWGNKKRLRCLRAKAKKISRSKNSSRFLGQDTVLLQSSRFSRGSEGAILRSGLPDRRRPSPEKEERYYTTRGVVDNIGKDCLDGNINGEDSNNKEESMWPKLFITLSNKEKEEDFMAMKGCKPSHRPKKRAKLIQRSLLLVSPGTWLADLCPDRYDVRVKKSSKKRRARGLKAMGNMETDSD

SEQ ID NO: 50678 - DNA, 1347 bp, Arabidopsis thaliana
  misc_feature (1)..(1347): Ceres Seq. ID no. 15168791
  misc_feature: MA Experiment ID: 20000495 Result: Down-regulated in Transcription
  misc_feature: MA Experiment 20000495 PARAMETER Experiment Name: At_Guard_Cells_P Parameter: Harvest Date Value: 8/2/2002
  misc_feature: MA Experiment 20000495 PARAMETER Experiment Name: At_Guard_Cells_P Parameter: Organism Value: A. thaliana
  misc_feature: MA Experiment 20000495 PARAMETER Experiment Name: At_Guard_Cells_P Parameter: Tissue Value: Guard Cells vs. Leaves
gaccgagaaaacagagaacgttaagaatcattgcttttctcgagaaaataatatttttaattgaatcgagaaactcttcaaagttgaattaagaagaatattacctcaattgagatttgagagacacgcatagagagattgattattgcatcgaatcaagcttggtttgttagtaatggcgggaatagctttagttttagatctactgaagaaatctcaatctaagaacactctccactcatcttccttctattccgcctccgccgccgctgtttctgctgccgcctctgctccttttgcgtctaggtttctcttcggttcttttgagcctagagttgcgtattgtgatgctgctgctgcaatagatgatgattaccttggtgctatacggaaaatgtctgcggatgttttgcagcgtcaaccccttgcgtatatttctaggtccaaggaatacaatatccagccaaaaccagttctctcggcctttgagttcagggcacttgcaatgactacagtgagatcccttttgatgttttatttgcctcttttggagcctaaaacggcttcagaggatgatgatgatttcctaaacaatgctgcagaagaaaaccgccacacagacttgattgttcctcttaaaaagtcagcaaagcaaattgcccgtgagaccacagttgtgaccactcggagagtccttgaaaggctggctctgagttatgtctcacagcgtatggcatggaaacttctaaaggatgtgcctcagtcggctttacgcaaggctcagagagggttgccgacacatgtatatatctttaaagtcagccaaacaactcttagaggtcacttcctgggaatcgcagcatcatgggtagttcaagtaggcattgaaatctacagatgtgtgttcccgaatgttaaacccgaggaagaagaagaagaggagaaagtcgagatatcacagcaagctaaggatctcggaaacaaagttgtgggtatcacagtacgatgtggcgcgtccttagtatttgctgccattggagccgggatatgttcttgccttatccgtccctccacgggccaatggatcggttgcgcgctgggagacttggctggtccgatggttgtttcggtttgcctgcagaagactcttcaagctgattattaagttcttgtgtggaaattgaattcttctacttgaatcttgatgatccaaatgaaatcatagagcttgttttttgtttctgaaatttcttattgtcttcactgaaccttaaaaacattgatcaatagatttctcaaaatgtacctacttttgacaacagcacaataagtcaggtatttattttc

SEQ ID NO: 50679 - protein, 329 aa, Arabidopsis thaliana; identical to SEQ ID NO: 49026
  peptide (1)..(329): Ceres Seq. ID no. 15168792
  misc_feature (1)..(77): Homolog of NCBI NO: 21592482 NR Description: unknown [Arabidopsis thaliana]
  misc_feature (1)..(77): Homolog of NCBI NO: 15215588 NR Description: AT5g55610/MDF20_5 [Arabidopsis thaliana]
  misc_feature (1)..(329): Homolog of NCBI NO: 15240548 NR Description: expressed protein [Arabidopsis thaliana]

SEQ ID NO: 50680 - protein, 256 aa, Arabidopsis thaliana; identical to SEQ ID NO: 49027
  peptide (1)..(256): Ceres Seq. ID no. 15168793
  misc_feature (1)..(256): Homolog of NCBI NO: 15240548 NR Description: expressed protein [Arabidopsis thaliana]

SEQ ID NO: 50681 - protein, 219 aa, Arabidopsis thaliana; identical to SEQ ID NO: 49028
  peptide (1)..(219): Ceres Seq. ID no. 15168794
  misc_feature (1)..(219): Homolog of NCBI NO: 15240548 NR Description: expressed protein [Arabidopsis thaliana]

SEQ ID NO: 50682 - DNA, 1537 bp, Arabidopsis thaliana; identical to SEQ ID NO: 49974
  misc_feature (1)..(1537): Ceres Seq. ID no. 13647981
  misc_feature: MA Experiment ID: 20000171 Result: Up-regulated in Transcription
  misc_feature: MA Experiment 20000171 PARAMETER Experiment Name: At_42deg_Heat_P Parameter: Age (day) Value: 14
  misc_feature: MA Experiment 20000171 PARAMETER Experiment Name: At_42deg_Heat_P Parameter: Organism Value: A. thaliana
  misc_feature: MA Experiment 20000171 PARAMETER Experiment Name: At_42deg_Heat_P Parameter: Plant Line Value: WS
  misc_feature: MA Experiment 20000171 PARAMETER Experiment Name: At_42deg_Heat_P Parameter: Temperature (deg C) Value: 42 vs. 22
  misc_feature: MA Experiment 20000171 PARAMETER Experiment Name: At_42deg_Heat_P Parameter: Timepoint (hr) Value: 1
  misc_feature: MA Experiment 20000171 PARAMETER Experiment Name: At_42deg_Heat_P Parameter: Tissue Value: Aerial
  misc_feature: MA Experiment ID: 20000182 Result: Up-regulated in Transcription
  misc_feature: MA Experiment 20000182 PARAMETER Experiment Name: At_2mM_SA_P Parameter: Age (day) Value: 14
  misc_feature: MA Experiment 20000182 PARAMETER Experiment Name: At_2mM_SA_P Parameter: Organism Value: A. thaliana
  misc_feature: MA Experiment 20000182 PARAMETER Experiment Name: At_2mM_SA_P Parameter: Plant Line Value: WS
  misc_feature: MA Experiment 20000182 PARAMETER Experiment Name: At_2mM_SA_P Parameter: Timepoint (hr) Value: 6
  misc_feature: MA Experiment 20000182 PARAMETER Experiment Name: At_2mM_SA_P Parameter: Tissue Value: Aerial
  misc_feature: MA Experiment 20000182 PARAMETER Experiment Name: At_2mM_SA_P Parameter: Treatment Value: 2mM SA vs. No Treatment
  misc_feature: MA Experiment ID: 20000184 Result: Down-regulated in Transcription
  misc_feature: MA Experiment 20000184 PARAMETER Experiment Name: At_Shoots__P Parameter: Age (day) Value: 7
  misc_feature: MA Experiment 20000184 PARAMETER Experiment Name: At_Shoots__P Parameter: Tissue Value: Shoots vs. Whole Plant
  misc_feature: MA Experiment ID: 20000234 Result: Down-regulated in Transcription
  misc_feature: MA Experiment 20000234 PARAMETER Experiment Name: At_Siliques_P Parameter: Age (day) Value: 21
  misc_feature: MA Experiment 20000234 PARAMETER Experiment Name: At_Siliques_P Parameter: Organism Value: A. thaliana
  misc_feature: MA Experiment 20000234 PARAMETER Experiment Name: At_Siliques_P Parameter: Plant Line Value: WS
  misc_feature: MA Experiment 20000234 PARAMETER Experiment Name: At_Siliques_P Parameter: Tissue Value: Less Than 5mm Siliques vs. Whole Plant
  misc_feature: MA Experiment ID: 20000235 Result: Down-regulated in Transcription
  misc_feature: MA Experiment 20000235 PARAMETER Experiment Name: At_Siliques_P Parameter: Age (day) Value: 21
  misc_feature: MA Experiment 20000235 PARAMETER Experiment Name: At_Siliques_P Parameter: Organism Value: A. thaliana
  misc_feature: MA Experiment 20000235 PARAMETER Experiment Name: At_Siliques_P Parameter: Plant Line Value: WS
  misc_feature: MA Experiment 20000235 PARAMETER Experiment Name: At_Siliques_P Parameter: Tissue Value: 5-10mm Siliques vs. Whole Plant
  misc_feature: MA Experiment ID: 20000437 Result: Up-regulated in Transcription
  misc_feature: MA Experiment 20000437 PARAMETER Experiment Name: At_Drought_P Parameter: Age (day) Value: 8
  misc_feature: MA Experiment 20000437 PARAMETER Experiment Name: At_Drought_P Parameter: Organism Value: A. thaliana
  misc_feature: MA Experiment 20000437 PARAMETER Experiment Name: At_Drought_P Parameter: Plant Line Value: WS
  misc_feature: MA Experiment 20000437 PARAMETER Experiment Name: At_Drought_P Parameter: Timepoint (hr) Value: 24
  misc_feature: MA Experiment 20000437 PARAMETER Experiment Name: At_Drought_P Parameter: Tissue Value: Whole Plant
  misc_feature: MA Experiment 20000437 PARAMETER Experiment Name: At_Drought_P Parameter: Treatment Value: Drought vs. No Drought
  misc_feature: MA Experiment ID: 20000438 Result: Down-regulated in Transcription
  misc_feature: MA Experiment 20000438 PARAMETER Experiment Name: At_Shoots__P Parameter: Age (day) Value: 14
  misc_feature: MA Experiment 20000438 PARAMETER Experiment Name: At_Shoots__P Parameter: Tissue Value: Shoots vs. Whole Plant
  misc_feature: MA Experiment ID: 20000451 Result: Down-regulated in Transcription
  misc_feature: MA Experiment 20000451 PARAMETER Experiment Name: At_CS6879_Shoots-Roots_P Parameter: Age (day) Value: 14
  misc_feature: MA Experiment 20000451 PARAMETER Experiment Name: At_CS6879_Shoots-Roots_P Parameter: Organism Value: A. thaliana
  misc_feature: MA Experiment 20000451 PARAMETER Experiment Name: At_CS6879_Shoots-Roots_P Parameter: Plant Line Value: CS6879 vs. WS
  misc_feature: MA Experiment 20000451 PARAMETER Experiment Name: At_CS6879_Shoots-Roots_P Parameter: Tissue Value: Roots
  misc_feature: MA Experiment ID: 20001558 Result: Down-regulated in Transcription
  misc_feature: MA Experiment 20001558 PARAMETER Experiment Name: At_Drought_Soil_Dry_P Parameter: Age (day) Value: 27
  misc_feature: MA Experiment 20001558 PARAMETER Experiment Name: At_Drought_Soil_Dry_P Parameter: Organism Value: A. thaliana
  misc_feature: MA Experiment 20001558 PARAMETER Experiment Name: At_Drought_Soil_Dry_P Parameter: Plant Line Value: WS
  misc_feature: MA Experiment 20001558 PARAMETER Experiment Name: At_Drought_Soil_Dry_P Parameter: Post Timepoint (hr) Value: 6
  misc_feature: MA Experiment 20001558 PARAMETER Experiment Name: At_Drought_Soil_Dry_P Parameter: Post-Treatment Value: Re-Water vs. No Drought
  misc_feature: MA Experiment 20001558 PARAMETER Experiment Name: At_Drought_Soil_Dry_P Parameter: Timepoint (day) Value: 13
  misc_feature: MA Experiment 20001558 PARAMETER Experiment Name: At_Drought_Soil_Dry_P Parameter: Treatment Value: Drought vs. No Drought
  misc_feature: MA Experiment ID: 20001911 Result: Up-regulated in Transcription
  misc_feature: MA Experiment 20001911 PARAMETER Experiment Name: At_Drought_Reproduction_P Parameter: Age (day) Value: 40
  misc_feature: MA Experiment 20001911 PARAMETER Experiment Name: At_Drought_Reproduction_P Parameter: Organism Value: A. thaliana
  misc_feature: MA Experiment 20001911 PARAMETER Experiment Name: At_Drought_Reproduction_P Parameter: Plant Line Value: WS
  misc_feature: MA Experiment 20001911 PARAMETER Experiment Name: At_Drought_Reproduction_P Parameter: Timepoint (day) Value: 10
  misc_feature: MA Experiment 20001911 PARAMETER Experiment Name: At_Drought_Reproduction_P Parameter: Tissue Value: Flowers
  misc_feature: MA Experiment 20001911 PARAMETER Experiment Name: At_Drought_Reproduction_P Parameter: Treatment Value: Drought vs. No Drought

SEQ ID NO: 50683 - protein, 376 aa, Arabidopsis thaliana; identical to SEQ ID NO: 49975
  peptide (1)..(376): Ceres Seq. ID no. 13647982
  misc_feature (155)..(299): Pfam Name: RhoGAP domain Pfam Description: RhoGAP domain
  misc_feature (155)..(299): Pfam Name: RhoGAP domain Pfam Description: RhoGAP domain
  misc_feature (137)..(295): Homolog of NCBI NO: 34856548 NR Description: similar to RIKEN cDNA B230365D05 [Rattus
  misc_feature (136)..(291): Homolog of NCBI NO: 26333369 NR Description: unnamed protein product [Mus musculus]
  misc_feature (137)..(295): Homolog of NCBI NO: 4139447 NR Description: Chain B, Transition State Complex For Gtp By Cdc42: Comparisons Of The High Resolution Structures For Cdc42 To The Active And Catalytically Compromised Forms Of The
  misc_feature (137)..(295): Homolog of NCBI NO: 6730013 NR Description: Chain B, Crystal Structure Of The
  misc_feature (137)..(295): Homolog of NCBI NO: 3660275 NR Description: Chain A, RhoRHOGAPGDP(DOT)ALF4 COMPLEX
  misc_feature (137)..(295): Homolog of NCBI NO: 34856548 NR Description: similar to RIKEN cDNA B230365D05 [Rattus
  misc_feature (137)..(295): Homolog of NCBI NO: 4139447 NR Description: Chain B, Transition State Complex For Gtp By Cdc42: Comparisons Of The High Resolution Structures For Cdc42 To The Active And Catalytically Compromised Forms Of The
  misc_feature (137)..(295): Homolog of NCBI NO: 3660275 NR Description: Chain A, RhoRHOGAPGDP(DOT)ALF4 COMPLEX
  misc_feature (1)..(376): Homolog of NCBI NO: 18424478 NR Description: auxin-regulated protein [Arabidopsis thaliana]
  misc_feature (1)..(376): Homolog of NCBI NO: 21553593 NR Description: unknown [Arabidopsis thaliana]
  misc_feature (1)..(376): Homolog of NCBI NO: 28564771 NR Description: putative auxin-regulated protein
  misc_feature (137)..(295): Homolog of NCBI NO: 2624718 NR Description: Gtpase-Activation Domain From Rhogap
  misc_feature (137)..(295): Homolog of NCBI NO: 3402094 NR Description: Chain A, Complex Between Cdc42hs.Gmppnp And P50
  misc_feature (137)..(295): Homolog of NCBI NO: 6730013 NR Description: Chain B, Crystal Structure Of The
  misc_feature (136)..(291): Homolog of NCBI NO: 26333369 NR Description: unnamed protein product [Mus musculus]
  misc_feature (137)..(295): Homolog of NCBI NO: 3402094 NR Description: Chain A, Complex Between Cdc42hs.Gmppnp And P50
  misc_feature (137)..(295): Homolog of NCBI NO: 2624718 NR Description: Gtpase-Activation Domain From Rhogap
  misc_feature (1)..(376): Homolog of NCBI NO: 28564771 NR Description: putative auxin-regulated protein
  misc_feature (1)..(376): Homolog of NCBI NO: 21553593 NR Description: unknown [Arabidopsis thaliana]
  misc_feature (1)..(376): Homolog of NCBI NO: 18424478 NR Description: auxin-regulated protein [Arabidopsis thaliana]

SEQ ID NO: 50684 - DNA, 687 bp, Arabidopsis thaliana
  misc_feature (1)..(687): Ceres Seq. ID no. 6429691
  misc_feature: MA Experiment ID: 20000173 Result: Up-regulated in Transcription
  misc_feature: MA Experiment 20000173 PARAMETER Experiment Name: At_42deg_Heat_P Parameter: Age (day) Value: 14
  misc_feature: MA Experiment 20000173 PARAMETER Experiment Name: At_42deg_Heat_P Parameter: Organism Value: A. thaliana
  misc_feature: MA Experiment 20000173 PARAMETER Experiment Name: At_42deg_Heat_P Parameter: Plant Line Value: WS
  misc_feature: MA Experiment 20000173 PARAMETER Experiment Name: At_42deg_Heat_P Parameter: Temperature (deg C) Value: 42 vs. 22
  misc_feature: MA Experiment 20000173 PARAMETER Experiment Name: At_42deg_Heat_P Parameter: Timepoint (hr) Value: 6
  misc_feature: MA Experiment 20000173 PARAMETER Experiment Name: At_42deg_Heat_P Parameter: Tissue Value: Aerial
  misc_feature: MA Experiment ID: 20000437 Result: Down-regulated in Transcription
  misc_feature: MA Experiment 20000437 PARAMETER Experiment Name: At_Drought_P Parameter: Age (day) Value: 8
  misc_feature: MA Experiment 20000437 PARAMETER Experiment Name: At_Drought_P Parameter: Organism Value: A. thaliana
  misc_feature: MA Experiment 20000437 PARAMETER Experiment Name: At_Drought_P Parameter: Plant Line Value: WS
  misc_feature: MA Experiment 20000437 PARAMETER Experiment Name: At_Drought_P Parameter: Timepoint (hr) Value: 24
  misc_feature: MA Experiment 20000437 PARAMETER Experiment Name: At_Drought_P Parameter: Tissue Value: Whole Plant
  misc_feature: MA Experiment 20000437 PARAMETER Experiment Name: At_Drought_P Parameter: Treatment Value: Drought vs. No Drought
tggtggacctgacatcgtgttcgttcccgggagaaaggattcaaatgtctgccccaaggaaggaagacttcctgatgccaaacaaggtttccaacatctcagagatgtcttctaccgcatgggactatctgataaggatattgtggcactctcagggggtcatactctgggaagggctcacccagagaggtcaggctttgatggaccatggacccaagagccgctgaagtttgacaactcctacttcgtggaactgctgaaaggagaatcagagggcttgttgaaacttcaactgacaagaccttattggaagacccggagttccgtcgtcttgttgagctttatgcaaaggatgaaagatgcattcttagagactacgcggaatccacaaagaaactctnttgagctttggtttcaaccccaactcctcaacaggcaaaagcagtttgcagacagcaccattctggcacaaaatgccttccggggttcanttgctgctgcgggtggtggcatttggttcttttacgaaatcccgaagaaggtgaagtaaacnaaataggaagtaaacaccaaacaacgatgctcttatttgggtttaaaaaaactattaatcgctatcnatctattttgctgctacaanantctaactttttgaatccccattcncttgttaatagtaaaaaagtt

SEQ ID NO: 50685 - protein, 182 aa, Arabidopsis thaliana
  peptide (1)..(182): Ceres Seq. ID no. 6429692
  misc_feature (1)..(96): Pfam Name: Peroxidase Pfam Description: Peroxidase
  misc_feature (1)..(96): Homolog of NCBI NO: 15808777 NR Description: ascorbate peroxidase [Hordeum vulgare]
  misc_feature (1)..(96): Homolog of NCBI NO: 6066418 NR Description: ascorbate peroxidase [Lycopersicon esculentum]
  misc_feature (1)..(182): Homolog of NCBI NO: 15080682 NR Description: peroxisome type ascorbate peroxidase
  misc_feature (1)..(182): Homolog of NCBI NO: 5442410 NR Description: ascorbate peroxidase [Zantedeschia aethiopica]
  misc_feature (1)..(182): Homolog of NCBI NO: 4835909 NR Description: cytosolic ascorbate peroxidase [Mesembryanthemum
  misc_feature (1)..(182): Homolog of NCBI NO: 15430584 NR Description: peroxisomal ascorbate peroxidase [Cucurbita cv.
  misc_feature (1)..(182): Homolog of NCBI NO: 17066705 NR Description: ascorbate peroxidase [Capsicum annuum]
  misc_feature (1)..(182): Homolog of NCBI NO: 7484726 NR Description: L-ascorbate peroxidase (EC 1.11.1.11),
  misc_feature (1)..(182): Homolog of NCBI NO: 3288066 NR Description: ascorbate peroxidase [Arabidopsis thaliana]
  misc_feature (1)..(182): Homolog of NCBI NO: 15236239 NR Description: ascorbate peroxidase, putative (APX)
  misc_feature (134)..(134): Xaa is any aa, unknown or other
  misc_feature (164)..(164): Xaa is any aa, unknown or other
GGPDIVFVPGRKDSNVCPKEGRLPDAKQGFQHLRDVFYRMGLSDKDIVALSGGHTLGRAHPERSGFDGPWTQEPLKFDNSYFVELLKGESEGLLKLQLTRPYWKTRSSVVLLSFMQRMKDAFLETTRNPQRNSXELWFQPQLLNRQKQFADSTILAQNAFRGSXAAAGGGIWFFYEIPKKVK

SEQ ID NO: 50686 - protein, 143 aa, Arabidopsis thaliana
  peptide (1)..(143): Ceres Seq. ID no. 6429693
  misc_feature (1)..(57): Pfam Name: Peroxidase Pfam Description: Peroxidase
  misc_feature (1)..(57): Homolog of NCBI NO: 15808777 NR Description: ascorbate peroxidase [Hordeum vulgare]
  misc_feature (1)..(57): Homolog of NCBI NO: 6066418 NR Description: ascorbate peroxidase [Lycopersicon esculentum]
  misc_feature (1)..(143): Homolog of NCBI NO: 15080682 NR Description: peroxisome type ascorbate peroxidase
  misc_feature (1)..(143): Homolog of NCBI NO: 5442410 NR Description: ascorbate peroxidase [Zantedeschia aethiopica]
  misc_feature (1)..(143): Homolog of NCBI NO: 4835909 NR Description: cytosolic ascorbate peroxidase [Mesembryanthemum
  misc_feature (1)..(143): Homolog of NCBI NO: 15430584 NR Description: peroxisomal ascorbate peroxidase [Cucurbita cv.
  misc_feature (1)..(143): Homolog of NCBI NO: 17066705 NR Description: ascorbate peroxidase [Capsicum annuum]
  misc_feature (1)..(143): Homolog of NCBI NO: 7484726 NR Description: L-ascorbate peroxidase (EC 1.11.1.11),
  misc_feature (1)..(143): Homolog of NCBI NO: 3288066 NR Description: ascorbate peroxidase [Arabidopsis thaliana]
  misc_feature (1)..(143): Homolog of NCBI NO: 15236239 NR Description: ascorbate peroxidase, putative (APX)
  misc_feature (95)..(95): Xaa is any aa, unknown or other
  misc_feature (125)..(125): Xaa is any aa, unknown or other
MGLSDKDIVALSGGHTLGRAHPERSGFDGPWTQEPLKFDNSYFVELLKGESEGLLKLQLTRPYWKTRSSVVLLSFMQRMKDAFLETTRNPQRNSXELWFQPQLLNRQKQFADSTILAQNAFRGSXAAAGGGIWFFYEIPKKVK

SEQ ID NO: 50687 - DNA, 1399 bp, Arabidopsis thaliana
  misc_feature (1)..(1399): Ceres Seq. ID no. 12558817
  misc_feature: MA Experiment ID: 20000180 Result: Up-regulated in Transcription
  misc_feature: MA Experiment 20000180 PARAMETER Experiment Name: At_Germinating_Seeds_P Parameter: Age (hr) Value: 24 vs. 0
  misc_feature: MA Experiment 20000180 PARAMETER Experiment Name: At_Germinating_Seeds_P Parameter: Tissue Value: Germinating Seeds
  misc_feature: MA Experiment ID: 20000182 Result: Up-regulated in Transcription
  misc_feature: MA Experiment 20000182 PARAMETER Experiment Name: At_2mM_SA_P Parameter: Age (day) Value: 14
  misc_feature: MA Experiment 20000182 PARAMETER Experiment Name: At_2mM_SA_P Parameter: Organism Value: A. thaliana
  misc_feature: MA Experiment 20000182 PARAMETER Experiment Name: At_2mM_SA_P Parameter: Plant Line Value: WS
  misc_feature: MA Experiment 20000182 PARAMETER Experiment Name: At_2mM_SA_P Parameter: Timepoint (hr) Value: 6
  misc_feature: MA Experiment 20000182 PARAMETER Experiment Name: At_2mM_SA_P Parameter: Tissue Value: Aerial
  misc_feature: MA Experiment 20000182 PARAMETER Experiment Name: At_2mM_SA_P Parameter: Treatment Value: 2mM SA vs. No Treatment
  misc_feature: MA Experiment ID: 20000185 Result: Up-regulated in Transcription
  misc_feature: MA Experiment 20000185 PARAMETER Experiment Name: At_Roots__P Parameter: Age (day) Value: 7 vs. 21
  misc_feature: MA Experiment 20000185 PARAMETER Experiment Name: At_Roots__P Parameter: Organism Value: A. thaliana
  misc_feature: MA Experiment 20000185 PARAMETER Experiment Name: At_Roots__P Parameter: Tissue Value: Roots vs. Whole Plant
  misc_feature: MA Experiment ID: 20000227 Result: Down-regulated in Transcription
  misc_feature: MA Experiment 20000227 PARAMETER Experiment Name: At_Root-Tips-vs-Tops_P Parameter: Tissue Value: Root Tips vs. Root Tops
  misc_feature: MA Experiment ID: 20000439 Result: Up-regulated in Transcription
  misc_feature: MA Experiment 20000439 PARAMETER Experiment Name: At_Roots__P Parameter: Age (day) Value: 14 vs. 21
  misc_feature: MA Experiment 20000439 PARAMETER Experiment Name: At_Roots__P Parameter: Organism Value: A. thaliana
  misc_feature: MA Experiment 20000439 PARAMETER Experiment Name: At_Roots__P Parameter: Tissue Value: Roots vs. Whole Plant
atggctaattcctcaatcgtagctcttcttcttctctttgttatcgctagttccgtcaatggaggagatcaagagtatccaaatcaatatctaacagaagctttaggtgataaagaatggttagtgtctgtaagaagacaaatccatgaaaacccagaactccttttcgagttacataaaacaagtgctctgattcgtcgcgagcttgatgaattaggggtttcttattcttacccggttgcgaaaaccgggatcgtagctcaaatcggatccggttatcctccggttgttgctctccgtgctgatatggatgctcttcccttacaagaacttgttgagtgggatcataagagcaaaatcgatggaaaaatgcatgcttgtggtcatgattctcataccactatgctccttggtgctgctaaattgcttagcaaacgcaaacgtatgctcaatggaacagtgaggcttctttttcaaccagcagaagaaggtggtgcaggtgcttttcatatgataaaagaaggtgctttgggtgattctgaagcaatatttgggatgcatgttcatactggcttacctacaggagaattagcaacaatctcgggtcctgctttggcatccacaagcattttcagtgtaagaatgagtggtaaatcacccgcttcttcggagacctattcttgtgttgatccggtgttggctgcatcatctaccatcttagcattgcaacttattatctccagagaagtagatcctctcttaagccatgtgctctctgttacatttatgaaaagtggcggttctgagtttgatgtgattccggcatatgtagaatttgggggaactttgaggagtcttacaaccaatggcatcaactggttgataaagcggttgaaagaggtggttgaaggacaagctgaagtacaaagatgcaaagcggatatagatatgcatgaagacgatcatcctatgtatccagcaacagtgaacgatcacaagctacacgaattcactgaaaaggttttgaaactcttgcttggacccgagaaggtgaaaccggctaacaaggtaatggcgggtgaggattttgctttctatcaacaaaaaatacccggttactacataggaatcggtataagaaacgaagaaatcggttctgtgcgttcggttcattcgccttatttcttcctcgacgagaatgtgcttcccattggatcagcaacgtttgctgccttagctgaaatgtatctacaagagcatcagaatcaaactaagtctggagattgagaaagttactaaacaaaagcttagttaattgccttcacaagtaaatgctattgtttttataaaatgcaatttttacaacttcaagaaatcaagttgtattatataaaattgt

SEQ ID NO: 50688 - protein, 428 aa, Arabidopsis thaliana
  peptide (1)..(428): Ceres Seq. ID no. 12558818
  misc_feature (38)..(418): Pfam Name: Peptidase family M20/M25/M40 Pfam Description: Peptidase family M20/M25/M40
  misc_feature (2)..(424): Homolog of NCBI NO: 34914096 NR Description: putative IAA-Ala hydrolase
  misc_feature (39)..(420): Homolog of NCBI NO: 15233011 NR Description: IAA-amino acid hydrolase (ILR1)
  misc_feature (39)..(420): Homolog of NCBI NO: 21554648 NR Description: IAA-amino acid hydrolase (ILR1) [Arabidopsis
  misc_feature (39)..(420): Homolog of NCBI NO: 18129692 NR Description: IAA amidohydrolase [Arabidopsis suecica]
  misc_feature (6)..(424): Homolog of NCBI NO: 15218027 NR Description: IAA-Ala hydrolase (IAR3)
  misc_feature (16)..(420): Homolog of NCBI NO: 34900780 NR Description: putative IAA amidohydrolase
  misc_feature (34)..(420): Homolog of NCBI NO: 34900782 NR Description: putative IAA amidohydrolase
  misc_feature (40)..(420): Homolog of NCBI NO: 28376718 NR Description: putative  IAA amidohydrolase
  misc_feature (9)..(428): Homolog of NCBI NO: 21741848 NR Description: OSJNBa0019D11.19 [Oryza sativa (japonica
  misc_feature (1)..(428): Homolog of NCBI NO: 15239551 NR Description: IAA-amino acid hydrolase homolog ILL3
MANSSIVALLLLFVIASSVNGGDQEYPNQYLTEALGDKEWLVSVRRQIHENPELLFELHKTSALIRRELDELGVSYSYPVAKTGIVAQIGSGYPPVVALRADMDALPLQELVEWDHKSKIDGKMHACGHDSHTTMLLGAAKLLSKRKRMLNGTVRLLFQPAEEGGAGAFHMIKEGALGDSEAIFGMHVHTGLPTGELATISGPALASTSIFSVRMSGKSPASSETYSCVDPVLAASSTILALQLIISREVDPLLSHVLSVTFMKSGGSEFDVIPAYVEFGGTLRSLTTNGINWLIKRLKEVVEGQAEVQRCKADIDMHEDDHPMYPATVNDHKLHEFTEKVLKLLLGPEKVKPANKVMAGEDFAFYQQKIPGYYIGIGIRNEEIGSVRSVHSPYFFLDENVLPIGSATFAALAEMYLQEHQNQTKSGD

SEQ ID NO: 50689 - protein, 326 aa, Arabidopsis thaliana
  peptide (1)..(326): Ceres Seq. ID no. 12558819
  misc_feature (1)..(316): Pfam Name: Peptidase family M20/M25/M40 Pfam Description: Peptidase family M20/M25/M40
  misc_feature (1)..(322): Homolog of NCBI NO: 34914096 NR Description: putative IAA-Ala hydrolase
  misc_feature (1)..(318): Homolog of NCBI NO: 15233011 NR Description: IAA-amino acid hydrolase (ILR1)
  misc_feature (1)..(318): Homolog of NCBI NO: 21554648 NR Description: IAA-amino acid hydrolase (ILR1) [Arabidopsis
  misc_feature (1)..(318): Homolog of NCBI NO: 18129692 NR Description: IAA amidohydrolase [Arabidopsis suecica]
  misc_feature (1)..(322): Homolog of NCBI NO: 15218027 NR Description: IAA-Ala hydrolase (IAR3)
  misc_feature (1)..(318): Homolog of NCBI NO: 34900780 NR Description: putative IAA amidohydrolase
  misc_feature (1)..(318): Homolog of NCBI NO: 34900782 NR Description: putative IAA amidohydrolase
  misc_feature (1)..(318): Homolog of NCBI NO: 28376718 NR Description: putative  IAA amidohydrolase
  misc_feature (1)..(326): Homolog of NCBI NO: 21741848 NR Description: OSJNBa0019D11.19 [Oryza sativa (japonica
  misc_feature (1)..(326): Homolog of NCBI NO: 15239551 NR Description: IAA-amino acid hydrolase homolog ILL3
MDALPLQELVEWDHKSKIDGKMHACGHDSHTTMLLGAAKLLSKRKRMLNGTVRLLFQPAEEGGAGAFHMIKEGALGDSEAIFGMHVHTGLPTGELATISGPALASTSIFSVRMSGKSPASSETYSCVDPVLAASSTILALQLIISREVDPLLSHVLSVTFMKSGGSEFDVIPAYVEFGGTLRSLTTNGINWLIKRLKEVVEGQAEVQRCKADIDMHEDDHPMYPATVNDHKLHEFTEKVLKLLLGPEKVKPANKVMAGEDFAFYQQKIPGYYIGIGIRNEEIGSVRSVHSPYFFLDENVLPIGSATFAALAEMYLQEHQNQTKSGD

SEQ ID NO: 50690 - protein, 305 aa, Arabidopsis thaliana
  peptide (1)..(305): Ceres Seq. ID no. 12558820
  misc_feature (1)..(295): Pfam Name: Peptidase family M20/M25/M40 Pfam Description: Peptidase family M20/M25/M40
  misc_feature (1)..(301): Homolog of NCBI NO: 34914096 NR Description: putative IAA-Ala hydrolase
  misc_feature (1)..(297): Homolog of NCBI NO: 15233011 NR Description: IAA-amino acid hydrolase (ILR1)
  misc_feature (1)..(297): Homolog of NCBI NO: 21554648 NR Description: IAA-amino acid hydrolase (ILR1) [Arabidopsis
  misc_feature (1)..(297): Homolog of NCBI NO: 18129692 NR Description: IAA amidohydrolase [Arabidopsis suecica]
  misc_feature (1)..(301): Homolog of NCBI NO: 15218027 NR Description: IAA-Ala hydrolase (IAR3)
  misc_feature (1)..(297): Homolog of NCBI NO: 34900780 NR Description: putative IAA amidohydrolase
  misc_feature (1)..(297): Homolog of NCBI NO: 34900782 NR Description: putative IAA amidohydrolase
  misc_feature (1)..(297): Homolog of NCBI NO: 28376718 NR Description: putative  IAA amidohydrolase
  misc_feature (1)..(305): Homolog of NCBI NO: 21741848 NR Description: OSJNBa0019D11.19 [Oryza sativa (japonica
  misc_feature (1)..(305): Homolog of NCBI NO: 15239551 NR Description: IAA-amino acid hydrolase homolog ILL3
MHACGHDSHTTMLLGAAKLLSKRKRMLNGTVRLLFQPAEEGGAGAFHMIKEGALGDSEAIFGMHVHTGLPTGELATISGPALASTSIFSVRMSGKSPASSETYSCVDPVLAASSTILALQLIISREVDPLLSHVLSVTFMKSGGSEFDVIPAYVEFGGTLRSLTTNGINWLIKRLKEVVEGQAEVQRCKADIDMHEDDHPMYPATVNDHKLHEFTEKVLKLLLGPEKVKPANKVMAGEDFAFYQQKIPGYYIGIGIRNEEIGSVRSVHSPYFFLDENVLPIGSATFAALAEMYLQEHQNQTKSGD

SEQ ID NO: 50691 - DNA, 860 bp, Arabidopsis thaliana; identical to SEQ ID NO: 31045
  misc_feature (1)..(860): Ceres Seq. ID no. 13591956
  misc_feature: MA Experiment ID: 108561 Result: Down-regulated in Transcription
  misc_feature: MA Experiment 108561 PARAMETER Experiment Name: At_100uM_ABA_cDNA_P Parameter: Timepoint (hr) Value: 6
  misc_feature: MA Experiment 108561 PARAMETER Experiment Name: At_100uM_ABA_cDNA_P Parameter: Tissue Value: Aerial
  misc_feature: MA Experiment 108561 PARAMETER Experiment Name: At_100uM_ABA_cDNA_P Parameter: Treatment Value: 100uM ABA vs. No Treatment
  misc_feature: MA Experiment ID: 108572 Result: Down-regulated in Transcription
  misc_feature: MA Experiment 108572 PARAMETER Experiment Name: At_Drought_cDNA_P Parameter: Timepoint (hr) Value: 1
  misc_feature: MA Experiment 108572 PARAMETER Experiment Name: At_Drought_cDNA_P Parameter: Tissue Value: Aerial
  misc_feature: MA Experiment 108572 PARAMETER Experiment Name: At_Drought_cDNA_P Parameter: Treatment Value: Drought vs. No Drought
  misc_feature: MA Experiment ID: 108573 Result: Down-regulated in Transcription
  misc_feature: MA Experiment 108573 PARAMETER Experiment Name: At_Drought_cDNA_P Parameter: Timepoint (hr) Value: 6
  misc_feature: MA Experiment 108573 PARAMETER Experiment Name: At_Drought_cDNA_P Parameter: Tissue Value: Aerial
  misc_feature: MA Experiment 108573 PARAMETER Experiment Name: At_Drought_cDNA_P Parameter: Treatment Value: Drought vs. No Drought
  misc_feature: MA Experiment ID: 108577 Result: Down-regulated in Transcription
  misc_feature: MA Experiment 108577 PARAMETER Experiment Name: At_42deg_Heat_cDNA_P Parameter: Temperature (deg C) Value: 42 vs. 22
  misc_feature: MA Experiment 108577 PARAMETER Experiment Name: At_42deg_Heat_cDNA_P Parameter: Timepoint (hr) Value: 6
  misc_feature: MA Experiment 108577 PARAMETER Experiment Name: At_42deg_Heat_cDNA_P Parameter: Tissue Value: Aerial
  misc_feature: MA Experiment ID: 108595 Result: Down-regulated in Transcription
  misc_feature: MA Experiment 108595 PARAMETER Experiment Name: At_Ler-pi_Ovule_cDNA_P Parameter: Plant Line Value: null
  misc_feature: MA Experiment ID: 20000173 Result: Down-regulated in Transcription
  misc_feature: MA Experiment 20000173 PARAMETER Experiment Name: At_42deg_Heat_P Parameter: Age (day) Value: 14
  misc_feature: MA Experiment 20000173 PARAMETER Experiment Name: At_42deg_Heat_P Parameter: Organism Value: A. thaliana
  misc_feature: MA Experiment 20000173 PARAMETER Experiment Name: At_42deg_Heat_P Parameter: Plant Line Value: WS
  misc_feature: MA Experiment 20000173 PARAMETER Experiment Name: At_42deg_Heat_P Parameter: Temperature (deg C) Value: 42 vs. 22
  misc_feature: MA Experiment 20000173 PARAMETER Experiment Name: At_42deg_Heat_P Parameter: Timepoint (hr) Value: 6
  misc_feature: MA Experiment 20000173 PARAMETER Experiment Name: At_42deg_Heat_P Parameter: Tissue Value: Aerial
  misc_feature: MA Experiment ID: 20000179 Result: Down-regulated in Transcription
  misc_feature: MA Experiment 20000179 PARAMETER Experiment Name: At_Germinating_Seeds_P Parameter: Age (hr) Value: 6 vs. 0
  misc_feature: MA Experiment 20000179 PARAMETER Experiment Name: At_Germinating_Seeds_P Parameter: Tissue Value: Germinating Seeds
  misc_feature: MA Experiment ID: 20000185 Result: Down-regulated in Transcription
  misc_feature: MA Experiment 20000185 PARAMETER Experiment Name: At_Roots__P Parameter: Age (day) Value: 7 vs. 21
  misc_feature: MA Experiment 20000185 PARAMETER Experiment Name: At_Roots__P Parameter: Organism Value: A. thaliana
  misc_feature: MA Experiment 20000185 PARAMETER Experiment Name: At_Roots__P Parameter: Tissue Value: Roots vs. Whole Plant
  misc_feature: MA Experiment ID: 20000264 Result: Down-regulated in Transcription
  misc_feature: MA Experiment 20000264 PARAMETER Experiment Name: At_Open_Flower_P Parameter: Age (day) Value: 21
  misc_feature: MA Experiment 20000264 PARAMETER Experiment Name: At_Open_Flower_P Parameter: Plant Line Value: WS
  misc_feature: MA Experiment 20000264 PARAMETER Experiment Name: At_Open_Flower_P Parameter: Tissue Value: Open Flower vs. Whole Plant
  misc_feature: MA Experiment ID: 20000268 Result: Down-regulated in Transcription
  misc_feature: MA Experiment 20000268 PARAMETER Experiment Name: At_100mM_NaCl__P Parameter: Age (day) Value: 14
  misc_feature: MA Experiment 20000268 PARAMETER Experiment Name: At_100mM_NaCl__P Parameter: Organism Value: A. thaliana
  misc_feature: MA Experiment 20000268 PARAMETER Experiment Name: At_100mM_NaCl__P Parameter: Plant Line Value: WS
  misc_feature: MA Experiment 20000268 PARAMETER Experiment Name: At_100mM_NaCl__P Parameter: Timepoint (hr) Value: 6
  misc_feature: MA Experiment 20000268 PARAMETER Experiment Name: At_100mM_NaCl__P Parameter: Tissue Value: Whole Plant
  misc_feature: MA Experiment 20000268 PARAMETER Experiment Name: At_100mM_NaCl__P Parameter: Treatment Value: 100mM NaCl vs. No Treatment
  misc_feature: MA Experiment ID: 20000286 Result: Down-regulated in Transcription
  misc_feature: MA Experiment 20000286 PARAMETER Experiment Name: At_Open_Flower_P Parameter: Age (day) Value: 21
  misc_feature: MA Experiment 20000286 PARAMETER Experiment Name: At_Open_Flower_P Parameter: Plant Line Value: WS
  misc_feature: MA Experiment 20000286 PARAMETER Experiment Name: At_Open_Flower_P Parameter: Tissue Value: Half Open vs. Whole Plant
  misc_feature: MA Experiment ID: 20000436 Result: Down-regulated in Transcription
  misc_feature: MA Experiment 20000436 PARAMETER Experiment Name: At_Drought_P Parameter: Age (day) Value: 7
  misc_feature: MA Experiment 20000436 PARAMETER Experiment Name: At_Drought_P Parameter: Organism Value: A. thaliana
  misc_feature: MA Experiment 20000436 PARAMETER Experiment Name: At_Drought_P Parameter: Plant Line Value: WS
  misc_feature: MA Experiment 20000436 PARAMETER Experiment Name: At_Drought_P Parameter: Timepoint (hr) Value: 12
  misc_feature: MA Experiment 20000436 PARAMETER Experiment Name: At_Drought_P Parameter: Tissue Value: Whole Plant
  misc_feature: MA Experiment 20000436 PARAMETER Experiment Name: At_Drought_P Parameter: Treatment Value: Drought vs. No Drought
  misc_feature: MA Experiment ID: 20000437 Result: Down-regulated in Transcription
  misc_feature: MA Experiment 20000437 PARAMETER Experiment Name: At_Drought_P Parameter: Age (day) Value: 8
  misc_feature: MA Experiment 20000437 PARAMETER Experiment Name: At_Drought_P Parameter: Organism Value: A. thaliana
  misc_feature: MA Experiment 20000437 PARAMETER Experiment Name: At_Drought_P Parameter: Plant Line Value: WS
  misc_feature: MA Experiment 20000437 PARAMETER Experiment Name: At_Drought_P Parameter: Timepoint (hr) Value: 24
  misc_feature: MA Experiment 20000437 PARAMETER Experiment Name: At_Drought_P Parameter: Tissue Value: Whole Plant
  misc_feature: MA Experiment 20000437 PARAMETER Experiment Name: At_Drought_P Parameter: Treatment Value: Drought vs. No Drought
  misc_feature: MA Experiment ID: 20000439 Result: Down-regulated in Transcription
  misc_feature: MA Experiment 20000439 PARAMETER Experiment Name: At_Roots__P Parameter: Age (day) Value: 14 vs. 21
  misc_feature: MA Experiment 20000439 PARAMETER Experiment Name: At_Roots__P Parameter: Organism Value: A. thaliana
  misc_feature: MA Experiment 20000439 PARAMETER Experiment Name: At_Roots__P Parameter: Tissue Value: Roots vs. Whole Plant
  misc_feature: MA Experiment ID: 20000794 Result: Down-regulated in Transcription
  misc_feature: MA Experiment 20000794 PARAMETER Experiment Name: At_Petals_P Parameter: Age (day) Value: 23-25 days
  misc_feature: MA Experiment 20000794 PARAMETER Experiment Name: At_Petals_P Parameter: Plant Line Value: WS
  misc_feature: MA Experiment 20000794 PARAMETER Experiment Name: At_Petals_P Parameter: Tissue Value: Petals vs. Whole plant
  misc_feature: MA Experiment ID: 20001554 Result: Down-regulated in Transcription
  misc_feature: MA Experiment 20001554 PARAMETER Experiment Name: At_Drought_Soil_Dry_P Parameter: Age (day) Value: 21
  misc_feature: MA Experiment 20001554 PARAMETER Experiment Name: At_Drought_Soil_Dry_P Parameter: Organism Value: A. thaliana
  misc_feature: MA Experiment 20001554 PARAMETER Experiment Name: At_Drought_Soil_Dry_P Parameter: Plant Line Value: WS
  misc_feature: MA Experiment 20001554 PARAMETER Experiment Name: At_Drought_Soil_Dry_P Parameter: Post Timepoint (hr) Value: None
  misc_feature: MA Experiment 20001554 PARAMETER Experiment Name: At_Drought_Soil_Dry_P Parameter: Post-Treatment Value: None
  misc_feature: MA Experiment 20001554 PARAMETER Experiment Name: At_Drought_Soil_Dry_P Parameter: Timepoint (day) Value: 7
  misc_feature: MA Experiment 20001554 PARAMETER Experiment Name: At_Drought_Soil_Dry_P Parameter: Treatment Value: Drought vs. No Drought
  misc_feature: MA Experiment ID: 20001555 Result: Down-regulated in Transcription
  misc_feature: MA Experiment 20001555 PARAMETER Experiment Name: At_Drought_Soil_Dry_P Parameter: Age (day) Value: 24
  misc_feature: MA Experiment 20001555 PARAMETER Experiment Name: At_Drought_Soil_Dry_P Parameter: Organism Value: A. thaliana
  misc_feature: MA Experiment 20001555 PARAMETER Experiment Name: At_Drought_Soil_Dry_P Parameter: Plant Line Value: WS
  misc_feature: MA Experiment 20001555 PARAMETER Experiment Name: At_Drought_Soil_Dry_P Parameter: Post Timepoint (hr) Value: None
  misc_feature: MA Experiment 20001555 PARAMETER Experiment Name: At_Drought_Soil_Dry_P Parameter: Post-Treatment Value: None
  misc_feature: MA Experiment 20001555 PARAMETER Experiment Name: At_Drought_Soil_Dry_P Parameter: Timepoint (day) Value: 10
  misc_feature: MA Experiment 20001555 PARAMETER Experiment Name: At_Drought_Soil_Dry_P Parameter: Treatment Value: Drought vs. No Drought
  misc_feature: MA Experiment ID: 20001556 Result: Down-regulated in Transcription
  misc_feature: MA Experiment 20001556 PARAMETER Experiment Name: At_Drought_Soil_Dry_P Parameter: Age (day) Value: 26
  misc_feature: MA Experiment 20001556 PARAMETER Experiment Name: At_Drought_Soil_Dry_P Parameter: Organism Value: A. thaliana
  misc_feature: MA Experiment 20001556 PARAMETER Experiment Name: At_Drought_Soil_Dry_P Parameter: Plant Line Value: WS
  misc_feature: MA Experiment 20001556 PARAMETER Experiment Name: At_Drought_Soil_Dry_P Parameter: Post Timepoint (hr) Value: None
  misc_feature: MA Experiment 20001556 PARAMETER Experiment Name: At_Drought_Soil_Dry_P Parameter: Post-Treatment Value: None
  misc_feature: MA Experiment 20001556 PARAMETER Experiment Name: At_Drought_Soil_Dry_P Parameter: Timepoint (day) Value: 12
  misc_feature: MA Experiment 20001556 PARAMETER Experiment Name: At_Drought_Soil_Dry_P Parameter: Treatment Value: Drought vs. No Drought
  misc_feature: MA Experiment ID: 20001557 Result: Up-regulated in Transcription
  misc_feature: MA Experiment 20001557 PARAMETER Experiment Name: At_Drought_Soil_Dry_P Parameter: Age (day) Value: 27
  misc_feature: MA Experiment 20001557 PARAMETER Experiment Name: At_Drought_Soil_Dry_P Parameter: Organism Value: A. thaliana
  misc_feature: MA Experiment 20001557 PARAMETER Experiment Name: At_Drought_Soil_Dry_P Parameter: Plant Line Value: WS
  misc_feature: MA Experiment 20001557 PARAMETER Experiment Name: At_Drought_Soil_Dry_P Parameter: Post Timepoint (hr) Value: 3
  misc_feature: MA Experiment 20001557 PARAMETER Experiment Name: At_Drought_Soil_Dry_P Parameter: Post-Treatment Value: Re-Water vs. No Drought
  misc_feature: MA Experiment 20001557 PARAMETER Experiment Name: At_Drought_Soil_Dry_P Parameter: Timepoint (day) Value: 13
  misc_feature: MA Experiment 20001557 PARAMETER Experiment Name: At_Drought_Soil_Dry_P Parameter: Treatment Value: Drought vs. No Drought
  misc_feature: MA Experiment ID: 20001756 Result: Up-regulated in Transcription
  misc_feature: MA Experiment 20001756 PARAMETER Experiment Name: At_50mM_NH4NO3_L-to-H_P Parameter: Timepoint (hr) Value: 4
  misc_feature: MA Experiment 20001756 PARAMETER Experiment Name: At_50mM_NH4NO3_L-to-H_P Parameter: Tissue Value: Leaf
  misc_feature: MA Experiment 20001756 PARAMETER Experiment Name: At_50mM_NH4NO3_L-to-H_P Parameter: Treatment Value: 50mM NH4NO3 vs 100mM Mannitol
  misc_feature: MA Experiment ID: 20001757 Result: Up-regulated in Transcription
  misc_feature: MA Experiment 20001757 PARAMETER Experiment Name: At_50mM_NH4NO3_L-to-H_P Parameter: Timepoint (hr) Value: 6
  misc_feature: MA Experiment 20001757 PARAMETER Experiment Name: At_50mM_NH4NO3_L-to-H_P Parameter: Tissue Value: Leaf
  misc_feature: MA Experiment 20001757 PARAMETER Experiment Name: At_50mM_NH4NO3_L-to-H_P Parameter: Treatment Value: 50mM NH4NO3 vs 100mM Mannitol
  misc_feature: MA Experiment ID: 20001904 Result: Down-regulated in Transcription
  misc_feature: MA Experiment 20001904 PARAMETER Experiment Name: At_Drought_Reproduction_P Parameter: Age (day) Value: 37
  misc_feature: MA Experiment 20001904 PARAMETER Experiment Name: At_Drought_Reproduction_P Parameter: Organism Value: A. thaliana
  misc_feature: MA Experiment 20001904 PARAMETER Experiment Name: At_Drought_Reproduction_P Parameter: Plant Line Value: WS
  misc_feature: MA Experiment 20001904 PARAMETER Experiment Name: At_Drought_Reproduction_P Parameter: Timepoint (day) Value: 7
  misc_feature: MA Experiment 20001904 PARAMETER Experiment Name: At_Drought_Reproduction_P Parameter: Tissue Value: Rosettes
  misc_feature: MA Experiment 20001904 PARAMETER Experiment Name: At_Drought_Reproduction_P Parameter: Treatment Value: Drought vs. No Drought
  misc_feature: MA Experiment ID: 20001906 Result: Down-regulated in Transcription
  misc_feature: MA Experiment 20001906 PARAMETER Experiment Name: At_Drought_Reproduction_P Parameter: Age (day) Value: 35
  misc_feature: MA Experiment 20001906 PARAMETER Experiment Name: At_Drought_Reproduction_P Parameter: Organism Value: A. thaliana
  misc_feature: MA Experiment 20001906 PARAMETER Experiment Name: At_Drought_Reproduction_P Parameter: Plant Line Value: WS
  misc_feature: MA Experiment 20001906 PARAMETER Experiment Name: At_Drought_Reproduction_P Parameter: Timepoint (day) Value: 5
  misc_feature: MA Experiment 20001906 PARAMETER Experiment Name: At_Drought_Reproduction_P Parameter: Tissue Value: Siliques
  misc_feature: MA Experiment 20001906 PARAMETER Experiment Name: At_Drought_Reproduction_P Parameter: Treatment Value: Drought vs. No Drought

SEQ ID NO: 50692 - protein, 208 aa, Arabidopsis thaliana; identical to SEQ ID NO: 23207
  peptide (1)..(208): Ceres Seq. ID no. 13591957
  misc_feature (52)..(198): Pfam Name: Cupin Pfam Description: Cupin
  misc_feature (52)..(198): Pfam Name: Cupin Pfam Description: Cupin
  misc_feature (52)..(198): Pfam Name: Cupin Pfam Description: Cupin
  misc_feature (52)..(198): Pfam Name: Cupin Pfam Description: Cupin
  misc_feature (6)..(207): Homolog of NCBI NO: 18201941 NR Description: Auxin-binding protein ABP19b precursor
  misc_feature (1)..(207): Homolog of NCBI NO: 15242028 NR Description: germin-like protein (AtGER3) [Arabidopsis
  misc_feature (6)..(207): Homolog of NCBI NO: 18203684 NR Description: Auxin-binding protein ABP19a precursor
  misc_feature (5)..(207): Homolog of NCBI NO: 18201940 NR Description: Auxin-binding protein ABP20 precursor
  misc_feature (1)..(208): Homolog of NCBI NO: 13277342 NR Description: Germin-like protein [Pisum sativum]
  misc_feature (6)..(207): Homolog of NCBI NO: 18201941 NR Description: Auxin-binding protein ABP19b precursor
  misc_feature (6)..(207): Homolog of NCBI NO: 18203684 NR Description: Auxin-binding protein ABP19a precursor
  misc_feature (1)..(208): Homolog of NCBI NO: 13277342 NR Description: Germin-like protein [Pisum sativum]
  misc_feature (5)..(207): Homolog of NCBI NO: 18201940 NR Description: Auxin-binding protein ABP20 precursor
  misc_feature (6)..(207): Homolog of NCBI NO: 18203684 NR Description: Auxin-binding protein ABP19a precursor
  misc_feature (1)..(207): Homolog of NCBI NO: 15242028 NR Description: germin-like protein (AtGER3) [Arabidopsis
  misc_feature (6)..(207): Homolog of NCBI NO: 18201941 NR Description: Auxin-binding protein ABP19b precursor
  misc_feature (1)..(208): Homolog of NCBI NO: 15218535 NR Description: germin-like protein (AtGER1) [Arabidopsis
  misc_feature (1)..(208): Homolog of NCBI NO: 17473703 NR Description: germin-like protein [Arabidopsis thaliana]
  misc_feature (1)..(208): Homolog of NCBI NO: 1592672 NR Description: germin1 [Arabidopsis thaliana]
  misc_feature (5)..(208): Homolog of NCBI NO: 1934726 NR Description: germin-like protein [Arabidopsis thaliana]
  misc_feature (1)..(208): Homolog of NCBI NO: 1169941 NR Description: Germin-like protein 1 precursor
  misc_feature (1)..(208): Homolog of NCBI NO: 15218535 NR Description: germin-like protein (AtGER1) [Arabidopsis
  misc_feature (1)..(208): Homolog of NCBI NO: 17473703 NR Description: germin-like protein [Arabidopsis thaliana]
  misc_feature (1)..(208): Homolog of NCBI NO: 1592672 NR Description: germin1 [Arabidopsis thaliana]
  misc_feature (5)..(208): Homolog of NCBI NO: 1934726 NR Description: germin-like protein [Arabidopsis thaliana]
  misc_feature (1)..(208): Homolog of NCBI NO: 1169941 NR Description: Germin-like protein 1 precursor
  misc_feature (1)..(208): Homolog of NCBI NO: 13277342 NR Description: Germin-like protein [Pisum sativum]
  misc_feature (5)..(207): Homolog of NCBI NO: 18201940 NR Description: Auxin-binding protein ABP20 precursor
  misc_feature (6)..(207): Homolog of NCBI NO: 18203684 NR Description: Auxin-binding protein ABP19a precursor
  misc_feature (1)..(207): Homolog of NCBI NO: 15242028 NR Description: germin-like protein (AtGER3) [Arabidopsis
  misc_feature (6)..(207): Homolog of NCBI NO: 18201941 NR Description: Auxin-binding protein ABP19b precursor
  misc_feature (1)..(208): Homolog of NCBI NO: 15218535 NR Description: germin-like protein (AtGER1) [Arabidopsis
  misc_feature (1)..(208): Homolog of NCBI NO: 17473703 NR Description: germin-like protein [Arabidopsis thaliana]
  misc_feature (1)..(208): Homolog of NCBI NO: 1592672 NR Description: germin1 [Arabidopsis thaliana]
  misc_feature (5)..(208): Homolog of NCBI NO: 1934726 NR Description: germin-like protein [Arabidopsis thaliana]
  misc_feature (1)..(208): Homolog of NCBI NO: 1169941 NR Description: Germin-like protein 1 precursor
  misc_feature (1)..(208): Homolog of NCBI NO: 13277342 NR Description: Germin-like protein [Pisum sativum]
  misc_feature (5)..(207): Homolog of NCBI NO: 18201940 NR Description: Auxin-binding protein ABP20 precursor
  misc_feature (1)..(207): Homolog of NCBI NO: 15242028 NR Description: germin-like protein (AtGER3) [Arabidopsis
  misc_feature (1)..(208): Homolog of NCBI NO: 1169941 NR Description: Germin-like protein 1 precursor
  misc_feature (5)..(208): Homolog of NCBI NO: 1934726 NR Description: germin-like protein [Arabidopsis thaliana]
  misc_feature (1)..(208): Homolog of NCBI NO: 1592672 NR Description: germin1 [Arabidopsis thaliana]
  misc_feature (1)..(208): Homolog of NCBI NO: 17473703 NR Description: germin-like protein [Arabidopsis thaliana]
  misc_feature (1)..(208): Homolog of NCBI NO: 15218535 NR Description: germin-like protein (AtGER1) [Arabidopsis

SEQ ID NO: 50693 - protein, 110 aa, Arabidopsis thaliana; identical to SEQ ID NO: 31047
  peptide (1)..(110): Ceres Seq. ID no. 13591958
  misc_feature (1)..(100): Pfam Name: Cupin Pfam Description: Cupin
  misc_feature (1)..(100): Pfam Name: Cupin Pfam Description: Cupin
  misc_feature (1)..(100): Pfam Name: Cupin Pfam Description: Cupin
  misc_feature (1)..(100): Pfam Name: Cupin Pfam Description: Cupin
  misc_feature (1)..(109): Homolog of NCBI NO: 18201941 NR Description: Auxin-binding protein ABP19b precursor
  misc_feature (1)..(109): Homolog of NCBI NO: 15242028 NR Description: germin-like protein (AtGER3) [Arabidopsis
  misc_feature (1)..(109): Homolog of NCBI NO: 18203684 NR Description: Auxin-binding protein ABP19a precursor
  misc_feature (1)..(109): Homolog of NCBI NO: 18201940 NR Description: Auxin-binding protein ABP20 precursor
  misc_feature (1)..(110): Homolog of NCBI NO: 13277342 NR Description: Germin-like protein [Pisum sativum]
  misc_feature (1)..(109): Homolog of NCBI NO: 18201941 NR Description: Auxin-binding protein ABP19b precursor
  misc_feature (1)..(109): Homolog of NCBI NO: 18203684 NR Description: Auxin-binding protein ABP19a precursor
  misc_feature (1)..(110): Homolog of NCBI NO: 13277342 NR Description: Germin-like protein [Pisum sativum]
  misc_feature (1)..(109): Homolog of NCBI NO: 18201940 NR Description: Auxin-binding protein ABP20 precursor
  misc_feature (1)..(109): Homolog of NCBI NO: 18203684 NR Description: Auxin-binding protein ABP19a precursor
  misc_feature (1)..(109): Homolog of NCBI NO: 15242028 NR Description: germin-like protein (AtGER3) [Arabidopsis
  misc_feature (1)..(109): Homolog of NCBI NO: 18201941 NR Description: Auxin-binding protein ABP19b precursor
  misc_feature (1)..(110): Homolog of NCBI NO: 15218535 NR Description: germin-like protein (AtGER1) [Arabidopsis
  misc_feature (1)..(110): Homolog of NCBI NO: 17473703 NR Description: germin-like protein [Arabidopsis thaliana]
  misc_feature (1)..(110): Homolog of NCBI NO: 1592672 NR Description: germin1 [Arabidopsis thaliana]
  misc_feature (1)..(110): Homolog of NCBI NO: 1934726 NR Description: germin-like protein [Arabidopsis thaliana]
  misc_feature (1)..(110): Homolog of NCBI NO: 1169941 NR Description: Germin-like protein 1 precursor
  misc_feature (1)..(110): Homolog of NCBI NO: 15218535 NR Description: germin-like protein (AtGER1) [Arabidopsis
  misc_feature (1)..(110): Homolog of NCBI NO: 17473703 NR Description: germin-like protein [Arabidopsis thaliana]
  misc_feature (1)..(110): Homolog of NCBI NO: 1592672 NR Description: germin1 [Arabidopsis thaliana]
  misc_feature (1)..(110): Homolog of NCBI NO: 1934726 NR Description: germin-like protein [Arabidopsis thaliana]
  misc_feature (1)..(110): Homolog of NCBI NO: 1169941 NR Description: Germin-like protein 1 precursor
  misc_feature (1)..(110): Homolog of NCBI NO: 13277342 NR Description: Germin-like protein [Pisum sativum]
  misc_feature (1)..(109): Homolog of NCBI NO: 18201940 NR Description: Auxin-binding protein ABP20 precursor
  misc_feature (1)..(109): Homolog of NCBI NO: 18203684 NR Description: Auxin-binding protein ABP19a precursor
  misc_feature (1)..(109): Homolog of NCBI NO: 15242028 NR Description: germin-like protein (AtGER3) [Arabidopsis
  misc_feature (1)..(109): Homolog of NCBI NO: 18201941 NR Description: Auxin-binding protein ABP19b precursor
  misc_feature (1)..(110): Homolog of NCBI NO: 15218535 NR Description: germin-like protein (AtGER1) [Arabidopsis
  misc_feature (1)..(110): Homolog of NCBI NO: 17473703 NR Description: germin-like protein [Arabidopsis thaliana]
  misc_feature (1)..(110): Homolog of NCBI NO: 1592672 NR Description: germin1 [Arabidopsis thaliana]
  misc_feature (1)..(110): Homolog of NCBI NO: 1934726 NR Description: germin-like protein [Arabidopsis thaliana]
  misc_feature (1)..(110): Homolog of NCBI NO: 1169941 NR Description: Germin-like protein 1 precursor
  misc_feature (1)..(110): Homolog of NCBI NO: 13277342 NR Description: Germin-like protein [Pisum sativum]
  misc_feature (1)..(109): Homolog of NCBI NO: 18201940 NR Description: Auxin-binding protein ABP20 precursor
  misc_feature (1)..(109): Homolog of NCBI NO: 15242028 NR Description: germin-like protein (AtGER3) [Arabidopsis
  misc_feature (1)..(110): Homolog of NCBI NO: 1169941 NR Description: Germin-like protein 1 precursor
  misc_feature (1)..(110): Homolog of NCBI NO: 1934726 NR Description: germin-like protein [Arabidopsis thaliana]
  misc_feature (1)..(110): Homolog of NCBI NO: 1592672 NR Description: germin1 [Arabidopsis thaliana]
  misc_feature (1)..(110): Homolog of NCBI NO: 17473703 NR Description: germin-like protein [Arabidopsis thaliana]
  misc_feature (1)..(110): Homolog of NCBI NO: 15218535 NR Description: germin-like protein (AtGER1) [Arabidopsis

SEQ ID NO: 50694 - DNA, 1701 bp, Arabidopsis thaliana; identical to SEQ ID NO: 47297
  misc_feature (1)..(1701): Ceres Seq. ID no. 13592655
  misc_feature: MA Experiment ID: 20000307 Result: Up-regulated in Transcription
  misc_feature: MA Experiment 20000307 PARAMETER Experiment Name: At_Germinating_Seeds_Sub_P Parameter: Age (hr) Value: 24 vs. 0
  misc_feature: MA Experiment 20000307 PARAMETER Experiment Name: At_Germinating_Seeds_Sub_P Parameter: Organism Value: A. thaliana
  misc_feature: MA Experiment 20000307 PARAMETER Experiment Name: At_Germinating_Seeds_Sub_P Parameter: Plant Line Value: WS
  misc_feature: MA Experiment 20000307 PARAMETER Experiment Name: At_Germinating_Seeds_Sub_P Parameter: Tissue Value: Germinating Seeds

SEQ ID NO: 50695 - protein, 445 aa, Arabidopsis thaliana; identical to SEQ ID NO: 47298
  peptide (1)..(445): Ceres Seq. ID no. 13592656
  misc_feature (121)..(425): Pfam Name: NAD dependent epimerase/dehydratase family Pfam Description: NAD dependent epimerase/dehydratase family
  misc_feature (121)..(425): Pfam Name: NAD dependent epimerase/dehydratase family Pfam Description: NAD dependent epimerase/dehydratase family
  misc_feature (77)..(167): Homolog of NCBI NO: 34908082 NR Description: P0506B12.30 [Oryza sativa (japonica
  misc_feature (208)..(428): Homolog of NCBI NO: 34908082 NR Description: P0506B12.30 [Oryza sativa (japonica
  misc_feature (1)..(432): Homolog of NCBI NO: 30693847 NR Description: NAD-dependent epimerase/dehydratase family
  misc_feature (37)..(71): Homolog of NCBI NO: 25396402 NR Description: UDP-glucuronic acid decarboxylase
  misc_feature (77)..(428): Homolog of NCBI NO: 25396402 NR Description: UDP-glucuronic acid decarboxylase
  misc_feature (77)..(167): Homolog of NCBI NO: 34908082 NR Description: P0506B12.30 [Oryza sativa (japonica
  misc_feature (1)..(432): Homolog of NCBI NO: 30693847 NR Description: NAD-dependent epimerase/dehydratase family
  misc_feature (77)..(428): Homolog of NCBI NO: 25396402 NR Description: UDP-glucuronic acid decarboxylase
  misc_feature (1)..(445): Homolog of NCBI NO: 15229334 NR Description: NAD-dependent epimerase/dehydratase family
  misc_feature (1)..(445): Homolog of NCBI NO: 2129578 NR Description: dTDP-glucose 4-6-dehydratase homolog D18 -
  misc_feature (1)..(441): Homolog of NCBI NO: 15227109 NR Description: NAD-dependent epimerase/dehydratase family
  misc_feature (1)..(432): Homolog of NCBI NO: 17473549 NR Description: dTDP-glucose 4-6-dehydratase-like protein
  misc_feature (1)..(432): Homolog of NCBI NO: 11270116 NR Description: dTDP-glucose 4-6-dehydratase-like protein -
  misc_feature (37)..(71): Homolog of NCBI NO: 25396402 NR Description: UDP-glucuronic acid decarboxylase
  misc_feature (208)..(428): Homolog of NCBI NO: 34908082 NR Description: P0506B12.30 [Oryza sativa (japonica
  misc_feature (1)..(432): Homolog of NCBI NO: 11270116 NR Description: dTDP-glucose 4-6-dehydratase-like protein -
  misc_feature (1)..(432): Homolog of NCBI NO: 17473549 NR Description: dTDP-glucose 4-6-dehydratase-like protein
  misc_feature (1)..(441): Homolog of NCBI NO: 15227109 NR Description: NAD-dependent epimerase/dehydratase family
  misc_feature (1)..(445): Homolog of NCBI NO: 2129578 NR Description: dTDP-glucose 4-6-dehydratase homolog D18 -
  misc_feature (1)..(445): Homolog of NCBI NO: 15229334 NR Description: NAD-dependent epimerase/dehydratase family

SEQ ID NO: 50696 - protein, 411 aa, Arabidopsis thaliana; identical to SEQ ID NO: 47299
  peptide (1)..(411): Ceres Seq. ID no. 13592657
  misc_feature (87)..(391): Pfam Name: NAD dependent epimerase/dehydratase family Pfam Description: NAD dependent epimerase/dehydratase family
  misc_feature (87)..(391): Pfam Name: NAD dependent epimerase/dehydratase family Pfam Description: NAD dependent epimerase/dehydratase family
  misc_feature (43)..(133): Homolog of NCBI NO: 34908082 NR Description: P0506B12.30 [Oryza sativa (japonica
  misc_feature (174)..(394): Homolog of NCBI NO: 34908082 NR Description: P0506B12.30 [Oryza sativa (japonica
  misc_feature (1)..(398): Homolog of NCBI NO: 30693847 NR Description: NAD-dependent epimerase/dehydratase family
  misc_feature (3)..(37): Homolog of NCBI NO: 25396402 NR Description: UDP-glucuronic acid decarboxylase
  misc_feature (43)..(394): Homolog of NCBI NO: 25396402 NR Description: UDP-glucuronic acid decarboxylase
  misc_feature (43)..(133): Homolog of NCBI NO: 34908082 NR Description: P0506B12.30 [Oryza sativa (japonica
  misc_feature (1)..(398): Homolog of NCBI NO: 30693847 NR Description: NAD-dependent epimerase/dehydratase family
  misc_feature (43)..(394): Homolog of NCBI NO: 25396402 NR Description: UDP-glucuronic acid decarboxylase
  misc_feature (1)..(411): Homolog of NCBI NO: 15229334 NR Description: NAD-dependent epimerase/dehydratase family
  misc_feature (1)..(411): Homolog of NCBI NO: 2129578 NR Description: dTDP-glucose 4-6-dehydratase homolog D18 -
  misc_feature (1)..(407): Homolog of NCBI NO: 15227109 NR Description: NAD-dependent epimerase/dehydratase family
  misc_feature (1)..(398): Homolog of NCBI NO: 17473549 NR Description: dTDP-glucose 4-6-dehydratase-like protein
  misc_feature (1)..(398): Homolog of NCBI NO: 11270116 NR Description: dTDP-glucose 4-6-dehydratase-like protein -
  misc_feature (3)..(37): Homolog of NCBI NO: 25396402 NR Description: UDP-glucuronic acid decarboxylase
  misc_feature (174)..(394): Homolog of NCBI NO: 34908082 NR Description: P0506B12.30 [Oryza sativa (japonica
  misc_feature (1)..(398): Homolog of NCBI NO: 11270116 NR Description: dTDP-glucose 4-6-dehydratase-like protein -
  misc_feature (1)..(398): Homolog of NCBI NO: 17473549 NR Description: dTDP-glucose 4-6-dehydratase-like protein
  misc_feature (1)..(407): Homolog of NCBI NO: 15227109 NR Description: NAD-dependent epimerase/dehydratase family
  misc_feature (1)..(411): Homolog of NCBI NO: 2129578 NR Description: dTDP-glucose 4-6-dehydratase homolog D18 -
  misc_feature (1)..(411): Homolog of NCBI NO: 15229334 NR Description: NAD-dependent epimerase/dehydratase family

SEQ ID NO: 50697 - protein, 408 aa, Arabidopsis thaliana; identical to SEQ ID NO: 47300
  peptide (1)..(408): Ceres Seq. ID no. 13592658
  misc_feature (84)..(388): Pfam Name: NAD dependent epimerase/dehydratase family Pfam Description: NAD dependent epimerase/dehydratase family
  misc_feature (84)..(388): Pfam Name: NAD dependent epimerase/dehydratase family Pfam Description: NAD dependent epimerase/dehydratase family
  misc_feature (40)..(130): Homolog of NCBI NO: 34908082 NR Description: P0506B12.30 [Oryza sativa (japonica
  misc_feature (171)..(391): Homolog of NCBI NO: 34908082 NR Description: P0506B12.30 [Oryza sativa (japonica
  misc_feature (1)..(395): Homolog of NCBI NO: 30693847 NR Description: NAD-dependent epimerase/dehydratase family
  misc_feature (1)..(34): Homolog of NCBI NO: 25396402 NR Description: UDP-glucuronic acid decarboxylase
  misc_feature (40)..(391): Homolog of NCBI NO: 25396402 NR Description: UDP-glucuronic acid decarboxylase
  misc_feature (40)..(130): Homolog of NCBI NO: 34908082 NR Description: P0506B12.30 [Oryza sativa (japonica
  misc_feature (1)..(395): Homolog of NCBI NO: 30693847 NR Description: NAD-dependent epimerase/dehydratase family
  misc_feature (40)..(391): Homolog of NCBI NO: 25396402 NR Description: UDP-glucuronic acid decarboxylase
  misc_feature (1)..(408): Homolog of NCBI NO: 15229334 NR Description: NAD-dependent epimerase/dehydratase family
  misc_feature (1)..(408): Homolog of NCBI NO: 2129578 NR Description: dTDP-glucose 4-6-dehydratase homolog D18 -
  misc_feature (1)..(404): Homolog of NCBI NO: 15227109 NR Description: NAD-dependent epimerase/dehydratase family
  misc_feature (1)..(395): Homolog of NCBI NO: 17473549 NR Description: dTDP-glucose 4-6-dehydratase-like protein
  misc_feature (1)..(395): Homolog of NCBI NO: 11270116 NR Description: dTDP-glucose 4-6-dehydratase-like protein -
  misc_feature (1)..(34): Homolog of NCBI NO: 25396402 NR Description: UDP-glucuronic acid decarboxylase
  misc_feature (171)..(391): Homolog of NCBI NO: 34908082 NR Description: P0506B12.30 [Oryza sativa (japonica
  misc_feature (1)..(395): Homolog of NCBI NO: 11270116 NR Description: dTDP-glucose 4-6-dehydratase-like protein -
  misc_feature (1)..(395): Homolog of NCBI NO: 17473549 NR Description: dTDP-glucose 4-6-dehydratase-like protein
  misc_feature (1)..(404): Homolog of NCBI NO: 15227109 NR Description: NAD-dependent epimerase/dehydratase family
  misc_feature (1)..(408): Homolog of NCBI NO: 2129578 NR Description: dTDP-glucose 4-6-dehydratase homolog D18 -
  misc_feature (1)..(408): Homolog of NCBI NO: 15229334 NR Description: NAD-dependent epimerase/dehydratase family

SEQ ID NO: 50698 - DNA, 2028 bp, Arabidopsis thaliana; identical to SEQ ID NO: 37075
  misc_feature (1)..(2028): Ceres Seq. ID no. 12559842
  misc_feature: MA Experiment ID: 20000171 Result: Down-regulated in Transcription
  misc_feature: MA Experiment 20000171 PARAMETER Experiment Name: At_42deg_Heat_P Parameter: Age (day) Value: 14
  misc_feature: MA Experiment 20000171 PARAMETER Experiment Name: At_42deg_Heat_P Parameter: Organism Value: A. thaliana
  misc_feature: MA Experiment 20000171 PARAMETER Experiment Name: At_42deg_Heat_P Parameter: Plant Line Value: WS
  misc_feature: MA Experiment 20000171 PARAMETER Experiment Name: At_42deg_Heat_P Parameter: Temperature (deg C) Value: 42 vs. 22
  misc_feature: MA Experiment 20000171 PARAMETER Experiment Name: At_42deg_Heat_P Parameter: Timepoint (hr) Value: 1
  misc_feature: MA Experiment 20000171 PARAMETER Experiment Name: At_42deg_Heat_P Parameter: Tissue Value: Aerial
  misc_feature: MA Experiment ID: 20000173 Result: Down-regulated in Transcription
  misc_feature: MA Experiment 20000173 PARAMETER Experiment Name: At_42deg_Heat_P Parameter: Age (day) Value: 14
  misc_feature: MA Experiment 20000173 PARAMETER Experiment Name: At_42deg_Heat_P Parameter: Organism Value: A. thaliana
  misc_feature: MA Experiment 20000173 PARAMETER Experiment Name: At_42deg_Heat_P Parameter: Plant Line Value: WS
  misc_feature: MA Experiment 20000173 PARAMETER Experiment Name: At_42deg_Heat_P Parameter: Temperature (deg C) Value: 42 vs. 22
  misc_feature: MA Experiment 20000173 PARAMETER Experiment Name: At_42deg_Heat_P Parameter: Timepoint (hr) Value: 6
  misc_feature: MA Experiment 20000173 PARAMETER Experiment Name: At_42deg_Heat_P Parameter: Tissue Value: Aerial
  misc_feature: MA Experiment ID: 20000179 Result: Up-regulated in Transcription
  misc_feature: MA Experiment 20000179 PARAMETER Experiment Name: At_Germinating_Seeds_P Parameter: Age (hr) Value: 6 vs. 0
  misc_feature: MA Experiment 20000179 PARAMETER Experiment Name: At_Germinating_Seeds_P Parameter: Tissue Value: Germinating Seeds
  misc_feature: MA Experiment ID: 20000184 Result: Up-regulated in Transcription
  misc_feature: MA Experiment 20000184 PARAMETER Experiment Name: At_Shoots__P Parameter: Age (day) Value: 7
  misc_feature: MA Experiment 20000184 PARAMETER Experiment Name: At_Shoots__P Parameter: Tissue Value: Shoots vs. Whole Plant
  misc_feature: MA Experiment ID: 20000185 Result: Down-regulated in Transcription
  misc_feature: MA Experiment 20000185 PARAMETER Experiment Name: At_Roots__P Parameter: Age (day) Value: 7 vs. 21
  misc_feature: MA Experiment 20000185 PARAMETER Experiment Name: At_Roots__P Parameter: Organism Value: A. thaliana
  misc_feature: MA Experiment 20000185 PARAMETER Experiment Name: At_Roots__P Parameter: Tissue Value: Roots vs. Whole Plant
  misc_feature: MA Experiment ID: 20000227 Result: Up-regulated in Transcription
  misc_feature: MA Experiment 20000227 PARAMETER Experiment Name: At_Root-Tips-vs-Tops_P Parameter: Tissue Value: Root Tips vs. Root Tops
  misc_feature: MA Experiment ID: 20000267 Result: Down-regulated in Transcription
  misc_feature: MA Experiment 20000267 PARAMETER Experiment Name: At_Drought_P Parameter: Age (day) Value: 7
  misc_feature: MA Experiment 20000267 PARAMETER Experiment Name: At_Drought_P Parameter: Organism Value: A. thaliana
  misc_feature: MA Experiment 20000267 PARAMETER Experiment Name: At_Drought_P Parameter: Plant Line Value: WS
  misc_feature: MA Experiment 20000267 PARAMETER Experiment Name: At_Drought_P Parameter: Timepoint (hr) Value: 6
  misc_feature: MA Experiment 20000267 PARAMETER Experiment Name: At_Drought_P Parameter: Tissue Value: Whole Plant
  misc_feature: MA Experiment 20000267 PARAMETER Experiment Name: At_Drought_P Parameter: Treatment Value: Drought vs. No Drought
  misc_feature: MA Experiment ID: 20000308 Result: Down-regulated in Transcription
  misc_feature: MA Experiment 20000308 PARAMETER Experiment Name: At_100mM_NaCl__P Parameter: Age (day) Value: 17
  misc_feature: MA Experiment 20000308 PARAMETER Experiment Name: At_100mM_NaCl__P Parameter: Organism Value: A. thaliana
  misc_feature: MA Experiment 20000308 PARAMETER Experiment Name: At_100mM_NaCl__P Parameter: Plant Line Value: WS
  misc_feature: MA Experiment 20000308 PARAMETER Experiment Name: At_100mM_NaCl__P Parameter: Timepoint (hr) Value: 72
  misc_feature: MA Experiment 20000308 PARAMETER Experiment Name: At_100mM_NaCl__P Parameter: Tissue Value: Whole Plant
  misc_feature: MA Experiment 20000308 PARAMETER Experiment Name: At_100mM_NaCl__P Parameter: Treatment Value: 100mM NaCl vs. No Treatment
  misc_feature: MA Experiment ID: 20000436 Result: Down-regulated in Transcription
  misc_feature: MA Experiment 20000436 PARAMETER Experiment Name: At_Drought_P Parameter: Age (day) Value: 7
  misc_feature: MA Experiment 20000436 PARAMETER Experiment Name: At_Drought_P Parameter: Organism Value: A. thaliana
  misc_feature: MA Experiment 20000436 PARAMETER Experiment Name: At_Drought_P Parameter: Plant Line Value: WS
  misc_feature: MA Experiment 20000436 PARAMETER Experiment Name: At_Drought_P Parameter: Timepoint (hr) Value: 12
  misc_feature: MA Experiment 20000436 PARAMETER Experiment Name: At_Drought_P Parameter: Tissue Value: Whole Plant
  misc_feature: MA Experiment 20000436 PARAMETER Experiment Name: At_Drought_P Parameter: Treatment Value: Drought vs. No Drought
  misc_feature: MA Experiment ID: 20000437 Result: Down-regulated in Transcription
  misc_feature: MA Experiment 20000437 PARAMETER Experiment Name: At_Drought_P Parameter: Age (day) Value: 8
  misc_feature: MA Experiment 20000437 PARAMETER Experiment Name: At_Drought_P Parameter: Organism Value: A. thaliana
  misc_feature: MA Experiment 20000437 PARAMETER Experiment Name: At_Drought_P Parameter: Plant Line Value: WS
  misc_feature: MA Experiment 20000437 PARAMETER Experiment Name: At_Drought_P Parameter: Timepoint (hr) Value: 24
  misc_feature: MA Experiment 20000437 PARAMETER Experiment Name: At_Drought_P Parameter: Tissue Value: Whole Plant
  misc_feature: MA Experiment 20000437 PARAMETER Experiment Name: At_Drought_P Parameter: Treatment Value: Drought vs. No Drought
  misc_feature: MA Experiment ID: 20000438 Result: Up-regulated in Transcription
  misc_feature: MA Experiment 20000438 PARAMETER Experiment Name: At_Shoots__P Parameter: Age (day) Value: 14
  misc_feature: MA Experiment 20000438 PARAMETER Experiment Name: At_Shoots__P Parameter: Tissue Value: Shoots vs. Whole Plant
  misc_feature: MA Experiment ID: 20000527 Result: Up-regulated in Transcription
  misc_feature: MA Experiment 20000527 PARAMETER Experiment Name: At_10percent_PEG_P Parameter: Age (day) Value: 20
  misc_feature: MA Experiment 20000527 PARAMETER Experiment Name: At_10percent_PEG_P Parameter: Organism Value: A. thaliana
  misc_feature: MA Experiment 20000527 PARAMETER Experiment Name: At_10percent_PEG_P Parameter: Plant Line Value: WS
  misc_feature: MA Experiment 20000527 PARAMETER Experiment Name: At_10percent_PEG_P Parameter: Timepoint (day) Value: 20
  misc_feature: MA Experiment 20000527 PARAMETER Experiment Name: At_10percent_PEG_P Parameter: Tissue Value: Whole Plant
  misc_feature: MA Experiment 20000527 PARAMETER Experiment Name: At_10percent_PEG_P Parameter: Treatment Value: 10percent PEG vs. No Treatment
  misc_feature: MA Experiment ID: 20000709 Result: Up-regulated in Transcription
  misc_feature: MA Experiment 20000709 PARAMETER Experiment Name: At_15mM_NH4NO3_L-to-H_P Parameter: Age (hr) Value: 14
  misc_feature: MA Experiment 20000709 PARAMETER Experiment Name: At_15mM_NH4NO3_L-to-H_P Parameter: Organism Value: A. thaliana
  misc_feature: MA Experiment 20000709 PARAMETER Experiment Name: At_15mM_NH4NO3_L-to-H_P Parameter: Plant Line Value: WS
  misc_feature: MA Experiment 20000709 PARAMETER Experiment Name: At_15mM_NH4NO3_L-to-H_P Parameter: Timepoint (hr) Value: 4
  misc_feature: MA Experiment 20000709 PARAMETER Experiment Name: At_15mM_NH4NO3_L-to-H_P Parameter: Tissue Value: Aerial
  misc_feature: MA Experiment 20000709 PARAMETER Experiment Name: At_15mM_NH4NO3_L-to-H_P Parameter: Treatment Value: 15mM NH4NO3 vs. 30mM Mannitol
  misc_feature: MA Experiment ID: 20000794 Result: Down-regulated in Transcription
  misc_feature: MA Experiment 20000794 PARAMETER Experiment Name: At_Petals_P Parameter: Age (day) Value: 23-25 days
  misc_feature: MA Experiment 20000794 PARAMETER Experiment Name: At_Petals_P Parameter: Plant Line Value: WS
  misc_feature: MA Experiment 20000794 PARAMETER Experiment Name: At_Petals_P Parameter: Tissue Value: Petals vs. Whole plant
  misc_feature: MA Experiment ID: 20001248 Result: Down-regulated in Transcription
  misc_feature: MA Experiment 20001248 PARAMETER Experiment Name: At_Far-red-induction_P Parameter: Age (day) Value: 7
  misc_feature: MA Experiment 20001248 PARAMETER Experiment Name: At_Far-red-induction_P Parameter: Light Value: Far-red vs. White
  misc_feature: MA Experiment 20001248 PARAMETER Experiment Name: At_Far-red-induction_P Parameter: Organism Value: A. thaliana
  misc_feature: MA Experiment 20001248 PARAMETER Experiment Name: At_Far-red-induction_P Parameter: Plant Line Value: Columbia
  misc_feature: MA Experiment 20001248 PARAMETER Experiment Name: At_Far-red-induction_P Parameter: Timepoint (hr) Value: 4
  misc_feature: MA Experiment 20001248 PARAMETER Experiment Name: At_Far-red-induction_P Parameter: Tissue Value: Whole Plant
  misc_feature: MA Experiment ID: 20001450 Result: Down-regulated in Transcription
  misc_feature: MA Experiment 20001450 PARAMETER Experiment Name: At_Far-red-induction_P Parameter: Age (day) Value: 7
  misc_feature: MA Experiment 20001450 PARAMETER Experiment Name: At_Far-red-induction_P Parameter: Light Value: Far-red vs. White
  misc_feature: MA Experiment 20001450 PARAMETER Experiment Name: At_Far-red-induction_P Parameter: Organism Value: A. thaliana
  misc_feature: MA Experiment 20001450 PARAMETER Experiment Name: At_Far-red-induction_P Parameter: Plant Line Value: Columbia
  misc_feature: MA Experiment 20001450 PARAMETER Experiment Name: At_Far-red-induction_P Parameter: Timepoint (hr) Value: 8
  misc_feature: MA Experiment 20001450 PARAMETER Experiment Name: At_Far-red-induction_P Parameter: Tissue Value: Whole Plant
  misc_feature: MA Experiment ID: 20001457 Result: Up-regulated in Transcription
  misc_feature: MA Experiment 20001457 PARAMETER Experiment Name: At_50mM_NH4NO3_L-to-H_P Parameter: Age (day) Value: Undefined
  misc_feature: MA Experiment 20001457 PARAMETER Experiment Name: At_50mM_NH4NO3_L-to-H_P Parameter: Organism Value: Undefined
  misc_feature: MA Experiment 20001457 PARAMETER Experiment Name: At_50mM_NH4NO3_L-to-H_P Parameter: Plant Line Value: Undefined
  misc_feature: MA Experiment 20001457 PARAMETER Experiment Name: At_50mM_NH4NO3_L-to-H_P Parameter: Timepoint (hr) Value: 0.5
  misc_feature: MA Experiment 20001457 PARAMETER Experiment Name: At_50mM_NH4NO3_L-to-H_P Parameter: Tissue Value: Siliques
  misc_feature: MA Experiment 20001457 PARAMETER Experiment Name: At_50mM_NH4NO3_L-to-H_P Parameter: Treatment Value: 50mM NH4NO3 vs. 100mM Manitol
  misc_feature: MA Experiment ID: 20001458 Result: Up-regulated in Transcription
  misc_feature: MA Experiment 20001458 PARAMETER Experiment Name: At_50mM_NH4NO3_L-to-H_P Parameter: Age (day) Value: Undefined
  misc_feature: MA Experiment 20001458 PARAMETER Experiment Name: At_50mM_NH4NO3_L-to-H_P Parameter: Organism Value: Undefined
  misc_feature: MA Experiment 20001458 PARAMETER Experiment Name: At_50mM_NH4NO3_L-to-H_P Parameter: Plant Line Value: Undefined
  misc_feature: MA Experiment 20001458 PARAMETER Experiment Name: At_50mM_NH4NO3_L-to-H_P Parameter: Timepoint (hr) Value: 2
  misc_feature: MA Experiment 20001458 PARAMETER Experiment Name: At_50mM_NH4NO3_L-to-H_P Parameter: Tissue Value: Siliques
  misc_feature: MA Experiment 20001458 PARAMETER Experiment Name: At_50mM_NH4NO3_L-to-H_P Parameter: Treatment Value: 50mM NH4NO3 vs. 100mM Manitol
  misc_feature: MA Experiment ID: 20001459 Result: Up-regulated in Transcription
  misc_feature: MA Experiment 20001459 PARAMETER Experiment Name: At_50mM_NH4NO3_L-to-H_P Parameter: Age (day) Value: Undefined
  misc_feature: MA Experiment 20001459 PARAMETER Experiment Name: At_50mM_NH4NO3_L-to-H_P Parameter: Organism Value: Undefined
  misc_feature: MA Experiment 20001459 PARAMETER Experiment Name: At_50mM_NH4NO3_L-to-H_P Parameter: Plant Line Value: Undefined
  misc_feature: MA Experiment 20001459 PARAMETER Experiment Name: At_50mM_NH4NO3_L-to-H_P Parameter: Timepoint (hr) Value: 4
  misc_feature: MA Experiment 20001459 PARAMETER Experiment Name: At_50mM_NH4NO3_L-to-H_P Parameter: Tissue Value: Siliques
  misc_feature: MA Experiment 20001459 PARAMETER Experiment Name: At_50mM_NH4NO3_L-to-H_P Parameter: Treatment Value: 50mM NH4NO3 vs. 100mM Manitol
  misc_feature: MA Experiment ID: 20001555 Result: Up-regulated in Transcription
  misc_feature: MA Experiment 20001555 PARAMETER Experiment Name: At_Drought_Soil_Dry_P Parameter: Age (day) Value: 24
  misc_feature: MA Experiment 20001555 PARAMETER Experiment Name: At_Drought_Soil_Dry_P Parameter: Organism Value: A. thaliana
  misc_feature: MA Experiment 20001555 PARAMETER Experiment Name: At_Drought_Soil_Dry_P Parameter: Plant Line Value: WS
  misc_feature: MA Experiment 20001555 PARAMETER Experiment Name: At_Drought_Soil_Dry_P Parameter: Post Timepoint (hr) Value: None
  misc_feature: MA Experiment 20001555 PARAMETER Experiment Name: At_Drought_Soil_Dry_P Parameter: Post-Treatment Value: None
  misc_feature: MA Experiment 20001555 PARAMETER Experiment Name: At_Drought_Soil_Dry_P Parameter: Timepoint (day) Value: 10
  misc_feature: MA Experiment 20001555 PARAMETER Experiment Name: At_Drought_Soil_Dry_P Parameter: Treatment Value: Drought vs. No Drought
  misc_feature: MA Experiment ID: 20001557 Result: Up-regulated in Transcription
  misc_feature: MA Experiment 20001557 PARAMETER Experiment Name: At_Drought_Soil_Dry_P Parameter: Age (day) Value: 27
  misc_feature: MA Experiment 20001557 PARAMETER Experiment Name: At_Drought_Soil_Dry_P Parameter: Organism Value: A. thaliana
  misc_feature: MA Experiment 20001557 PARAMETER Experiment Name: At_Drought_Soil_Dry_P Parameter: Plant Line Value: WS
  misc_feature: MA Experiment 20001557 PARAMETER Experiment Name: At_Drought_Soil_Dry_P Parameter: Post Timepoint (hr) Value: 3
  misc_feature: MA Experiment 20001557 PARAMETER Experiment Name: At_Drought_Soil_Dry_P Parameter: Post-Treatment Value: Re-Water vs. No Drought
  misc_feature: MA Experiment 20001557 PARAMETER Experiment Name: At_Drought_Soil_Dry_P Parameter: Timepoint (day) Value: 13
  misc_feature: MA Experiment 20001557 PARAMETER Experiment Name: At_Drought_Soil_Dry_P Parameter: Treatment Value: Drought vs. No Drought
  misc_feature: MA Experiment ID: 20001560 Result: Up-regulated in Transcription
  misc_feature: MA Experiment 20001560 PARAMETER Experiment Name: At_Drought_Soil_Dry_P Parameter: Age (day) Value: 28
  misc_feature: MA Experiment 20001560 PARAMETER Experiment Name: At_Drought_Soil_Dry_P Parameter: Organism Value: A. thaliana
  misc_feature: MA Experiment 20001560 PARAMETER Experiment Name: At_Drought_Soil_Dry_P Parameter: Plant Line Value: WS
  misc_feature: MA Experiment 20001560 PARAMETER Experiment Name: At_Drought_Soil_Dry_P Parameter: Post Timepoint (hr) Value: None
  misc_feature: MA Experiment 20001560 PARAMETER Experiment Name: At_Drought_Soil_Dry_P Parameter: Post-Treatment Value: None
  misc_feature: MA Experiment 20001560 PARAMETER Experiment Name: At_Drought_Soil_Dry_P Parameter: Timepoint (day) Value: 14
  misc_feature: MA Experiment 20001560 PARAMETER Experiment Name: At_Drought_Soil_Dry_P Parameter: Treatment Value: Drought vs. No Drought
  misc_feature: MA Experiment ID: 20001757 Result: Up-regulated in Transcription
  misc_feature: MA Experiment 20001757 PARAMETER Experiment Name: At_50mM_NH4NO3_L-to-H_P Parameter: Timepoint (hr) Value: 6
  misc_feature: MA Experiment 20001757 PARAMETER Experiment Name: At_50mM_NH4NO3_L-to-H_P Parameter: Tissue Value: Leaf
  misc_feature: MA Experiment 20001757 PARAMETER Experiment Name: At_50mM_NH4NO3_L-to-H_P Parameter: Treatment Value: 50mM NH4NO3 vs 100mM Mannitol
  misc_feature: MA Experiment ID: 20001759 Result: Up-regulated in Transcription
  misc_feature: MA Experiment 20001759 PARAMETER Experiment Name: At_50mM_NH4NO3_L-to-H_P Parameter: Timepoint (hr) Value: 1
  misc_feature: MA Experiment 20001759 PARAMETER Experiment Name: At_50mM_NH4NO3_L-to-H_P Parameter: Tissue Value: Siliques
  misc_feature: MA Experiment 20001759 PARAMETER Experiment Name: At_50mM_NH4NO3_L-to-H_P Parameter: Treatment Value: 50mM NH4NO3 vs 100mM Mannitol
  misc_feature: MA Experiment ID: 20001760 Result: Up-regulated in Transcription
  misc_feature: MA Experiment 20001760 PARAMETER Experiment Name: At_50mM_NH4NO3_L-to-H_P Parameter: Timepoint (hr) Value: 2
  misc_feature: MA Experiment 20001760 PARAMETER Experiment Name: At_50mM_NH4NO3_L-to-H_P Parameter: Tissue Value: Siliques
  misc_feature: MA Experiment 20001760 PARAMETER Experiment Name: At_50mM_NH4NO3_L-to-H_P Parameter: Treatment Value: 50mM NH4NO3 vs 100mM Mannitol
  misc_feature: MA Experiment ID: 20001906 Result: Down-regulated in Transcription
  misc_feature: MA Experiment 20001906 PARAMETER Experiment Name: At_Drought_Reproduction_P Parameter: Age (day) Value: 35
  misc_feature: MA Experiment 20001906 PARAMETER Experiment Name: At_Drought_Reproduction_P Parameter: Organism Value: A. thaliana
  misc_feature: MA Experiment 20001906 PARAMETER Experiment Name: At_Drought_Reproduction_P Parameter: Plant Line Value: WS
  misc_feature: MA Experiment 20001906 PARAMETER Experiment Name: At_Drought_Reproduction_P Parameter: Timepoint (day) Value: 5
  misc_feature: MA Experiment 20001906 PARAMETER Experiment Name: At_Drought_Reproduction_P Parameter: Tissue Value: Siliques
  misc_feature: MA Experiment 20001906 PARAMETER Experiment Name: At_Drought_Reproduction_P Parameter: Treatment Value: Drought vs. No Drought
  misc_feature: MA Experiment ID: 20001908 Result: Down-regulated in Transcription
  misc_feature: MA Experiment 20001908 PARAMETER Experiment Name: At_Drought_Reproduction_P Parameter: Age (day) Value: 40
  misc_feature: MA Experiment 20001908 PARAMETER Experiment Name: At_Drought_Reproduction_P Parameter: Organism Value: A. thaliana
  misc_feature: MA Experiment 20001908 PARAMETER Experiment Name: At_Drought_Reproduction_P Parameter: Plant Line Value: WS
  misc_feature: MA Experiment 20001908 PARAMETER Experiment Name: At_Drought_Reproduction_P Parameter: Timepoint (day) Value: 10
  misc_feature: MA Experiment 20001908 PARAMETER Experiment Name: At_Drought_Reproduction_P Parameter: Tissue Value: Siliques
  misc_feature: MA Experiment 20001908 PARAMETER Experiment Name: At_Drought_Reproduction_P Parameter: Treatment Value: Drought vs. No Drought
  misc_feature: MA Experiment ID: 20001911 Result: Down-regulated in Transcription
  misc_feature: MA Experiment 20001911 PARAMETER Experiment Name: At_Drought_Reproduction_P Parameter: Age (day) Value: 40
  misc_feature: MA Experiment 20001911 PARAMETER Experiment Name: At_Drought_Reproduction_P Parameter: Organism Value: A. thaliana
  misc_feature: MA Experiment 20001911 PARAMETER Experiment Name: At_Drought_Reproduction_P Parameter: Plant Line Value: WS
  misc_feature: MA Experiment 20001911 PARAMETER Experiment Name: At_Drought_Reproduction_P Parameter: Timepoint (day) Value: 10
  misc_feature: MA Experiment 20001911 PARAMETER Experiment Name: At_Drought_Reproduction_P Parameter: Tissue Value: Flowers
  misc_feature: MA Experiment 20001911 PARAMETER Experiment Name: At_Drought_Reproduction_P Parameter: Treatment Value: Drought vs. No Drought

SEQ ID NO: 50699 - protein, 589 aa, Arabidopsis thaliana; identical to SEQ ID NO: 37076
  peptide (1)..(589): Ceres Seq. ID no. 12559843
  misc_feature (204)..(527): Pfam Name: Asparagine synthase Pfam Description: Asparagine synthase
  misc_feature (204)..(527): Pfam Name: Asparagine synthase Pfam Description: Asparagine synthase
  misc_feature (204)..(527): Pfam Name: Asparagine synthase Pfam Description: Asparagine synthase
  misc_feature (6)..(566): Homolog of NCBI NO: 26246639 NR Description: Asparagine synthetase B
  misc_feature (12)..(589): Homolog of NCBI NO: 3132675 NR Description: asparagine synthetase [Elaeagnus umbellata]
  misc_feature (12)..(586): Homolog of NCBI NO: 399064 NR Description: Asparagine synthase [glutamine-hydrolyzing] (AS)
  misc_feature (12)..(586): Homolog of NCBI NO: 1617002 NR Description: asparagine synthetase [Asparagus officinalis]
  misc_feature (12)..(578): Homolog of NCBI NO: 13925886 NR Description: glutamine-dependent asparagine synthetase 1
  misc_feature (6)..(566): Homolog of NCBI NO: 26246639 NR Description: Asparagine synthetase B
  misc_feature (12)..(586): Homolog of NCBI NO: 399064 NR Description: Asparagine synthase [glutamine-hydrolyzing] (AS)
  misc_feature (12)..(578): Homolog of NCBI NO: 13925886 NR Description: glutamine-dependent asparagine synthetase 1
  misc_feature (12)..(586): Homolog of NCBI NO: 1617002 NR Description: asparagine synthetase [Asparagus officinalis]
  misc_feature (12)..(586): Homolog of NCBI NO: 399064 NR Description: Asparagine synthase [glutamine-hydrolyzing] (AS)
  misc_feature (12)..(589): Homolog of NCBI NO: 3132675 NR Description: asparagine synthetase [Elaeagnus umbellata]
  misc_feature (6)..(566): Homolog of NCBI NO: 26246639 NR Description: Asparagine synthetase B
  misc_feature (12)..(569): Homolog of NCBI NO: 15238108 NR Description: asparagine synthetase ASN3
  misc_feature (12)..(569): Homolog of NCBI NO: 25293864 NR Description: asparagine synthase (glutamine-hydrolyzing) (EC
  misc_feature (12)..(571): Homolog of NCBI NO: 22208544 NR Description: asparagine synthetase 2 [Striga hermonthica]
  misc_feature (12)..(569): Homolog of NCBI NO: 6049843 NR Description: asparagine synthetase [Helianthus annuus]
  misc_feature (12)..(574): Homolog of NCBI NO: 3182921 NR Description: Asparagine synthetase
  misc_feature (12)..(569): Homolog of NCBI NO: 15238108 NR Description: asparagine synthetase ASN3
  misc_feature (12)..(569): Homolog of NCBI NO: 25293864 NR Description: asparagine synthase (glutamine-hydrolyzing) (EC
  misc_feature (12)..(571): Homolog of NCBI NO: 22208544 NR Description: asparagine synthetase 2 [Striga hermonthica]
  misc_feature (12)..(569): Homolog of NCBI NO: 6049843 NR Description: asparagine synthetase [Helianthus annuus]
  misc_feature (12)..(574): Homolog of NCBI NO: 3182921 NR Description: Asparagine synthetase
  misc_feature (12)..(578): Homolog of NCBI NO: 13925886 NR Description: glutamine-dependent asparagine synthetase 1
  misc_feature (12)..(586): Homolog of NCBI NO: 1617002 NR Description: asparagine synthetase [Asparagus officinalis]
  misc_feature (12)..(589): Homolog of NCBI NO: 3132675 NR Description: asparagine synthetase [Elaeagnus umbellata]
  misc_feature (12)..(574): Homolog of NCBI NO: 3182921 NR Description: Asparagine synthetase
  misc_feature (12)..(569): Homolog of NCBI NO: 6049843 NR Description: asparagine synthetase [Helianthus annuus]
  misc_feature (12)..(571): Homolog of NCBI NO: 22208544 NR Description: asparagine synthetase 2 [Striga hermonthica]
  misc_feature (12)..(569): Homolog of NCBI NO: 25293864 NR Description: asparagine synthase (glutamine-hydrolyzing) (EC
  misc_feature (12)..(569): Homolog of NCBI NO: 15238108 NR Description: asparagine synthetase ASN3

SEQ ID NO: 50700 - protein, 578 aa, Arabidopsis thaliana; identical to SEQ ID NO: 37077
  peptide (1)..(578): Ceres Seq. ID no. 12559844
  misc_feature (193)..(516): Pfam Name: Asparagine synthase Pfam Description: Asparagine synthase
  misc_feature (193)..(516): Pfam Name: Asparagine synthase Pfam Description: Asparagine synthase
  misc_feature (193)..(516): Pfam Name: Asparagine synthase Pfam Description: Asparagine synthase
  misc_feature (1)..(555): Homolog of NCBI NO: 26246639 NR Description: Asparagine synthetase B
  misc_feature (1)..(578): Homolog of NCBI NO: 3132675 NR Description: asparagine synthetase [Elaeagnus umbellata]
  misc_feature (1)..(575): Homolog of NCBI NO: 399064 NR Description: Asparagine synthase [glutamine-hydrolyzing] (AS)
  misc_feature (1)..(575): Homolog of NCBI NO: 1617002 NR Description: asparagine synthetase [Asparagus officinalis]
  misc_feature (1)..(567): Homolog of NCBI NO: 13925886 NR Description: glutamine-dependent asparagine synthetase 1
  misc_feature (1)..(555): Homolog of NCBI NO: 26246639 NR Description: Asparagine synthetase B
  misc_feature (1)..(575): Homolog of NCBI NO: 399064 NR Description: Asparagine synthase [glutamine-hydrolyzing] (AS)
  misc_feature (1)..(567): Homolog of NCBI NO: 13925886 NR Description: glutamine-dependent asparagine synthetase 1
  misc_feature (1)..(575): Homolog of NCBI NO: 1617002 NR Description: asparagine synthetase [Asparagus officinalis]
  misc_feature (1)..(575): Homolog of NCBI NO: 399064 NR Description: Asparagine synthase [glutamine-hydrolyzing] (AS)
  misc_feature (1)..(578): Homolog of NCBI NO: 3132675 NR Description: asparagine synthetase [Elaeagnus umbellata]
  misc_feature (1)..(555): Homolog of NCBI NO: 26246639 NR Description: Asparagine synthetase B
  misc_feature (1)..(558): Homolog of NCBI NO: 15238108 NR Description: asparagine synthetase ASN3
  misc_feature (1)..(558): Homolog of NCBI NO: 25293864 NR Description: asparagine synthase (glutamine-hydrolyzing) (EC
  misc_feature (1)..(560): Homolog of NCBI NO: 22208544 NR Description: asparagine synthetase 2 [Striga hermonthica]
  misc_feature (1)..(558): Homolog of NCBI NO: 6049843 NR Description: asparagine synthetase [Helianthus annuus]
  misc_feature (1)..(563): Homolog of NCBI NO: 3182921 NR Description: Asparagine synthetase
  misc_feature (1)..(558): Homolog of NCBI NO: 15238108 NR Description: asparagine synthetase ASN3
  misc_feature (1)..(558): Homolog of NCBI NO: 25293864 NR Description: asparagine synthase (glutamine-hydrolyzing) (EC
  misc_feature (1)..(560): Homolog of NCBI NO: 22208544 NR Description: asparagine synthetase 2 [Striga hermonthica]
  misc_feature (1)..(558): Homolog of NCBI NO: 6049843 NR Description: asparagine synthetase [Helianthus annuus]
  misc_feature (1)..(563): Homolog of NCBI NO: 3182921 NR Description: Asparagine synthetase
  misc_feature (1)..(567): Homolog of NCBI NO: 13925886 NR Description: glutamine-dependent asparagine synthetase 1
  misc_feature (1)..(575): Homolog of NCBI NO: 1617002 NR Description: asparagine synthetase [Asparagus officinalis]
  misc_feature (1)..(578): Homolog of NCBI NO: 3132675 NR Description: asparagine synthetase [Elaeagnus umbellata]
  misc_feature (1)..(563): Homolog of NCBI NO: 3182921 NR Description: Asparagine synthetase
  misc_feature (1)..(558): Homolog of NCBI NO: 6049843 NR Description: asparagine synthetase [Helianthus annuus]
  misc_feature (1)..(560): Homolog of NCBI NO: 22208544 NR Description: asparagine synthetase 2 [Striga hermonthica]
  misc_feature (1)..(558): Homolog of NCBI NO: 25293864 NR Description: asparagine synthase (glutamine-hydrolyzing) (EC
  misc_feature (1)..(558): Homolog of NCBI NO: 15238108 NR Description: asparagine synthetase ASN3

SEQ ID NO: 50701 - protein, 463 aa, Arabidopsis thaliana; identical to SEQ ID NO: 37078
  peptide (1)..(463): Ceres Seq. ID no. 12559845
  misc_feature (78)..(401): Pfam Name: Asparagine synthase Pfam Description: Asparagine synthase
  misc_feature (78)..(401): Pfam Name: Asparagine synthase Pfam Description: Asparagine synthase
  misc_feature (78)..(401): Pfam Name: Asparagine synthase Pfam Description: Asparagine synthase
  misc_feature (1)..(440): Homolog of NCBI NO: 26246639 NR Description: Asparagine synthetase B
  misc_feature (1)..(463): Homolog of NCBI NO: 3132675 NR Description: asparagine synthetase [Elaeagnus umbellata]
  misc_feature (1)..(460): Homolog of NCBI NO: 399064 NR Description: Asparagine synthase [glutamine-hydrolyzing] (AS)
  misc_feature (1)..(460): Homolog of NCBI NO: 1617002 NR Description: asparagine synthetase [Asparagus officinalis]
  misc_feature (1)..(452): Homolog of NCBI NO: 13925886 NR Description: glutamine-dependent asparagine synthetase 1
  misc_feature (1)..(440): Homolog of NCBI NO: 26246639 NR Description: Asparagine synthetase B
  misc_feature (1)..(460): Homolog of NCBI NO: 399064 NR Description: Asparagine synthase [glutamine-hydrolyzing] (AS)
  misc_feature (1)..(452): Homolog of NCBI NO: 13925886 NR Description: glutamine-dependent asparagine synthetase 1
  misc_feature (1)..(460): Homolog of NCBI NO: 1617002 NR Description: asparagine synthetase [Asparagus officinalis]
  misc_feature (1)..(460): Homolog of NCBI NO: 399064 NR Description: Asparagine synthase [glutamine-hydrolyzing] (AS)
  misc_feature (1)..(463): Homolog of NCBI NO: 3132675 NR Description: asparagine synthetase [Elaeagnus umbellata]
  misc_feature (1)..(440): Homolog of NCBI NO: 26246639 NR Description: Asparagine synthetase B
  misc_feature (1)..(443): Homolog of NCBI NO: 15238108 NR Description: asparagine synthetase ASN3
  misc_feature (1)..(443): Homolog of NCBI NO: 25293864 NR Description: asparagine synthase (glutamine-hydrolyzing) (EC
  misc_feature (1)..(445): Homolog of NCBI NO: 22208544 NR Description: asparagine synthetase 2 [Striga hermonthica]
  misc_feature (1)..(443): Homolog of NCBI NO: 6049843 NR Description: asparagine synthetase [Helianthus annuus]
  misc_feature (1)..(448): Homolog of NCBI NO: 3182921 NR Description: Asparagine synthetase
  misc_feature (1)..(443): Homolog of NCBI NO: 15238108 NR Description: asparagine synthetase ASN3
  misc_feature (1)..(443): Homolog of NCBI NO: 25293864 NR Description: asparagine synthase (glutamine-hydrolyzing) (EC
  misc_feature (1)..(445): Homolog of NCBI NO: 22208544 NR Description: asparagine synthetase 2 [Striga hermonthica]
  misc_feature (1)..(443): Homolog of NCBI NO: 6049843 NR Description: asparagine synthetase [Helianthus annuus]
  misc_feature (1)..(448): Homolog of NCBI NO: 3182921 NR Description: Asparagine synthetase
  misc_feature (1)..(452): Homolog of NCBI NO: 13925886 NR Description: glutamine-dependent asparagine synthetase 1
  misc_feature (1)..(460): Homolog of NCBI NO: 1617002 NR Description: asparagine synthetase [Asparagus officinalis]
  misc_feature (1)..(463): Homolog of NCBI NO: 3132675 NR Description: asparagine synthetase [Elaeagnus umbellata]
  misc_feature (1)..(448): Homolog of NCBI NO: 3182921 NR Description: Asparagine synthetase
  misc_feature (1)..(443): Homolog of NCBI NO: 6049843 NR Description: asparagine synthetase [Helianthus annuus]
  misc_feature (1)..(445): Homolog of NCBI NO: 22208544 NR Description: asparagine synthetase 2 [Striga hermonthica]
  misc_feature (1)..(443): Homolog of NCBI NO: 25293864 NR Description: asparagine synthase (glutamine-hydrolyzing) (EC
  misc_feature (1)..(443): Homolog of NCBI NO: 15238108 NR Description: asparagine synthetase ASN3

SEQ ID NO: 50702 - DNA, 1728 bp, Arabidopsis thaliana
  misc_feature (1)..(1728): Ceres Seq. ID no. 13575276
  misc_feature: MA Experiment ID: 20000184 Result: Down-regulated in Transcription
  misc_feature: MA Experiment 20000184 PARAMETER Experiment Name: At_Shoots__P Parameter: Age (day) Value: 7
  misc_feature: MA Experiment 20000184 PARAMETER Experiment Name: At_Shoots__P Parameter: Tissue Value: Shoots vs. Whole Plant
  misc_feature: MA Experiment ID: 20001451 Result: Up-regulated in Transcription
  misc_feature: MA Experiment 20001451 PARAMETER Experiment Name: At_Far-red-induction_P Parameter: Age (day) Value: 7
  misc_feature: MA Experiment 20001451 PARAMETER Experiment Name: At_Far-red-induction_P Parameter: Light Value: Far-red vs. White
  misc_feature: MA Experiment 20001451 PARAMETER Experiment Name: At_Far-red-induction_P Parameter: Organism Value: A. thaliana
  misc_feature: MA Experiment 20001451 PARAMETER Experiment Name: At_Far-red-induction_P Parameter: Plant Line Value: Columbia
  misc_feature: MA Experiment 20001451 PARAMETER Experiment Name: At_Far-red-induction_P Parameter: Timepoint (hr) Value: 24
  misc_feature: MA Experiment 20001451 PARAMETER Experiment Name: At_Far-red-induction_P Parameter: Tissue Value: Whole Plant
  misc_feature: MA Experiment ID: 20001911 Result: Up-regulated in Transcription
  misc_feature: MA Experiment 20001911 PARAMETER Experiment Name: At_Drought_Reproduction_P Parameter: Age (day) Value: 40
  misc_feature: MA Experiment 20001911 PARAMETER Experiment Name: At_Drought_Reproduction_P Parameter: Organism Value: A. thaliana
  misc_feature: MA Experiment 20001911 PARAMETER Experiment Name: At_Drought_Reproduction_P Parameter: Plant Line Value: WS
  misc_feature: MA Experiment 20001911 PARAMETER Experiment Name: At_Drought_Reproduction_P Parameter: Timepoint (day) Value: 10
  misc_feature: MA Experiment 20001911 PARAMETER Experiment Name: At_Drought_Reproduction_P Parameter: Tissue Value: Flowers
  misc_feature: MA Experiment 20001911 PARAMETER Experiment Name: At_Drought_Reproduction_P Parameter: Treatment Value: Drought vs. No Drought
gagaaaaaaaagcagagagtgtattcaaagtcggaaagaaaccctaaagaagaggattatgggtgctgtatcgatggagtcgcttcctttaggtttcagattcagacctaccgatgaagagctcgtcaatcactacctccgtctcaagatcaacggacgtcactccgatgtccgtgtcatccctgatatcgatgtctgcaaatgggaaccttgggatcttcctgctctctcggtgattaagacggatgatccagagtggttctttttctgccctcgtgatcggaaataccctaatggtcatcgctctaacagagcaactgactctggctattggaaagctactggtaaagatcgtagcatcaagtctaagaagactttaatcggtatgaagaagactcttgtcttctatcgtggacgagctcctaaaggtgagcggactaattggattatgcacgagtatcgtcccactcttaaggatcttgatggcacttcccctggccaaagcccttacgttctttgtcgcctcttccacaagcctgatgatcgggttaatggtgtcaagtccgatgaagcagcttttacggccagcaacaaatactcacctgatgatacatcatctgatcttgttcaagaaacaccttcctctgatgctgctgttgagaaaccatcagattattcaggtggatgcggttatgctcatagtaatagtaccgcagatgggacaatgattgaggcacctgaagagaatctttggttatcttgtgaccttgaagatcaaaaggcaccactaccgtgtatggattctatatatgctggtgatttcagttacgatgagattggattccaatttcaagatggtaccagcgaaccagatgtatcactaacagaattgttggaggaggtgttcaataaccctgatgacttctcttgcgaggaatcgatcagtcgagagaatccagcagtctcaccaaatgggatattttcatctgctaaaatgctgcagtctgcagcaccagaggatgctttcttcaacgacttcatggctttcactgatacagatgctgagatggcgcaattgcagtatggttcagaaggtggagcttctggttggccaagtgacactaattcatactatagtgatttggttcagcaagagcaaatgatcaatcataacacagagaacaacctcacagaagggagagggataaagatccgggctcgacagcctcagaaccggcagagtacaggattgataaaccagggtattgctccaaggagaatccgtctgcagctgcagtctaactctgaagtaaaagaacgagaggaggtgaatgaaggacacactgttattcccgaggccaaagaagctgcagctaaatactcagagaagagtggttctttggttaaacctcaaataaagctcagggcgcggggaactataggccaagtaaaaggagagagatttgcagacgacgaggtacaggtgcagagcagaaagagacgaggagggaagcgatggaaggtggttgcaacggtaatggtggctgtgatggttggggtagggatgggtatatggaggacactggtgagttcatgacacatgagacacaaagagagagagagagagaatcaaatgtagtttaatgtaattagggatgatgcaatgttagcatgtttgtgtgttgtaacttaaaaacttatttaggaatctgataaaagttactgttg

SEQ ID NO: 50703 - protein, 531 aa, Arabidopsis thaliana
  peptide (1)..(531): Ceres Seq. ID no. 13575277
  misc_feature (28)..(156): Pfam Name: No apical meristem (NAM) protein Pfam Description: No apical meristem (NAM) protein
  misc_feature (20)..(290): Homolog of NCBI NO: 21358787 NR Description: nam-like protein 1 [Petunia x hybrida]
  misc_feature (23)..(244): Homolog of NCBI NO: 15229161 NR Description: No apical meristem (NAM) protein family
  misc_feature (17)..(235): Homolog of NCBI NO: 30689531 NR Description: No apical meristem (NAM) protein family
  misc_feature (266)..(375): Homolog of NCBI NO: 30692812 NR Description: No apical meristem (NAM) protein family
  misc_feature (266)..(375): Homolog of NCBI NO: 6910587 NR Description: CDS [Arabidopsis thaliana]
  misc_feature (23)..(224): Homolog of NCBI NO: 30692812 NR Description: No apical meristem (NAM) protein family
  misc_feature (23)..(224): Homolog of NCBI NO: 6910587 NR Description: CDS [Arabidopsis thaliana]
  misc_feature (332)..(531): Homolog of NCBI NO: 15912331 NR Description: AT4g35580/F8D20_90 [Arabidopsis thaliana]
  misc_feature (150)..(531): Homolog of NCBI NO: 30690416 NR Description: NAM / CUC2 -related protein [Arabidopsis thaliana]
  misc_feature (20)..(492): Homolog of NCBI NO: 7486659 NR Description: hypothetical protein F8D20.90 - Arabidopsis
RKKSRECIQSRKETLKKRIMGAVSMESLPLGFRFRPTDEELVNHYLRLKINGRHSDVRVIPDIDVCKWEPWDLPALSVIKTDDPEWFFFCPRDRKYPNGHRSNRATDSGYWKATGKDRSIKSKKTLIGMKKTLVFYRGRAPKGERTNWIMHEYRPTLKDLDGTSPGQSPYVLCRLFHKPDDRVNGVKSDEAAFTASNKYSPDDTSSDLVQETPSSDAAVEKPSDYSGGCGYAHSNSTADGTMIEAPEENLWLSCDLEDQKAPLPCMDSIYAGDFSYDEIGFQFQDGTSEPDVSLTELLEEVFNNPDDFSCEESISRENPAVSPNGIFSSAKMLQSAAPEDAFFNDFMAFTDTDAEMAQLQYGSEGGASGWPSDTNSYYSDLVQQEQMINHNTENNLTEGRGIKIRARQPQNRQSTGLINQGIAPRRIRLQLQSNSEVKEREEVNEGHTVIPEAKEAAAKYSEKSGSLVKPQIKLRARGTIGQVKGERFADDEVQVQSRKRRGGKRWKVVATVMVAVMVGVGMGIWRTLVSS

SEQ ID NO: 50704 - protein, 512 aa, Arabidopsis thaliana
  peptide (1)..(512): Ceres Seq. ID no. 13575278
  misc_feature (9)..(137): Pfam Name: No apical meristem (NAM) protein Pfam Description: No apical meristem (NAM) protein
  misc_feature (1)..(271): Homolog of NCBI NO: 21358787 NR Description: nam-like protein 1 [Petunia x hybrida]
  misc_feature (4)..(225): Homolog of NCBI NO: 15229161 NR Description: No apical meristem (NAM) protein family
  misc_feature (1)..(216): Homolog of NCBI NO: 30689531 NR Description: No apical meristem (NAM) protein family
  misc_feature (247)..(356): Homolog of NCBI NO: 30692812 NR Description: No apical meristem (NAM) protein family
  misc_feature (247)..(356): Homolog of NCBI NO: 6910587 NR Description: CDS [Arabidopsis thaliana]
  misc_feature (4)..(205): Homolog of NCBI NO: 30692812 NR Description: No apical meristem (NAM) protein family
  misc_feature (4)..(205): Homolog of NCBI NO: 6910587 NR Description: CDS [Arabidopsis thaliana]
  misc_feature (313)..(512): Homolog of NCBI NO: 15912331 NR Description: AT4g35580/F8D20_90 [Arabidopsis thaliana]
  misc_feature (131)..(512): Homolog of NCBI NO: 30690416 NR Description: NAM / CUC2 -related protein [Arabidopsis thaliana]
  misc_feature (1)..(473): Homolog of NCBI NO: 7486659 NR Description: hypothetical protein F8D20.90 - Arabidopsis
MGAVSMESLPLGFRFRPTDEELVNHYLRLKINGRHSDVRVIPDIDVCKWEPWDLPALSVIKTDDPEWFFFCPRDRKYPNGHRSNRATDSGYWKATGKDRSIKSKKTLIGMKKTLVFYRGRAPKGERTNWIMHEYRPTLKDLDGTSPGQSPYVLCRLFHKPDDRVNGVKSDEAAFTASNKYSPDDTSSDLVQETPSSDAAVEKPSDYSGGCGYAHSNSTADGTMIEAPEENLWLSCDLEDQKAPLPCMDSIYAGDFSYDEIGFQFQDGTSEPDVSLTELLEEVFNNPDDFSCEESISRENPAVSPNGIFSSAKMLQSAAPEDAFFNDFMAFTDTDAEMAQLQYGSEGGASGWPSDTNSYYSDLVQQEQMINHNTENNLTEGRGIKIRARQPQNRQSTGLINQGIAPRRIRLQLQSNSEVKEREEVNEGHTVIPEAKEAAAKYSEKSGSLVKPQIKLRARGTIGQVKGERFADDEVQVQSRKRRGGKRWKVVATVMVAVMVGVGMGIWRTLVSS

SEQ ID NO: 50705 - protein, 507 aa, Arabidopsis thaliana
  peptide (1)..(507): Ceres Seq. ID no. 13575279
  misc_feature (4)..(132): Pfam Name: No apical meristem (NAM) protein Pfam Description: No apical meristem (NAM) protein
  misc_feature (1)..(266): Homolog of NCBI NO: 21358787 NR Description: nam-like protein 1 [Petunia x hybrida]
  misc_feature (1)..(220): Homolog of NCBI NO: 15229161 NR Description: No apical meristem (NAM) protein family
  misc_feature (1)..(211): Homolog of NCBI NO: 30689531 NR Description: No apical meristem (NAM) protein family
  misc_feature (242)..(351): Homolog of NCBI NO: 30692812 NR Description: No apical meristem (NAM) protein family
  misc_feature (242)..(351): Homolog of NCBI NO: 6910587 NR Description: CDS [Arabidopsis thaliana]
  misc_feature (1)..(200): Homolog of NCBI NO: 30692812 NR Description: No apical meristem (NAM) protein family
  misc_feature (1)..(200): Homolog of NCBI NO: 6910587 NR Description: CDS [Arabidopsis thaliana]
  misc_feature (308)..(507): Homolog of NCBI NO: 15912331 NR Description: AT4g35580/F8D20_90 [Arabidopsis thaliana]
  misc_feature (126)..(507): Homolog of NCBI NO: 30690416 NR Description: NAM / CUC2 -related protein [Arabidopsis thaliana]
  misc_feature (1)..(468): Homolog of NCBI NO: 7486659 NR Description: hypothetical protein F8D20.90 - Arabidopsis
MESLPLGFRFRPTDEELVNHYLRLKINGRHSDVRVIPDIDVCKWEPWDLPALSVIKTDDPEWFFFCPRDRKYPNGHRSNRATDSGYWKATGKDRSIKSKKTLIGMKKTLVFYRGRAPKGERTNWIMHEYRPTLKDLDGTSPGQSPYVLCRLFHKPDDRVNGVKSDEAAFTASNKYSPDDTSSDLVQETPSSDAAVEKPSDYSGGCGYAHSNSTADGTMIEAPEENLWLSCDLEDQKAPLPCMDSIYAGDFSYDEIGFQFQDGTSEPDVSLTELLEEVFNNPDDFSCEESISRENPAVSPNGIFSSAKMLQSAAPEDAFFNDFMAFTDTDAEMAQLQYGSEGGASGWPSDTNSYYSDLVQQEQMINHNTENNLTEGRGIKIRARQPQNRQSTGLINQGIAPRRIRLQLQSNSEVKEREEVNEGHTVIPEAKEAAAKYSEKSGSLVKPQIKLRARGTIGQVKGERFADDEVQVQSRKRRGGKRWKVVATVMVAVMVGVGMGIWRTLVSS

SEQ ID NO: 50706 - DNA, 3293 bp, Arabidopsis thaliana; identical to SEQ ID NO: 50448
  misc_feature (1)..(3293): Ceres Seq. ID no. 13647822
  misc_feature: MA Experiment ID: 20000185 Result: Up-regulated in Transcription
  misc_feature: MA Experiment 20000185 PARAMETER Experiment Name: At_Roots__P Parameter: Age (day) Value: 7 vs. 21
  misc_feature: MA Experiment 20000185 PARAMETER Experiment Name: At_Roots__P Parameter: Organism Value: A. thaliana
  misc_feature: MA Experiment 20000185 PARAMETER Experiment Name: At_Roots__P Parameter: Tissue Value: Roots vs. Whole Plant
  misc_feature: MA Experiment ID: 20000227 Result: Down-regulated in Transcription
  misc_feature: MA Experiment 20000227 PARAMETER Experiment Name: At_Root-Tips-vs-Tops_P Parameter: Tissue Value: Root Tips vs. Root Tops
  misc_feature: MA Experiment ID: 20000437 Result: Down-regulated in Transcription
  misc_feature: MA Experiment 20000437 PARAMETER Experiment Name: At_Drought_P Parameter: Age (day) Value: 8
  misc_feature: MA Experiment 20000437 PARAMETER Experiment Name: At_Drought_P Parameter: Organism Value: A. thaliana
  misc_feature: MA Experiment 20000437 PARAMETER Experiment Name: At_Drought_P Parameter: Plant Line Value: WS
  misc_feature: MA Experiment 20000437 PARAMETER Experiment Name: At_Drought_P Parameter: Timepoint (hr) Value: 24
  misc_feature: MA Experiment 20000437 PARAMETER Experiment Name: At_Drought_P Parameter: Tissue Value: Whole Plant
  misc_feature: MA Experiment 20000437 PARAMETER Experiment Name: At_Drought_P Parameter: Treatment Value: Drought vs. No Drought
  misc_feature: MA Experiment ID: 20000439 Result: Up-regulated in Transcription
  misc_feature: MA Experiment 20000439 PARAMETER Experiment Name: At_Roots__P Parameter: Age (day) Value: 14 vs. 21
  misc_feature: MA Experiment 20000439 PARAMETER Experiment Name: At_Roots__P Parameter: Organism Value: A. thaliana
  misc_feature: MA Experiment 20000439 PARAMETER Experiment Name: At_Roots__P Parameter: Tissue Value: Roots vs. Whole Plant
  misc_feature: MA Experiment ID: 20000794 Result: Up-regulated in Transcription
  misc_feature: MA Experiment 20000794 PARAMETER Experiment Name: At_Petals_P Parameter: Age (day) Value: 23-25 days
  misc_feature: MA Experiment 20000794 PARAMETER Experiment Name: At_Petals_P Parameter: Plant Line Value: WS
  misc_feature: MA Experiment 20000794 PARAMETER Experiment Name: At_Petals_P Parameter: Tissue Value: Petals vs. Whole plant
  misc_feature: MA Experiment ID: 20001557 Result: Up-regulated in Transcription
  misc_feature: MA Experiment 20001557 PARAMETER Experiment Name: At_Drought_Soil_Dry_P Parameter: Age (day) Value: 27
  misc_feature: MA Experiment 20001557 PARAMETER Experiment Name: At_Drought_Soil_Dry_P Parameter: Organism Value: A. thaliana
  misc_feature: MA Experiment 20001557 PARAMETER Experiment Name: At_Drought_Soil_Dry_P Parameter: Plant Line Value: WS
  misc_feature: MA Experiment 20001557 PARAMETER Experiment Name: At_Drought_Soil_Dry_P Parameter: Post Timepoint (hr) Value: 3
  misc_feature: MA Experiment 20001557 PARAMETER Experiment Name: At_Drought_Soil_Dry_P Parameter: Post-Treatment Value: Re-Water vs. No Drought
  misc_feature: MA Experiment 20001557 PARAMETER Experiment Name: At_Drought_Soil_Dry_P Parameter: Timepoint (day) Value: 13
  misc_feature: MA Experiment 20001557 PARAMETER Experiment Name: At_Drought_Soil_Dry_P Parameter: Treatment Value: Drought vs. No Drought
  misc_feature: MA Experiment ID: 20001558 Result: Up-regulated in Transcription
  misc_feature: MA Experiment 20001558 PARAMETER Experiment Name: At_Drought_Soil_Dry_P Parameter: Age (day) Value: 27
  misc_feature: MA Experiment 20001558 PARAMETER Experiment Name: At_Drought_Soil_Dry_P Parameter: Organism Value: A. thaliana
  misc_feature: MA Experiment 20001558 PARAMETER Experiment Name: At_Drought_Soil_Dry_P Parameter: Plant Line Value: WS
  misc_feature: MA Experiment 20001558 PARAMETER Experiment Name: At_Drought_Soil_Dry_P Parameter: Post Timepoint (hr) Value: 6
  misc_feature: MA Experiment 20001558 PARAMETER Experiment Name: At_Drought_Soil_Dry_P Parameter: Post-Treatment Value: Re-Water vs. No Drought
  misc_feature: MA Experiment 20001558 PARAMETER Experiment Name: At_Drought_Soil_Dry_P Parameter: Timepoint (day) Value: 13
  misc_feature: MA Experiment 20001558 PARAMETER Experiment Name: At_Drought_Soil_Dry_P Parameter: Treatment Value: Drought vs. No Drought
  misc_feature: MA Experiment ID: 20001560 Result: Up-regulated in Transcription
  misc_feature: MA Experiment 20001560 PARAMETER Experiment Name: At_Drought_Soil_Dry_P Parameter: Age (day) Value: 28
  misc_feature: MA Experiment 20001560 PARAMETER Experiment Name: At_Drought_Soil_Dry_P Parameter: Organism Value: A. thaliana
  misc_feature: MA Experiment 20001560 PARAMETER Experiment Name: At_Drought_Soil_Dry_P Parameter: Plant Line Value: WS
  misc_feature: MA Experiment 20001560 PARAMETER Experiment Name: At_Drought_Soil_Dry_P Parameter: Post Timepoint (hr) Value: None
  misc_feature: MA Experiment 20001560 PARAMETER Experiment Name: At_Drought_Soil_Dry_P Parameter: Post-Treatment Value: None
  misc_feature: MA Experiment 20001560 PARAMETER Experiment Name: At_Drought_Soil_Dry_P Parameter: Timepoint (day) Value: 14
  misc_feature: MA Experiment 20001560 PARAMETER Experiment Name: At_Drought_Soil_Dry_P Parameter: Treatment Value: Drought vs. No Drought

SEQ ID NO: 50707 - protein, 948 aa, Arabidopsis thaliana; identical to SEQ ID NO: 50449
  peptide (1)..(948): Ceres Seq. ID no. 13647823
  misc_feature (323)..(609): Pfam Name: haloacid dehalogenase-like hydrolase Pfam Description: haloacid dehalogenase-like hydrolase
  misc_feature (323)..(609): Pfam Name: haloacid dehalogenase-like hydrolase Pfam Description: haloacid dehalogenase-like hydrolase
  misc_feature (323)..(609): Pfam Name: haloacid dehalogenase-like hydrolase Pfam Description: haloacid dehalogenase-like hydrolase
  misc_feature (753)..(804): Homolog of NCBI NO: 16751320 NR Description: putative plasma membrane-type proton ATPase
  misc_feature (10)..(751): Homolog of NCBI NO: 16751320 NR Description: putative plasma membrane-type proton ATPase
  misc_feature (744)..(813): Homolog of NCBI NO: 1709665 NR Description: Plasma membrane ATPase (Proton pump)
  misc_feature (10)..(736): Homolog of NCBI NO: 1709665 NR Description: Plasma membrane ATPase (Proton pump)
  misc_feature (757)..(813): Homolog of NCBI NO: 1709666 NR Description: Plasma membrane ATPase (Proton pump)
  misc_feature (753)..(804): Homolog of NCBI NO: 16751320 NR Description: putative plasma membrane-type proton ATPase
  misc_feature (744)..(813): Homolog of NCBI NO: 1709665 NR Description: Plasma membrane ATPase (Proton pump)
  misc_feature (757)..(813): Homolog of NCBI NO: 1709666 NR Description: Plasma membrane ATPase (Proton pump)
  misc_feature (10)..(736): Homolog of NCBI NO: 1709665 NR Description: Plasma membrane ATPase (Proton pump)
  misc_feature (744)..(813): Homolog of NCBI NO: 1709665 NR Description: Plasma membrane ATPase (Proton pump)
  misc_feature (10)..(751): Homolog of NCBI NO: 16751320 NR Description: putative plasma membrane-type proton ATPase
  misc_feature (753)..(804): Homolog of NCBI NO: 16751320 NR Description: putative plasma membrane-type proton ATPase
  misc_feature (10)..(842): Homolog of NCBI NO: 6691153 NR Description: plasma membrane H(+)-ATPase [Filobasidiella
  misc_feature (10)..(842): Homolog of NCBI NO: 3348073 NR Description: plasma membrane H(+)-ATPase 1 [Filobasidiella
  misc_feature (5)..(845): Homolog of NCBI NO: 2652922 NR Description: plasma membrane (H+) ATPase [Uromyces fabae]
  misc_feature (10)..(867): Homolog of NCBI NO: 1709664 NR Description: Probable plasma membrane ATPase (Proton pump)
  misc_feature (10)..(748): Homolog of NCBI NO: 1709666 NR Description: Plasma membrane ATPase (Proton pump)
  misc_feature (10)..(842): Homolog of NCBI NO: 6691153 NR Description: plasma membrane H(+)-ATPase [Filobasidiella
  misc_feature (10)..(842): Homolog of NCBI NO: 3348073 NR Description: plasma membrane H(+)-ATPase 1 [Filobasidiella
  misc_feature (5)..(845): Homolog of NCBI NO: 2652922 NR Description: plasma membrane (H+) ATPase [Uromyces fabae]
  misc_feature (10)..(867): Homolog of NCBI NO: 1709664 NR Description: Probable plasma membrane ATPase (Proton pump)
  misc_feature (10)..(748): Homolog of NCBI NO: 1709666 NR Description: Plasma membrane ATPase (Proton pump)
  misc_feature (757)..(813): Homolog of NCBI NO: 1709666 NR Description: Plasma membrane ATPase (Proton pump)
  misc_feature (10)..(736): Homolog of NCBI NO: 1709665 NR Description: Plasma membrane ATPase (Proton pump)
  misc_feature (10)..(751): Homolog of NCBI NO: 16751320 NR Description: putative plasma membrane-type proton ATPase
  misc_feature (10)..(748): Homolog of NCBI NO: 1709666 NR Description: Plasma membrane ATPase (Proton pump)
  misc_feature (10)..(867): Homolog of NCBI NO: 1709664 NR Description: Probable plasma membrane ATPase (Proton pump)
  misc_feature (5)..(845): Homolog of NCBI NO: 2652922 NR Description: plasma membrane (H+) ATPase [Uromyces fabae]
  misc_feature (10)..(842): Homolog of NCBI NO: 3348073 NR Description: plasma membrane H(+)-ATPase 1 [Filobasidiella
  misc_feature (10)..(842): Homolog of NCBI NO: 6691153 NR Description: plasma membrane H(+)-ATPase [Filobasidiella

SEQ ID NO: 50708 - protein, 884 aa, Arabidopsis thaliana; identical to SEQ ID NO: 50450
  peptide (1)..(884): Ceres Seq. ID no. 13647824
  misc_feature (259)..(545): Pfam Name: haloacid dehalogenase-like hydrolase Pfam Description: haloacid dehalogenase-like hydrolase
  misc_feature (259)..(545): Pfam Name: haloacid dehalogenase-like hydrolase Pfam Description: haloacid dehalogenase-like hydrolase
  misc_feature (259)..(545): Pfam Name: haloacid dehalogenase-like hydrolase Pfam Description: haloacid dehalogenase-like hydrolase
  misc_feature (689)..(740): Homolog of NCBI NO: 16751320 NR Description: putative plasma membrane-type proton ATPase
  misc_feature (1)..(687): Homolog of NCBI NO: 16751320 NR Description: putative plasma membrane-type proton ATPase
  misc_feature (680)..(749): Homolog of NCBI NO: 1709665 NR Description: Plasma membrane ATPase (Proton pump)
  misc_feature (1)..(672): Homolog of NCBI NO: 1709665 NR Description: Plasma membrane ATPase (Proton pump)
  misc_feature (693)..(749): Homolog of NCBI NO: 1709666 NR Description: Plasma membrane ATPase (Proton pump)
  misc_feature (689)..(740): Homolog of NCBI NO: 16751320 NR Description: putative plasma membrane-type proton ATPase
  misc_feature (680)..(749): Homolog of NCBI NO: 1709665 NR Description: Plasma membrane ATPase (Proton pump)
  misc_feature (693)..(749): Homolog of NCBI NO: 1709666 NR Description: Plasma membrane ATPase (Proton pump)
  misc_feature (1)..(672): Homolog of NCBI NO: 1709665 NR Description: Plasma membrane ATPase (Proton pump)
  misc_feature (680)..(749): Homolog of NCBI NO: 1709665 NR Description: Plasma membrane ATPase (Proton pump)
  misc_feature (1)..(687): Homolog of NCBI NO: 16751320 NR Description: putative plasma membrane-type proton ATPase
  misc_feature (689)..(740): Homolog of NCBI NO: 16751320 NR Description: putative plasma membrane-type proton ATPase
  misc_feature (1)..(778): Homolog of NCBI NO: 6691153 NR Description: plasma membrane H(+)-ATPase [Filobasidiella
  misc_feature (1)..(778): Homolog of NCBI NO: 3348073 NR Description: plasma membrane H(+)-ATPase 1 [Filobasidiella
  misc_feature (1)..(781): Homolog of NCBI NO: 2652922 NR Description: plasma membrane (H+) ATPase [Uromyces fabae]
  misc_feature (1)..(803): Homolog of NCBI NO: 1709664 NR Description: Probable plasma membrane ATPase (Proton pump)
  misc_feature (1)..(684): Homolog of NCBI NO: 1709666 NR Description: Plasma membrane ATPase (Proton pump)
  misc_feature (1)..(778): Homolog of NCBI NO: 6691153 NR Description: plasma membrane H(+)-ATPase [Filobasidiella
  misc_feature (1)..(778): Homolog of NCBI NO: 3348073 NR Description: plasma membrane H(+)-ATPase 1 [Filobasidiella
  misc_feature (1)..(781): Homolog of NCBI NO: 2652922 NR Description: plasma membrane (H+) ATPase [Uromyces fabae]
  misc_feature (1)..(803): Homolog of NCBI NO: 1709664 NR Description: Probable plasma membrane ATPase (Proton pump)
  misc_feature (1)..(684): Homolog of NCBI NO: 1709666 NR Description: Plasma membrane ATPase (Proton pump)
  misc_feature (693)..(749): Homolog of NCBI NO: 1709666 NR Description: Plasma membrane ATPase (Proton pump)
  misc_feature (1)..(672): Homolog of NCBI NO: 1709665 NR Description: Plasma membrane ATPase (Proton pump)
  misc_feature (1)..(687): Homolog of NCBI NO: 16751320 NR Description: putative plasma membrane-type proton ATPase
  misc_feature (1)..(684): Homolog of NCBI NO: 1709666 NR Description: Plasma membrane ATPase (Proton pump)
  misc_feature (1)..(803): Homolog of NCBI NO: 1709664 NR Description: Probable plasma membrane ATPase (Proton pump)
  misc_feature (1)..(781): Homolog of NCBI NO: 2652922 NR Description: plasma membrane (H+) ATPase [Uromyces fabae]
  misc_feature (1)..(778): Homolog of NCBI NO: 3348073 NR Description: plasma membrane H(+)-ATPase 1 [Filobasidiella
  misc_feature (1)..(778): Homolog of NCBI NO: 6691153 NR Description: plasma membrane H(+)-ATPase [Filobasidiella

SEQ ID NO: 50709 - protein, 876 aa, Arabidopsis thaliana; identical to SEQ ID NO: 50451
  peptide (1)..(876): Ceres Seq. ID no. 13647825
  misc_feature (251)..(537): Pfam Name: haloacid dehalogenase-like hydrolase Pfam Description: haloacid dehalogenase-like hydrolase
  misc_feature (251)..(537): Pfam Name: haloacid dehalogenase-like hydrolase Pfam Description: haloacid dehalogenase-like hydrolase
  misc_feature (251)..(537): Pfam Name: haloacid dehalogenase-like hydrolase Pfam Description: haloacid dehalogenase-like hydrolase
  misc_feature (681)..(732): Homolog of NCBI NO: 16751320 NR Description: putative plasma membrane-type proton ATPase
  misc_feature (1)..(679): Homolog of NCBI NO: 16751320 NR Description: putative plasma membrane-type proton ATPase
  misc_feature (672)..(741): Homolog of NCBI NO: 1709665 NR Description: Plasma membrane ATPase (Proton pump)
  misc_feature (1)..(664): Homolog of NCBI NO: 1709665 NR Description: Plasma membrane ATPase (Proton pump)
  misc_feature (685)..(741): Homolog of NCBI NO: 1709666 NR Description: Plasma membrane ATPase (Proton pump)
  misc_feature (681)..(732): Homolog of NCBI NO: 16751320 NR Description: putative plasma membrane-type proton ATPase
  misc_feature (672)..(741): Homolog of NCBI NO: 1709665 NR Description: Plasma membrane ATPase (Proton pump)
  misc_feature (685)..(741): Homolog of NCBI NO: 1709666 NR Description: Plasma membrane ATPase (Proton pump)
  misc_feature (1)..(664): Homolog of NCBI NO: 1709665 NR Description: Plasma membrane ATPase (Proton pump)
  misc_feature (672)..(741): Homolog of NCBI NO: 1709665 NR Description: Plasma membrane ATPase (Proton pump)
  misc_feature (1)..(679): Homolog of NCBI NO: 16751320 NR Description: putative plasma membrane-type proton ATPase
  misc_feature (681)..(732): Homolog of NCBI NO: 16751320 NR Description: putative plasma membrane-type proton ATPase
  misc_feature (1)..(770): Homolog of NCBI NO: 6691153 NR Description: plasma membrane H(+)-ATPase [Filobasidiella
  misc_feature (1)..(770): Homolog of NCBI NO: 3348073 NR Description: plasma membrane H(+)-ATPase 1 [Filobasidiella
  misc_feature (1)..(773): Homolog of NCBI NO: 2652922 NR Description: plasma membrane (H+) ATPase [Uromyces fabae]
  misc_feature (1)..(795): Homolog of NCBI NO: 1709664 NR Description: Probable plasma membrane ATPase (Proton pump)
  misc_feature (1)..(676): Homolog of NCBI NO: 1709666 NR Description: Plasma membrane ATPase (Proton pump)
  misc_feature (1)..(770): Homolog of NCBI NO: 6691153 NR Description: plasma membrane H(+)-ATPase [Filobasidiella
  misc_feature (1)..(770): Homolog of NCBI NO: 3348073 NR Description: plasma membrane H(+)-ATPase 1 [Filobasidiella
  misc_feature (1)..(773): Homolog of NCBI NO: 2652922 NR Description: plasma membrane (H+) ATPase [Uromyces fabae]
  misc_feature (1)..(795): Homolog of NCBI NO: 1709664 NR Description: Probable plasma membrane ATPase (Proton pump)
  misc_feature (1)..(676): Homolog of NCBI NO: 1709666 NR Description: Plasma membrane ATPase (Proton pump)
  misc_feature (685)..(741): Homolog of NCBI NO: 1709666 NR Description: Plasma membrane ATPase (Proton pump)
  misc_feature (1)..(664): Homolog of NCBI NO: 1709665 NR Description: Plasma membrane ATPase (Proton pump)
  misc_feature (1)..(679): Homolog of NCBI NO: 16751320 NR Description: putative plasma membrane-type proton ATPase
  misc_feature (1)..(676): Homolog of NCBI NO: 1709666 NR Description: Plasma membrane ATPase (Proton pump)
  misc_feature (1)..(795): Homolog of NCBI NO: 1709664 NR Description: Probable plasma membrane ATPase (Proton pump)
  misc_feature (1)..(773): Homolog of NCBI NO: 2652922 NR Description: plasma membrane (H+) ATPase [Uromyces fabae]
  misc_feature (1)..(770): Homolog of NCBI NO: 3348073 NR Description: plasma membrane H(+)-ATPase 1 [Filobasidiella
  misc_feature (1)..(770): Homolog of NCBI NO: 6691153 NR Description: plasma membrane H(+)-ATPase [Filobasidiella

SEQ ID NO: 50710 - DNA, 2418 bp, Arabidopsis thaliana
  misc_feature (1)..(2418): Ceres Seq. ID no. 12559742
  misc_feature: MA Experiment ID: 20000180 Result: Up-regulated in Transcription
  misc_feature: MA Experiment 20000180 PARAMETER Experiment Name: At_Germinating_Seeds_P Parameter: Age (hr) Value: 24 vs. 0
  misc_feature: MA Experiment 20000180 PARAMETER Experiment Name: At_Germinating_Seeds_P Parameter: Tissue Value: Germinating Seeds
  misc_feature: MA Experiment ID: 20000182 Result: Down-regulated in Transcription
  misc_feature: MA Experiment 20000182 PARAMETER Experiment Name: At_2mM_SA_P Parameter: Age (day) Value: 14
  misc_feature: MA Experiment 20000182 PARAMETER Experiment Name: At_2mM_SA_P Parameter: Organism Value: A. thaliana
  misc_feature: MA Experiment 20000182 PARAMETER Experiment Name: At_2mM_SA_P Parameter: Plant Line Value: WS
  misc_feature: MA Experiment 20000182 PARAMETER Experiment Name: At_2mM_SA_P Parameter: Timepoint (hr) Value: 6
  misc_feature: MA Experiment 20000182 PARAMETER Experiment Name: At_2mM_SA_P Parameter: Tissue Value: Aerial
  misc_feature: MA Experiment 20000182 PARAMETER Experiment Name: At_2mM_SA_P Parameter: Treatment Value: 2mM SA vs. No Treatment
  misc_feature: MA Experiment ID: 20000184 Result: Up-regulated in Transcription
  misc_feature: MA Experiment 20000184 PARAMETER Experiment Name: At_Shoots__P Parameter: Age (day) Value: 7
  misc_feature: MA Experiment 20000184 PARAMETER Experiment Name: At_Shoots__P Parameter: Tissue Value: Shoots vs. Whole Plant
  misc_feature: MA Experiment ID: 20000185 Result: Down-regulated in Transcription
  misc_feature: MA Experiment 20000185 PARAMETER Experiment Name: At_Roots__P Parameter: Age (day) Value: 7 vs. 21
  misc_feature: MA Experiment 20000185 PARAMETER Experiment Name: At_Roots__P Parameter: Organism Value: A. thaliana
  misc_feature: MA Experiment 20000185 PARAMETER Experiment Name: At_Roots__P Parameter: Tissue Value: Roots vs. Whole Plant
  misc_feature: MA Experiment ID: 20000265 Result: Up-regulated in Transcription
  misc_feature: MA Experiment 20000265 PARAMETER Experiment Name: At_Open_Flower_P Parameter: Age (day) Value: 21
  misc_feature: MA Experiment 20000265 PARAMETER Experiment Name: At_Open_Flower_P Parameter: Plant Line Value: WS
  misc_feature: MA Experiment 20000265 PARAMETER Experiment Name: At_Open_Flower_P Parameter: Tissue Value: Closed Flower vs. Whole Plant
  misc_feature: MA Experiment ID: 20000437 Result: Down-regulated in Transcription
  misc_feature: MA Experiment 20000437 PARAMETER Experiment Name: At_Drought_P Parameter: Age (day) Value: 8
  misc_feature: MA Experiment 20000437 PARAMETER Experiment Name: At_Drought_P Parameter: Organism Value: A. thaliana
  misc_feature: MA Experiment 20000437 PARAMETER Experiment Name: At_Drought_P Parameter: Plant Line Value: WS
  misc_feature: MA Experiment 20000437 PARAMETER Experiment Name: At_Drought_P Parameter: Timepoint (hr) Value: 24
  misc_feature: MA Experiment 20000437 PARAMETER Experiment Name: At_Drought_P Parameter: Tissue Value: Whole Plant
  misc_feature: MA Experiment 20000437 PARAMETER Experiment Name: At_Drought_P Parameter: Treatment Value: Drought vs. No Drought
  misc_feature: MA Experiment ID: 20000438 Result: Up-regulated in Transcription
  misc_feature: MA Experiment 20000438 PARAMETER Experiment Name: At_Shoots__P Parameter: Age (day) Value: 14
  misc_feature: MA Experiment 20000438 PARAMETER Experiment Name: At_Shoots__P Parameter: Tissue Value: Shoots vs. Whole Plant
  misc_feature: MA Experiment ID: 20000439 Result: Down-regulated in Transcription
  misc_feature: MA Experiment 20000439 PARAMETER Experiment Name: At_Roots__P Parameter: Age (day) Value: 14 vs. 21
  misc_feature: MA Experiment 20000439 PARAMETER Experiment Name: At_Roots__P Parameter: Organism Value: A. thaliana
  misc_feature: MA Experiment 20000439 PARAMETER Experiment Name: At_Roots__P Parameter: Tissue Value: Roots vs. Whole Plant
  misc_feature: MA Experiment ID: 20000794 Result: Down-regulated in Transcription
  misc_feature: MA Experiment 20000794 PARAMETER Experiment Name: At_Petals_P Parameter: Age (day) Value: 23-25 days
  misc_feature: MA Experiment 20000794 PARAMETER Experiment Name: At_Petals_P Parameter: Plant Line Value: WS
  misc_feature: MA Experiment 20000794 PARAMETER Experiment Name: At_Petals_P Parameter: Tissue Value: Petals vs. Whole plant
  misc_feature: MA Experiment ID: 20001248 Result: Down-regulated in Transcription
  misc_feature: MA Experiment 20001248 PARAMETER Experiment Name: At_Far-red-induction_P Parameter: Age (day) Value: 7
  misc_feature: MA Experiment 20001248 PARAMETER Experiment Name: At_Far-red-induction_P Parameter: Light Value: Far-red vs. White
  misc_feature: MA Experiment 20001248 PARAMETER Experiment Name: At_Far-red-induction_P Parameter: Organism Value: A. thaliana
  misc_feature: MA Experiment 20001248 PARAMETER Experiment Name: At_Far-red-induction_P Parameter: Plant Line Value: Columbia
  misc_feature: MA Experiment 20001248 PARAMETER Experiment Name: At_Far-red-induction_P Parameter: Timepoint (hr) Value: 4
  misc_feature: MA Experiment 20001248 PARAMETER Experiment Name: At_Far-red-induction_P Parameter: Tissue Value: Whole Plant
  misc_feature: MA Experiment ID: 20001757 Result: Up-regulated in Transcription
  misc_feature: MA Experiment 20001757 PARAMETER Experiment Name: At_50mM_NH4NO3_L-to-H_P Parameter: Timepoint (hr) Value: 6
  misc_feature: MA Experiment 20001757 PARAMETER Experiment Name: At_50mM_NH4NO3_L-to-H_P Parameter: Tissue Value: Leaf
  misc_feature: MA Experiment 20001757 PARAMETER Experiment Name: At_50mM_NH4NO3_L-to-H_P Parameter: Treatment Value: 50mM NH4NO3 vs 100mM Mannitol
  misc_feature: MA Experiment ID: 20001904 Result: Down-regulated in Transcription
  misc_feature: MA Experiment 20001904 PARAMETER Experiment Name: At_Drought_Reproduction_P Parameter: Age (day) Value: 37
  misc_feature: MA Experiment 20001904 PARAMETER Experiment Name: At_Drought_Reproduction_P Parameter: Organism Value: A. thaliana
  misc_feature: MA Experiment 20001904 PARAMETER Experiment Name: At_Drought_Reproduction_P Parameter: Plant Line Value: WS
  misc_feature: MA Experiment 20001904 PARAMETER Experiment Name: At_Drought_Reproduction_P Parameter: Timepoint (day) Value: 7
  misc_feature: MA Experiment 20001904 PARAMETER Experiment Name: At_Drought_Reproduction_P Parameter: Tissue Value: Rosettes
  misc_feature: MA Experiment 20001904 PARAMETER Experiment Name: At_Drought_Reproduction_P Parameter: Treatment Value: Drought vs. No Drought
  misc_feature: MA Experiment ID: 20001905 Result: Down-regulated in Transcription
  misc_feature: MA Experiment 20001905 PARAMETER Experiment Name: At_Drought_Reproduction_P Parameter: Age (day) Value: 40
  misc_feature: MA Experiment 20001905 PARAMETER Experiment Name: At_Drought_Reproduction_P Parameter: Organism Value: A. thaliana
  misc_feature: MA Experiment 20001905 PARAMETER Experiment Name: At_Drought_Reproduction_P Parameter: Plant Line Value: WS
  misc_feature: MA Experiment 20001905 PARAMETER Experiment Name: At_Drought_Reproduction_P Parameter: Timepoint (day) Value: 10
  misc_feature: MA Experiment 20001905 PARAMETER Experiment Name: At_Drought_Reproduction_P Parameter: Tissue Value: Rosettes
  misc_feature: MA Experiment 20001905 PARAMETER Experiment Name: At_Drought_Reproduction_P Parameter: Treatment Value: Drought vs. No Drought
  misc_feature: MA Experiment ID: 20001906 Result: Down-regulated in Transcription
  misc_feature: MA Experiment 20001906 PARAMETER Experiment Name: At_Drought_Reproduction_P Parameter: Age (day) Value: 35
  misc_feature: MA Experiment 20001906 PARAMETER Experiment Name: At_Drought_Reproduction_P Parameter: Organism Value: A. thaliana
  misc_feature: MA Experiment 20001906 PARAMETER Experiment Name: At_Drought_Reproduction_P Parameter: Plant Line Value: WS
  misc_feature: MA Experiment 20001906 PARAMETER Experiment Name: At_Drought_Reproduction_P Parameter: Timepoint (day) Value: 5
  misc_feature: MA Experiment 20001906 PARAMETER Experiment Name: At_Drought_Reproduction_P Parameter: Tissue Value: Siliques
  misc_feature: MA Experiment 20001906 PARAMETER Experiment Name: At_Drought_Reproduction_P Parameter: Treatment Value: Drought vs. No Drought
gtggttcaacctctatctctctctctttctgccatgaaaatgcaaagccaaatgtaatagttagagagggagaaaccaagaactgaaagaccatgacttccaacagaagcaacctcctgttctcattagtcctcttccactttctttttgtccccacacaactccaagctcttaacactgatggtgttcttctgcttactttcaaatactccatcctcactgaccctctctctgttctacgcaattggaactatgatgatgcaacaccatgcttgtggacaggtgtcacatgtacagagcttgggaagcctaacacaccagacatgttcagagtcacaagcttggtacttcccaacaaacaccttttgggttccatcactccggacttgttctcgattccatatctaaggatcttggatctgtctagcaatttcttcaacgggtcactcccggactcggtgttcaacgccactgagcttcagagtatctcccttggaagcaacaatctctctggtgatttgcccaagagtgtcaacagtgtgactaatctccagctcttgaatctctcagctaacgcatttactggcgaaattccgctcaacatctcacttctgaagaatctaacggtcgtttccttgtcaaaaaacaccttttcaggtgatattccaagtggtttcgaagcagcacagattcttgatctttcttcaaatcttctcaacggctctcttcccaaggatttgggaggaaaaagcctgcattacttgaacttatcacacaacaaagtcctcggcgagatttctccaaattttgcagagaagtttccagcaaatgccacagtcgatctctcctttaacaacctcacaggcccaatcccaagttccctttctttacttaaccaaaaggctgagtctttttccggtaaccaagagctttgtgggaagccattgaagatcctttgttcaattccttccactctttcaaaccctccaaatatctctgaaactacttcaccagcaatagcagttaaaccaagaagtacagctccaataaaccctttgacagaaaaaccaaatcagacaggaaaaagcaagctaaagccaagcaccattgccgcaatcacagttgcagatatagttggtctagctttcattggtctactcgtgctctacgtataccaagtcaggaaacgcagaaggtacccagaatctagcaaatttagcttcttcaagttctgtctggagaaaaacgaagccaagaaatcgaaaccaagcaccactgaggtcacagtcccagaatcaccagaggccaaaacgacatgcggttcatgcattatcttgaccggaggaaggtacgacgagacatcgacatcagagagcgacgtagagaatcaacaaaccgttcaggcattcactcgaacagatggtgggcaactgaagcagagctcccaaactcaattggttacagtcgacggcgagactcggctagatctagacactctgctaaaggcatctgcttacatattgggaaccaccggaaccgggatcgtgtataaggcggtgctggagaacggcacggcattcgcggtgaggcggatcgagacggagagctgtgcggctgcgaaacccaaggaattcgagagggaggttcgtgccatcgctaagcttcgtcacccaaatctcgtcagaattcgtgggttctgctggggagacgacgagaaacttctcatttccgattatgttcccaatggcagcctcctctgtttcttcaccgccactaaggcaagctcaagctcatcttcttcgtcgtcattacaaaaccctcttacttttgaagcacggctcaagatagcaagaggaatggctagaggactatcttacatcaatgagaagaaacaagtgcacggtaacatcaagcccaataacattctcttgaacgctgagaatgagcccatcatcaccgatttagggctagaccgcctcatgacaccagcgcgtgaatctcacaccactggaccaacttcgagctcaccgtaccagccaccggaatggtccacaagcctgaaaccaaaccctaaatgggacgtttactcctttggcgtcatacttttagaacttctcacaagcaaagtgttctcggtagatcatgatatagatcagttctcaaacttatccgactctgcagcggaagagaatggccggttcttgaggttaatcgacggtgcaattaggagtgatgtcgctcgccatgaggatgctgcaatggcgtgctttaggttagggattgaatgtgtctcttccttgcctcagaagcgaccatccatgaaagaattggtgcaagtgttggagaaaatttgtgttttagtttgatttcttaattcgtatagcctaagtcgttttggcaatatagaaagttatgtgt

SEQ ID NO: 50711 - protein, 757 aa, Arabidopsis thaliana
  peptide (1)..(757): Ceres Seq. ID no. 12559743
  misc_feature (8)..(301): Homolog of NCBI NO: 15219755 NR Description: leucine-rich repeat transmembrane protein kinase,
  misc_feature (448)..(753): Homolog of NCBI NO: 15219755 NR Description: leucine-rich repeat transmembrane protein kinase,
  misc_feature (625)..(755): Homolog of NCBI NO: 15240265 NR Description: leucine-rich repeat transmembrane protein kinase,
  misc_feature (1)..(501): Homolog of NCBI NO: 15240265 NR Description: leucine-rich repeat transmembrane protein kinase,
  misc_feature (628)..(752): Homolog of NCBI NO: 15227808 NR Description: leucine-rich repeat transmembrane protein kinase,
  misc_feature (2)..(555): Homolog of NCBI NO: 15227808 NR Description: leucine-rich repeat transmembrane protein kinase,
  misc_feature (9)..(752): Homolog of NCBI NO: 18086496 NR Description: AT4g37250/C7A10_110 [Arabidopsis thaliana]
  misc_feature (9)..(752): Homolog of NCBI NO: 30690913 NR Description: leucine rich repeat protein family [Arabidopsis
  misc_feature (9)..(752): Homolog of NCBI NO: 25387059 NR Description: receptor kinase-like protein [imported] -
  misc_feature (1)..(755): Homolog of NCBI NO: 15226084 NR Description: leucine-rich repeat transmembrane protein kinase,
MTSNRSNLLFSLVLFHFLFVPTQLQALNTDGVLLLTFKYSILTDPLSVLRNWNYDDATPCLWTGVTCTELGKPNTPDMFRVTSLVLPNKHLLGSITPDLFSIPYLRILDLSSNFFNGSLPDSVFNATELQSISLGSNNLSGDLPKSVNSVTNLQLLNLSANAFTGEIPLNISLLKNLTVVSLSKNTFSGDIPSGFEAAQILDLSSNLLNGSLPKDLGGKSLHYLNLSHNKVLGEISPNFAEKFPANATVDLSFNNLTGPIPSSLSLLNQKAESFSGNQELCGKPLKILCSIPSTLSNPPNISETTSPAIAVKPRSTAPINPLTEKPNQTGKSKLKPSTIAAITVADIVGLAFIGLLVLYVYQVRKRRRYPESSKFSFFKFCLEKNEAKKSKPSTTEVTVPESPEAKTTCGSCIILTGGRYDETSTSESDVENQQTVQAFTRTDGGQLKQSSQTQLVTVDGETRLDLDTLLKASAYILGTTGTGIVYKAVLENGTAFAVRRIETESCAAAKPKEFEREVRAIAKLRHPNLVRIRGFCWGDDEKLLISDYVPNGSLLCFFTATKASSSSSSSSSLQNPLTFEARLKIARGMARGLSYINEKKQVHGNIKPNNILLNAENEPIITDLGLDRLMTPARESHTTGPTSSSPYQPPEWSTSLKPNPKWDVYSFGVILLELLTSKVFSVDHDIDQFSNLSDSAAEENGRFLRLIDGAIRSDVARHEDAAMACFRLGIECVSSLPQKRPSMKELVQVLEKICVLV

SEQ ID NO: 50712 - protein, 680 aa, Arabidopsis thaliana
  peptide (1)..(680): Ceres Seq. ID no. 12559744
  misc_feature (1)..(224): Homolog of NCBI NO: 15219755 NR Description: leucine-rich repeat transmembrane protein kinase,
  misc_feature (371)..(676): Homolog of NCBI NO: 15219755 NR Description: leucine-rich repeat transmembrane protein kinase,
  misc_feature (548)..(678): Homolog of NCBI NO: 15240265 NR Description: leucine-rich repeat transmembrane protein kinase,
  misc_feature (1)..(424): Homolog of NCBI NO: 15240265 NR Description: leucine-rich repeat transmembrane protein kinase,
  misc_feature (551)..(675): Homolog of NCBI NO: 15227808 NR Description: leucine-rich repeat transmembrane protein kinase,
  misc_feature (1)..(478): Homolog of NCBI NO: 15227808 NR Description: leucine-rich repeat transmembrane protein kinase,
  misc_feature (1)..(675): Homolog of NCBI NO: 18086496 NR Description: AT4g37250/C7A10_110 [Arabidopsis thaliana]
  misc_feature (1)..(675): Homolog of NCBI NO: 30690913 NR Description: leucine rich repeat protein family [Arabidopsis
  misc_feature (1)..(675): Homolog of NCBI NO: 25387059 NR Description: receptor kinase-like protein [imported] -
  misc_feature (1)..(678): Homolog of NCBI NO: 15226084 NR Description: leucine-rich repeat transmembrane protein kinase,
MFRVTSLVLPNKHLLGSITPDLFSIPYLRILDLSSNFFNGSLPDSVFNATELQSISLGSNNLSGDLPKSVNSVTNLQLLNLSANAFTGEIPLNISLLKNLTVVSLSKNTFSGDIPSGFEAAQILDLSSNLLNGSLPKDLGGKSLHYLNLSHNKVLGEISPNFAEKFPANATVDLSFNNLTGPIPSSLSLLNQKAESFSGNQELCGKPLKILCSIPSTLSNPPNISETTSPAIAVKPRSTAPINPLTEKPNQTGKSKLKPSTIAAITVADIVGLAFIGLLVLYVYQVRKRRRYPESSKFSFFKFCLEKNEAKKSKPSTTEVTVPESPEAKTTCGSCIILTGGRYDETSTSESDVENQQTVQAFTRTDGGQLKQSSQTQLVTVDGETRLDLDTLLKASAYILGTTGTGIVYKAVLENGTAFAVRRIETESCAAAKPKEFEREVRAIAKLRHPNLVRIRGFCWGDDEKLLISDYVPNGSLLCFFTATKASSSSSSSSSLQNPLTFEARLKIARGMARGLSYINEKKQVHGNIKPNNILLNAENEPIITDLGLDRLMTPARESHTTGPTSSSPYQPPEWSTSLKPNPKWDVYSFGVILLELLTSKVFSVDHDIDQFSNLSDSAAEENGRFLRLIDGAIRSDVARHEDAAMACFRLGIECVSSLPQKRPSMKELVQVLEKICVLV

SEQ ID NO: 50713 - DNA, 636 bp, Arabidopsis thaliana
  misc_feature (1)..(636): Ceres Seq. ID no. 1957209
  misc_feature: MA Experiment ID: 108433 Result: Up-regulated in Transcription
  misc_feature: MA Experiment 108433 PARAMETER Experiment Name: At_rhl_Mutant2_cDNA_P Parameter: Age (day) Value: 7
  misc_feature: MA Experiment 108433 PARAMETER Experiment Name: At_rhl_Mutant2_cDNA_P Parameter: Organism Value: A. thaliana
  misc_feature: MA Experiment 108433 PARAMETER Experiment Name: At_rhl_Mutant2_cDNA_P Parameter: Plant Line Value: rhl Mutant vs. wt landsburg
  misc_feature: MA Experiment 108433 PARAMETER Experiment Name: At_rhl_Mutant2_cDNA_P Parameter: Tissue Value: Roots
  misc_feature: MA Experiment ID: 108434 Result: Down-regulated in Transcription
  misc_feature: MA Experiment 108434 PARAMETER Experiment Name: At_Root_Tips_cDNA_P Parameter: Tissue Value: Root Tips
  misc_feature: MA Experiment ID: 108488 Result: Down-regulated in Transcription
gggagaagaagaaaaagaagatcaatgacgttgaagaagcttgacgcgaatccatcgaccttagaatcgattttacaggaactgaaatcagacgagacaaatcgtagcaagatcaatttcatactcttcctcgccgacaatgatcccaccaccggtcaaagctggtgtccagactgtgttagagctgaacctgtgatttacaagactctagaggaatttccagaggaggtgaatctaattcgtgcttacgccggagaccgaccgacgtggcggactccggcgcatccttggagagttgattctcggtttaagctaacccggagtaccaactcttgttcgttgggatggtgactctggttaaggacgtcttggaaantattaaagctcacctttcttacttgattctttccctttttgccccttcacttgaattgatcgatttcgatttcttcgggactatcgtgggattgaggtcaaatatcttatatatattctagtgggaattggttttcaataaatccttacaatgggtaaanggaaagttggtttnttcgatgatctttacgatttcnggctcaatggaaggggtatttntctataaattaccggggatattanctgaattctaactttggg

SEQ ID NO: 50714 - protein, 116 aa, Arabidopsis thaliana
  peptide (1)..(116): Ceres Seq. ID no. 1957210
  misc_feature (9)..(106): Pfam Name: Eukaryotic protein of unknown function (DUF953) Pfam Description: Eukaryotic protein of unknown function (DUF953)
  misc_feature (32)..(98): Homolog of NCBI NO: 14249348 NR Description: hypothetical protein MGC14353 [Homo sapiens]
  misc_feature (32)..(106): Homolog of NCBI NO: 15216177 NR Description: putative 42-9-9 protein [Bos taurus]
  misc_feature (29)..(106): Homolog of NCBI NO: 13386060 NR Description: hypothetical protein D11Ertd672e; putative 42-9-9
  misc_feature (29)..(106): Homolog of NCBI NO: 27673864 NR Description: similar to hypothetical protein D11Ertd672e
  misc_feature (29)..(106): Homolog of NCBI NO: 15216179 NR Description: putative 42-9-9 protein [Mus musculus]
  misc_feature (29)..(106): Homolog of NCBI NO: 12835324 NR Description: unnamed protein product [Mus musculus]
  misc_feature (10)..(106): Homolog of NCBI NO: 39585269 NR Description: Hypothetical protein CBG00487 [Caenorhabditis
  misc_feature (22)..(106): Homolog of NCBI NO: 17556458 NR Description: Putative cytoplasmic protein of eukaryotic origin
  misc_feature (9)..(106): Homolog of NCBI NO: 18422261 NR Description: expressed protein
  misc_feature (9)..(106): Homolog of NCBI NO: 21592399 NR Description: unknown [Arabidopsis thaliana]
GRRRKRRSMTLKKLDANPSTLESILQELKSDETNRSKINFILFLADNDPTTGQSWCPDCVRAEPVIYKTLEEFPEEVNLIRAYAGDRPTWRTPAHPWRVDSRFKLTRSTNSCSLGW

SEQ ID NO: 50715 - protein, 108 aa, Arabidopsis thaliana
  peptide (1)..(108): Ceres Seq. ID no. 1957211
  misc_feature (1)..(98): Pfam Name: Eukaryotic protein of unknown function (DUF953) Pfam Description: Eukaryotic protein of unknown function (DUF953)
  misc_feature (24)..(90): Homolog of NCBI NO: 14249348 NR Description: hypothetical protein MGC14353 [Homo sapiens]
  misc_feature (24)..(98): Homolog of NCBI NO: 15216177 NR Description: putative 42-9-9 protein [Bos taurus]
  misc_feature (21)..(98): Homolog of NCBI NO: 13386060 NR Description: hypothetical protein D11Ertd672e; putative 42-9-9
  misc_feature (21)..(98): Homolog of NCBI NO: 27673864 NR Description: similar to hypothetical protein D11Ertd672e
  misc_feature (21)..(98): Homolog of NCBI NO: 15216179 NR Description: putative 42-9-9 protein [Mus musculus]
  misc_feature (21)..(98): Homolog of NCBI NO: 12835324 NR Description: unnamed protein product [Mus musculus]
  misc_feature (2)..(98): Homolog of NCBI NO: 39585269 NR Description: Hypothetical protein CBG00487 [Caenorhabditis
  misc_feature (14)..(98): Homolog of NCBI NO: 17556458 NR Description: Putative cytoplasmic protein of eukaryotic origin
  misc_feature (1)..(98): Homolog of NCBI NO: 18422261 NR Description: expressed protein
  misc_feature (1)..(98): Homolog of NCBI NO: 21592399 NR Description: unknown [Arabidopsis thaliana]
MTLKKLDANPSTLESILQELKSDETNRSKINFILFLADNDPTTGQSWCPDCVRAEPVIYKTLEEFPEEVNLIRAYAGDRPTWRTPAHPWRVDSRFKLTRSTNSCSLGW

SEQ ID NO: 50716 - DNA, 926 bp, Arabidopsis thaliana
  misc_feature (1)..(926): Ceres Seq. ID no. 12558873
  misc_feature: MA Experiment ID: 20000307 Result: Up-regulated in Transcription
  misc_feature: MA Experiment 20000307 PARAMETER Experiment Name: At_Germinating_Seeds_Sub_P Parameter: Age (hr) Value: 24 vs. 0
  misc_feature: MA Experiment 20000307 PARAMETER Experiment Name: At_Germinating_Seeds_Sub_P Parameter: Organism Value: A. thaliana
  misc_feature: MA Experiment 20000307 PARAMETER Experiment Name: At_Germinating_Seeds_Sub_P Parameter: Plant Line Value: WS
  misc_feature: MA Experiment 20000307 PARAMETER Experiment Name: At_Germinating_Seeds_Sub_P Parameter: Tissue Value: Germinating Seeds
  misc_feature: MA Experiment ID: 20000315 Result: Down-regulated in Transcription
  misc_feature: MA Experiment 20000315 PARAMETER Experiment Name: At_14day_Shoots-Roots_Sub_P Parameter: Age (day) Value: 14
  misc_feature: MA Experiment 20000315 PARAMETER Experiment Name: At_14day_Shoots-Roots_Sub_P Parameter: Organism Value: A. thaliana
  misc_feature: MA Experiment 20000315 PARAMETER Experiment Name: At_14day_Shoots-Roots_Sub_P Parameter: Plant Line Value: WS
  misc_feature: MA Experiment 20000315 PARAMETER Experiment Name: At_14day_Shoots-Roots_Sub_P Parameter: Tissue Value: Shoots vs. Whole Plant
  misc_feature: MA Experiment ID: 20000328 Result: Down-regulated in Transcription
  misc_feature: MA Experiment 20000328 PARAMETER Experiment Name: At_42deg_Heat_Sub_P Parameter: Age (day) Value: 14
  misc_feature: MA Experiment 20000328 PARAMETER Experiment Name: At_42deg_Heat_Sub_P Parameter: Organism Value: A. thaliana
  misc_feature: MA Experiment 20000328 PARAMETER Experiment Name: At_42deg_Heat_Sub_P Parameter: Plant Line Value: WS
  misc_feature: MA Experiment 20000328 PARAMETER Experiment Name: At_42deg_Heat_Sub_P Parameter: Temperature (deg C) Value: 42 vs. 22
  misc_feature: MA Experiment 20000328 PARAMETER Experiment Name: At_42deg_Heat_Sub_P Parameter: Timepoint (hr) Value: 6
  misc_feature: MA Experiment 20000328 PARAMETER Experiment Name: At_42deg_Heat_Sub_P Parameter: Tissue Value: Aerial
gacgaaaaagaagatgatgaagctcaaagtgtatgcagatcgaatgtcacagccatcacgtgctgttatcatattctgcaaggttaatggaatccaattcgatgaggtcttgatttccttggcgaagcgtcaacaattatctcctgaattcaaagatattaacccattggggaaagttccagctattgttgatggcaggcttaagctctttgagagtcacgcaatcctgatatatctatcctcggcgtttccaagtgttgctgatcattggtatccaaatgatctatccaaaagagccaagattcactcagttttggattggcatcacaccaatttacgtcgtggtgcagctggatatgttctgaatagtgtactaggtccagctctcggtcttcctctgaatccgaaagcagctgctgaagctgagcagttactaacaaagtctctgtccactctagagactttttggcttaagggcaatgctaaattcttgctcggaagcaaccaaccatctatagctgatctcagccttgtatgcgaacttatgcagctgcaggttttggatgacaaagatcgtcttagattgctcagcactcataagaaagttgaacaatggattgagaatacgaaaaaagcaacaatgcctcactttgatgagacccatgagatccttttcaaagtcaaagaaggattccagaagcggcgagagatgggaaccttatctaaaccgggtcttcaatccaagatctaagaacttagaacaaaactttggcaaaaccggtttcaggggtcagtcactggttcgttgaagaaaagccgattatctcctattctccattgtaagaaaaataaggaatgtaataatcacttgttttttgaactatatgtaataatcactttatcaaaggtttttacccgacccgagc

SEQ ID NO: 50717 - protein, 249 aa, Arabidopsis thaliana
  peptide (1)..(249): Ceres Seq. ID no. 12558874
  misc_feature (6)..(249): Homolog of NCBI NO: 10177768 NR Description: glutathione transferase [Arabidopsis thaliana]
  misc_feature (5)..(249): Homolog of NCBI NO: 25453559 NR Description: glutathione transferase (EC 2.5.1.18) GST 10b
  misc_feature (6)..(249): Homolog of NCBI NO: 30693769 NR Description: glutathione transferase, putative [Arabidopsis
  misc_feature (6)..(249): Homolog of NCBI NO: 15237595 NR Description: glutathione transferase, putative
  misc_feature (5)..(249): Homolog of NCBI NO: 15237583 NR Description: glutathione transferase, putative
TKKKMMKLKVYADRMSQPSRAVIIFCKVNGIQFDEVLISLAKRQQLSPEFKDINPLGKVPAIVDGRLKLFESHAILIYLSSAFPSVADHWYPNDLSKRAKIHSVLDWHHTNLRRGAAGYVLNSVLGPALGLPLNPKAAAEAEQLLTKSLSTLETFWLKGNAKFLLGSNQPSIADLSLVCELMQLQVLDDKDRLRLLSTHKKVEQWIENTKKATMPHFDETHEILFKVKEGFQKRREMGTLSKPGLQSKI

SEQ ID NO: 50718 - protein, 245 aa, Arabidopsis thaliana
  peptide (1)..(245): Ceres Seq. ID no. 12558875
  misc_feature (2)..(245): Homolog of NCBI NO: 10177768 NR Description: glutathione transferase [Arabidopsis thaliana]
  misc_feature (1)..(245): Homolog of NCBI NO: 25453559 NR Description: glutathione transferase (EC 2.5.1.18) GST 10b
  misc_feature (2)..(245): Homolog of NCBI NO: 30693769 NR Description: glutathione transferase, putative [Arabidopsis
  misc_feature (2)..(245): Homolog of NCBI NO: 15237595 NR Description: glutathione transferase, putative
  misc_feature (1)..(245): Homolog of NCBI NO: 15237583 NR Description: glutathione transferase, putative
MMKLKVYADRMSQPSRAVIIFCKVNGIQFDEVLISLAKRQQLSPEFKDINPLGKVPAIVDGRLKLFESHAILIYLSSAFPSVADHWYPNDLSKRAKIHSVLDWHHTNLRRGAAGYVLNSVLGPALGLPLNPKAAAEAEQLLTKSLSTLETFWLKGNAKFLLGSNQPSIADLSLVCELMQLQVLDDKDRLRLLSTHKKVEQWIENTKKATMPHFDETHEILFKVKEGFQKRREMGTLSKPGLQSKI

SEQ ID NO: 50719 - protein, 244 aa, Arabidopsis thaliana
  peptide (1)..(244): Ceres Seq. ID no. 12558876
  misc_feature (1)..(244): Homolog of NCBI NO: 10177768 NR Description: glutathione transferase [Arabidopsis thaliana]
  misc_feature (1)..(244): Homolog of NCBI NO: 25453559 NR Description: glutathione transferase (EC 2.5.1.18) GST 10b
  misc_feature (1)..(244): Homolog of NCBI NO: 30693769 NR Description: glutathione transferase, putative [Arabidopsis
  misc_feature (1)..(244): Homolog of NCBI NO: 15237595 NR Description: glutathione transferase, putative
  misc_feature (1)..(244): Homolog of NCBI NO: 15237583 NR Description: glutathione transferase, putative
MKLKVYADRMSQPSRAVIIFCKVNGIQFDEVLISLAKRQQLSPEFKDINPLGKVPAIVDGRLKLFESHAILIYLSSAFPSVADHWYPNDLSKRAKIHSVLDWHHTNLRRGAAGYVLNSVLGPALGLPLNPKAAAEAEQLLTKSLSTLETFWLKGNAKFLLGSNQPSIADLSLVCELMQLQVLDDKDRLRLLSTHKKVEQWIENTKKATMPHFDETHEILFKVKEGFQKRREMGTLSKPGLQSKI

SEQ ID NO: 50720 - DNA, 733 bp, Arabidopsis thaliana
  misc_feature (1)..(733): Ceres Seq. ID no. 12559033
  misc_feature: MA Experiment ID: 20000171 Result: Up-regulated in Transcription
  misc_feature: MA Experiment 20000171 PARAMETER Experiment Name: At_42deg_Heat_P Parameter: Age (day) Value: 14
  misc_feature: MA Experiment 20000171 PARAMETER Experiment Name: At_42deg_Heat_P Parameter: Organism Value: A. thaliana
  misc_feature: MA Experiment 20000171 PARAMETER Experiment Name: At_42deg_Heat_P Parameter: Plant Line Value: WS
  misc_feature: MA Experiment 20000171 PARAMETER Experiment Name: At_42deg_Heat_P Parameter: Temperature (deg C) Value: 42 vs. 22
  misc_feature: MA Experiment 20000171 PARAMETER Experiment Name: At_42deg_Heat_P Parameter: Timepoint (hr) Value: 1
  misc_feature: MA Experiment 20000171 PARAMETER Experiment Name: At_42deg_Heat_P Parameter: Tissue Value: Aerial
  misc_feature: MA Experiment ID: 20000173 Result: Up-regulated in Transcription
  misc_feature: MA Experiment 20000173 PARAMETER Experiment Name: At_42deg_Heat_P Parameter: Age (day) Value: 14
  misc_feature: MA Experiment 20000173 PARAMETER Experiment Name: At_42deg_Heat_P Parameter: Organism Value: A. thaliana
  misc_feature: MA Experiment 20000173 PARAMETER Experiment Name: At_42deg_Heat_P Parameter: Plant Line Value: WS
  misc_feature: MA Experiment 20000173 PARAMETER Experiment Name: At_42deg_Heat_P Parameter: Temperature (deg C) Value: 42 vs. 22
  misc_feature: MA Experiment 20000173 PARAMETER Experiment Name: At_42deg_Heat_P Parameter: Timepoint (hr) Value: 6
  misc_feature: MA Experiment 20000173 PARAMETER Experiment Name: At_42deg_Heat_P Parameter: Tissue Value: Aerial
  misc_feature: MA Experiment ID: 20000235 Result: Down-regulated in Transcription
  misc_feature: MA Experiment 20000235 PARAMETER Experiment Name: At_Siliques_P Parameter: Age (day) Value: 21
  misc_feature: MA Experiment 20000235 PARAMETER Experiment Name: At_Siliques_P Parameter: Organism Value: A. thaliana
  misc_feature: MA Experiment 20000235 PARAMETER Experiment Name: At_Siliques_P Parameter: Plant Line Value: WS
  misc_feature: MA Experiment 20000235 PARAMETER Experiment Name: At_Siliques_P Parameter: Tissue Value: 5-10mm Siliques vs. Whole Plant
  misc_feature: MA Experiment ID: 20000438 Result: Down-regulated in Transcription
  misc_feature: MA Experiment 20000438 PARAMETER Experiment Name: At_Shoots__P Parameter: Age (day) Value: 14
  misc_feature: MA Experiment 20000438 PARAMETER Experiment Name: At_Shoots__P Parameter: Tissue Value: Shoots vs. Whole Plant
  misc_feature: MA Experiment ID: 20000439 Result: Down-regulated in Transcription
  misc_feature: MA Experiment 20000439 PARAMETER Experiment Name: At_Roots__P Parameter: Age (day) Value: 14 vs. 21
  misc_feature: MA Experiment 20000439 PARAMETER Experiment Name: At_Roots__P Parameter: Organism Value: A. thaliana
  misc_feature: MA Experiment 20000439 PARAMETER Experiment Name: At_Roots__P Parameter: Tissue Value: Roots vs. Whole Plant
  misc_feature: MA Experiment ID: 20000794 Result: Down-regulated in Transcription
  misc_feature: MA Experiment 20000794 PARAMETER Experiment Name: At_Petals_P Parameter: Age (day) Value: 23-25 days
  misc_feature: MA Experiment 20000794 PARAMETER Experiment Name: At_Petals_P Parameter: Plant Line Value: WS
  misc_feature: MA Experiment 20000794 PARAMETER Experiment Name: At_Petals_P Parameter: Tissue Value: Petals vs. Whole plant
ggggtttatctttgactagtcttcttctgacttcgccgaatgtgtgtcgatctccggcgaagtaataagtcgtaataaccctaaaaatcttgccctctttttcgccgccggctaaagctatgaaggtttttaatcttgaccgtggaaacactctctctgtttccctcttctccggtgtcaccaactccaaggagctcttgaattcaatgcttgacggaagtctgaagctggaggtctcatttctcaatgcatcacttattccagacatttttcctctattggctgctgctcagaaagcacttatctccaaatcacgcgattccttatcaaccagaactcttcattctgagcttgtctacaattactcaggatctaagcacattacagaatcattgaaacgatgtgggatttctgagaacactacttacattctagctgcccggttcaatgcttctcccgttgagatggaggaggtggcgaaattgatcaacgggaaggagattgatttggaggaattgaagacacatgcaaatcaagccaatatactaaagcattacaagataactagccaagagctcggaatttcctctctgggagatgccattgtttgtcgaatagctgcacgcgatgctttgtangagtagacatctttctttatgtcttttgcaccaattatagtttctccttataacaacgttgacacttaccgttataattcaaccaatggtggggt

SEQ ID NO: 50721 - protein, 174 aa, Arabidopsis thaliana
  peptide (1)..(174): Ceres Seq. ID no. 12559034
  misc_feature (12)..(172): Homolog of NCBI NO: 28175286 NR Description: Unknown (protein for MGC:53277) [Xenopus laevis]
  misc_feature (12)..(172): Homolog of NCBI NO: 12001980 NR Description: My019 protein [Homo sapiens]
  misc_feature (16)..(172): Homolog of NCBI NO: 39794363 NR Description: Unknown (protein for MGC:75657) [Silurana
  misc_feature (12)..(172): Homolog of NCBI NO: 7705590 NR Description: CGI-121 protein [Homo sapiens]
  misc_feature (12)..(172): Homolog of NCBI NO: 28849893 NR Description: CGI-121 protein [Mus musculus]
  misc_feature (12)..(172): Homolog of NCBI NO: 27712192 NR Description: similar to RIKEN cDNA 1810034M08
  misc_feature (1)..(172): Homolog of NCBI NO: 34895710 NR Description: P0019D06.12 [Oryza sativa (japonica
  misc_feature (140)..(172): Homolog of NCBI NO: 22329156 NR Description: hypothetical protein; protein id: At4g34412.1
  misc_feature (1)..(115): Homolog of NCBI NO: 22329156 NR Description: hypothetical protein; protein id: At4g34412.1
  misc_feature (1)..(172): Homolog of NCBI NO: 38454120 NR Description: At4g34412 [Arabidopsis thaliana]
  misc_feature (173)..(173): Xaa is any aa, unknown or other
MKVFNLDRGNTLSVSLFSGVTNSKELLNSMLDGSLKLEVSFLNASLIPDIFPLLAAAQKALISKSRDSLSTRTLHSELVYNYSGSKHITESLKRCGISENTTYILAARFNASPVEMEEVAKLINGKEIDLEELKTHANQANILKHYKITSQELGISSLGDAIVCRIAARDALXE

SEQ ID NO: 50722 - protein, 145 aa, Arabidopsis thaliana
  peptide (1)..(145): Ceres Seq. ID no. 12559035
  misc_feature (1)..(143): Homolog of NCBI NO: 28175286 NR Description: Unknown (protein for MGC:53277) [Xenopus laevis]
  misc_feature (1)..(143): Homolog of NCBI NO: 12001980 NR Description: My019 protein [Homo sapiens]
  misc_feature (1)..(143): Homolog of NCBI NO: 39794363 NR Description: Unknown (protein for MGC:75657) [Silurana
  misc_feature (1)..(143): Homolog of NCBI NO: 7705590 NR Description: CGI-121 protein [Homo sapiens]
  misc_feature (1)..(143): Homolog of NCBI NO: 28849893 NR Description: CGI-121 protein [Mus musculus]
  misc_feature (1)..(143): Homolog of NCBI NO: 27712192 NR Description: similar to RIKEN cDNA 1810034M08
  misc_feature (1)..(143): Homolog of NCBI NO: 34895710 NR Description: P0019D06.12 [Oryza sativa (japonica
  misc_feature (111)..(143): Homolog of NCBI NO: 22329156 NR Description: hypothetical protein; protein id: At4g34412.1
  misc_feature (1)..(86): Homolog of NCBI NO: 22329156 NR Description: hypothetical protein; protein id: At4g34412.1
  misc_feature (1)..(143): Homolog of NCBI NO: 38454120 NR Description: At4g34412 [Arabidopsis thaliana]
  misc_feature (144)..(144): Xaa is any aa, unknown or other
MLDGSLKLEVSFLNASLIPDIFPLLAAAQKALISKSRDSLSTRTLHSELVYNYSGSKHITESLKRCGISENTTYILAARFNASPVEMEEVAKLINGKEIDLEELKTHANQANILKHYKITSQELGISSLGDAIVCRIAARDALXE

SEQ ID NO: 50723 - DNA, 1681 bp, Arabidopsis thaliana; identical to SEQ ID NO: 43822
  misc_feature (1)..(1681): Ceres Seq. ID no. 13591915
  misc_feature: MA Experiment ID: 20000445 Result: Up-regulated in Transcription
  misc_feature: MA Experiment 20000445 PARAMETER Experiment Name: At_100uM_NAA__P Parameter: Age (day) Value: 14
  misc_feature: MA Experiment 20000445 PARAMETER Experiment Name: At_100uM_NAA__P Parameter: Organism Value: A. thaliana
  misc_feature: MA Experiment 20000445 PARAMETER Experiment Name: At_100uM_NAA__P Parameter: Plant Line Value: WS
  misc_feature: MA Experiment 20000445 PARAMETER Experiment Name: At_100uM_NAA__P Parameter: Timepoint (hr) Value: 6
  misc_feature: MA Experiment 20000445 PARAMETER Experiment Name: At_100uM_NAA__P Parameter: Tissue Value: Aerial
  misc_feature: MA Experiment 20000445 PARAMETER Experiment Name: At_100uM_NAA__P Parameter: Treatment Value: 100uM NAA vs. No Treatment

SEQ ID NO: 50724 - protein, 435 aa, Arabidopsis thaliana; identical to SEQ ID NO: 43823
  peptide (1)..(435): Ceres Seq. ID no. 13591916
  misc_feature (122)..(426): Pfam Name: NAD dependent epimerase/dehydratase family Pfam Description: NAD dependent epimerase/dehydratase family
  misc_feature (122)..(426): Pfam Name: NAD dependent epimerase/dehydratase family Pfam Description: NAD dependent epimerase/dehydratase family
  misc_feature (6)..(167): Homolog of NCBI NO: 34908082 NR Description: P0506B12.30 [Oryza sativa (japonica
  misc_feature (209)..(429): Homolog of NCBI NO: 34908082 NR Description: P0506B12.30 [Oryza sativa (japonica
  misc_feature (7)..(431): Homolog of NCBI NO: 15227109 NR Description: NAD-dependent epimerase/dehydratase family
  misc_feature (6)..(429): Homolog of NCBI NO: 25396402 NR Description: UDP-glucuronic acid decarboxylase
  misc_feature (7)..(432): Homolog of NCBI NO: 2129578 NR Description: dTDP-glucose 4-6-dehydratase homolog D18 -
  misc_feature (6)..(167): Homolog of NCBI NO: 34908082 NR Description: P0506B12.30 [Oryza sativa (japonica
  misc_feature (7)..(431): Homolog of NCBI NO: 15227109 NR Description: NAD-dependent epimerase/dehydratase family
  misc_feature (7)..(432): Homolog of NCBI NO: 2129578 NR Description: dTDP-glucose 4-6-dehydratase homolog D18 -
  misc_feature (1)..(435): Homolog of NCBI NO: 17473549 NR Description: dTDP-glucose 4-6-dehydratase-like protein
  misc_feature (1)..(435): Homolog of NCBI NO: 11270116 NR Description: dTDP-glucose 4-6-dehydratase-like protein -
  misc_feature (1)..(435): Homolog of NCBI NO: 30693847 NR Description: NAD-dependent epimerase/dehydratase family
  misc_feature (1)..(337): Homolog of NCBI NO: 30693844 NR Description: NAD-dependent epimerase/dehydratase family
  misc_feature (7)..(432): Homolog of NCBI NO: 15229334 NR Description: NAD-dependent epimerase/dehydratase family
  misc_feature (6)..(429): Homolog of NCBI NO: 25396402 NR Description: UDP-glucuronic acid decarboxylase
  misc_feature (209)..(429): Homolog of NCBI NO: 34908082 NR Description: P0506B12.30 [Oryza sativa (japonica
  misc_feature (7)..(432): Homolog of NCBI NO: 15229334 NR Description: NAD-dependent epimerase/dehydratase family
  misc_feature (1)..(337): Homolog of NCBI NO: 30693844 NR Description: NAD-dependent epimerase/dehydratase family
  misc_feature (1)..(435): Homolog of NCBI NO: 30693847 NR Description: NAD-dependent epimerase/dehydratase family
  misc_feature (1)..(435): Homolog of NCBI NO: 11270116 NR Description: dTDP-glucose 4-6-dehydratase-like protein -
  misc_feature (1)..(435): Homolog of NCBI NO: 17473549 NR Description: dTDP-glucose 4-6-dehydratase-like protein

SEQ ID NO: 50725 - protein, 428 aa, Arabidopsis thaliana; identical to SEQ ID NO: 43824
  peptide (1)..(428): Ceres Seq. ID no. 13591917
  misc_feature (115)..(419): Pfam Name: NAD dependent epimerase/dehydratase family Pfam Description: NAD dependent epimerase/dehydratase family
  misc_feature (115)..(419): Pfam Name: NAD dependent epimerase/dehydratase family Pfam Description: NAD dependent epimerase/dehydratase family
  misc_feature (1)..(160): Homolog of NCBI NO: 34908082 NR Description: P0506B12.30 [Oryza sativa (japonica
  misc_feature (202)..(422): Homolog of NCBI NO: 34908082 NR Description: P0506B12.30 [Oryza sativa (japonica
  misc_feature (1)..(424): Homolog of NCBI NO: 15227109 NR Description: NAD-dependent epimerase/dehydratase family
  misc_feature (1)..(422): Homolog of NCBI NO: 25396402 NR Description: UDP-glucuronic acid decarboxylase
  misc_feature (1)..(425): Homolog of NCBI NO: 2129578 NR Description: dTDP-glucose 4-6-dehydratase homolog D18 -
  misc_feature (1)..(160): Homolog of NCBI NO: 34908082 NR Description: P0506B12.30 [Oryza sativa (japonica
  misc_feature (1)..(424): Homolog of NCBI NO: 15227109 NR Description: NAD-dependent epimerase/dehydratase family
  misc_feature (1)..(425): Homolog of NCBI NO: 2129578 NR Description: dTDP-glucose 4-6-dehydratase homolog D18 -
  misc_feature (1)..(428): Homolog of NCBI NO: 17473549 NR Description: dTDP-glucose 4-6-dehydratase-like protein
  misc_feature (1)..(428): Homolog of NCBI NO: 11270116 NR Description: dTDP-glucose 4-6-dehydratase-like protein -
  misc_feature (1)..(428): Homolog of NCBI NO: 30693847 NR Description: NAD-dependent epimerase/dehydratase family
  misc_feature (1)..(330): Homolog of NCBI NO: 30693844 NR Description: NAD-dependent epimerase/dehydratase family
  misc_feature (1)..(425): Homolog of NCBI NO: 15229334 NR Description: NAD-dependent epimerase/dehydratase family
  misc_feature (1)..(422): Homolog of NCBI NO: 25396402 NR Description: UDP-glucuronic acid decarboxylase
  misc_feature (202)..(422): Homolog of NCBI NO: 34908082 NR Description: P0506B12.30 [Oryza sativa (japonica
  misc_feature (1)..(425): Homolog of NCBI NO: 15229334 NR Description: NAD-dependent epimerase/dehydratase family
  misc_feature (1)..(330): Homolog of NCBI NO: 30693844 NR Description: NAD-dependent epimerase/dehydratase family
  misc_feature (1)..(428): Homolog of NCBI NO: 30693847 NR Description: NAD-dependent epimerase/dehydratase family
  misc_feature (1)..(428): Homolog of NCBI NO: 11270116 NR Description: dTDP-glucose 4-6-dehydratase-like protein -
  misc_feature (1)..(428): Homolog of NCBI NO: 17473549 NR Description: dTDP-glucose 4-6-dehydratase-like protein

SEQ ID NO: 50726 - protein, 417 aa, Arabidopsis thaliana; identical to SEQ ID NO: 43825
  peptide (1)..(417): Ceres Seq. ID no. 13591918
  misc_feature (104)..(408): Pfam Name: NAD dependent epimerase/dehydratase family Pfam Description: NAD dependent epimerase/dehydratase family
  misc_feature (104)..(408): Pfam Name: NAD dependent epimerase/dehydratase family Pfam Description: NAD dependent epimerase/dehydratase family
  misc_feature (1)..(149): Homolog of NCBI NO: 34908082 NR Description: P0506B12.30 [Oryza sativa (japonica
  misc_feature (191)..(411): Homolog of NCBI NO: 34908082 NR Description: P0506B12.30 [Oryza sativa (japonica
  misc_feature (1)..(413): Homolog of NCBI NO: 15227109 NR Description: NAD-dependent epimerase/dehydratase family
  misc_feature (1)..(411): Homolog of NCBI NO: 25396402 NR Description: UDP-glucuronic acid decarboxylase
  misc_feature (1)..(414): Homolog of NCBI NO: 2129578 NR Description: dTDP-glucose 4-6-dehydratase homolog D18 -
  misc_feature (1)..(149): Homolog of NCBI NO: 34908082 NR Description: P0506B12.30 [Oryza sativa (japonica
  misc_feature (1)..(413): Homolog of NCBI NO: 15227109 NR Description: NAD-dependent epimerase/dehydratase family
  misc_feature (1)..(414): Homolog of NCBI NO: 2129578 NR Description: dTDP-glucose 4-6-dehydratase homolog D18 -
  misc_feature (1)..(417): Homolog of NCBI NO: 17473549 NR Description: dTDP-glucose 4-6-dehydratase-like protein
  misc_feature (1)..(417): Homolog of NCBI NO: 11270116 NR Description: dTDP-glucose 4-6-dehydratase-like protein -
  misc_feature (1)..(417): Homolog of NCBI NO: 30693847 NR Description: NAD-dependent epimerase/dehydratase family
  misc_feature (1)..(319): Homolog of NCBI NO: 30693844 NR Description: NAD-dependent epimerase/dehydratase family
  misc_feature (1)..(414): Homolog of NCBI NO: 15229334 NR Description: NAD-dependent epimerase/dehydratase family
  misc_feature (1)..(411): Homolog of NCBI NO: 25396402 NR Description: UDP-glucuronic acid decarboxylase
  misc_feature (191)..(411): Homolog of NCBI NO: 34908082 NR Description: P0506B12.30 [Oryza sativa (japonica
  misc_feature (1)..(414): Homolog of NCBI NO: 15229334 NR Description: NAD-dependent epimerase/dehydratase family
  misc_feature (1)..(319): Homolog of NCBI NO: 30693844 NR Description: NAD-dependent epimerase/dehydratase family
  misc_feature (1)..(417): Homolog of NCBI NO: 30693847 NR Description: NAD-dependent epimerase/dehydratase family
  misc_feature (1)..(417): Homolog of NCBI NO: 11270116 NR Description: dTDP-glucose 4-6-dehydratase-like protein -
  misc_feature (1)..(417): Homolog of NCBI NO: 17473549 NR Description: dTDP-glucose 4-6-dehydratase-like protein

SEQ ID NO: 50727 - DNA, 1529 bp, Arabidopsis thaliana
  misc_feature (1)..(1529): Ceres Seq. ID no. 13575292
  misc_feature: MA Experiment ID: 20000307 Result: Up-regulated in Transcription
  misc_feature: MA Experiment 20000307 PARAMETER Experiment Name: At_Germinating_Seeds_Sub_P Parameter: Age (hr) Value: 24 vs. 0
  misc_feature: MA Experiment 20000307 PARAMETER Experiment Name: At_Germinating_Seeds_Sub_P Parameter: Organism Value: A. thaliana
  misc_feature: MA Experiment 20000307 PARAMETER Experiment Name: At_Germinating_Seeds_Sub_P Parameter: Plant Line Value: WS
  misc_feature: MA Experiment 20000307 PARAMETER Experiment Name: At_Germinating_Seeds_Sub_P Parameter: Tissue Value: Germinating Seeds
  misc_feature: MA Experiment ID: 20000314 Result: Up-regulated in Transcription
  misc_feature: MA Experiment 20000314 PARAMETER Experiment Name: At_14day_Shoots-Roots_Sub_P Parameter: Age (day) Value: 14
  misc_feature: MA Experiment 20000314 PARAMETER Experiment Name: At_14day_Shoots-Roots_Sub_P Parameter: Organism Value: A. thaliana
  misc_feature: MA Experiment 20000314 PARAMETER Experiment Name: At_14day_Shoots-Roots_Sub_P Parameter: Plant Line Value: WS
  misc_feature: MA Experiment 20000314 PARAMETER Experiment Name: At_14day_Shoots-Roots_Sub_P Parameter: Tissue Value: Roots vs. Whole Plant
  misc_feature: MA Experiment ID: 20000329 Result: Up-regulated in Transcription
  misc_feature: MA Experiment 20000329 PARAMETER Experiment Name: At_4deg_Cold_Sub_P Parameter: Age (day) Value: 14
  misc_feature: MA Experiment 20000329 PARAMETER Experiment Name: At_4deg_Cold_Sub_P Parameter: Organism Value: A. thaliana
  misc_feature: MA Experiment 20000329 PARAMETER Experiment Name: At_4deg_Cold_Sub_P Parameter: Plant Line Value: WS
  misc_feature: MA Experiment 20000329 PARAMETER Experiment Name: At_4deg_Cold_Sub_P Parameter: Temperature (deg C) Value: 4 vs. 22
  misc_feature: MA Experiment 20000329 PARAMETER Experiment Name: At_4deg_Cold_Sub_P Parameter: Timepoint (hr) Value: 6
  misc_feature: MA Experiment 20000329 PARAMETER Experiment Name: At_4deg_Cold_Sub_P Parameter: Tissue Value: Aerial
  misc_feature: MA Experiment ID: 20000355 Result: Up-regulated in Transcription
  misc_feature: MA Experiment 20000355 PARAMETER Experiment Name: At_Siliques_Sub_P Parameter: Age (day) Value: 21
  misc_feature: MA Experiment 20000355 PARAMETER Experiment Name: At_Siliques_Sub_P Parameter: Organism Value: A. thaliana
  misc_feature: MA Experiment 20000355 PARAMETER Experiment Name: At_Siliques_Sub_P Parameter: Plant Line Value: WS
  misc_feature: MA Experiment 20000355 PARAMETER Experiment Name: At_Siliques_Sub_P Parameter: Tissue Value: Less Than 5mm Siliques vs. Whole Plant
agataaataaactcaaaaccattcttcatttcgccgacactttcttctccaccaccaccatggatgatctctccaagcttctcttcttcctcctcctcactatctccattaccaccgcattacccgataaacccgggtcgggtcaaataaactcaaactccgtcctcgttgctcttcttgactcacactacacagaactagcagagctcgtcgaaaaagctcttcttctccaaaccttagaagaagctgttggtcaacacaacatcacaatctttgctcctcgtaacgatgccttagaaaaaaatcttgatcctgaattcaaatctttcttactccaaccgaaaaacctcaaatcattacaatctttattaatgtttcacattcttcccaaaagaatcacttctccacaattctcctccgccgtcgttagccaccgtactctctccaacgaccacctccatttcaccaacggaaaagtcaactccgctgaaataaccaaacccgatgatttaactcgtcccgatggaatcatccacggaatcgaacgtcttttaatcccacgttctgttcaagaagatttcaaccgccgtcgtagtctccgttcaatcgctgccgtattaccggaaggagcaccggaggttgatccaagaactcaccgtctcaagaaaaagccagcaccaattcccgccggagctccaccggttcttccggtttacgacgcaatgtcacctggtccgtcactagctccggctccggcaccaggaccgggtgggccacgccaccatttcaacggagaggctcaagttaaagattttatccacacgcttcttcattacggtggctacaatgaaatggcagatattctcgttaatctcacttctttagccaccgagatgggtcggctcgtgtcggaaggttacgttttaaccgttttagcaccaaacgacgaagctatggctaaattgaccacggaccaattgagcgaaccgggagctccagagcaaattatgtattatcacatcataccggaataccaaaccgaagagagtatgtacaattctgtacgccggtttgggaaaatccggtacgattcactccggtttcctcataaagtagaggctcaggaggcagatggttcggttaagttcggtcatggtgatggttcggcttatttgttcgatcctgatatttataccgatggacggatttcggttcaagggattgacggtgttttgttcccggaggaaaaaactccggtcgagaagaaaaccggcgttccagttgtcaagaaagcacctaaaccaagaagaggtaaattgatggaagtagcatgtacaatgctgggatcacaatttccaacatgtcaatgagatcaaattaaatccgggacatgagaattttataattctgtaaacatgtgataaaaatgtgaacagaaaaaagaaataatgtaaatgattattttttgggctcgttgcaatatgattgttaaattgtaatttcagttgttttgagctgcgtaaccaacc

SEQ ID NO: 50728 - protein, 455 aa, Arabidopsis thaliana
  peptide (1)..(455): Ceres Seq. ID no. 13575293
  misc_feature (50)..(186): Pfam Name: Fasciclin domain Pfam Description: Fasciclin domain
  misc_feature (47)..(432): Homolog of NCBI NO: 27819499 NR Description: putative arabinogalactan-protein
  misc_feature (46)..(417): Homolog of NCBI NO: 34899886 NR Description: OJ1714_H10.26 [Oryza sativa (japonica
  misc_feature (46)..(448): Homolog of NCBI NO: 33146739 NR Description: GPI-anchored protein -like
  misc_feature (28)..(437): Homolog of NCBI NO: 6041822 NR Description: unknown protein [Arabidopsis thaliana]
  misc_feature (124)..(437): Homolog of NCBI NO: 7486009 NR Description: hypothetical protein F22O6.250 - Arabidopsis
  misc_feature (27)..(440): Homolog of NCBI NO: 15240029 NR Description: expressed protein [Arabidopsis thaliana]
  misc_feature (28)..(449): Homolog of NCBI NO: 18399319 NR Description: expressed protein [Arabidopsis thaliana]
  misc_feature (24)..(438): Homolog of NCBI NO: 25370583 NR Description: hypothetical protein At2g35860 [imported] -
  misc_feature (24)..(455): Homolog of NCBI NO: 30686588 NR Description: expressed protein [Arabidopsis thaliana]
  misc_feature (20)..(455): Homolog of NCBI NO: 15231197 NR Description: predicted GPI-anchored protein [Arabidopsis
INKLKTILHFADTFFSTTTMDDLSKLLFFLLLTISITTALPDKPGSGQINSNSVLVALLDSHYTELAELVEKALLLQTLEEAVGQHNITIFAPRNDALEKNLDPEFKSFLLQPKNLKSLQSLLMFHILPKRITSPQFSSAVVSHRTLSNDHLHFTNGKVNSAEITKPDDLTRPDGIIHGIERLLIPRSVQEDFNRRRSLRSIAAVLPEGAPEVDPRTHRLKKKPAPIPAGAPPVLPVYDAMSPGPSLAPAPAPGPGGPRHHFNGEAQVKDFIHTLLHYGGYNEMADILVNLTSLATEMGRLVSEGYVLTVLAPNDEAMAKLTTDQLSEPGAPEQIMYYHIIPEYQTEESMYNSVRRFGKIRYDSLRFPHKVEAQEADGSVKFGHGDGSAYLFDPDIYTDGRISVQGIDGVLFPEEKTPVEKKTGVPVVKKAPKPRRGKLMEVACTMLGSQFPTCQ

SEQ ID NO: 50729 - protein, 436 aa, Arabidopsis thaliana
  peptide (1)..(436): Ceres Seq. ID no. 13575294
  misc_feature (31)..(167): Pfam Name: Fasciclin domain Pfam Description: Fasciclin domain
  misc_feature (28)..(413): Homolog of NCBI NO: 27819499 NR Description: putative arabinogalactan-protein
  misc_feature (27)..(398): Homolog of NCBI NO: 34899886 NR Description: OJ1714_H10.26 [Oryza sativa (japonica
  misc_feature (27)..(429): Homolog of NCBI NO: 33146739 NR Description: GPI-anchored protein -like
  misc_feature (9)..(418): Homolog of NCBI NO: 6041822 NR Description: unknown protein [Arabidopsis thaliana]
  misc_feature (105)..(418): Homolog of NCBI NO: 7486009 NR Description: hypothetical protein F22O6.250 - Arabidopsis
  misc_feature (8)..(421): Homolog of NCBI NO: 15240029 NR Description: expressed protein [Arabidopsis thaliana]
  misc_feature (9)..(430): Homolog of NCBI NO: 18399319 NR Description: expressed protein [Arabidopsis thaliana]
  misc_feature (5)..(419): Homolog of NCBI NO: 25370583 NR Description: hypothetical protein At2g35860 [imported] -
  misc_feature (5)..(436): Homolog of NCBI NO: 30686588 NR Description: expressed protein [Arabidopsis thaliana]
  misc_feature (1)..(436): Homolog of NCBI NO: 15231197 NR Description: predicted GPI-anchored protein [Arabidopsis
MDDLSKLLFFLLLTISITTALPDKPGSGQINSNSVLVALLDSHYTELAELVEKALLLQTLEEAVGQHNITIFAPRNDALEKNLDPEFKSFLLQPKNLKSLQSLLMFHILPKRITSPQFSSAVVSHRTLSNDHLHFTNGKVNSAEITKPDDLTRPDGIIHGIERLLIPRSVQEDFNRRRSLRSIAAVLPEGAPEVDPRTHRLKKKPAPIPAGAPPVLPVYDAMSPGPSLAPAPAPGPGGPRHHFNGEAQVKDFIHTLLHYGGYNEMADILVNLTSLATEMGRLVSEGYVLTVLAPNDEAMAKLTTDQLSEPGAPEQIMYYHIIPEYQTEESMYNSVRRFGKIRYDSLRFPHKVEAQEADGSVKFGHGDGSAYLFDPDIYTDGRISVQGIDGVLFPEEKTPVEKKTGVPVVKKAPKPRRGKLMEVACTMLGSQFPTCQ

SEQ ID NO: 50730 - protein, 332 aa, Arabidopsis thaliana
  peptide (1)..(332): Ceres Seq. ID no. 13575295
  misc_feature (1)..(63): Pfam Name: Fasciclin domain Pfam Description: Fasciclin domain
  misc_feature (1)..(309): Homolog of NCBI NO: 27819499 NR Description: putative arabinogalactan-protein
  misc_feature (1)..(294): Homolog of NCBI NO: 34899886 NR Description: OJ1714_H10.26 [Oryza sativa (japonica
  misc_feature (1)..(325): Homolog of NCBI NO: 33146739 NR Description: GPI-anchored protein -like
  misc_feature (1)..(314): Homolog of NCBI NO: 6041822 NR Description: unknown protein [Arabidopsis thaliana]
  misc_feature (1)..(314): Homolog of NCBI NO: 7486009 NR Description: hypothetical protein F22O6.250 - Arabidopsis
  misc_feature (1)..(317): Homolog of NCBI NO: 15240029 NR Description: expressed protein [Arabidopsis thaliana]
  misc_feature (1)..(326): Homolog of NCBI NO: 18399319 NR Description: expressed protein [Arabidopsis thaliana]
  misc_feature (1)..(315): Homolog of NCBI NO: 25370583 NR Description: hypothetical protein At2g35860 [imported] -
  misc_feature (1)..(332): Homolog of NCBI NO: 30686588 NR Description: expressed protein [Arabidopsis thaliana]
  misc_feature (1)..(332): Homolog of NCBI NO: 15231197 NR Description: predicted GPI-anchored protein [Arabidopsis
MFHILPKRITSPQFSSAVVSHRTLSNDHLHFTNGKVNSAEITKPDDLTRPDGIIHGIERLLIPRSVQEDFNRRRSLRSIAAVLPEGAPEVDPRTHRLKKKPAPIPAGAPPVLPVYDAMSPGPSLAPAPAPGPGGPRHHFNGEAQVKDFIHTLLHYGGYNEMADILVNLTSLATEMGRLVSEGYVLTVLAPNDEAMAKLTTDQLSEPGAPEQIMYYHIIPEYQTEESMYNSVRRFGKIRYDSLRFPHKVEAQEADGSVKFGHGDGSAYLFDPDIYTDGRISVQGIDGVLFPEEKTPVEKKTGVPVVKKAPKPRRGKLMEVACTMLGSQFPTCQ

SEQ ID NO: 50731 - DNA, 1599 bp, Arabidopsis thaliana
  misc_feature (1)..(1599): Ceres Seq. ID no. 12574945
  misc_feature: MA Experiment ID: 20001451 Result: Up-regulated in Transcription
  misc_feature: MA Experiment 20001451 PARAMETER Experiment Name: At_Far-red-induction_P Parameter: Age (day) Value: 7
  misc_feature: MA Experiment 20001451 PARAMETER Experiment Name: At_Far-red-induction_P Parameter: Light Value: Far-red vs. White
  misc_feature: MA Experiment 20001451 PARAMETER Experiment Name: At_Far-red-induction_P Parameter: Organism Value: A. thaliana
  misc_feature: MA Experiment 20001451 PARAMETER Experiment Name: At_Far-red-induction_P Parameter: Plant Line Value: Columbia
  misc_feature: MA Experiment 20001451 PARAMETER Experiment Name: At_Far-red-induction_P Parameter: Timepoint (hr) Value: 24
  misc_feature: MA Experiment 20001451 PARAMETER Experiment Name: At_Far-red-induction_P Parameter: Tissue Value: Whole Plant
agcatagcctccttacttcatcttcctctcattttatctttcttcttcacactctctcggatacttttttgtgcttcgacaaaagctctcagatccacagagtcagaggctcgtctcttctttgatcttggtttatgagctcgaaggagaaacccactctcggaggtacgcggattaagacccgcaaacggaatattgctgctcctctggaccctgcagccttttctgatgcagtggtccagatttaccatgataatgctggtgatctggaacttgttgccaaaagtattgagtcatcagaccttaatttcacaagatatggtgacatcttctttgaggttattttcataggaggacgcacacaacctggaacagtgaaatctgatgaaggagaacgtcatacttactctgtaattgattgtgaacccaagcgtgaagccattttgccatctgttgtctacatacagaaaattctgcgtaggaagcctttcctcataaagaaccttgaaaatgttactcggagattcctgcagtcactggagctttttgaggaaaatgaaaggaagaagcttgctatcttcacagcacttgccttttcccagaagctctcaggattacctccggaaactgtcttccagccattgctcaaggataatcttgttgccaaagggatagtgctctccttcgtaacagacttcttcaaggagtatttggttgagaacagtcttgaagacttgatttctattctgaggcgtgggaaaatggaagacaaccttatggatttcctaccaccagtaaggcgatctgctgaaagttttgcggaacatttcacgaatgaaggattgactgatctagtagagtaccattcaaagaaaatgtttgaggtgaaactgagggaaatcaaaaccgttcttacaagcaaggtcacagaggaaagtaatgtagacgaagtcattgaatcggtgaagcaacagatcaaagatgctaagttacctgacattgaggttgtgcgtgttgtttgggatggtttaatggatgctgttcagtggtctggaaaaaaccagcagcaaaatgcaaattctgttctgcgccaggtgaaaacatgggctccacttctgaacacgttctgtaccagcggaaagctagagctggaactgatgtacaaagtccaaatgcaatgctatgaggatgcaaagcttatgaaagttttcccagaagtagtgaggtcgctctatgaactcgatgtcctcgctgaagacaccattctccactggttccgtaaaggaaccaactcaaagggcaggcaaacctttgtgaaaagtttagagccatttgtgaattggcttgaagaggcggaggaagaagagtgagtgatctatgtttctaataaacaagccatgaagacgataataattcagggtttcttctatgtttcacttttgcttatgagctttactctgctttgtattttggcaataagtatttgatattgttgtgcttcttttttttttctttttggttttgatgactgtctctgtttccccagaacggttttggattcttttgcaaatggatttaggcaaatgcaaattctgcttt

SEQ ID NO: 50732 - protein, 411 aa, Arabidopsis thaliana
  peptide (1)..(411): Ceres Seq. ID no. 12574946
  misc_feature (335)..(411): Pfam Name: eIF4-gamma/eIF5/eIF2-epsilon Pfam Description: eIF4-gamma/eIF5/eIF2-epsilon
  misc_feature (4)..(410): Homolog of NCBI NO: 37589071 NR Description: Unknown (protein for MGC:63787) [Danio rerio]
  misc_feature (1)..(410): Homolog of NCBI NO: 11640562 NR Description: MSTP017 [Homo sapiens]
  misc_feature (1)..(410): Homolog of NCBI NO: 19705527 NR Description: Hfb2 protein [Rattus norvegicus]
  misc_feature (1)..(410): Homolog of NCBI NO: 7661744 NR Description: basic leucine zipper and W2 domains 2; HSPC028
  misc_feature (1)..(410): Homolog of NCBI NO: 17737777 NR Description: elongation initiation factor 5C CG2922-PG
  misc_feature (1)..(411): Homolog of NCBI NO: 21554220 NR Description: unknown [Arabidopsis thaliana]
  misc_feature (2)..(411): Homolog of NCBI NO: 25404540 NR Description: hypothetical protein T23K8.13 [imported] -
  misc_feature (1)..(411): Homolog of NCBI NO: 18408228 NR Description: expressed protein
  misc_feature (2)..(411): Homolog of NCBI NO: 9759036 NR Description: gb|AAD26879.1~gene_id:T30G6.9~strong similarity
  misc_feature (1)..(411): Homolog of NCBI NO: 18421544 NR Description: putative protein
MSSKEKPTLGGTRIKTRKRNIAAPLDPAAFSDAVVQIYHDNAGDLELVAKSIESSDLNFTRYGDIFFEVIFIGGRTQPGTVKSDEGERHTYSVIDCEPKREAILPSVVYIQKILRRKPFLIKNLENVTRRFLQSLELFEENERKKLAIFTALAFSQKLSGLPPETVFQPLLKDNLVAKGIVLSFVTDFFKEYLVENSLEDLISILRRGKMEDNLMDFLPPVRRSAESFAEHFTNEGLTDLVEYHSKKMFEVKLREIKTVLTSKVTEESNVDEVIESVKQQIKDAKLPDIEVVRVVWDGLMDAVQWSGKNQQQNANSVLRQVKTWAPLLNTFCTSGKLELELMYKVQMQCYEDAKLMKVFPEVVRSLYELDVLAEDTILHWFRKGTNSKGRQTFVKSLEPFVNWLEEAEEEE

SEQ ID NO: 50733 - DNA, 3344 bp, Arabidopsis thaliana
  misc_feature (1)..(3344): Ceres Seq. ID no. 13575300
  misc_feature: MA Experiment ID: 20000166 Result: Down-regulated in Transcription
  misc_feature: MA Experiment 20000166 PARAMETER Experiment Name: At_100uM_ABA_P Parameter: Age (day) Value: 14
  misc_feature: MA Experiment 20000166 PARAMETER Experiment Name: At_100uM_ABA_P Parameter: Organism Value: A. thaliana
  misc_feature: MA Experiment 20000166 PARAMETER Experiment Name: At_100uM_ABA_P Parameter: Plant Line Value: WS
  misc_feature: MA Experiment 20000166 PARAMETER Experiment Name: At_100uM_ABA_P Parameter: Timepoint (hr) Value: 1
  misc_feature: MA Experiment 20000166 PARAMETER Experiment Name: At_100uM_ABA_P Parameter: Tissue Value: Aerial
  misc_feature: MA Experiment 20000166 PARAMETER Experiment Name: At_100uM_ABA_P Parameter: Treatment Value: 100uM ABA vs. No Treatment
  misc_feature: MA Experiment ID: 20000169 Result: Down-regulated in Transcription
  misc_feature: MA Experiment 20000169 PARAMETER Experiment Name: At_100uM_ABA_P Parameter: Age (day) Value: 14
  misc_feature: MA Experiment 20000169 PARAMETER Experiment Name: At_100uM_ABA_P Parameter: Organism Value: A. thaliana
  misc_feature: MA Experiment 20000169 PARAMETER Experiment Name: At_100uM_ABA_P Parameter: Plant Line Value: WS
  misc_feature: MA Experiment 20000169 PARAMETER Experiment Name: At_100uM_ABA_P Parameter: Timepoint (hr) Value: 6
  misc_feature: MA Experiment 20000169 PARAMETER Experiment Name: At_100uM_ABA_P Parameter: Tissue Value: Aerial
  misc_feature: MA Experiment 20000169 PARAMETER Experiment Name: At_100uM_ABA_P Parameter: Treatment Value: 100uM ABA vs. No Treatment
  misc_feature: MA Experiment ID: 20000171 Result: Down-regulated in Transcription
  misc_feature: MA Experiment 20000171 PARAMETER Experiment Name: At_42deg_Heat_P Parameter: Age (day) Value: 14
  misc_feature: MA Experiment 20000171 PARAMETER Experiment Name: At_42deg_Heat_P Parameter: Organism Value: A. thaliana
  misc_feature: MA Experiment 20000171 PARAMETER Experiment Name: At_42deg_Heat_P Parameter: Plant Line Value: WS
  misc_feature: MA Experiment 20000171 PARAMETER Experiment Name: At_42deg_Heat_P Parameter: Temperature (deg C) Value: 42 vs. 22
  misc_feature: MA Experiment 20000171 PARAMETER Experiment Name: At_42deg_Heat_P Parameter: Timepoint (hr) Value: 1
  misc_feature: MA Experiment 20000171 PARAMETER Experiment Name: At_42deg_Heat_P Parameter: Tissue Value: Aerial
  misc_feature: MA Experiment ID: 20000180 Result: Up-regulated in Transcription
  misc_feature: MA Experiment 20000180 PARAMETER Experiment Name: At_Germinating_Seeds_P Parameter: Age (hr) Value: 24 vs. 0
  misc_feature: MA Experiment 20000180 PARAMETER Experiment Name: At_Germinating_Seeds_P Parameter: Tissue Value: Germinating Seeds
  misc_feature: MA Experiment ID: 20000184 Result: Up-regulated in Transcription
  misc_feature: MA Experiment 20000184 PARAMETER Experiment Name: At_Shoots__P Parameter: Age (day) Value: 7
  misc_feature: MA Experiment 20000184 PARAMETER Experiment Name: At_Shoots__P Parameter: Tissue Value: Shoots vs. Whole Plant
  misc_feature: MA Experiment ID: 20000234 Result: Up-regulated in Transcription
  misc_feature: MA Experiment 20000234 PARAMETER Experiment Name: At_Siliques_P Parameter: Age (day) Value: 21
  misc_feature: MA Experiment 20000234 PARAMETER Experiment Name: At_Siliques_P Parameter: Organism Value: A. thaliana
  misc_feature: MA Experiment 20000234 PARAMETER Experiment Name: At_Siliques_P Parameter: Plant Line Value: WS
  misc_feature: MA Experiment 20000234 PARAMETER Experiment Name: At_Siliques_P Parameter: Tissue Value: Less Than 5mm Siliques vs. Whole Plant
  misc_feature: MA Experiment ID: 20000235 Result: Up-regulated in Transcription
  misc_feature: MA Experiment 20000235 PARAMETER Experiment Name: At_Siliques_P Parameter: Age (day) Value: 21
  misc_feature: MA Experiment 20000235 PARAMETER Experiment Name: At_Siliques_P Parameter: Organism Value: A. thaliana
  misc_feature: MA Experiment 20000235 PARAMETER Experiment Name: At_Siliques_P Parameter: Plant Line Value: WS
  misc_feature: MA Experiment 20000235 PARAMETER Experiment Name: At_Siliques_P Parameter: Tissue Value: 5-10mm Siliques vs. Whole Plant
  misc_feature: MA Experiment ID: 20000264 Result: Up-regulated in Transcription
  misc_feature: MA Experiment 20000264 PARAMETER Experiment Name: At_Open_Flower_P Parameter: Age (day) Value: 21
  misc_feature: MA Experiment 20000264 PARAMETER Experiment Name: At_Open_Flower_P Parameter: Plant Line Value: WS
  misc_feature: MA Experiment 20000264 PARAMETER Experiment Name: At_Open_Flower_P Parameter: Tissue Value: Open Flower vs. Whole Plant
  misc_feature: MA Experiment ID: 20000265 Result: Up-regulated in Transcription
  misc_feature: MA Experiment 20000265 PARAMETER Experiment Name: At_Open_Flower_P Parameter: Age (day) Value: 21
  misc_feature: MA Experiment 20000265 PARAMETER Experiment Name: At_Open_Flower_P Parameter: Plant Line Value: WS
  misc_feature: MA Experiment 20000265 PARAMETER Experiment Name: At_Open_Flower_P Parameter: Tissue Value: Closed Flower vs. Whole Plant
  misc_feature: MA Experiment ID: 20000286 Result: Up-regulated in Transcription
  misc_feature: MA Experiment 20000286 PARAMETER Experiment Name: At_Open_Flower_P Parameter: Age (day) Value: 21
  misc_feature: MA Experiment 20000286 PARAMETER Experiment Name: At_Open_Flower_P Parameter: Plant Line Value: WS
  misc_feature: MA Experiment 20000286 PARAMETER Experiment Name: At_Open_Flower_P Parameter: Tissue Value: Half Open vs. Whole Plant
  misc_feature: MA Experiment ID: 20000436 Result: Down-regulated in Transcription
  misc_feature: MA Experiment 20000436 PARAMETER Experiment Name: At_Drought_P Parameter: Age (day) Value: 7
  misc_feature: MA Experiment 20000436 PARAMETER Experiment Name: At_Drought_P Parameter: Organism Value: A. thaliana
  misc_feature: MA Experiment 20000436 PARAMETER Experiment Name: At_Drought_P Parameter: Plant Line Value: WS
  misc_feature: MA Experiment 20000436 PARAMETER Experiment Name: At_Drought_P Parameter: Timepoint (hr) Value: 12
  misc_feature: MA Experiment 20000436 PARAMETER Experiment Name: At_Drought_P Parameter: Tissue Value: Whole Plant
  misc_feature: MA Experiment 20000436 PARAMETER Experiment Name: At_Drought_P Parameter: Treatment Value: Drought vs. No Drought
  misc_feature: MA Experiment ID: 20000437 Result: Down-regulated in Transcription
  misc_feature: MA Experiment 20000437 PARAMETER Experiment Name: At_Drought_P Parameter: Age (day) Value: 8
  misc_feature: MA Experiment 20000437 PARAMETER Experiment Name: At_Drought_P Parameter: Organism Value: A. thaliana
  misc_feature: MA Experiment 20000437 PARAMETER Experiment Name: At_Drought_P Parameter: Plant Line Value: WS
  misc_feature: MA Experiment 20000437 PARAMETER Experiment Name: At_Drought_P Parameter: Timepoint (hr) Value: 24
  misc_feature: MA Experiment 20000437 PARAMETER Experiment Name: At_Drought_P Parameter: Tissue Value: Whole Plant
  misc_feature: MA Experiment 20000437 PARAMETER Experiment Name: At_Drought_P Parameter: Treatment Value: Drought vs. No Drought
  misc_feature: MA Experiment ID: 20000438 Result: Up-regulated in Transcription
  misc_feature: MA Experiment 20000438 PARAMETER Experiment Name: At_Shoots__P Parameter: Age (day) Value: 14
  misc_feature: MA Experiment 20000438 PARAMETER Experiment Name: At_Shoots__P Parameter: Tissue Value: Shoots vs. Whole Plant
  misc_feature: MA Experiment ID: 20001555 Result: Down-regulated in Transcription
  misc_feature: MA Experiment 20001555 PARAMETER Experiment Name: At_Drought_Soil_Dry_P Parameter: Age (day) Value: 24
  misc_feature: MA Experiment 20001555 PARAMETER Experiment Name: At_Drought_Soil_Dry_P Parameter: Organism Value: A. thaliana
  misc_feature: MA Experiment 20001555 PARAMETER Experiment Name: At_Drought_Soil_Dry_P Parameter: Plant Line Value: WS
  misc_feature: MA Experiment 20001555 PARAMETER Experiment Name: At_Drought_Soil_Dry_P Parameter: Post Timepoint (hr) Value: None
  misc_feature: MA Experiment 20001555 PARAMETER Experiment Name: At_Drought_Soil_Dry_P Parameter: Post-Treatment Value: None
  misc_feature: MA Experiment 20001555 PARAMETER Experiment Name: At_Drought_Soil_Dry_P Parameter: Timepoint (day) Value: 10
  misc_feature: MA Experiment 20001555 PARAMETER Experiment Name: At_Drought_Soil_Dry_P Parameter: Treatment Value: Drought vs. No Drought
  misc_feature: MA Experiment ID: 20001556 Result: Down-regulated in Transcription
  misc_feature: MA Experiment 20001556 PARAMETER Experiment Name: At_Drought_Soil_Dry_P Parameter: Age (day) Value: 26
  misc_feature: MA Experiment 20001556 PARAMETER Experiment Name: At_Drought_Soil_Dry_P Parameter: Organism Value: A. thaliana
  misc_feature: MA Experiment 20001556 PARAMETER Experiment Name: At_Drought_Soil_Dry_P Parameter: Plant Line Value: WS
  misc_feature: MA Experiment 20001556 PARAMETER Experiment Name: At_Drought_Soil_Dry_P Parameter: Post Timepoint (hr) Value: None
  misc_feature: MA Experiment 20001556 PARAMETER Experiment Name: At_Drought_Soil_Dry_P Parameter: Post-Treatment Value: None
  misc_feature: MA Experiment 20001556 PARAMETER Experiment Name: At_Drought_Soil_Dry_P Parameter: Timepoint (day) Value: 12
  misc_feature: MA Experiment 20001556 PARAMETER Experiment Name: At_Drought_Soil_Dry_P Parameter: Treatment Value: Drought vs. No Drought
  misc_feature: MA Experiment ID: 20001559 Result: Down-regulated in Transcription
  misc_feature: MA Experiment 20001559 PARAMETER Experiment Name: At_Drought_Soil_Dry_P Parameter: Age (day) Value: 28
  misc_feature: MA Experiment 20001559 PARAMETER Experiment Name: At_Drought_Soil_Dry_P Parameter: Organism Value: A. thaliana
  misc_feature: MA Experiment 20001559 PARAMETER Experiment Name: At_Drought_Soil_Dry_P Parameter: Plant Line Value: WS
  misc_feature: MA Experiment 20001559 PARAMETER Experiment Name: At_Drought_Soil_Dry_P Parameter: Post Timepoint (hr) Value: 29
  misc_feature: MA Experiment 20001559 PARAMETER Experiment Name: At_Drought_Soil_Dry_P Parameter: Post-Treatment Value: Re-Water vs. No Drought
  misc_feature: MA Experiment 20001559 PARAMETER Experiment Name: At_Drought_Soil_Dry_P Parameter: Timepoint (day) Value: 14
  misc_feature: MA Experiment 20001559 PARAMETER Experiment Name: At_Drought_Soil_Dry_P Parameter: Treatment Value: Drought vs. No Drought
  misc_feature: MA Experiment ID: 20001757 Result: Up-regulated in Transcription
  misc_feature: MA Experiment 20001757 PARAMETER Experiment Name: At_50mM_NH4NO3_L-to-H_P Parameter: Timepoint (hr) Value: 6
  misc_feature: MA Experiment 20001757 PARAMETER Experiment Name: At_50mM_NH4NO3_L-to-H_P Parameter: Tissue Value: Leaf
  misc_feature: MA Experiment 20001757 PARAMETER Experiment Name: At_50mM_NH4NO3_L-to-H_P Parameter: Treatment Value: 50mM NH4NO3 vs 100mM Mannitol
  misc_feature: MA Experiment ID: 20001904 Result: Down-regulated in Transcription
  misc_feature: MA Experiment 20001904 PARAMETER Experiment Name: At_Drought_Reproduction_P Parameter: Age (day) Value: 37
  misc_feature: MA Experiment 20001904 PARAMETER Experiment Name: At_Drought_Reproduction_P Parameter: Organism Value: A. thaliana
  misc_feature: MA Experiment 20001904 PARAMETER Experiment Name: At_Drought_Reproduction_P Parameter: Plant Line Value: WS
  misc_feature: MA Experiment 20001904 PARAMETER Experiment Name: At_Drought_Reproduction_P Parameter: Timepoint (day) Value: 7
  misc_feature: MA Experiment 20001904 PARAMETER Experiment Name: At_Drought_Reproduction_P Parameter: Tissue Value: Rosettes
  misc_feature: MA Experiment 20001904 PARAMETER Experiment Name: At_Drought_Reproduction_P Parameter: Treatment Value: Drought vs. No Drought
acttactctcaccctttttaaaaccaaaccctaacttacacagaaagagaagaaaaaaaacaaaaaaaaaatgaagcttcttcttctcctcctcctcctccttctcctccacatttctcattccttcaccgtcgctaaaccaatcaccgagctccacgctcttctctcactcaaatcctccttcaccatcgacgaacactcacctctcctgacctcatggaacctttcaacaactttctgttcatggaccggtgtcacgtgcgacgtctctctccgtcacgtgacctctctcgacctctcaggtcttaacctctccggaactctctcctccgacgtagctcatttacctctgctacagaatctatcactcgctgctaatcagatctcaggtcctattccgccgcaaatctccaatctctatgagcttcgtcacctcaatctctccaataatgtcttcaacggttcatttcccgatgaactctcctctggattggtgaatctccgtgttcttgacttatacaacaacaatttaaccggagatttaccggtttcactcactaatctcactcagctccgtcatcttcacctcggtgggaattacttctccggcaaaatcccggcgacgtacggaacctggcctgttctcgaatacttagcggtttccggtaacgagctaaccggtaaaatccctccggagatcggaaacctaacgactcttcgtgaactttacatcggatattacaacgcttttgaaaatggtcttccaccggagattggaaatttatcagagcttgttcggttcgacgctgctaattgtggtttaaccggagagattccaccggagattgggaagcttcagaagctagatacgttgtttcttcaagtaaacgcatttacagggacaataactcaagagctgggattgatttcaagcttgaaatcgatggatctgtctaacaatatgtttaccggcgagattccgacgagtttttcacagctgaagaacttaacgcttttgaatctcttcaggaataagctctacggtgctatacctgagttcatcggtgaaatgccggagcttgaagtgttgcagctttgggagaacaatttcactggtagtattcctcagaaattgggggaaaatggtagattagtgattcttgatctctcttcgaacaaactcaccggaactctgccgccgaatatgtgttctggtaaccggttaatgacgttaatcactcttggcaacttcttgtttggttcaataccggattcgcttggtaaatgtgagtctctgacccggatccggatgggtgagaatttccttaacgggtcgattccaaaggagctcttcgggttacctaaattatctcaagtggagctccaagacaattaccttaccggagagttgccaataagcggaggaggagtctctggtgaccttggtcagattagtctttctaataaccagctctctggttcattacctgcagctattggaaacttgtccggtgttcaaaaactacttcttgatggtaacaagttctctggttcgattcctcccgagattgggaggcttcagcagctatctaagttggattttagccacaatctgttctccggtcggatcgcaccggagatcagtcgttgtaagctgctaacgtttgttgatcttagccgtaatgagctctcaggtgatattcctaatgaactcacaggtatgaagatcttgaattacttgaatctttcaagaaaccatctcgttggttccatacctgtgacgatagcatcaatgcagagtttgacatcggttgatttctcttacaacaatctctccggtttagttcccagcactggacagtttagttacttcaattacacatcgtttgtgggtaactctcatctttgtggtccgtatttgggtccttgcggcaaaggaactcaccagtctcatgtcaaacctttatctgctactacgaaactgttactcgtccttggattgctcttttgttcgatggtgtttgctatagtggccataatcaaagctcggtccttgcgaaatgcgagtgaagccaaggcatggagattgactgctttccagaggctagacttcacttgtgacgatgtcttggactctctcaaggaagacaacatcatcggtaaaggcggtgctgggattgtctacaaaggcactatgcctaaaggcgacctagtcgcggtcaaacgattggctacaatgtcccatggatcttcccacgatcacgggttcaacgccgagattcagacgctaggtagaatcagacacagacacatcgtgagactgctcggtttttgctccaaccacgaaacgaatctccttgtgtacgagtacatgcctaatggtagccttggagaggttcttcatggaaagaaaggaggtcatttacattggaacacacgttataagatagctcttgaagcagccaagggtctttgctatctccaccatgattgttccccgttgatcgtccatagagatgttaaatccaacaacatcctcctcgattccaacttcgaagctcatgtcgccgactttggtctcgccaagttcctccaagattccggtacttctgaatgtatgtccgcaattgccggctcctacggctacatagctccagagtacgcgtatacattgaaggtagatgagaagagcgatgtgtatagtttcggtgttgttcttctagaactcatcaccgggaaaaaacccgtcggagaatttggcgacggcgttgatattgttcaatgggtgagaagcatgacggattcaaataaagattgtgtgctcaaagtaatcgatcttagactctcttcagttccagttcacgaggtaacacacgtcttctacgttgcgttgctctgcgttgaagaacaagcggtggagaggccgacgatgcgtgaagtcgttcagattctcactgagatcccaaaaattcctctttcgaagcagcaagcggcggaatcagacgtgactgagaaagctccggcgattaatgaatcgtcgccggattcaggaagtccaccggatcttttaagtaattagactttccggcgattgggtttggtcattgaggggcaaatttgtctttctaattttcttgtcaccgacgtctcggtagtggagttaattacttaattagcccgttgttgtctggttccggttaaggcaacaattagtggtttaactcttaaggttgttgcatttcttttttcactgctgccacaattattcgtgtaggaattttgaatatgtacattgcggttgaattttgcatgataagtggttaatttcaggaaatcgaatttcg

SEQ ID NO: 50734 - protein, 1002 aa, Arabidopsis thaliana
  peptide (1)..(1002): Ceres Seq. ID no. 13575301
  misc_feature (690)..(892): Pfam Name: Protein kinase domain Pfam Description: Protein kinase domain
  misc_feature (1)..(972): Homolog of NCBI NO: 24940156 NR Description: hypernodulation aberrant root formation protein
  misc_feature (5)..(966): Homolog of NCBI NO: 25287710 NR Description: protein T4O12.5 [imported] - Arabidopsis thaliana
  misc_feature (1)..(966): Homolog of NCBI NO: 15222877 NR Description: CLAVATA1 receptor kinase (CLV1) [Arabidopsis
  misc_feature (25)..(963): Homolog of NCBI NO: 15235366 NR Description: leucine-rich repeat transmembrane protein kinase,
  misc_feature (7)..(892): Homolog of NCBI NO: 8132685 NR Description: LRK1 protein [Oryza sativa]
MKLLLLLLLLLLLHISHSFTVAKPITELHALLSLKSSFTIDEHSPLLTSWNLSTTFCSWTGVTCDVSLRHVTSLDLSGLNLSGTLSSDVAHLPLLQNLSLAANQISGPIPPQISNLYELRHLNLSNNVFNGSFPDELSSGLVNLRVLDLYNNNLTGDLPVSLTNLTQLRHLHLGGNYFSGKIPATYGTWPVLEYLAVSGNELTGKIPPEIGNLTTLRELYIGYYNAFENGLPPEIGNLSELVRFDAANCGLTGEIPPEIGKLQKLDTLFLQVNAFTGTITQELGLISSLKSMDLSNNMFTGEIPTSFSQLKNLTLLNLFRNKLYGAIPEFIGEMPELEVLQLWENNFTGSIPQKLGENGRLVILDLSSNKLTGTLPPNMCSGNRLMTLITLGNFLFGSIPDSLGKCESLTRIRMGENFLNGSIPKELFGLPKLSQVELQDNYLTGELPISGGGVSGDLGQISLSNNQLSGSLPAAIGNLSGVQKLLLDGNKFSGSIPPEIGRLQQLSKLDFSHNLFSGRIAPEISRCKLLTFVDLSRNELSGDIPNELTGMKILNYLNLSRNHLVGSIPVTIASMQSLTSVDFSYNNLSGLVPSTGQFSYFNYTSFVGNSHLCGPYLGPCGKGTHQSHVKPLSATTKLLLVLGLLFCSMVFAIVAIIKARSLRNASEAKAWRLTAFQRLDFTCDDVLDSLKEDNIIGKGGAGIVYKGTMPKGDLVAVKRLATMSHGSSHDHGFNAEIQTLGRIRHRHIVRLLGFCSNHETNLLVYEYMPNGSLGEVLHGKKGGHLHWNTRYKIALEAAKGLCYLHHDCSPLIVHRDVKSNNILLDSNFEAHVADFGLAKFLQDSGTSECMSAIAGSYGYIAPEYAYTLKVDEKSDVYSFGVVLLELITGKKPVGEFGDGVDIVQWVRSMTDSNKDCVLKVIDLRLSSVPVHEVTHVFYVALLCVEEQAVERPTMREVVQILTEIPKIPLSKQQAAESDVTEKAPAINESSPDSGSPPDLLSN

SEQ ID NO: 50735 - protein, 711 aa, Arabidopsis thaliana
  peptide (1)..(711): Ceres Seq. ID no. 13575302
  misc_feature (399)..(601): Pfam Name: Protein kinase domain Pfam Description: Protein kinase domain
  misc_feature (1)..(681): Homolog of NCBI NO: 24940156 NR Description: hypernodulation aberrant root formation protein
  misc_feature (1)..(675): Homolog of NCBI NO: 25287710 NR Description: protein T4O12.5 [imported] - Arabidopsis thaliana
  misc_feature (1)..(675): Homolog of NCBI NO: 15222877 NR Description: CLAVATA1 receptor kinase (CLV1) [Arabidopsis
  misc_feature (1)..(672): Homolog of NCBI NO: 15235366 NR Description: leucine-rich repeat transmembrane protein kinase,
  misc_feature (1)..(601): Homolog of NCBI NO: 8132685 NR Description: LRK1 protein [Oryza sativa]
MDLSNNMFTGEIPTSFSQLKNLTLLNLFRNKLYGAIPEFIGEMPELEVLQLWENNFTGSIPQKLGENGRLVILDLSSNKLTGTLPPNMCSGNRLMTLITLGNFLFGSIPDSLGKCESLTRIRMGENFLNGSIPKELFGLPKLSQVELQDNYLTGELPISGGGVSGDLGQISLSNNQLSGSLPAAIGNLSGVQKLLLDGNKFSGSIPPEIGRLQQLSKLDFSHNLFSGRIAPEISRCKLLTFVDLSRNELSGDIPNELTGMKILNYLNLSRNHLVGSIPVTIASMQSLTSVDFSYNNLSGLVPSTGQFSYFNYTSFVGNSHLCGPYLGPCGKGTHQSHVKPLSATTKLLLVLGLLFCSMVFAIVAIIKARSLRNASEAKAWRLTAFQRLDFTCDDVLDSLKEDNIIGKGGAGIVYKGTMPKGDLVAVKRLATMSHGSSHDHGFNAEIQTLGRIRHRHIVRLLGFCSNHETNLLVYEYMPNGSLGEVLHGKKGGHLHWNTRYKIALEAAKGLCYLHHDCSPLIVHRDVKSNNILLDSNFEAHVADFGLAKFLQDSGTSECMSAIAGSYGYIAPEYAYTLKVDEKSDVYSFGVVLLELITGKKPVGEFGDGVDIVQWVRSMTDSNKDCVLKVIDLRLSSVPVHEVTHVFYVALLCVEEQAVERPTMREVVQILTEIPKIPLSKQQAAESDVTEKAPAINESSPDSGSPPDLLSN

SEQ ID NO: 50736 - protein, 705 aa, Arabidopsis thaliana
  peptide (1)..(705): Ceres Seq. ID no. 13575303
  misc_feature (393)..(595): Pfam Name: Protein kinase domain Pfam Description: Protein kinase domain
  misc_feature (1)..(675): Homolog of NCBI NO: 24940156 NR Description: hypernodulation aberrant root formation protein
  misc_feature (1)..(669): Homolog of NCBI NO: 25287710 NR Description: protein T4O12.5 [imported] - Arabidopsis thaliana
  misc_feature (1)..(669): Homolog of NCBI NO: 15222877 NR Description: CLAVATA1 receptor kinase (CLV1) [Arabidopsis
  misc_feature (1)..(666): Homolog of NCBI NO: 15235366 NR Description: leucine-rich repeat transmembrane protein kinase,
  misc_feature (1)..(595): Homolog of NCBI NO: 8132685 NR Description: LRK1 protein [Oryza sativa]
MFTGEIPTSFSQLKNLTLLNLFRNKLYGAIPEFIGEMPELEVLQLWENNFTGSIPQKLGENGRLVILDLSSNKLTGTLPPNMCSGNRLMTLITLGNFLFGSIPDSLGKCESLTRIRMGENFLNGSIPKELFGLPKLSQVELQDNYLTGELPISGGGVSGDLGQISLSNNQLSGSLPAAIGNLSGVQKLLLDGNKFSGSIPPEIGRLQQLSKLDFSHNLFSGRIAPEISRCKLLTFVDLSRNELSGDIPNELTGMKILNYLNLSRNHLVGSIPVTIASMQSLTSVDFSYNNLSGLVPSTGQFSYFNYTSFVGNSHLCGPYLGPCGKGTHQSHVKPLSATTKLLLVLGLLFCSMVFAIVAIIKARSLRNASEAKAWRLTAFQRLDFTCDDVLDSLKEDNIIGKGGAGIVYKGTMPKGDLVAVKRLATMSHGSSHDHGFNAEIQTLGRIRHRHIVRLLGFCSNHETNLLVYEYMPNGSLGEVLHGKKGGHLHWNTRYKIALEAAKGLCYLHHDCSPLIVHRDVKSNNILLDSNFEAHVADFGLAKFLQDSGTSECMSAIAGSYGYIAPEYAYTLKVDEKSDVYSFGVVLLELITGKKPVGEFGDGVDIVQWVRSMTDSNKDCVLKVIDLRLSSVPVHEVTHVFYVALLCVEEQAVERPTMREVVQILTEIPKIPLSKQQAAESDVTEKAPAINESSPDSGSPPDLLSN

SEQ ID NO: 50737 - DNA, 2055 bp, Arabidopsis thaliana; identical to SEQ ID NO: 46130
  misc_feature (1)..(2055): Ceres Seq. ID no. 13591783
  misc_feature: MA Experiment ID: 20000184 Result: Up-regulated in Transcription
  misc_feature: MA Experiment 20000184 PARAMETER Experiment Name: At_Shoots__P Parameter: Age (day) Value: 7
  misc_feature: MA Experiment 20000184 PARAMETER Experiment Name: At_Shoots__P Parameter: Tissue Value: Shoots vs. Whole Plant

SEQ ID NO: 50738 - protein, 588 aa, Arabidopsis thaliana; identical to SEQ ID NO: 46131
  peptide (1)..(588): Ceres Seq. ID no. 13591784
  misc_feature (468)..(506): Pfam Name: HEAT repeat Pfam Description: HEAT repeat
  misc_feature (468)..(506): Pfam Name: HEAT repeat Pfam Description: HEAT repeat
  misc_feature (1)..(583): Homolog of NCBI NO: 7447393 NR Description: phosphoprotein phosphatase (EC 3.1.3.16) 2A
  misc_feature (3)..(581): Homolog of NCBI NO: 11094365 NR Description: Ser/Thr specific protein phosphatase 2A A
  misc_feature (1)..(581): Homolog of NCBI NO: 22329534 NR Description: serine/threonine protein phosphatase 2A
  misc_feature (1)..(581): Homolog of NCBI NO: 1076389 NR Description: phosphoprotein phosphatase 2A 65K regulatory
  misc_feature (1)..(581): Homolog of NCBI NO: 15230896 NR Description: serine/threonine protein phosphatase 2A, 65 KDa
  misc_feature (1)..(583): Homolog of NCBI NO: 7447393 NR Description: phosphoprotein phosphatase (EC 3.1.3.16) 2A
  misc_feature (1)..(581): Homolog of NCBI NO: 22329534 NR Description: serine/threonine protein phosphatase 2A
  misc_feature (1)..(581): Homolog of NCBI NO: 15230896 NR Description: serine/threonine protein phosphatase 2A, 65 KDa
  misc_feature (1)..(588): Homolog of NCBI NO: 15222601 NR Description: serine/threonine protein phosphatase 2A, 65 KDa
  misc_feature (1)..(588): Homolog of NCBI NO: 1254996 NR Description: serine/threonine protein phosphatase type 2A
  misc_feature (1)..(588): Homolog of NCBI NO: 2146743 NR Description: phosphoprotein phosphatase (EC 3.1.3.16) 2A
  misc_feature (1)..(588): Homolog of NCBI NO: 683506 NR Description: 65 kDa regulatory subunit of protein phosphatase
  misc_feature (1)..(588): Homolog of NCBI NO: 1076396 NR Description: phosphoprotein phosphatase 2A 65K regulatory
  misc_feature (1)..(581): Homolog of NCBI NO: 1076389 NR Description: phosphoprotein phosphatase 2A 65K regulatory
  misc_feature (3)..(581): Homolog of NCBI NO: 11094365 NR Description: Ser/Thr specific protein phosphatase 2A A
  misc_feature (1)..(588): Homolog of NCBI NO: 1076396 NR Description: phosphoprotein phosphatase 2A 65K regulatory
  misc_feature (1)..(588): Homolog of NCBI NO: 683506 NR Description: 65 kDa regulatory subunit of protein phosphatase
  misc_feature (1)..(588): Homolog of NCBI NO: 2146743 NR Description: phosphoprotein phosphatase (EC 3.1.3.16) 2A
  misc_feature (1)..(588): Homolog of NCBI NO: 1254996 NR Description: serine/threonine protein phosphatase type 2A
  misc_feature (1)..(588): Homolog of NCBI NO: 15222601 NR Description: serine/threonine protein phosphatase 2A, 65 KDa

SEQ ID NO: 50739 - protein, 586 aa, Arabidopsis thaliana; identical to SEQ ID NO: 46132
  peptide (1)..(586): Ceres Seq. ID no. 13591785
  misc_feature (466)..(504): Pfam Name: HEAT repeat Pfam Description: HEAT repeat
  misc_feature (466)..(504): Pfam Name: HEAT repeat Pfam Description: HEAT repeat
  misc_feature (1)..(581): Homolog of NCBI NO: 7447393 NR Description: phosphoprotein phosphatase (EC 3.1.3.16) 2A
  misc_feature (1)..(579): Homolog of NCBI NO: 11094365 NR Description: Ser/Thr specific protein phosphatase 2A A
  misc_feature (1)..(579): Homolog of NCBI NO: 22329534 NR Description: serine/threonine protein phosphatase 2A
  misc_feature (1)..(579): Homolog of NCBI NO: 1076389 NR Description: phosphoprotein phosphatase 2A 65K regulatory
  misc_feature (1)..(579): Homolog of NCBI NO: 15230896 NR Description: serine/threonine protein phosphatase 2A, 65 KDa
  misc_feature (1)..(581): Homolog of NCBI NO: 7447393 NR Description: phosphoprotein phosphatase (EC 3.1.3.16) 2A
  misc_feature (1)..(579): Homolog of NCBI NO: 22329534 NR Description: serine/threonine protein phosphatase 2A
  misc_feature (1)..(579): Homolog of NCBI NO: 15230896 NR Description: serine/threonine protein phosphatase 2A, 65 KDa
  misc_feature (1)..(586): Homolog of NCBI NO: 15222601 NR Description: serine/threonine protein phosphatase 2A, 65 KDa
  misc_feature (1)..(586): Homolog of NCBI NO: 1254996 NR Description: serine/threonine protein phosphatase type 2A
  misc_feature (1)..(586): Homolog of NCBI NO: 2146743 NR Description: phosphoprotein phosphatase (EC 3.1.3.16) 2A
  misc_feature (1)..(586): Homolog of NCBI NO: 683506 NR Description: 65 kDa regulatory subunit of protein phosphatase
  misc_feature (1)..(586): Homolog of NCBI NO: 1076396 NR Description: phosphoprotein phosphatase 2A 65K regulatory
  misc_feature (1)..(579): Homolog of NCBI NO: 1076389 NR Description: phosphoprotein phosphatase 2A 65K regulatory
  misc_feature (1)..(579): Homolog of NCBI NO: 11094365 NR Description: Ser/Thr specific protein phosphatase 2A A
  misc_feature (1)..(586): Homolog of NCBI NO: 1076396 NR Description: phosphoprotein phosphatase 2A 65K regulatory
  misc_feature (1)..(586): Homolog of NCBI NO: 683506 NR Description: 65 kDa regulatory subunit of protein phosphatase
  misc_feature (1)..(586): Homolog of NCBI NO: 2146743 NR Description: phosphoprotein phosphatase (EC 3.1.3.16) 2A
  misc_feature (1)..(586): Homolog of NCBI NO: 1254996 NR Description: serine/threonine protein phosphatase type 2A
  misc_feature (1)..(586): Homolog of NCBI NO: 15222601 NR Description: serine/threonine protein phosphatase 2A, 65 KDa

SEQ ID NO: 50740 - protein, 522 aa, Arabidopsis thaliana; identical to SEQ ID NO: 46133
  peptide (1)..(522): Ceres Seq. ID no. 13591786
  misc_feature (402)..(440): Pfam Name: HEAT repeat Pfam Description: HEAT repeat
  misc_feature (402)..(440): Pfam Name: HEAT repeat Pfam Description: HEAT repeat
  misc_feature (1)..(517): Homolog of NCBI NO: 7447393 NR Description: phosphoprotein phosphatase (EC 3.1.3.16) 2A
  misc_feature (1)..(515): Homolog of NCBI NO: 11094365 NR Description: Ser/Thr specific protein phosphatase 2A A
  misc_feature (1)..(515): Homolog of NCBI NO: 22329534 NR Description: serine/threonine protein phosphatase 2A
  misc_feature (1)..(515): Homolog of NCBI NO: 1076389 NR Description: phosphoprotein phosphatase 2A 65K regulatory
  misc_feature (1)..(515): Homolog of NCBI NO: 15230896 NR Description: serine/threonine protein phosphatase 2A, 65 KDa
  misc_feature (1)..(517): Homolog of NCBI NO: 7447393 NR Description: phosphoprotein phosphatase (EC 3.1.3.16) 2A
  misc_feature (1)..(515): Homolog of NCBI NO: 22329534 NR Description: serine/threonine protein phosphatase 2A
  misc_feature (1)..(515): Homolog of NCBI NO: 15230896 NR Description: serine/threonine protein phosphatase 2A, 65 KDa
  misc_feature (1)..(522): Homolog of NCBI NO: 15222601 NR Description: serine/threonine protein phosphatase 2A, 65 KDa
  misc_feature (1)..(522): Homolog of NCBI NO: 1254996 NR Description: serine/threonine protein phosphatase type 2A
  misc_feature (1)..(522): Homolog of NCBI NO: 2146743 NR Description: phosphoprotein phosphatase (EC 3.1.3.16) 2A
  misc_feature (1)..(522): Homolog of NCBI NO: 683506 NR Description: 65 kDa regulatory subunit of protein phosphatase
  misc_feature (1)..(522): Homolog of NCBI NO: 1076396 NR Description: phosphoprotein phosphatase 2A 65K regulatory
  misc_feature (1)..(515): Homolog of NCBI NO: 1076389 NR Description: phosphoprotein phosphatase 2A 65K regulatory
  misc_feature (1)..(515): Homolog of NCBI NO: 11094365 NR Description: Ser/Thr specific protein phosphatase 2A A
  misc_feature (1)..(522): Homolog of NCBI NO: 1076396 NR Description: phosphoprotein phosphatase 2A 65K regulatory
  misc_feature (1)..(522): Homolog of NCBI NO: 683506 NR Description: 65 kDa regulatory subunit of protein phosphatase
  misc_feature (1)..(522): Homolog of NCBI NO: 2146743 NR Description: phosphoprotein phosphatase (EC 3.1.3.16) 2A
  misc_feature (1)..(522): Homolog of NCBI NO: 1254996 NR Description: serine/threonine protein phosphatase type 2A
  misc_feature (1)..(522): Homolog of NCBI NO: 15222601 NR Description: serine/threonine protein phosphatase 2A, 65 KDa

SEQ ID NO: 50741 - DNA, 681 bp, Arabidopsis thaliana
  misc_feature (1)..(681): Ceres Seq. ID no. 12558899
  misc_feature: MA Experiment ID: 108434 Result: Down-regulated in Transcription
  misc_feature: MA Experiment 108434 PARAMETER Experiment Name: At_Root_Tips_cDNA_P Parameter: Tissue Value: Root Tips
  misc_feature: MA Experiment ID: 108474 Result: Down-regulated in Transcription
  misc_feature: MA Experiment 108474 PARAMETER Experiment Name: At_Drought_Flowers_cDNA_P Parameter: Timepoint (hr) Value: null
  misc_feature: MA Experiment 108474 PARAMETER Experiment Name: At_Drought_Flowers_cDNA_P Parameter: Treatment Value: Drought vs. No Drought
  misc_feature: MA Experiment ID: 20001910 Result: Up-regulated in Transcription
  misc_feature: MA Experiment 20001910 PARAMETER Experiment Name: At_Drought_Reproduction_P Parameter: Age (day) Value: 37
  misc_feature: MA Experiment 20001910 PARAMETER Experiment Name: At_Drought_Reproduction_P Parameter: Organism Value: A. thaliana
  misc_feature: MA Experiment 20001910 PARAMETER Experiment Name: At_Drought_Reproduction_P Parameter: Plant Line Value: WS
  misc_feature: MA Experiment 20001910 PARAMETER Experiment Name: At_Drought_Reproduction_P Parameter: Timepoint (day) Value: 7
  misc_feature: MA Experiment 20001910 PARAMETER Experiment Name: At_Drought_Reproduction_P Parameter: Tissue Value: Flowers
  misc_feature: MA Experiment 20001910 PARAMETER Experiment Name: At_Drought_Reproduction_P Parameter: Treatment Value: Drought vs. No Drought
aaaaaataactcttttcttctttttaatcttttttagcactaatcataaaccacaaaaatacataattaatcaccacaaaagcaattcacattcaccacaaaatgacaatgacacttaagctcctatctctcgccgtggctgccttggccatcaccgccgtcttggccgccgatcctccaacaccggcaaacgcgcccaaagccaacggcgaaaagaattcaacctctccttctcccgccgccgcagcatccccaaaatcacccacggcctccgccccaacctcaccgcctacagctgctccgaccatggccaagaaaaactccaccggaactccaagcccttccccatcttcaaacaccgcaaagcctccaaagtcatcatcagccaaaactccggcttcaagccctgactcaagctccggtgattcttccgaaggtcctaccagctcctctgacggcacctaccgcctcctctccgccagctccgactccagaaatgtctccatcttccgatgacggaactggcgccagtgacggccctgaagcttcgggctcctgcggcaggagcctcatcgcttgtgatctctgtctcgggctctgttctcgcagccgttgcatggcttttcttcatatgattgaatattactagtattttcttggagatttcatactacatttaag

SEQ ID NO: 50742 - protein, 137 aa, Arabidopsis thaliana
  peptide (1)..(137): Ceres Seq. ID no. 12558900
  misc_feature (11)..(120): Pfam Name: Glycoprotein GG/GX Pfam Description: Glycoprotein GG/GX
  misc_feature (26)..(116): Homolog of NCBI NO: 20330520 NR Description: mucin [Bos taurus]
  misc_feature (26)..(116): Homolog of NCBI NO: 20330520 NR Description: mucin [Bos taurus]
  misc_feature (26)..(116): Homolog of NCBI NO: 20330518 NR Description: mucin [Bos taurus]
  misc_feature (26)..(102): Homolog of NCBI NO: 20330518 NR Description: mucin [Bos taurus]
  misc_feature (26)..(120): Homolog of NCBI NO: 20330516 NR Description: mucin [Bos taurus]
  misc_feature (26)..(120): Homolog of NCBI NO: 20330520 NR Description: mucin [Bos taurus]
  misc_feature (26)..(127): Homolog of NCBI NO: 18495795 NR Description: MUC1 protein [Bos taurus]
  misc_feature (26)..(127): Homolog of NCBI NO: 16755594 NR Description: mucin [Bos taurus]
  misc_feature (26)..(116): Homolog of NCBI NO: 20330516 NR Description: mucin [Bos taurus]
  misc_feature (1)..(128): Homolog of NCBI NO: 559557 NR Description: arabinogalactan-protein
MTMTLKLLSLAVAALAITAVLAADPPTPANAPKANGEKNSTSPSPAAAASPKSPTASAPTSPPTAAPTMAKKNSTGTPSPSPSSNTAKPPKSSSAKTPASSPDSSSGDSSEGPTSSSDGTYRLLSASSDSRNVSIFR

SEQ ID NO: 50743 - protein, 135 aa, Arabidopsis thaliana
  peptide (1)..(135): Ceres Seq. ID no. 12558901
  misc_feature (9)..(118): Pfam Name: Glycoprotein GG/GX Pfam Description: Glycoprotein GG/GX
  misc_feature (24)..(114): Homolog of NCBI NO: 20330520 NR Description: mucin [Bos taurus]
  misc_feature (24)..(114): Homolog of NCBI NO: 20330518 NR Description: mucin [Bos taurus]
  misc_feature (24)..(114): Homolog of NCBI NO: 20330518 NR Description: mucin [Bos taurus]
  misc_feature (24)..(100): Homolog of NCBI NO: 20330518 NR Description: mucin [Bos taurus]
  misc_feature (24)..(118): Homolog of NCBI NO: 20330516 NR Description: mucin [Bos taurus]
  misc_feature (24)..(118): Homolog of NCBI NO: 20330520 NR Description: mucin [Bos taurus]
  misc_feature (24)..(125): Homolog of NCBI NO: 18495795 NR Description: MUC1 protein [Bos taurus]
  misc_feature (24)..(125): Homolog of NCBI NO: 16755594 NR Description: mucin [Bos taurus]
  misc_feature (24)..(114): Homolog of NCBI NO: 20330516 NR Description: mucin [Bos taurus]
  misc_feature (1)..(126): Homolog of NCBI NO: 559557 NR Description: arabinogalactan-protein
MTLKLLSLAVAALAITAVLAADPPTPANAPKANGEKNSTSPSPAAAASPKSPTASAPTSPPTAAPTMAKKNSTGTPSPSPSSNTAKPPKSSSAKTPASSPDSSSGDSSEGPTSSSDGTYRLLSASSDSRNVSIFR

SEQ ID NO: 50744 - protein, 69 aa, Arabidopsis thaliana
  peptide (1)..(69): Ceres Seq. ID no. 12558902
  misc_feature (1)..(52): Pfam Name: Glycoprotein GG/GX Pfam Description: Glycoprotein GG/GX
  misc_feature (1)..(48): Homolog of NCBI NO: 20330520 NR Description: mucin [Bos taurus]
  misc_feature (1)..(48): Homolog of NCBI NO: 20330518 NR Description: mucin [Bos taurus]
  misc_feature (1)..(48): Homolog of NCBI NO: 20330518 NR Description: mucin [Bos taurus]
  misc_feature (1)..(34): Homolog of NCBI NO: 20330518 NR Description: mucin [Bos taurus]
  misc_feature (1)..(52): Homolog of NCBI NO: 20330516 NR Description: mucin [Bos taurus]
  misc_feature (1)..(52): Homolog of NCBI NO: 20330520 NR Description: mucin [Bos taurus]
  misc_feature (1)..(59): Homolog of NCBI NO: 18495795 NR Description: MUC1 protein [Bos taurus]
  misc_feature (1)..(59): Homolog of NCBI NO: 16755594 NR Description: mucin [Bos taurus]
  misc_feature (1)..(48): Homolog of NCBI NO: 20330516 NR Description: mucin [Bos taurus]
  misc_feature (1)..(60): Homolog of NCBI NO: 559557 NR Description: arabinogalactan-protein
MAKKNSTGTPSPSPSSNTAKPPKSSSAKTPASSPDSSSGDSSEGPTSSSDGTYRLLSASSDSRNVSIFR

SEQ ID NO: 50745 - DNA, 2266 bp, Arabidopsis thaliana
  misc_feature (1)..(2266): Ceres Seq. ID no. 12558903
  misc_feature: MA Experiment ID: 20000185 Result: Down-regulated in Transcription
  misc_feature: MA Experiment 20000185 PARAMETER Experiment Name: At_Roots__P Parameter: Age (day) Value: 7 vs. 21
  misc_feature: MA Experiment 20000185 PARAMETER Experiment Name: At_Roots__P Parameter: Organism Value: A. thaliana
  misc_feature: MA Experiment 20000185 PARAMETER Experiment Name: At_Roots__P Parameter: Tissue Value: Roots vs. Whole Plant
  misc_feature: MA Experiment ID: 20000234 Result: Up-regulated in Transcription
  misc_feature: MA Experiment 20000234 PARAMETER Experiment Name: At_Siliques_P Parameter: Age (day) Value: 21
  misc_feature: MA Experiment 20000234 PARAMETER Experiment Name: At_Siliques_P Parameter: Organism Value: A. thaliana
  misc_feature: MA Experiment 20000234 PARAMETER Experiment Name: At_Siliques_P Parameter: Plant Line Value: WS
  misc_feature: MA Experiment 20000234 PARAMETER Experiment Name: At_Siliques_P Parameter: Tissue Value: Less Than 5mm Siliques vs. Whole Plant
  misc_feature: MA Experiment ID: 20000264 Result: Up-regulated in Transcription
  misc_feature: MA Experiment 20000264 PARAMETER Experiment Name: At_Open_Flower_P Parameter: Age (day) Value: 21
  misc_feature: MA Experiment 20000264 PARAMETER Experiment Name: At_Open_Flower_P Parameter: Plant Line Value: WS
  misc_feature: MA Experiment 20000264 PARAMETER Experiment Name: At_Open_Flower_P Parameter: Tissue Value: Open Flower vs. Whole Plant
  misc_feature: MA Experiment ID: 20000265 Result: Up-regulated in Transcription
  misc_feature: MA Experiment 20000265 PARAMETER Experiment Name: At_Open_Flower_P Parameter: Age (day) Value: 21
  misc_feature: MA Experiment 20000265 PARAMETER Experiment Name: At_Open_Flower_P Parameter: Plant Line Value: WS
  misc_feature: MA Experiment 20000265 PARAMETER Experiment Name: At_Open_Flower_P Parameter: Tissue Value: Closed Flower vs. Whole Plant
  misc_feature: MA Experiment ID: 20000267 Result: Up-regulated in Transcription
  misc_feature: MA Experiment 20000267 PARAMETER Experiment Name: At_Drought_P Parameter: Age (day) Value: 7
  misc_feature: MA Experiment 20000267 PARAMETER Experiment Name: At_Drought_P Parameter: Organism Value: A. thaliana
  misc_feature: MA Experiment 20000267 PARAMETER Experiment Name: At_Drought_P Parameter: Plant Line Value: WS
  misc_feature: MA Experiment 20000267 PARAMETER Experiment Name: At_Drought_P Parameter: Timepoint (hr) Value: 6
  misc_feature: MA Experiment 20000267 PARAMETER Experiment Name: At_Drought_P Parameter: Tissue Value: Whole Plant
  misc_feature: MA Experiment 20000267 PARAMETER Experiment Name: At_Drought_P Parameter: Treatment Value: Drought vs. No Drought
  misc_feature: MA Experiment ID: 20000286 Result: Up-regulated in Transcription
  misc_feature: MA Experiment 20000286 PARAMETER Experiment Name: At_Open_Flower_P Parameter: Age (day) Value: 21
  misc_feature: MA Experiment 20000286 PARAMETER Experiment Name: At_Open_Flower_P Parameter: Plant Line Value: WS
  misc_feature: MA Experiment 20000286 PARAMETER Experiment Name: At_Open_Flower_P Parameter: Tissue Value: Half Open vs. Whole Plant
  misc_feature: MA Experiment ID: 20000436 Result: Up-regulated in Transcription
  misc_feature: MA Experiment 20000436 PARAMETER Experiment Name: At_Drought_P Parameter: Age (day) Value: 7
  misc_feature: MA Experiment 20000436 PARAMETER Experiment Name: At_Drought_P Parameter: Organism Value: A. thaliana
  misc_feature: MA Experiment 20000436 PARAMETER Experiment Name: At_Drought_P Parameter: Plant Line Value: WS
  misc_feature: MA Experiment 20000436 PARAMETER Experiment Name: At_Drought_P Parameter: Timepoint (hr) Value: 12
  misc_feature: MA Experiment 20000436 PARAMETER Experiment Name: At_Drought_P Parameter: Tissue Value: Whole Plant
  misc_feature: MA Experiment 20000436 PARAMETER Experiment Name: At_Drought_P Parameter: Treatment Value: Drought vs. No Drought
  misc_feature: MA Experiment ID: 20000439 Result: Down-regulated in Transcription
  misc_feature: MA Experiment 20000439 PARAMETER Experiment Name: At_Roots__P Parameter: Age (day) Value: 14 vs. 21
  misc_feature: MA Experiment 20000439 PARAMETER Experiment Name: At_Roots__P Parameter: Organism Value: A. thaliana
  misc_feature: MA Experiment 20000439 PARAMETER Experiment Name: At_Roots__P Parameter: Tissue Value: Roots vs. Whole Plant
  misc_feature: MA Experiment ID: 20000495 Result: Up-regulated in Transcription
  misc_feature: MA Experiment 20000495 PARAMETER Experiment Name: At_Guard_Cells_P Parameter: Harvest Date Value: 8/2/2002
  misc_feature: MA Experiment 20000495 PARAMETER Experiment Name: At_Guard_Cells_P Parameter: Organism Value: A. thaliana
  misc_feature: MA Experiment 20000495 PARAMETER Experiment Name: At_Guard_Cells_P Parameter: Tissue Value: Guard Cells vs. Leaves
  misc_feature: MA Experiment ID: 20000496 Result: Up-regulated in Transcription
  misc_feature: MA Experiment 20000496 PARAMETER Experiment Name: At_Guard_Cells_P Parameter: Harvest Date Value: 7/19/2002
  misc_feature: MA Experiment 20000496 PARAMETER Experiment Name: At_Guard_Cells_P Parameter: Organism Value: Canola
  misc_feature: MA Experiment 20000496 PARAMETER Experiment Name: At_Guard_Cells_P Parameter: Tissue Value: Guard Cells vs. Leaves
  misc_feature: MA Experiment ID: 20000573 Result: Down-regulated in Transcription
  misc_feature: MA Experiment 20000573 PARAMETER Experiment Name: At_100uM_ABA_Mutants__P Parameter: Organism Value: A. thaliana
  misc_feature: MA Experiment 20000573 PARAMETER Experiment Name: At_100uM_ABA_Mutants__P Parameter: Plant Line Value: CS22 vs. Ler wt
  misc_feature: MA Experiment 20000573 PARAMETER Experiment Name: At_100uM_ABA_Mutants__P Parameter: Timepoint (hr) Value: N/A
  misc_feature: MA Experiment 20000573 PARAMETER Experiment Name: At_100uM_ABA_Mutants__P Parameter: Tissue Value: Whole Plant
  misc_feature: MA Experiment 20000573 PARAMETER Experiment Name: At_100uM_ABA_Mutants__P Parameter: Treatment Value: None
  misc_feature: MA Experiment ID: 20000574 Result: Down-regulated in Transcription
  misc_feature: MA Experiment 20000574 PARAMETER Experiment Name: At_100uM_ABA_Mutants__P Parameter: Organism Value: A. thaliana
  misc_feature: MA Experiment 20000574 PARAMETER Experiment Name: At_100uM_ABA_Mutants__P Parameter: Plant Line Value: CS23 vs. Ler wt
  misc_feature: MA Experiment 20000574 PARAMETER Experiment Name: At_100uM_ABA_Mutants__P Parameter: Timepoint (hr) Value: N/A
  misc_feature: MA Experiment 20000574 PARAMETER Experiment Name: At_100uM_ABA_Mutants__P Parameter: Tissue Value: Whole Plant
  misc_feature: MA Experiment 20000574 PARAMETER Experiment Name: At_100uM_ABA_Mutants__P Parameter: Treatment Value: None
  misc_feature: MA Experiment ID: 20000576 Result: Up-regulated in Transcription
  misc_feature: MA Experiment 20000576 PARAMETER Experiment Name: At_100uM_ABA_Mutants__P Parameter: Organism Value: A. thaliana
  misc_feature: MA Experiment 20000576 PARAMETER Experiment Name: At_100uM_ABA_Mutants__P Parameter: Plant Line Value: CS23
  misc_feature: MA Experiment 20000576 PARAMETER Experiment Name: At_100uM_ABA_Mutants__P Parameter: Timepoint (hr) Value: 6
  misc_feature: MA Experiment 20000576 PARAMETER Experiment Name: At_100uM_ABA_Mutants__P Parameter: Tissue Value: Whole Plant
  misc_feature: MA Experiment 20000576 PARAMETER Experiment Name: At_100uM_ABA_Mutants__P Parameter: Treatment Value: 1uM ABA vs. No Treatment
  misc_feature: MA Experiment ID: 20000794 Result: Up-regulated in Transcription
  misc_feature: MA Experiment 20000794 PARAMETER Experiment Name: At_Petals_P Parameter: Age (day) Value: 23-25 days
  misc_feature: MA Experiment 20000794 PARAMETER Experiment Name: At_Petals_P Parameter: Plant Line Value: WS
  misc_feature: MA Experiment 20000794 PARAMETER Experiment Name: At_Petals_P Parameter: Tissue Value: Petals vs. Whole plant
  misc_feature: MA Experiment ID: 20001247 Result: Up-regulated in Transcription
  misc_feature: MA Experiment 20001247 PARAMETER Experiment Name: At_Far-red-induction_P Parameter: Age (day) Value: 7
  misc_feature: MA Experiment 20001247 PARAMETER Experiment Name: At_Far-red-induction_P Parameter: Light Value: Far-red vs. White
  misc_feature: MA Experiment 20001247 PARAMETER Experiment Name: At_Far-red-induction_P Parameter: Organism Value: A. thaliana
  misc_feature: MA Experiment 20001247 PARAMETER Experiment Name: At_Far-red-induction_P Parameter: Plant Line Value: Columbia
  misc_feature: MA Experiment 20001247 PARAMETER Experiment Name: At_Far-red-induction_P Parameter: Timepoint (hr) Value: 1
  misc_feature: MA Experiment 20001247 PARAMETER Experiment Name: At_Far-red-induction_P Parameter: Tissue Value: Whole Plant
  misc_feature: MA Experiment ID: 20001248 Result: Down-regulated in Transcription
  misc_feature: MA Experiment 20001248 PARAMETER Experiment Name: At_Far-red-induction_P Parameter: Age (day) Value: 7
  misc_feature: MA Experiment 20001248 PARAMETER Experiment Name: At_Far-red-induction_P Parameter: Light Value: Far-red vs. White
  misc_feature: MA Experiment 20001248 PARAMETER Experiment Name: At_Far-red-induction_P Parameter: Organism Value: A. thaliana
  misc_feature: MA Experiment 20001248 PARAMETER Experiment Name: At_Far-red-induction_P Parameter: Plant Line Value: Columbia
  misc_feature: MA Experiment 20001248 PARAMETER Experiment Name: At_Far-red-induction_P Parameter: Timepoint (hr) Value: 4
  misc_feature: MA Experiment 20001248 PARAMETER Experiment Name: At_Far-red-induction_P Parameter: Tissue Value: Whole Plant
  misc_feature: MA Experiment ID: 20001554 Result: Up-regulated in Transcription
  misc_feature: MA Experiment 20001554 PARAMETER Experiment Name: At_Drought_Soil_Dry_P Parameter: Age (day) Value: 21
  misc_feature: MA Experiment 20001554 PARAMETER Experiment Name: At_Drought_Soil_Dry_P Parameter: Organism Value: A. thaliana
  misc_feature: MA Experiment 20001554 PARAMETER Experiment Name: At_Drought_Soil_Dry_P Parameter: Plant Line Value: WS
  misc_feature: MA Experiment 20001554 PARAMETER Experiment Name: At_Drought_Soil_Dry_P Parameter: Post Timepoint (hr) Value: None
  misc_feature: MA Experiment 20001554 PARAMETER Experiment Name: At_Drought_Soil_Dry_P Parameter: Post-Treatment Value: None
  misc_feature: MA Experiment 20001554 PARAMETER Experiment Name: At_Drought_Soil_Dry_P Parameter: Timepoint (day) Value: 7
  misc_feature: MA Experiment 20001554 PARAMETER Experiment Name: At_Drought_Soil_Dry_P Parameter: Treatment Value: Drought vs. No Drought
  misc_feature: MA Experiment ID: 20001555 Result: Up-regulated in Transcription
  misc_feature: MA Experiment 20001555 PARAMETER Experiment Name: At_Drought_Soil_Dry_P Parameter: Age (day) Value: 24
  misc_feature: MA Experiment 20001555 PARAMETER Experiment Name: At_Drought_Soil_Dry_P Parameter: Organism Value: A. thaliana
  misc_feature: MA Experiment 20001555 PARAMETER Experiment Name: At_Drought_Soil_Dry_P Parameter: Plant Line Value: WS
  misc_feature: MA Experiment 20001555 PARAMETER Experiment Name: At_Drought_Soil_Dry_P Parameter: Post Timepoint (hr) Value: None
  misc_feature: MA Experiment 20001555 PARAMETER Experiment Name: At_Drought_Soil_Dry_P Parameter: Post-Treatment Value: None
  misc_feature: MA Experiment 20001555 PARAMETER Experiment Name: At_Drought_Soil_Dry_P Parameter: Timepoint (day) Value: 10
  misc_feature: MA Experiment 20001555 PARAMETER Experiment Name: At_Drought_Soil_Dry_P Parameter: Treatment Value: Drought vs. No Drought
attcctcacttccaaccgccaaagaaaaaaatcaaaaactccaacaaaaaaaacctcccaaaccctacccgagcagtcgccagatgggcacggaggactacacattccctcaaggagcggaggagcttcaccgccgccaccacacggtggaggctccacaacctcaaccgttcttgaagtcacttcagtactcagtgaaggaaactctgtttccagacgacccttttagacaatttaagaaccaaaatgcatcaagaaaatttgtgttaggcctcaaatacttcctcccgattttcgaatgggcaccacgctacaatctcaagttcttcaaatcagatctcatcgccggaatcaccatcgctagtctcgccatccctcagggcatcagttacgccaaacttgctaacttgcccccaattcttggcctttattcgagttttgtaccgccattggtatacgcggtgctagggagttcaagggacttagcggtgggaacggttgcggttgcgtctctgttgacaggtgcgatgctgagcaaagaagttgatgctgagaaagatcctaagctttaccttcaccttgctttcaccgccacttttttcgccggcgttctcgaagcctctcttggaattttcaggttagggttcatagtggactttctatcgcatgcaacgatagtaggattcatgggaggagcagcgacgctggtgagtctgcaacagcttaagggtatattcggacttaaacatttcacagactctaccgatgttatctctgtcatgcgttccgttttctcccaaactcacgagtggagatgggaaagtggcgttcttggatgtggttttctattctttcttctctccaccagatatttcagcatcaagaaaccaaaattcttttgggtggcggcgatggctcctttgacctcagtgattcttggaagtctcttggtttacttcactcacgctgagagacatggtgttcaagtgataggggacctgaagaaagggttgaatccactctccggttctgatctcatctttacttccccttacatgtccacagctgtcaaaactggcctcatcactggcatcattgctctcgctgaaggagtagcagtggggaggagttttgcgatgttcaagaactacaacatagacgggaacaaagagatgatagcgtttggaatgatgaacatcgttggttccttcacatcttgttacctcacaaccggaccattttcaaggtcggcagtgaactacaacgcgggttgcaagaccgcaatgtccaacatagtgatggcgattgcggttatgttcacactcctcttcctcacaccgctttttcactacacaccactcgtcgtcctctctgccatcatcatatccgcaatgctcggactcattgactatcaagctgccatccatctctggaaagttgacaagttcgacttcctcgtctgcatgagcgcctacgttggggtcgtattcggcagtgtagagattggactcgtcgtagcggtggcgatatctatagcgaggttgttgctgtttgtgtcgaggccaaaaactgcggtgaagggaaacataccaaacagcatgatctataggaacactgagcagtacccatcatcaagaaccgttcctggtattctcatcttggagattgatgctcccatctactttgctaatgccagttacttgcgtgaaagaatcataaggtggattgatgaagaggaagagagagttaaacaatcaggagagagcagcttacaatatattatactcgatatgtcagctgttggtaatatcgacacaagcggtattagcatgatggtggaaattaagaaagtcattgacaggagagcgttaaagttggtattgtcaaatccaaaaggagaggtcgtgaagaaattaaccagatccaaattcatcggtgatcatttgggcaaagagtggatgttcttaacggtaggagaagcagtggaggcttgtagctacatgcttcacacgtttaaaaccgaaccggcctccaaaaacgagccttggaacaacgtatagttcctttattttttgctgtcgttctgtgactactcgttattaactaatccgatgtaaacttaaattaaaaactgaaactcattttgtaatattgatgatgagccatatgcaatatatatgcactcttattgtagtgttatggaagaaattggcggttcggaattagaccaaataccggttaatgaacaatgaagcaaatttggttt

SEQ ID NO: 50746 - protein, 685 aa, Arabidopsis thaliana
  peptide (1)..(685): Ceres Seq. ID no. 12558904
  misc_feature (541)..(660): Pfam Name: STAS domain Pfam Description: STAS domain
  misc_feature (91)..(674): Homolog of NCBI NO: 16197734 NR Description: sulfate transporter [Brassica napus]
  misc_feature (96)..(682): Homolog of NCBI NO: 15230510 NR Description: sulphate transporter, putative; protein id:
  misc_feature (572)..(662): Homolog of NCBI NO: 6573773 NR Description: F28K19.21 [Arabidopsis thaliana]
  misc_feature (39)..(570): Homolog of NCBI NO: 6573773 NR Description: F28K19.21 [Arabidopsis thaliana]
  misc_feature (91)..(667): Homolog of NCBI NO: 24414266 NR Description: Putative sulfate transporter
  misc_feature (38)..(665): Homolog of NCBI NO: 37572944 NR Description: putative high affinity sulfate transporter
  misc_feature (47)..(665): Homolog of NCBI NO: 4579913 NR Description: sulfate transporter [Arabidopsis thaliana]
  misc_feature (47)..(665): Homolog of NCBI NO: 15220016 NR Description: putative sulphate transporter protein
  misc_feature (45)..(685): Homolog of NCBI NO: 15235467 NR Description: sulfate transporter protein
  misc_feature (52)..(672): Homolog of NCBI NO: 34902632 NR Description: Putative sulfate transporter ATST1
SSLPTAKEKNQKLQQKKPPKPYPSSRQMGTEDYTFPQGAEELHRRHHTVEAPQPQPFLKSLQYSVKETLFPDDPFRQFKNQNASRKFVLGLKYFLPIFEWAPRYNLKFFKSDLIAGITIASLAIPQGISYAKLANLPPILGLYSSFVPPLVYAVLGSSRDLAVGTVAVASLLTGAMLSKEVDAEKDPKLYLHLAFTATFFAGVLEASLGIFRLGFIVDFLSHATIVGFMGGAATLVSLQQLKGIFGLKHFTDSTDVISVMRSVFSQTHEWRWESGVLGCGFLFFLLSTRYFSIKKPKFFWVAAMAPLTSVILGSLLVYFTHAERHGVQVIGDLKKGLNPLSGSDLIFTSPYMSTAVKTGLITGIIALAEGVAVGRSFAMFKNYNIDGNKEMIAFGMMNIVGSFTSCYLTTGPFSRSAVNYNAGCKTAMSNIVMAIAVMFTLLFLTPLFHYTPLVVLSAIIISAMLGLIDYQAAIHLWKVDKFDFLVCMSAYVGVVFGSVEIGLVVAVAISIARLLLFVSRPKTAVKGNIPNSMIYRNTEQYPSSRTVPGILILEIDAPIYFANASYLRERIIRWIDEEEERVKQSGESSLQYIILDMSAVGNIDTSGISMMVEIKKVIDRRALKLVLSNPKGEVVKKLTRSKFIGDHLGKEWMFLTVGEAVEACSYMLHTFKTEPASKNEPWNNV

SEQ ID NO: 50747 - protein, 658 aa, Arabidopsis thaliana
  peptide (1)..(658): Ceres Seq. ID no. 12558905
  misc_feature (514)..(633): Pfam Name: STAS domain Pfam Description: STAS domain
  misc_feature (64)..(647): Homolog of NCBI NO: 16197734 NR Description: sulfate transporter [Brassica napus]
  misc_feature (69)..(655): Homolog of NCBI NO: 15230510 NR Description: sulphate transporter, putative; protein id:
  misc_feature (545)..(635): Homolog of NCBI NO: 6573773 NR Description: F28K19.21 [Arabidopsis thaliana]
  misc_feature (12)..(543): Homolog of NCBI NO: 6573773 NR Description: F28K19.21 [Arabidopsis thaliana]
  misc_feature (64)..(640): Homolog of NCBI NO: 24414266 NR Description: Putative sulfate transporter
  misc_feature (11)..(638): Homolog of NCBI NO: 37572944 NR Description: putative high affinity sulfate transporter
  misc_feature (20)..(638): Homolog of NCBI NO: 4579913 NR Description: sulfate transporter [Arabidopsis thaliana]
  misc_feature (20)..(638): Homolog of NCBI NO: 15220016 NR Description: putative sulphate transporter protein
  misc_feature (18)..(658): Homolog of NCBI NO: 15235467 NR Description: sulfate transporter protein
  misc_feature (25)..(645): Homolog of NCBI NO: 34902632 NR Description: Putative sulfate transporter ATST1
MGTEDYTFPQGAEELHRRHHTVEAPQPQPFLKSLQYSVKETLFPDDPFRQFKNQNASRKFVLGLKYFLPIFEWAPRYNLKFFKSDLIAGITIASLAIPQGISYAKLANLPPILGLYSSFVPPLVYAVLGSSRDLAVGTVAVASLLTGAMLSKEVDAEKDPKLYLHLAFTATFFAGVLEASLGIFRLGFIVDFLSHATIVGFMGGAATLVSLQQLKGIFGLKHFTDSTDVISVMRSVFSQTHEWRWESGVLGCGFLFFLLSTRYFSIKKPKFFWVAAMAPLTSVILGSLLVYFTHAERHGVQVIGDLKKGLNPLSGSDLIFTSPYMSTAVKTGLITGIIALAEGVAVGRSFAMFKNYNIDGNKEMIAFGMMNIVGSFTSCYLTTGPFSRSAVNYNAGCKTAMSNIVMAIAVMFTLLFLTPLFHYTPLVVLSAIIISAMLGLIDYQAAIHLWKVDKFDFLVCMSAYVGVVFGSVEIGLVVAVAISIARLLLFVSRPKTAVKGNIPNSMIYRNTEQYPSSRTVPGILILEIDAPIYFANASYLRERIIRWIDEEEERVKQSGESSLQYIILDMSAVGNIDTSGISMMVEIKKVIDRRALKLVLSNPKGEVVKKLTRSKFIGDHLGKEWMFLTVGEAVEACSYMLHTFKTEPASKNEPWNNV

SEQ ID NO: 50748 - protein, 510 aa, Arabidopsis thaliana
  peptide (1)..(510): Ceres Seq. ID no. 12558906
  misc_feature (366)..(485): Pfam Name: STAS domain Pfam Description: STAS domain
  misc_feature (1)..(499): Homolog of NCBI NO: 16197734 NR Description: sulfate transporter [Brassica napus]
  misc_feature (1)..(507): Homolog of NCBI NO: 15230510 NR Description: sulphate transporter, putative; protein id:
  misc_feature (397)..(487): Homolog of NCBI NO: 6573773 NR Description: F28K19.21 [Arabidopsis thaliana]
  misc_feature (1)..(395): Homolog of NCBI NO: 6573773 NR Description: F28K19.21 [Arabidopsis thaliana]
  misc_feature (1)..(492): Homolog of NCBI NO: 24414266 NR Description: Putative sulfate transporter
  misc_feature (1)..(490): Homolog of NCBI NO: 37572944 NR Description: putative high affinity sulfate transporter
  misc_feature (1)..(490): Homolog of NCBI NO: 4579913 NR Description: sulfate transporter [Arabidopsis thaliana]
  misc_feature (1)..(490): Homolog of NCBI NO: 15220016 NR Description: putative sulphate transporter protein
  misc_feature (1)..(510): Homolog of NCBI NO: 15235467 NR Description: sulfate transporter protein
  misc_feature (1)..(497): Homolog of NCBI NO: 34902632 NR Description: Putative sulfate transporter ATST1
MLSKEVDAEKDPKLYLHLAFTATFFAGVLEASLGIFRLGFIVDFLSHATIVGFMGGAATLVSLQQLKGIFGLKHFTDSTDVISVMRSVFSQTHEWRWESGVLGCGFLFFLLSTRYFSIKKPKFFWVAAMAPLTSVILGSLLVYFTHAERHGVQVIGDLKKGLNPLSGSDLIFTSPYMSTAVKTGLITGIIALAEGVAVGRSFAMFKNYNIDGNKEMIAFGMMNIVGSFTSCYLTTGPFSRSAVNYNAGCKTAMSNIVMAIAVMFTLLFLTPLFHYTPLVVLSAIIISAMLGLIDYQAAIHLWKVDKFDFLVCMSAYVGVVFGSVEIGLVVAVAISIARLLLFVSRPKTAVKGNIPNSMIYRNTEQYPSSRTVPGILILEIDAPIYFANASYLRERIIRWIDEEEERVKQSGESSLQYIILDMSAVGNIDTSGISMMVEIKKVIDRRALKLVLSNPKGEVVKKLTRSKFIGDHLGKEWMFLTVGEAVEACSYMLHTFKTEPASKNEPWNNV

SEQ ID NO: 50749 - DNA, 2657 bp, Arabidopsis thaliana
  misc_feature (1)..(2657): Ceres Seq. ID no. 12558909
  misc_feature: MA Experiment ID: 20000180 Result: Up-regulated in Transcription
  misc_feature: MA Experiment 20000180 PARAMETER Experiment Name: At_Germinating_Seeds_P Parameter: Age (hr) Value: 24 vs. 0
  misc_feature: MA Experiment 20000180 PARAMETER Experiment Name: At_Germinating_Seeds_P Parameter: Tissue Value: Germinating Seeds
  misc_feature: MA Experiment ID: 20000495 Result: Up-regulated in Transcription
  misc_feature: MA Experiment 20000495 PARAMETER Experiment Name: At_Guard_Cells_P Parameter: Harvest Date Value: 8/2/2002
  misc_feature: MA Experiment 20000495 PARAMETER Experiment Name: At_Guard_Cells_P Parameter: Organism Value: A. thaliana
  misc_feature: MA Experiment 20000495 PARAMETER Experiment Name: At_Guard_Cells_P Parameter: Tissue Value: Guard Cells vs. Leaves
  misc_feature: MA Experiment ID: 20000794 Result: Up-regulated in Transcription
  misc_feature: MA Experiment 20000794 PARAMETER Experiment Name: At_Petals_P Parameter: Age (day) Value: 23-25 days
  misc_feature: MA Experiment 20000794 PARAMETER Experiment Name: At_Petals_P Parameter: Plant Line Value: WS
  misc_feature: MA Experiment 20000794 PARAMETER Experiment Name: At_Petals_P Parameter: Tissue Value: Petals vs. Whole plant
  misc_feature: MA Experiment ID: 20001905 Result: Up-regulated in Transcription
  misc_feature: MA Experiment 20001905 PARAMETER Experiment Name: At_Drought_Reproduction_P Parameter: Age (day) Value: 40
  misc_feature: MA Experiment 20001905 PARAMETER Experiment Name: At_Drought_Reproduction_P Parameter: Organism Value: A. thaliana
  misc_feature: MA Experiment 20001905 PARAMETER Experiment Name: At_Drought_Reproduction_P Parameter: Plant Line Value: WS
  misc_feature: MA Experiment 20001905 PARAMETER Experiment Name: At_Drought_Reproduction_P Parameter: Timepoint (day) Value: 10
  misc_feature: MA Experiment 20001905 PARAMETER Experiment Name: At_Drought_Reproduction_P Parameter: Tissue Value: Rosettes
  misc_feature: MA Experiment 20001905 PARAMETER Experiment Name: At_Drought_Reproduction_P Parameter: Treatment Value: Drought vs. No Drought
  misc_feature: MA Experiment ID: 20001911 Result: Up-regulated in Transcription
  misc_feature: MA Experiment 20001911 PARAMETER Experiment Name: At_Drought_Reproduction_P Parameter: Age (day) Value: 40
  misc_feature: MA Experiment 20001911 PARAMETER Experiment Name: At_Drought_Reproduction_P Parameter: Organism Value: A. thaliana
  misc_feature: MA Experiment 20001911 PARAMETER Experiment Name: At_Drought_Reproduction_P Parameter: Plant Line Value: WS
  misc_feature: MA Experiment 20001911 PARAMETER Experiment Name: At_Drought_Reproduction_P Parameter: Timepoint (day) Value: 10
  misc_feature: MA Experiment 20001911 PARAMETER Experiment Name: At_Drought_Reproduction_P Parameter: Tissue Value: Flowers
  misc_feature: MA Experiment 20001911 PARAMETER Experiment Name: At_Drought_Reproduction_P Parameter: Treatment Value: Drought vs. No Drought
atttctgttaaatccgttgggttcttccatggatcctcatcgtcatcgcctccatctccgtctttcttcttcttcttctgctcgattctaattccgtaagagagaaataataaaggattcatgttcacatcttctacctgatgagcataccatgattctctcgctatgcgttggcttccgcaaatctcgttctcgtctccttcttcttctccatcttcttctctaaaacccgtggcttcttactctgaatctccggatccagatcgtaatcaggatcgggatcggtttcatcgccgcttgtttcgttttaaccgtggcaggctcacccgtcagcggaagcttcgtcacttgacggatgacgatgttttgttgggagaacgtcgtgcttctacctcttcctccaccttcgattccggtttaactcgctctcccagcgctttcaccgccgttcctcgctctccttctgccgttcccttacccttacctctccccttaccggaggtcgccgggattcgaaatgccgcaaacgctagaggattggatgacagagatcgagatcccgagagacttatttctgatcgcacctcttctggtcctcctctcaccagcgtcaatggcggctttgcccgtgactcgaggaaagctacggagaattcgtcatatcaagattttagtccgagaaacagaaatggttattgggtgaatattccaaccatgagtgcaccaacgagtccatacatgagtcctgtgcctagtccacaaaggaagagtactggccacgatttgccttttttttatttgcctcctaaaagcaatcaagcttggtctgctccagatatgccacttgatacctctggtcttcctcctcctgcattttatgatattactgcctttagtaccgataattctcccatccatagtccacaacctcggagtccacggaaacagatcagaagcccacaacctagcagaccatcttcaccgttgcattcggttgatagctcagctccaccgcgagatagtgtttcctcacctttgcatccgaggttgtctactgatgttacgaatgggcgacgtgattgctgcaatgttcatcctttgcctctccctcctggagctacttgttcctcttcatcagctgcttctgttccgtccccgcaggctcctctcaaactggattcattcccaatgaattcccagtggaagaaagggaagctaataggtcgtggtacttttggaagtgtttacgttgcaagcaacagcgaaactggagcattgtgtgcgatgaaagaagttgagctatttcctgatgaccccaaatccgcagagtgtataaagcaattagagcaggagatcaaacttctaagtaaccttcaacatccaaacattgtgcagtattttggtagcgagacagtagaagatcgtttctttatatacctggaatatgttcacccgggttcaataaacaaatatatccgtgatcattgcggcaccatgacagaatctgttgttcgcaattttactcgtcacattttgtctgggctggcttatttgcacaataaaaagactgtacatagggatatcaaaggtgctaatctccttgttgatgcttctggggttgtcaagcttgctgatttcggcatggctaaacaccttactggacaaagagctgatctctcgttaaagggaagcccgtactggatggcaccagagctcatgcaagctgtgatgcaaaaagatagcaacccagatctggcttttgctgttgatatatggagtttaggatgtacaatcattgagatgttcactgggaagcctccttggagtgagtttgaaggggctgcagctatgttcaaggtcatgagagatagcccaccgatacctgaatcaatgtcacctgagggtaaagacttcctgagattatgcttccagagaaacccagctgagcgaccaaccgcatctatgttgctagaacaccggttcctaaagaactctttgcaaccaacctcaccaagcaacagtgatgtctctcaattatttaatgggatgaacataacggaaccaagcagtagaagggagaagccaaatttcaaactagaccaggtcccgcgagctagaaacatgacatcctcagagagtgaaagtgggcaacagcagcagcaacaacagtaccggtctcccgatctaacaggaaccgtgaaccgtctgtctcctcgttccactctggaggctatcccaagcccgtgtccttcccaacgacctaagcccagcagcagtgacaggagaagaacgggcgtcacttcagatcacctttgatttgcagctcgagaggttaaccaatagaagctacttctatacgtattcttgtacacgtaagtgtatgtcaatgtacgtatttagagtttggggtcgcgtgggggaatacgattgggatgaaatgaaaatcctgtgggtggtagatgaagaatattgtgtctgtaaaattataattcaatgttgaatcgatagaagaagcttttttctttcttcctcttttttttttttttttgcttgagagagttgtgtataaattattttaacgacgtcttgtgtacctttggtttcgggtctgtatccacttttagatttagatccatttaaaacaaaattaatctctg

SEQ ID NO: 50750 - protein, 716 aa, Arabidopsis thaliana
  peptide (1)..(716): Ceres Seq. ID no. 12558910
  misc_feature (346)..(607): Pfam Name: Protein kinase domain Pfam Description: Protein kinase domain
  misc_feature (186)..(617): Homolog of NCBI NO: 4204912 NR Description: MEK kinase [Arabidopsis thaliana]
  misc_feature (264)..(715): Homolog of NCBI NO: 38049268 NR Description: YDA [Arabidopsis thaliana]
  misc_feature (264)..(715): Homolog of NCBI NO: 15222512 NR Description: putative protein kinase; protein id: At1g63700.1
  misc_feature (185)..(611): Homolog of NCBI NO: 38345839 NR Description: OSJNBa0084K11.3 [Oryza sativa (japonica
  misc_feature (10)..(610): Homolog of NCBI NO: 34915394 NR Description: putative MAP3K protein kinase(Mitogen-activated
  misc_feature (503)..(704): Homolog of NCBI NO: 17027283 NR Description: putative protein kinase [Oryza sativa (japonica
  misc_feature (76)..(496): Homolog of NCBI NO: 17027283 NR Description: putative protein kinase [Oryza sativa (japonica
  misc_feature (10)..(696): Homolog of NCBI NO: 33146554 NR Description: putative MAP3K protein kinase(Mitogen-activated
  misc_feature (345)..(716): Homolog of NCBI NO: 25387031 NR Description: mitogen-activated protein kinase MAP3K
  misc_feature (342)..(716): Homolog of NCBI NO: 9758135 NR Description: MAP protein kinase [Arabidopsis thaliana]
MRWLPQISFSSPSSSPSSSLKPVASYSESPDPDRNQDRDRFHRRLFRFNRGRLTRQRKLRHLTDDDVLLGERRASTSSSTFDSGLTRSPSAFTAVPRSPSAVPLPLPLPLPEVAGIRNAANARGLDDRDRDPERLISDRTSSGPPLTSVNGGFARDSRKATENSSYQDFSPRNRNGYWVNIPTMSAPTSPYMSPVPSPQRKSTGHDLPFFYLPPKSNQAWSAPDMPLDTSGLPPPAFYDITAFSTDNSPIHSPQPRSPRKQIRSPQPSRPSSPLHSVDSSAPPRDSVSSPLHPRLSTDVTNGRRDCCNVHPLPLPPGATCSSSSAASVPSPQAPLKLDSFPMNSQWKKGKLIGRGTFGSVYVASNSETGALCAMKEVELFPDDPKSAECIKQLEQEIKLLSNLQHPNIVQYFGSETVEDRFFIYLEYVHPGSINKYIRDHCGTMTESVVRNFTRHILSGLAYLHNKKTVHRDIKGANLLVDASGVVKLADFGMAKHLTGQRADLSLKGSPYWMAPELMQAVMQKDSNPDLAFAVDIWSLGCTIIEMFTGKPPWSEFEGAAAMFKVMRDSPPIPESMSPEGKDFLRLCFQRNPAERPTASMLLEHRFLKNSLQPTSPSNSDVSQLFNGMNITEPSSRREKPNFKLDQVPRARNMTSSESESGQQQQQQQYRSPDLTGTVNRLSPRSTLEAIPSPCPSQRPKPSSSDRRRTGVTSDHL

SEQ ID NO: 50751 - protein, 533 aa, Arabidopsis thaliana
  peptide (1)..(533): Ceres Seq. ID no. 12558911
  misc_feature (163)..(424): Pfam Name: Protein kinase domain Pfam Description: Protein kinase domain
  misc_feature (3)..(434): Homolog of NCBI NO: 4204912 NR Description: MEK kinase [Arabidopsis thaliana]
  misc_feature (81)..(532): Homolog of NCBI NO: 38049268 NR Description: YDA [Arabidopsis thaliana]
  misc_feature (81)..(532): Homolog of NCBI NO: 15222512 NR Description: putative protein kinase; protein id: At1g63700.1
  misc_feature (2)..(428): Homolog of NCBI NO: 38345839 NR Description: OSJNBa0084K11.3 [Oryza sativa (japonica
  misc_feature (1)..(427): Homolog of NCBI NO: 34915394 NR Description: putative MAP3K protein kinase(Mitogen-activated
  misc_feature (320)..(521): Homolog of NCBI NO: 17027283 NR Description: putative protein kinase [Oryza sativa (japonica
  misc_feature (1)..(313): Homolog of NCBI NO: 17027283 NR Description: putative protein kinase [Oryza sativa (japonica
  misc_feature (1)..(513): Homolog of NCBI NO: 33146554 NR Description: putative MAP3K protein kinase(Mitogen-activated
  misc_feature (162)..(533): Homolog of NCBI NO: 25387031 NR Description: mitogen-activated protein kinase MAP3K
  misc_feature (159)..(533): Homolog of NCBI NO: 9758135 NR Description: MAP protein kinase [Arabidopsis thaliana]
MSAPTSPYMSPVPSPQRKSTGHDLPFFYLPPKSNQAWSAPDMPLDTSGLPPPAFYDITAFSTDNSPIHSPQPRSPRKQIRSPQPSRPSSPLHSVDSSAPPRDSVSSPLHPRLSTDVTNGRRDCCNVHPLPLPPGATCSSSSAASVPSPQAPLKLDSFPMNSQWKKGKLIGRGTFGSVYVASNSETGALCAMKEVELFPDDPKSAECIKQLEQEIKLLSNLQHPNIVQYFGSETVEDRFFIYLEYVHPGSINKYIRDHCGTMTESVVRNFTRHILSGLAYLHNKKTVHRDIKGANLLVDASGVVKLADFGMAKHLTGQRADLSLKGSPYWMAPELMQAVMQKDSNPDLAFAVDIWSLGCTIIEMFTGKPPWSEFEGAAAMFKVMRDSPPIPESMSPEGKDFLRLCFQRNPAERPTASMLLEHRFLKNSLQPTSPSNSDVSQLFNGMNITEPSSRREKPNFKLDQVPRARNMTSSESESGQQQQQQQYRSPDLTGTVNRLSPRSTLEAIPSPCPSQRPKPSSSDRRRTGVTSDHL

SEQ ID NO: 50752 - protein, 525 aa, Arabidopsis thaliana
  peptide (1)..(525): Ceres Seq. ID no. 12558912
  misc_feature (155)..(416): Pfam Name: Protein kinase domain Pfam Description: Protein kinase domain
  misc_feature (1)..(426): Homolog of NCBI NO: 4204912 NR Description: MEK kinase [Arabidopsis thaliana]
  misc_feature (73)..(524): Homolog of NCBI NO: 38049268 NR Description: YDA [Arabidopsis thaliana]
  misc_feature (73)..(524): Homolog of NCBI NO: 15222512 NR Description: putative protein kinase; protein id: At1g63700.1
  misc_feature (1)..(420): Homolog of NCBI NO: 38345839 NR Description: OSJNBa0084K11.3 [Oryza sativa (japonica
  misc_feature (1)..(419): Homolog of NCBI NO: 34915394 NR Description: putative MAP3K protein kinase(Mitogen-activated
  misc_feature (312)..(513): Homolog of NCBI NO: 17027283 NR Description: putative protein kinase [Oryza sativa (japonica
  misc_feature (1)..(305): Homolog of NCBI NO: 17027283 NR Description: putative protein kinase [Oryza sativa (japonica
  misc_feature (1)..(505): Homolog of NCBI NO: 33146554 NR Description: putative MAP3K protein kinase(Mitogen-activated
  misc_feature (154)..(525): Homolog of NCBI NO: 25387031 NR Description: mitogen-activated protein kinase MAP3K
  misc_feature (151)..(525): Homolog of NCBI NO: 9758135 NR Description: MAP protein kinase [Arabidopsis thaliana]
MSPVPSPQRKSTGHDLPFFYLPPKSNQAWSAPDMPLDTSGLPPPAFYDITAFSTDNSPIHSPQPRSPRKQIRSPQPSRPSSPLHSVDSSAPPRDSVSSPLHPRLSTDVTNGRRDCCNVHPLPLPPGATCSSSSAASVPSPQAPLKLDSFPMNSQWKKGKLIGRGTFGSVYVASNSETGALCAMKEVELFPDDPKSAECIKQLEQEIKLLSNLQHPNIVQYFGSETVEDRFFIYLEYVHPGSINKYIRDHCGTMTESVVRNFTRHILSGLAYLHNKKTVHRDIKGANLLVDASGVVKLADFGMAKHLTGQRADLSLKGSPYWMAPELMQAVMQKDSNPDLAFAVDIWSLGCTIIEMFTGKPPWSEFEGAAAMFKVMRDSPPIPESMSPEGKDFLRLCFQRNPAERPTASMLLEHRFLKNSLQPTSPSNSDVSQLFNGMNITEPSSRREKPNFKLDQVPRARNMTSSESESGQQQQQQQYRSPDLTGTVNRLSPRSTLEAIPSPCPSQRPKPSSSDRRRTGVTSDHL

SEQ ID NO: 50753 - DNA, 1288 bp, Arabidopsis thaliana
  misc_feature (1)..(1288): Ceres Seq. ID no. 13575314
  misc_feature: MA Experiment ID: 20000173 Result: Down-regulated in Transcription
  misc_feature: MA Experiment 20000173 PARAMETER Experiment Name: At_42deg_Heat_P Parameter: Age (day) Value: 14
  misc_feature: MA Experiment 20000173 PARAMETER Experiment Name: At_42deg_Heat_P Parameter: Organism Value: A. thaliana
  misc_feature: MA Experiment 20000173 PARAMETER Experiment Name: At_42deg_Heat_P Parameter: Plant Line Value: WS
  misc_feature: MA Experiment 20000173 PARAMETER Experiment Name: At_42deg_Heat_P Parameter: Temperature (deg C) Value: 42 vs. 22
  misc_feature: MA Experiment 20000173 PARAMETER Experiment Name: At_42deg_Heat_P Parameter: Timepoint (hr) Value: 6
  misc_feature: MA Experiment 20000173 PARAMETER Experiment Name: At_42deg_Heat_P Parameter: Tissue Value: Aerial
  misc_feature: MA Experiment ID: 20000235 Result: Up-regulated in Transcription
  misc_feature: MA Experiment 20000235 PARAMETER Experiment Name: At_Siliques_P Parameter: Age (day) Value: 21
  misc_feature: MA Experiment 20000235 PARAMETER Experiment Name: At_Siliques_P Parameter: Organism Value: A. thaliana
  misc_feature: MA Experiment 20000235 PARAMETER Experiment Name: At_Siliques_P Parameter: Plant Line Value: WS
  misc_feature: MA Experiment 20000235 PARAMETER Experiment Name: At_Siliques_P Parameter: Tissue Value: 5-10mm Siliques vs. Whole Plant
  misc_feature: MA Experiment ID: 20001905 Result: Down-regulated in Transcription
  misc_feature: MA Experiment 20001905 PARAMETER Experiment Name: At_Drought_Reproduction_P Parameter: Age (day) Value: 40
  misc_feature: MA Experiment 20001905 PARAMETER Experiment Name: At_Drought_Reproduction_P Parameter: Organism Value: A. thaliana
  misc_feature: MA Experiment 20001905 PARAMETER Experiment Name: At_Drought_Reproduction_P Parameter: Plant Line Value: WS
  misc_feature: MA Experiment 20001905 PARAMETER Experiment Name: At_Drought_Reproduction_P Parameter: Timepoint (day) Value: 10
  misc_feature: MA Experiment 20001905 PARAMETER Experiment Name: At_Drought_Reproduction_P Parameter: Tissue Value: Rosettes
  misc_feature: MA Experiment 20001905 PARAMETER Experiment Name: At_Drought_Reproduction_P Parameter: Treatment Value: Drought vs. No Drought
gaaaatcagaaccaaacattccaatcctttgattgattgatttcacagtgaagatttctaattcttacgcttgctcttcacatctctcaaatctccagattggagcaacgaatctgattcaaccctaatttcaagcaaaaaccccttaccaagcctctgagattacatacagtcgtcactccaacatacgagagaagatacccaaaccaaaatggccaacgatcgacgcgcttcttctgtcaatccgtcgacggagcaagacaatgctatgtttcttgatatattgcatgaagctcctctctttggtcatcgtgaatcgagaagtcttgttggaagctgcatttatcttatcatattggcatgttatgctattttagcagcaggggcaccgtggatacttcagtctgtagactatcttatcccatcgctgctttgcagctgtaatgttgctttattgatgttaacaggtatgtttcagcaatattttgtcaatcaggtccagaaaatacgcttgcagggttattacagtttcagtcagaaactgaaacatgtagttcgtctgccatttgcaatcatggcctatgggactgcatctatgctacttttcatggagtggagaccatatgtcagtgttctacccatttttactgtgcaaaggttcatcatgtctgttgaagcaatttctgctgcttcttttatgattgtatttgttgctgttcttatctgtattttaatactggtaggttatgttcgccagtataactcagtgaattctcagcccgatgtcttaaattcattatattctcctcttcaaccagctgctttggaaggattgagataccatgaagccggtcgcctttctgatcaacaaatggctctactgcaatatcaacgcgagaatctccattatctcagtgaagagattctgcgtttgcaggagtccttaagtaaatatgaaacgaatggtagtagcacgcctcaggttgatctggcgcatcttgtggcaactcgagatcaggaattacgaacactatctgctgaggtggatcaactccattcagagcttaatctcgctcgatctctgatctctgagagagatagagagatacaacacgtccggaataccaataatcagtatgtagcagaaaatgaaaggttaagagctattcttggagaatggagtatgcgagctgcaaagcttgaacgagctctggaggtggagagaatatcaaatattgaactgcggaagaaagtttcagctctcagagaccagaggcaggtggcatga

SEQ ID NO: 50754 - protein, 358 aa, Arabidopsis thaliana
  peptide (1)..(358): Ceres Seq. ID no. 13575315
  misc_feature (209)..(312): Homolog of NCBI NO: 25411202 NR Description: hypothetical protein At2g06010 [imported] -
  misc_feature (237)..(358): Homolog of NCBI NO: 15242018 NR Description: expressed protein [Arabidopsis thaliana]
  misc_feature (129)..(357): Homolog of NCBI NO: 20453094 NR Description: At2g06010/F5K7.23 [Arabidopsis thaliana]
  misc_feature (1)..(357): Homolog of NCBI NO: 18396221 NR Description: expressed protein [Arabidopsis thaliana]
MANDRRASSVNPSTEQDNAMFLDILHEAPLFGHRESRSLVGSCIYLIILACYAILAAGAPWILQSVDYLIPSLLCSCNVALLMLTGMFQQYFVNQVQKIRLQGYYSFSQKLKHVVRLPFAIMAYGTASMLLFMEWRPYVSVLPIFTVQRFIMSVEAISAASFMIVFVAVLICILILVGYVRQYNSVNSQPDVLNSLYSPLQPAALEGLRYHEAGRLSDQQMALLQYQRENLHYLSEEILRLQESLSKYETNGSSTPQVDLAHLVATRDQELRTLSAEVDQLHSELNLARSLISERDREIQHVRNTNNQYVAENERLRAILGEWSMRAAKLERALEVERISNIELRKKVSALRDQRQVA

SEQ ID NO: 50755 - protein, 339 aa, Arabidopsis thaliana
  peptide (1)..(339): Ceres Seq. ID no. 13575316
  misc_feature (190)..(293): Homolog of NCBI NO: 25411202 NR Description: hypothetical protein At2g06010 [imported] -
  misc_feature (218)..(339): Homolog of NCBI NO: 15242018 NR Description: expressed protein [Arabidopsis thaliana]
  misc_feature (110)..(338): Homolog of NCBI NO: 20453094 NR Description: At2g06010/F5K7.23 [Arabidopsis thaliana]
  misc_feature (1)..(338): Homolog of NCBI NO: 18396221 NR Description: expressed protein [Arabidopsis thaliana]
MFLDILHEAPLFGHRESRSLVGSCIYLIILACYAILAAGAPWILQSVDYLIPSLLCSCNVALLMLTGMFQQYFVNQVQKIRLQGYYSFSQKLKHVVRLPFAIMAYGTASMLLFMEWRPYVSVLPIFTVQRFIMSVEAISAASFMIVFVAVLICILILVGYVRQYNSVNSQPDVLNSLYSPLQPAALEGLRYHEAGRLSDQQMALLQYQRENLHYLSEEILRLQESLSKYETNGSSTPQVDLAHLVATRDQELRTLSAEVDQLHSELNLARSLISERDREIQHVRNTNNQYVAENERLRAILGEWSMRAAKLERALEVERISNIELRKKVSALRDQRQVA

SEQ ID NO: 50756 - protein, 276 aa, Arabidopsis thaliana
  peptide (1)..(276): Ceres Seq. ID no. 13575317
  misc_feature (127)..(230): Homolog of NCBI NO: 25411202 NR Description: hypothetical protein At2g06010 [imported] -
  misc_feature (155)..(276): Homolog of NCBI NO: 15242018 NR Description: expressed protein [Arabidopsis thaliana]
  misc_feature (47)..(275): Homolog of NCBI NO: 20453094 NR Description: At2g06010/F5K7.23 [Arabidopsis thaliana]
  misc_feature (1)..(275): Homolog of NCBI NO: 18396221 NR Description: expressed protein [Arabidopsis thaliana]
MLTGMFQQYFVNQVQKIRLQGYYSFSQKLKHVVRLPFAIMAYGTASMLLFMEWRPYVSVLPIFTVQRFIMSVEAISAASFMIVFVAVLICILILVGYVRQYNSVNSQPDVLNSLYSPLQPAALEGLRYHEAGRLSDQQMALLQYQRENLHYLSEEILRLQESLSKYETNGSSTPQVDLAHLVATRDQELRTLSAEVDQLHSELNLARSLISERDREIQHVRNTNNQYVAENERLRAILGEWSMRAAKLERALEVERISNIELRKKVSALRDQRQVA

SEQ ID NO: 50757 - DNA, 1594 bp, Arabidopsis thaliana
  misc_feature (1)..(1594): Ceres Seq. ID no. 13617545
  misc_feature: MA Experiment ID: 20000184 Result: Down-regulated in Transcription
  misc_feature: MA Experiment 20000184 PARAMETER Experiment Name: At_Shoots__P Parameter: Age (day) Value: 7
  misc_feature: MA Experiment 20000184 PARAMETER Experiment Name: At_Shoots__P Parameter: Tissue Value: Shoots vs. Whole Plant
  misc_feature: MA Experiment ID: 20000214 Result: Down-regulated in Transcription
  misc_feature: MA Experiment 20000214 PARAMETER Experiment Name: At_4deg_Cold_P Parameter: Timepoint (hr) Value: 6
  misc_feature: MA Experiment ID: 20000496 Result: Up-regulated in Transcription
  misc_feature: MA Experiment 20000496 PARAMETER Experiment Name: At_Guard_Cells_P Parameter: Harvest Date Value: 7/19/2002
  misc_feature: MA Experiment 20000496 PARAMETER Experiment Name: At_Guard_Cells_P Parameter: Organism Value: Canola
  misc_feature: MA Experiment 20000496 PARAMETER Experiment Name: At_Guard_Cells_P Parameter: Tissue Value: Guard Cells vs. Leaves
  misc_feature: MA Experiment ID: 20001450 Result: Up-regulated in Transcription
  misc_feature: MA Experiment 20001450 PARAMETER Experiment Name: At_Far-red-induction_P Parameter: Age (day) Value: 7
  misc_feature: MA Experiment 20001450 PARAMETER Experiment Name: At_Far-red-induction_P Parameter: Light Value: Far-red vs. White
  misc_feature: MA Experiment 20001450 PARAMETER Experiment Name: At_Far-red-induction_P Parameter: Organism Value: A. thaliana
  misc_feature: MA Experiment 20001450 PARAMETER Experiment Name: At_Far-red-induction_P Parameter: Plant Line Value: Columbia
  misc_feature: MA Experiment 20001450 PARAMETER Experiment Name: At_Far-red-induction_P Parameter: Timepoint (hr) Value: 8
  misc_feature: MA Experiment 20001450 PARAMETER Experiment Name: At_Far-red-induction_P Parameter: Tissue Value: Whole Plant
  misc_feature: MA Experiment ID: 20001905 Result: Up-regulated in Transcription
  misc_feature: MA Experiment 20001905 PARAMETER Experiment Name: At_Drought_Reproduction_P Parameter: Age (day) Value: 40
  misc_feature: MA Experiment 20001905 PARAMETER Experiment Name: At_Drought_Reproduction_P Parameter: Organism Value: A. thaliana
  misc_feature: MA Experiment 20001905 PARAMETER Experiment Name: At_Drought_Reproduction_P Parameter: Plant Line Value: WS
  misc_feature: MA Experiment 20001905 PARAMETER Experiment Name: At_Drought_Reproduction_P Parameter: Timepoint (day) Value: 10
  misc_feature: MA Experiment 20001905 PARAMETER Experiment Name: At_Drought_Reproduction_P Parameter: Tissue Value: Rosettes
  misc_feature: MA Experiment 20001905 PARAMETER Experiment Name: At_Drought_Reproduction_P Parameter: Treatment Value: Drought vs. No Drought
gatttcagacaatcttcttcttcgttgcagcttcgtggaaattattttctctttctcttccattattatcttaaagtgagaaatcaataagatgttggagaaagagtttttcacggagtatggtgaagcaagtcaatatcagatccaagaagttgttggcaaaggaagctacggagttgttgcttctgcggaatgtccacacacgggaggcaaagtagccatcaagaagatgacaaatgtgtttgaacatgtctcagatgctattcgtatcctcagagagatcaagcttctcaggcttcttcgacatcctgatatcgtggagatcaagcatatcatgcttcctccttgtcgcaaggaattcaaagatatatatgttgtttttgagttgatggagtctgatcttcaccacgttcttaaggtaaatgacgacctcactcctcagcatcatcaattcttcttgtaccaacttcttcgtggcttaaaattcatgcactcagctcatgtgttccatagagatctgaagcctaagaacatcctcgctaatgctgattgcaaaatcaagatctgtgatttaggacttgctcgtgtctcctttactgattccccttctgctgtgttttggactgactacgttgctacaagatggtaccgtgcgccagagctctgtggttccttctattctaactacacgccggcgattgacatgtggagtgttgggtgcatatttgcagagatgctaactggaaaacctttgtttcctggcaaaaacgttgtgcaccagctagaactcgtgactgatctgcttggaactccgtcgccgataactctatccaggattcggaatgagaaggctagaaagtatttgggaaacatgaggcgaaaggatcctgtacctttcacccataaattccccaatatcgatcctgtggcgctgaagttacttcagcgtttgatcgcttttgacccaaaggaccgtccctctgcagaagaggcattggctgatccgtattttcaaggattggcaaatgtggactatgaaccatcgaggcaacctatctcgaaacttgagtttgagtttgagaggaggaaattgactcgcgatgacgtgagggaactcatgtacagagagattttggagtatcatccacagatgttgcaagagtatctacaaggagaagagaacataaactctcattttctatacccaagagaaagtgtgtcttactttggtgaatcaatcttgatatccagcggagttgatcagttcaaacaagagtttgcccgactcgaagaacacaacgacgatgaagaggaacacaactccccaccacatcagagaaagtacacttcactccctagagaacgggtgtgctcatcagaagacgaaggttctgattcagttcatgctcaatcgtcttcagcttcagtggtgtttacacctccacagactccaaacacagcaactggcttatcatcacagaaggcgtcacaagtagacaaagcagcaactccggtaaaacggtctgcatgtctaatgaggagtgatagtatctgtgcttcaagatgtgttggtgtctcctctgcagtgtcatag

SEQ ID NO: 50758 - protein, 500 aa, Arabidopsis thaliana
  peptide (1)..(500): Ceres Seq. ID no. 13617546
  misc_feature (16)..(307): Pfam Name: Protein kinase domain Pfam Description: Protein kinase domain
  misc_feature (5)..(487): Homolog of NCBI NO: 6689924 NR Description: MAP kinase homolog [Oryza sativa]
  misc_feature (5)..(487): Homolog of NCBI NO: 5815410 NR Description: blast and wounding induced mitogen-activated
  misc_feature (1)..(460): Homolog of NCBI NO: 7106542 NR Description: ATMPK8 [Arabidopsis thaliana]
  misc_feature (1)..(487): Homolog of NCBI NO: 38174819 NR Description: putative MAP kinase [Hordeum vulgare subsp.
  misc_feature (1)..(481): Homolog of NCBI NO: 15220976 NR Description: mitogen-activated protein kinase (MAPK), putative
  misc_feature (2)..(487): Homolog of NCBI NO: 7106544 NR Description: ATMPK9 [Arabidopsis thaliana]
  misc_feature (2)..(487): Homolog of NCBI NO: 18401750 NR Description: mitogen-activated protein kinase (MAPK), putative
  misc_feature (2)..(487): Homolog of NCBI NO: 9294059 NR Description: MAP kinase [Arabidopsis thaliana]
  misc_feature (1)..(500): Homolog of NCBI NO: 30677926 NR Description: mitogen-activated protein kinase (MAPK), putative
  misc_feature (1)..(500): Homolog of NCBI NO: 25410906 NR Description: probable MAP kinase [imported] - Arabidopsis
MLEKEFFTEYGEASQYQIQEVVGKGSYGVVASAECPHTGGKVAIKKMTNVFEHVSDAIRILREIKLLRLLRHPDIVEIKHIMLPPCRKEFKDIYVVFELMESDLHHVLKVNDDLTPQHHQFFLYQLLRGLKFMHSAHVFHRDLKPKNILANADCKIKICDLGLARVSFTDSPSAVFWTDYVATRWYRAPELCGSFYSNYTPAIDMWSVGCIFAEMLTGKPLFPGKNVVHQLELVTDLLGTPSPITLSRIRNEKARKYLGNMRRKDPVPFTHKFPNIDPVALKLLQRLIAFDPKDRPSAEEALADPYFQGLANVDYEPSRQPISKLEFEFERRKLTRDDVRELMYREILEYHPQMLQEYLQGEENINSHFLYPRESVSYFGESILISSGVDQFKQEFARLEEHNDDEEEHNSPPHQRKYTSLPRERVCSSEDEGSDSVHAQSSSASVVFTPPQTPNTATGLSSQKASQVDKAATPVKRSACLMRSDSICASRCVGVSSAVS

SEQ ID NO: 50759 - protein, 454 aa, Arabidopsis thaliana
  peptide (1)..(454): Ceres Seq. ID no. 13617547
  misc_feature (1)..(261): Pfam Name: Protein kinase domain Pfam Description: Protein kinase domain
  misc_feature (1)..(441): Homolog of NCBI NO: 6689924 NR Description: MAP kinase homolog [Oryza sativa]
  misc_feature (1)..(441): Homolog of NCBI NO: 5815410 NR Description: blast and wounding induced mitogen-activated
  misc_feature (1)..(414): Homolog of NCBI NO: 7106542 NR Description: ATMPK8 [Arabidopsis thaliana]
  misc_feature (1)..(441): Homolog of NCBI NO: 38174819 NR Description: putative MAP kinase [Hordeum vulgare subsp.
  misc_feature (1)..(435): Homolog of NCBI NO: 15220976 NR Description: mitogen-activated protein kinase (MAPK), putative
  misc_feature (1)..(441): Homolog of NCBI NO: 7106544 NR Description: ATMPK9 [Arabidopsis thaliana]
  misc_feature (1)..(441): Homolog of NCBI NO: 18401750 NR Description: mitogen-activated protein kinase (MAPK), putative
  misc_feature (1)..(441): Homolog of NCBI NO: 9294059 NR Description: MAP kinase [Arabidopsis thaliana]
  misc_feature (1)..(454): Homolog of NCBI NO: 30677926 NR Description: mitogen-activated protein kinase (MAPK), putative
  misc_feature (1)..(454): Homolog of NCBI NO: 25410906 NR Description: probable MAP kinase [imported] - Arabidopsis
MTNVFEHVSDAIRILREIKLLRLLRHPDIVEIKHIMLPPCRKEFKDIYVVFELMESDLHHVLKVNDDLTPQHHQFFLYQLLRGLKFMHSAHVFHRDLKPKNILANADCKIKICDLGLARVSFTDSPSAVFWTDYVATRWYRAPELCGSFYSNYTPAIDMWSVGCIFAEMLTGKPLFPGKNVVHQLELVTDLLGTPSPITLSRIRNEKARKYLGNMRRKDPVPFTHKFPNIDPVALKLLQRLIAFDPKDRPSAEEALADPYFQGLANVDYEPSRQPISKLEFEFERRKLTRDDVRELMYREILEYHPQMLQEYLQGEENINSHFLYPRESVSYFGESILISSGVDQFKQEFARLEEHNDDEEEHNSPPHQRKYTSLPRERVCSSEDEGSDSVHAQSSSASVVFTPPQTPNTATGLSSQKASQVDKAATPVKRSACLMRSDSICASRCVGVSSAVS

SEQ ID NO: 50760 - protein, 419 aa, Arabidopsis thaliana
  peptide (1)..(419): Ceres Seq. ID no. 13617548
  misc_feature (1)..(226): Pfam Name: Protein kinase domain Pfam Description: Protein kinase domain
  misc_feature (1)..(406): Homolog of NCBI NO: 6689924 NR Description: MAP kinase homolog [Oryza sativa]
  misc_feature (1)..(406): Homolog of NCBI NO: 5815410 NR Description: blast and wounding induced mitogen-activated
  misc_feature (1)..(379): Homolog of NCBI NO: 7106542 NR Description: ATMPK8 [Arabidopsis thaliana]
  misc_feature (1)..(406): Homolog of NCBI NO: 38174819 NR Description: putative MAP kinase [Hordeum vulgare subsp.
  misc_feature (1)..(400): Homolog of NCBI NO: 15220976 NR Description: mitogen-activated protein kinase (MAPK), putative
  misc_feature (1)..(406): Homolog of NCBI NO: 7106544 NR Description: ATMPK9 [Arabidopsis thaliana]
  misc_feature (1)..(406): Homolog of NCBI NO: 18401750 NR Description: mitogen-activated protein kinase (MAPK), putative
  misc_feature (1)..(406): Homolog of NCBI NO: 9294059 NR Description: MAP kinase [Arabidopsis thaliana]
  misc_feature (1)..(419): Homolog of NCBI NO: 30677926 NR Description: mitogen-activated protein kinase (MAPK), putative
  misc_feature (1)..(419): Homolog of NCBI NO: 25410906 NR Description: probable MAP kinase [imported] - Arabidopsis
MLPPCRKEFKDIYVVFELMESDLHHVLKVNDDLTPQHHQFFLYQLLRGLKFMHSAHVFHRDLKPKNILANADCKIKICDLGLARVSFTDSPSAVFWTDYVATRWYRAPELCGSFYSNYTPAIDMWSVGCIFAEMLTGKPLFPGKNVVHQLELVTDLLGTPSPITLSRIRNEKARKYLGNMRRKDPVPFTHKFPNIDPVALKLLQRLIAFDPKDRPSAEEALADPYFQGLANVDYEPSRQPISKLEFEFERRKLTRDDVRELMYREILEYHPQMLQEYLQGEENINSHFLYPRESVSYFGESILISSGVDQFKQEFARLEEHNDDEEEHNSPPHQRKYTSLPRERVCSSEDEGSDSVHAQSSSASVVFTPPQTPNTATGLSSQKASQVDKAATPVKRSACLMRSDSICASRCVGVSSAVS

SEQ ID NO: 50761 - DNA, 1681 bp, Arabidopsis thaliana
  misc_feature (1)..(1681): Ceres Seq. ID no. 13575318
  misc_feature: MA Experiment ID: 20000171 Result: Down-regulated in Transcription
  misc_feature: MA Experiment 20000171 PARAMETER Experiment Name: At_42deg_Heat_P Parameter: Age (day) Value: 14
  misc_feature: MA Experiment 20000171 PARAMETER Experiment Name: At_42deg_Heat_P Parameter: Organism Value: A. thaliana
  misc_feature: MA Experiment 20000171 PARAMETER Experiment Name: At_42deg_Heat_P Parameter: Plant Line Value: WS
  misc_feature: MA Experiment 20000171 PARAMETER Experiment Name: At_42deg_Heat_P Parameter: Temperature (deg C) Value: 42 vs. 22
  misc_feature: MA Experiment 20000171 PARAMETER Experiment Name: At_42deg_Heat_P Parameter: Timepoint (hr) Value: 1
  misc_feature: MA Experiment 20000171 PARAMETER Experiment Name: At_42deg_Heat_P Parameter: Tissue Value: Aerial
  misc_feature: MA Experiment ID: 20000173 Result: Down-regulated in Transcription
  misc_feature: MA Experiment 20000173 PARAMETER Experiment Name: At_42deg_Heat_P Parameter: Age (day) Value: 14
  misc_feature: MA Experiment 20000173 PARAMETER Experiment Name: At_42deg_Heat_P Parameter: Organism Value: A. thaliana
  misc_feature: MA Experiment 20000173 PARAMETER Experiment Name: At_42deg_Heat_P Parameter: Plant Line Value: WS
  misc_feature: MA Experiment 20000173 PARAMETER Experiment Name: At_42deg_Heat_P Parameter: Temperature (deg C) Value: 42 vs. 22
  misc_feature: MA Experiment 20000173 PARAMETER Experiment Name: At_42deg_Heat_P Parameter: Timepoint (hr) Value: 6
  misc_feature: MA Experiment 20000173 PARAMETER Experiment Name: At_42deg_Heat_P Parameter: Tissue Value: Aerial
  misc_feature: MA Experiment ID: 20000185 Result: Up-regulated in Transcription
  misc_feature: MA Experiment 20000185 PARAMETER Experiment Name: At_Roots__P Parameter: Age (day) Value: 7 vs. 21
  misc_feature: MA Experiment 20000185 PARAMETER Experiment Name: At_Roots__P Parameter: Organism Value: A. thaliana
  misc_feature: MA Experiment 20000185 PARAMETER Experiment Name: At_Roots__P Parameter: Tissue Value: Roots vs. Whole Plant
  misc_feature: MA Experiment ID: 20000234 Result: Up-regulated in Transcription
  misc_feature: MA Experiment 20000234 PARAMETER Experiment Name: At_Siliques_P Parameter: Age (day) Value: 21
  misc_feature: MA Experiment 20000234 PARAMETER Experiment Name: At_Siliques_P Parameter: Organism Value: A. thaliana
  misc_feature: MA Experiment 20000234 PARAMETER Experiment Name: At_Siliques_P Parameter: Plant Line Value: WS
  misc_feature: MA Experiment 20000234 PARAMETER Experiment Name: At_Siliques_P Parameter: Tissue Value: Less Than 5mm Siliques vs. Whole Plant
  misc_feature: MA Experiment ID: 20000264 Result: Up-regulated in Transcription
  misc_feature: MA Experiment 20000264 PARAMETER Experiment Name: At_Open_Flower_P Parameter: Age (day) Value: 21
  misc_feature: MA Experiment 20000264 PARAMETER Experiment Name: At_Open_Flower_P Parameter: Plant Line Value: WS
  misc_feature: MA Experiment 20000264 PARAMETER Experiment Name: At_Open_Flower_P Parameter: Tissue Value: Open Flower vs. Whole Plant
  misc_feature: MA Experiment ID: 20000265 Result: Up-regulated in Transcription
  misc_feature: MA Experiment 20000265 PARAMETER Experiment Name: At_Open_Flower_P Parameter: Age (day) Value: 21
  misc_feature: MA Experiment 20000265 PARAMETER Experiment Name: At_Open_Flower_P Parameter: Plant Line Value: WS
  misc_feature: MA Experiment 20000265 PARAMETER Experiment Name: At_Open_Flower_P Parameter: Tissue Value: Closed Flower vs. Whole Plant
  misc_feature: MA Experiment ID: 20000286 Result: Up-regulated in Transcription
  misc_feature: MA Experiment 20000286 PARAMETER Experiment Name: At_Open_Flower_P Parameter: Age (day) Value: 21
  misc_feature: MA Experiment 20000286 PARAMETER Experiment Name: At_Open_Flower_P Parameter: Plant Line Value: WS
  misc_feature: MA Experiment 20000286 PARAMETER Experiment Name: At_Open_Flower_P Parameter: Tissue Value: Half Open vs. Whole Plant
  misc_feature: MA Experiment ID: 20000495 Result: Up-regulated in Transcription
  misc_feature: MA Experiment 20000495 PARAMETER Experiment Name: At_Guard_Cells_P Parameter: Harvest Date Value: 8/2/2002
  misc_feature: MA Experiment 20000495 PARAMETER Experiment Name: At_Guard_Cells_P Parameter: Organism Value: A. thaliana
  misc_feature: MA Experiment 20000495 PARAMETER Experiment Name: At_Guard_Cells_P Parameter: Tissue Value: Guard Cells vs. Leaves
  misc_feature: MA Experiment ID: 20001450 Result: Down-regulated in Transcription
  misc_feature: MA Experiment 20001450 PARAMETER Experiment Name: At_Far-red-induction_P Parameter: Age (day) Value: 7
  misc_feature: MA Experiment 20001450 PARAMETER Experiment Name: At_Far-red-induction_P Parameter: Light Value: Far-red vs. White
  misc_feature: MA Experiment 20001450 PARAMETER Experiment Name: At_Far-red-induction_P Parameter: Organism Value: A. thaliana
  misc_feature: MA Experiment 20001450 PARAMETER Experiment Name: At_Far-red-induction_P Parameter: Plant Line Value: Columbia
  misc_feature: MA Experiment 20001450 PARAMETER Experiment Name: At_Far-red-induction_P Parameter: Timepoint (hr) Value: 8
  misc_feature: MA Experiment 20001450 PARAMETER Experiment Name: At_Far-red-induction_P Parameter: Tissue Value: Whole Plant
  misc_feature: MA Experiment ID: 20001451 Result: Down-regulated in Transcription
  misc_feature: MA Experiment 20001451 PARAMETER Experiment Name: At_Far-red-induction_P Parameter: Age (day) Value: 7
  misc_feature: MA Experiment 20001451 PARAMETER Experiment Name: At_Far-red-induction_P Parameter: Light Value: Far-red vs. White
  misc_feature: MA Experiment 20001451 PARAMETER Experiment Name: At_Far-red-induction_P Parameter: Organism Value: A. thaliana
  misc_feature: MA Experiment 20001451 PARAMETER Experiment Name: At_Far-red-induction_P Parameter: Plant Line Value: Columbia
  misc_feature: MA Experiment 20001451 PARAMETER Experiment Name: At_Far-red-induction_P Parameter: Timepoint (hr) Value: 24
  misc_feature: MA Experiment 20001451 PARAMETER Experiment Name: At_Far-red-induction_P Parameter: Tissue Value: Whole Plant
gacaatcgcagagactctttacgaaagagaaatatcaagactaagaaacaagaagagtaagaatcattgggagagcgatcatggcgacgagagcaaacgtacctgaacaagtcagaggtgctcctctcgttgatggtttgaagattcagaacaaaaacggtgctgtgaagagtcggcgtgccctcggtgacatcggaaatcttgtttctgttcccggagttcaaggaggaaaggctcaacctccgattaatcgacccattactcgaagtttccgtgcccagttattagcgaatgcccaactcgaaagaaagccaatcaatggagacaacaaggttccagctcttggtccaaagagacaacctcttgctgcaagaaacccagaagctcaaagggcggttcagaagaagaatctagtggttaagcaacagacgaagcctgttgaagtgatcgagacgaagaaggaggtgactaaaaaggaagtagcgatgtcacctaagaataagaaagtgacgtactcgtctgtacttagtgctcggagcaaagctgcttgtggtatagtcaacaaaccaaagattatcgatattgatgaatctgacaaagataaccatttggctgcggtggagtatgttgatgatatgtactcgttctataaagaagttgagaaggagagtcagcctaagatgtacatgcacattcagactgaaatgaatgagaagatgagagcgatcttgattgattggttactagaagttcacatcaagtttgagctcaaccttgaaactctgtacctcaccgtcaacatcattgatcgattcctctctgtgaaagctgtccctaaaagagagttacagctagtgggaatcagtgccttgcttattgcttccaaatatgaagaaatctggccacctcaggttaacgatctggtgtatgtcacggacaatgcttacagtagcagacagattctggtgatggagaaggcaattcttggaaacctcgaatggtatttgacagtcccgactcaatacgtcttccttgtccgcttcatcaaagcttcgatgtctgatccagaaatggagaatatggttcacttccttgctgaattggggatgatgcattacgacaccttgacgttctgtccctccatgcttgctgcttcagctgtttacacggcaagatgctcattgaacaagtcccctgcttggactgatacattgcagttccacaccggctacacagagtctgagattatggactgctcaaagcttttagcttttcttcactcgagatgcggtgagagcaggctacgtgcagtgtacaagaagtactcgaaggcagagaatggaggtgttgctatggtttctccggccaagtctctcttgagtgctgctgctgattggaagaagcctgtttcttcttagatgttttttttcatcagatctctctctgattcaaaattctagatttctcatcagatactcttttgtttttttgagttcaaacgtattaatgaattcttctcatcagtgtttttcttaatctctgattacttggatattagatttctactatatctttaacagatagatgatgtttgactgtaataaatcagatgcgtgcaattagtttccgacttattgtaaattgaatgatgataaatgaaatgcataaaatagttaatgtt

SEQ ID NO: 50762 - protein, 445 aa, Arabidopsis thaliana
  peptide (1)..(445): Ceres Seq. ID no. 13575319
  misc_feature (185)..(310): Pfam Name: Cyclin, N-terminal domain Pfam Description: Cyclin, N-terminal domain
  misc_feature (1)..(434): Homolog of NCBI NO: 1835260 NR Description: mitotic cyclin [Sesbania rostrata]
  misc_feature (38)..(436): Homolog of NCBI NO: 22330995 NR Description: cyclin, putative [Arabidopsis thaliana]
  misc_feature (1)..(436): Homolog of NCBI NO: 12322897 NR Description: putative cyclin; 69674-68010 [Arabidopsis
  misc_feature (1)..(445): Homolog of NCBI NO: 2146728 NR Description: mitosis-specific cyclin 1b - Arabidopsis thaliana
  misc_feature (1)..(445): Homolog of NCBI NO: 15239938 NR Description: cyclin (cyc1b) [Arabidopsis thaliana]
MATRANVPEQVRGAPLVDGLKIQNKNGAVKSRRALGDIGNLVSVPGVQGGKAQPPINRPITRSFRAQLLANAQLERKPINGDNKVPALGPKRQPLAARNPEAQRAVQKKNLVVKQQTKPVEVIETKKEVTKKEVAMSPKNKKVTYSSVLSARSKAACGIVNKPKIIDIDESDKDNHLAAVEYVDDMYSFYKEVEKESQPKMYMHIQTEMNEKMRAILIDWLLEVHIKFELNLETLYLTVNIIDRFLSVKAVPKRELQLVGISALLIASKYEEIWPPQVNDLVYVTDNAYSSRQILVMEKAILGNLEWYLTVPTQYVFLVRFIKASMSDPEMENMVHFLAELGMMHYDTLTFCPSMLAASAVYTARCSLNKSPAWTDTLQFHTGYTESEIMDCSKLLAFLHSRCGESRLRAVYKKYSKAENGGVAMVSPAKSLLSAAADWKKPVSS

SEQ ID NO: 50763 - protein, 310 aa, Arabidopsis thaliana
  peptide (1)..(310): Ceres Seq. ID no. 13575320
  misc_feature (50)..(175): Pfam Name: Cyclin, N-terminal domain Pfam Description: Cyclin, N-terminal domain
  misc_feature (1)..(299): Homolog of NCBI NO: 1835260 NR Description: mitotic cyclin [Sesbania rostrata]
  misc_feature (1)..(301): Homolog of NCBI NO: 22330995 NR Description: cyclin, putative [Arabidopsis thaliana]
  misc_feature (1)..(301): Homolog of NCBI NO: 12322897 NR Description: putative cyclin; 69674-68010 [Arabidopsis
  misc_feature (1)..(310): Homolog of NCBI NO: 2146728 NR Description: mitosis-specific cyclin 1b - Arabidopsis thaliana
  misc_feature (1)..(310): Homolog of NCBI NO: 15239938 NR Description: cyclin (cyc1b) [Arabidopsis thaliana]
MSPKNKKVTYSSVLSARSKAACGIVNKPKIIDIDESDKDNHLAAVEYVDDMYSFYKEVEKESQPKMYMHIQTEMNEKMRAILIDWLLEVHIKFELNLETLYLTVNIIDRFLSVKAVPKRELQLVGISALLIASKYEEIWPPQVNDLVYVTDNAYSSRQILVMEKAILGNLEWYLTVPTQYVFLVRFIKASMSDPEMENMVHFLAELGMMHYDTLTFCPSMLAASAVYTARCSLNKSPAWTDTLQFHTGYTESEIMDCSKLLAFLHSRCGESRLRAVYKKYSKAENGGVAMVSPAKSLLSAAADWKKPVSS

SEQ ID NO: 50764 - protein, 260 aa, Arabidopsis thaliana
  peptide (1)..(260): Ceres Seq. ID no. 13575321
  misc_feature (1)..(125): Pfam Name: Cyclin, N-terminal domain Pfam Description: Cyclin, N-terminal domain
  misc_feature (1)..(249): Homolog of NCBI NO: 1835260 NR Description: mitotic cyclin [Sesbania rostrata]
  misc_feature (1)..(251): Homolog of NCBI NO: 22330995 NR Description: cyclin, putative [Arabidopsis thaliana]
  misc_feature (1)..(251): Homolog of NCBI NO: 12322897 NR Description: putative cyclin; 69674-68010 [Arabidopsis
  misc_feature (1)..(260): Homolog of NCBI NO: 2146728 NR Description: mitosis-specific cyclin 1b - Arabidopsis thaliana
  misc_feature (1)..(260): Homolog of NCBI NO: 15239938 NR Description: cyclin (cyc1b) [Arabidopsis thaliana]
MYSFYKEVEKESQPKMYMHIQTEMNEKMRAILIDWLLEVHIKFELNLETLYLTVNIIDRFLSVKAVPKRELQLVGISALLIASKYEEIWPPQVNDLVYVTDNAYSSRQILVMEKAILGNLEWYLTVPTQYVFLVRFIKASMSDPEMENMVHFLAELGMMHYDTLTFCPSMLAASAVYTARCSLNKSPAWTDTLQFHTGYTESEIMDCSKLLAFLHSRCGESRLRAVYKKYSKAENGGVAMVSPAKSLLSAAADWKKPVSS

SEQ ID NO: 50765 - DNA, 2211 bp, Arabidopsis thaliana
  misc_feature (1)..(2211): Ceres Seq. ID no. 12558926
  misc_feature: MA Experiment ID: 20000171 Result: Up-regulated in Transcription
  misc_feature: MA Experiment 20000171 PARAMETER Experiment Name: At_42deg_Heat_P Parameter: Age (day) Value: 14
  misc_feature: MA Experiment 20000171 PARAMETER Experiment Name: At_42deg_Heat_P Parameter: Organism Value: A. thaliana
  misc_feature: MA Experiment 20000171 PARAMETER Experiment Name: At_42deg_Heat_P Parameter: Plant Line Value: WS
  misc_feature: MA Experiment 20000171 PARAMETER Experiment Name: At_42deg_Heat_P Parameter: Temperature (deg C) Value: 42 vs. 22
  misc_feature: MA Experiment 20000171 PARAMETER Experiment Name: At_42deg_Heat_P Parameter: Timepoint (hr) Value: 1
  misc_feature: MA Experiment 20000171 PARAMETER Experiment Name: At_42deg_Heat_P Parameter: Tissue Value: Aerial
  misc_feature: MA Experiment ID: 20000173 Result: Up-regulated in Transcription
  misc_feature: MA Experiment 20000173 PARAMETER Experiment Name: At_42deg_Heat_P Parameter: Age (day) Value: 14
  misc_feature: MA Experiment 20000173 PARAMETER Experiment Name: At_42deg_Heat_P Parameter: Organism Value: A. thaliana
  misc_feature: MA Experiment 20000173 PARAMETER Experiment Name: At_42deg_Heat_P Parameter: Plant Line Value: WS
  misc_feature: MA Experiment 20000173 PARAMETER Experiment Name: At_42deg_Heat_P Parameter: Temperature (deg C) Value: 42 vs. 22
  misc_feature: MA Experiment 20000173 PARAMETER Experiment Name: At_42deg_Heat_P Parameter: Timepoint (hr) Value: 6
  misc_feature: MA Experiment 20000173 PARAMETER Experiment Name: At_42deg_Heat_P Parameter: Tissue Value: Aerial
  misc_feature: MA Experiment ID: 20000179 Result: Down-regulated in Transcription
  misc_feature: MA Experiment 20000179 PARAMETER Experiment Name: At_Germinating_Seeds_P Parameter: Age (hr) Value: 6 vs. 0
  misc_feature: MA Experiment 20000179 PARAMETER Experiment Name: At_Germinating_Seeds_P Parameter: Tissue Value: Germinating Seeds
  misc_feature: MA Experiment ID: 20000180 Result: Down-regulated in Transcription
  misc_feature: MA Experiment 20000180 PARAMETER Experiment Name: At_Germinating_Seeds_P Parameter: Age (hr) Value: 24 vs. 0
  misc_feature: MA Experiment 20000180 PARAMETER Experiment Name: At_Germinating_Seeds_P Parameter: Tissue Value: Germinating Seeds
  misc_feature: MA Experiment ID: 20000182 Result: Up-regulated in Transcription
  misc_feature: MA Experiment 20000182 PARAMETER Experiment Name: At_2mM_SA_P Parameter: Age (day) Value: 14
  misc_feature: MA Experiment 20000182 PARAMETER Experiment Name: At_2mM_SA_P Parameter: Organism Value: A. thaliana
  misc_feature: MA Experiment 20000182 PARAMETER Experiment Name: At_2mM_SA_P Parameter: Plant Line Value: WS
  misc_feature: MA Experiment 20000182 PARAMETER Experiment Name: At_2mM_SA_P Parameter: Timepoint (hr) Value: 6
  misc_feature: MA Experiment 20000182 PARAMETER Experiment Name: At_2mM_SA_P Parameter: Tissue Value: Aerial
  misc_feature: MA Experiment 20000182 PARAMETER Experiment Name: At_2mM_SA_P Parameter: Treatment Value: 2mM SA vs. No Treatment
  misc_feature: MA Experiment ID: 20000443 Result: Up-regulated in Transcription
  misc_feature: MA Experiment 20000443 PARAMETER Experiment Name: At_1uM_BR-BRZ__P Parameter: Tissue Value: Shoot Apices
  misc_feature: MA Experiment 20000443 PARAMETER Experiment Name: At_1uM_BR-BRZ__P Parameter: Treatment Value: 1uM BRZ vs. No Treatment
  misc_feature: MA Experiment ID: 20001247 Result: Down-regulated in Transcription
  misc_feature: MA Experiment 20001247 PARAMETER Experiment Name: At_Far-red-induction_P Parameter: Age (day) Value: 7
  misc_feature: MA Experiment 20001247 PARAMETER Experiment Name: At_Far-red-induction_P Parameter: Light Value: Far-red vs. White
  misc_feature: MA Experiment 20001247 PARAMETER Experiment Name: At_Far-red-induction_P Parameter: Organism Value: A. thaliana
  misc_feature: MA Experiment 20001247 PARAMETER Experiment Name: At_Far-red-induction_P Parameter: Plant Line Value: Columbia
  misc_feature: MA Experiment 20001247 PARAMETER Experiment Name: At_Far-red-induction_P Parameter: Timepoint (hr) Value: 1
  misc_feature: MA Experiment 20001247 PARAMETER Experiment Name: At_Far-red-induction_P Parameter: Tissue Value: Whole Plant
  misc_feature: MA Experiment ID: 20001248 Result: Down-regulated in Transcription
  misc_feature: MA Experiment 20001248 PARAMETER Experiment Name: At_Far-red-induction_P Parameter: Age (day) Value: 7
  misc_feature: MA Experiment 20001248 PARAMETER Experiment Name: At_Far-red-induction_P Parameter: Light Value: Far-red vs. White
  misc_feature: MA Experiment 20001248 PARAMETER Experiment Name: At_Far-red-induction_P Parameter: Organism Value: A. thaliana
  misc_feature: MA Experiment 20001248 PARAMETER Experiment Name: At_Far-red-induction_P Parameter: Plant Line Value: Columbia
  misc_feature: MA Experiment 20001248 PARAMETER Experiment Name: At_Far-red-induction_P Parameter: Timepoint (hr) Value: 4
  misc_feature: MA Experiment 20001248 PARAMETER Experiment Name: At_Far-red-induction_P Parameter: Tissue Value: Whole Plant
  misc_feature: MA Experiment ID: 20001450 Result: Down-regulated in Transcription
  misc_feature: MA Experiment 20001450 PARAMETER Experiment Name: At_Far-red-induction_P Parameter: Age (day) Value: 7
  misc_feature: MA Experiment 20001450 PARAMETER Experiment Name: At_Far-red-induction_P Parameter: Light Value: Far-red vs. White
  misc_feature: MA Experiment 20001450 PARAMETER Experiment Name: At_Far-red-induction_P Parameter: Organism Value: A. thaliana
  misc_feature: MA Experiment 20001450 PARAMETER Experiment Name: At_Far-red-induction_P Parameter: Plant Line Value: Columbia
  misc_feature: MA Experiment 20001450 PARAMETER Experiment Name: At_Far-red-induction_P Parameter: Timepoint (hr) Value: 8
  misc_feature: MA Experiment 20001450 PARAMETER Experiment Name: At_Far-red-induction_P Parameter: Tissue Value: Whole Plant
  misc_feature: MA Experiment ID: 20001451 Result: Down-regulated in Transcription
  misc_feature: MA Experiment 20001451 PARAMETER Experiment Name: At_Far-red-induction_P Parameter: Age (day) Value: 7
  misc_feature: MA Experiment 20001451 PARAMETER Experiment Name: At_Far-red-induction_P Parameter: Light Value: Far-red vs. White
  misc_feature: MA Experiment 20001451 PARAMETER Experiment Name: At_Far-red-induction_P Parameter: Organism Value: A. thaliana
  misc_feature: MA Experiment 20001451 PARAMETER Experiment Name: At_Far-red-induction_P Parameter: Plant Line Value: Columbia
  misc_feature: MA Experiment 20001451 PARAMETER Experiment Name: At_Far-red-induction_P Parameter: Timepoint (hr) Value: 24
  misc_feature: MA Experiment 20001451 PARAMETER Experiment Name: At_Far-red-induction_P Parameter: Tissue Value: Whole Plant
  misc_feature: MA Experiment ID: 20001557 Result: Up-regulated in Transcription
  misc_feature: MA Experiment 20001557 PARAMETER Experiment Name: At_Drought_Soil_Dry_P Parameter: Age (day) Value: 27
  misc_feature: MA Experiment 20001557 PARAMETER Experiment Name: At_Drought_Soil_Dry_P Parameter: Organism Value: A. thaliana
  misc_feature: MA Experiment 20001557 PARAMETER Experiment Name: At_Drought_Soil_Dry_P Parameter: Plant Line Value: WS
  misc_feature: MA Experiment 20001557 PARAMETER Experiment Name: At_Drought_Soil_Dry_P Parameter: Post Timepoint (hr) Value: 3
  misc_feature: MA Experiment 20001557 PARAMETER Experiment Name: At_Drought_Soil_Dry_P Parameter: Post-Treatment Value: Re-Water vs. No Drought
  misc_feature: MA Experiment 20001557 PARAMETER Experiment Name: At_Drought_Soil_Dry_P Parameter: Timepoint (day) Value: 13
  misc_feature: MA Experiment 20001557 PARAMETER Experiment Name: At_Drought_Soil_Dry_P Parameter: Treatment Value: Drought vs. No Drought
  misc_feature: MA Experiment ID: 20001560 Result: Up-regulated in Transcription
  misc_feature: MA Experiment 20001560 PARAMETER Experiment Name: At_Drought_Soil_Dry_P Parameter: Age (day) Value: 28
  misc_feature: MA Experiment 20001560 PARAMETER Experiment Name: At_Drought_Soil_Dry_P Parameter: Organism Value: A. thaliana
  misc_feature: MA Experiment 20001560 PARAMETER Experiment Name: At_Drought_Soil_Dry_P Parameter: Plant Line Value: WS
  misc_feature: MA Experiment 20001560 PARAMETER Experiment Name: At_Drought_Soil_Dry_P Parameter: Post Timepoint (hr) Value: None
  misc_feature: MA Experiment 20001560 PARAMETER Experiment Name: At_Drought_Soil_Dry_P Parameter: Post-Treatment Value: None
  misc_feature: MA Experiment 20001560 PARAMETER Experiment Name: At_Drought_Soil_Dry_P Parameter: Timepoint (day) Value: 14
  misc_feature: MA Experiment 20001560 PARAMETER Experiment Name: At_Drought_Soil_Dry_P Parameter: Treatment Value: Drought vs. No Drought
  misc_feature: MA Experiment ID: 20001774 Result: Down-regulated in Transcription
  misc_feature: MA Experiment 20001774 PARAMETER Experiment Name: At_Far-red-enriched-adult_P Parameter: Age (day) Value: 31
  misc_feature: MA Experiment 20001774 PARAMETER Experiment Name: At_Far-red-enriched-adult_P Parameter: Light Value: Far-red enriched vs. White
  misc_feature: MA Experiment 20001774 PARAMETER Experiment Name: At_Far-red-enriched-adult_P Parameter: Organism Value: A. thaliana
  misc_feature: MA Experiment 20001774 PARAMETER Experiment Name: At_Far-red-enriched-adult_P Parameter: Plant Line Value: Columbia
  misc_feature: MA Experiment 20001774 PARAMETER Experiment Name: At_Far-red-enriched-adult_P Parameter: Timepoint (hr) Value: 72
  misc_feature: MA Experiment 20001774 PARAMETER Experiment Name: At_Far-red-enriched-adult_P Parameter: Tissue Value: Aerial
  misc_feature: MA Experiment ID: 20001905 Result: Up-regulated in Transcription
  misc_feature: MA Experiment 20001905 PARAMETER Experiment Name: At_Drought_Reproduction_P Parameter: Age (day) Value: 40
  misc_feature: MA Experiment 20001905 PARAMETER Experiment Name: At_Drought_Reproduction_P Parameter: Organism Value: A. thaliana
  misc_feature: MA Experiment 20001905 PARAMETER Experiment Name: At_Drought_Reproduction_P Parameter: Plant Line Value: WS
  misc_feature: MA Experiment 20001905 PARAMETER Experiment Name: At_Drought_Reproduction_P Parameter: Timepoint (day) Value: 10
  misc_feature: MA Experiment 20001905 PARAMETER Experiment Name: At_Drought_Reproduction_P Parameter: Tissue Value: Rosettes
  misc_feature: MA Experiment 20001905 PARAMETER Experiment Name: At_Drought_Reproduction_P Parameter: Treatment Value: Drought vs. No Drought
gaaaacaaacctagccgcaattcacaattcctctttcacaatctttctttcgattttttagcttaatcctgagtagcgttaacaatggctggtaaaggagaaggtccagcgattggtatcgatctcggtaccacttactcttgcgttggagtttggcaacacgaccgtgttgagatcattgctaatgatcaaggtaacagaaccacaccgtcttacgtcgccttcactgatagcgaacggttgattggtgacgccgcaaagaatcaggtcgccatgaacccgattaacactgttttcgatgcgaagaggttgattggtcgaagatttactgatagctctgttcaaagtgacatcaaattgtggcccttcacgctcaaatctggacctgctgaaaaaccaatgatcgtcgttaactacaagggagaagataaagagttttctgctgaagaaatctcttctatgattctcatcaagatgcgtgagattgctgaagcttaccttggtacaacgatcaagaacgctgttgttactgttccagcttacttcaatgactctcagcgtcaggctactaaggatgctggtgttattgctggtttgaatgttatgcgtatcatcaacgagcctactgcagctgctattgcttacggtcttgacaagaaggctacaagtgttggtgagaagaacgttttgatctttgaccttggtggtggtacattcgatgtctctcttttgaccattgaggaaggtatatttgaagtgaaggcgactgcaggagacactcatcttggtggtgaggatttcgacaacagaatggtgaatcactttgttcaagagttcaagaggaagaacaagaaggacattagtggaaacccgagagctctaaggaggttgagaaccgcctgtgagagagcgaagaggactttgtcatctacggctcagaccaccatcgaaatcgactctctgttcgatggtattgacttctacgctcctatcacccgtgccagattcgaggagcttaacatagatctcttcagaaagtgtatggagcctgttgagaagtgtcttcgtgatgctaagatggacaagaactcaatcgatgatgttgtccttgttggtggctcaacccgtatccccaaggtccagcaattgctcgttgacttcttcaacggcaaggagctttgcaaatctatcaaccccgatgaggctgttgcatatggtgctgctgtccaggcagctattctcagtggtgagggtaatgagaaggttcaagatctcctcttgcttgatgtcacaccactatctcttggtcttgaaaccgctggaggagtcatgactgtcttgatccagaggaatacaaccatccccacaaagaaggagcaagtcttctcaacttattcagacaaccaacccggtgttttgatccaagtctatgaaggcgagagagcaagaaccaaggacaacaacctgttgggtaaattcgagctttctggtatccctccagcaccaagaggtgttcctcaaatcactgtctgttttgacattgatgcaaacggtatcctcaacgtctcggctgaggacaagacaacggggcagaagaacaagatcacaatcaccaacgacaagggaagattgtcaaaggacgagattgagaaaatggttcaagaggcagagaagtacaagtcggaggatgaggagcacaagaagaaggtggacgccaagaatgctcttgagaattacgcatacaacatgaggaacacaatccgtgatgagaagattggcgagaagcttgctggagatgacaagaagaagattgaagactcaattgaagcagccattgaatggctagaagcgaatcagctagcagagtgtgatgaatttgaggacaagatgaaagagctcgagagtatttgcaacccgatcatagcaaagatgtaccaaggcggtgaagctggtggtccagctgcaggaggaatggacgaggatgttcctccttctgccggaggtgcaggtcccaagattgaggaagtcgactaataactttctctcttactctcttactctcagtctttatgtgtttgtatttcaacattttcctgttttgtcccctagttttttttttctttttctttcttgtattgactctattttgagggctcgcttgtttcgatgagctccttattttttttaatctataacaggaatgttttgatt

SEQ ID NO: 50766 - protein, 649 aa, Arabidopsis thaliana
  peptide (1)..(649): Ceres Seq. ID no. 12558927
  misc_feature (1)..(649): Homolog of NCBI NO: 21327033 NR Description: heat shock protein 70 [Saussurea medusa]
MAGKGEGPAIGIDLGTTYSCVGVWQHDRVEIIANDQGNRTTPSYVAFTDSERLIGDAAKNQVAMNPINTVFDAKRLIGRRFTDSSVQSDIKLWPFTLKSGPAEKPMIVVNYKGEDKEFSAEEISSMILIKMREIAEAYLGTTIKNAVVTVPAYFNDSQRQATKDAGVIAGLNVMRIINEPTAAAIAYGLDKKATSVGEKNVLIFDLGGGTFDVSLLTIEEGIFEVKATAGDTHLGGEDFDNRMVNHFVQEFKRKNKKDISGNPRALRRLRTACERAKRTLSSTAQTTIEIDSLFDGIDFYAPITRARFEELNIDLFRKCMEPVEKCLRDAKMDKNSIDDVVLVGGSTRIPKVQQLLVDFFNGKELCKSINPDEAVAYGAAVQAAILSGEGNEKVQDLLLLDVTPLSLGLETAGGVMTVLIQRNTTIPTKKEQVFSTYSDNQPGVLIQVYEGERARTKDNNLLGKFELSGIPPAPRGVPQITVCFDIDANGILNVSAEDKTTGQKNKITITNDKGRLSKDEIEKMVQEAEKYKSEDEEHKKKVDAKNALENYAYNMRNTIRDEKIGEKLAGDDKKKIEDSIEAAIEWLEANQLAECDEFEDKMKELESICNPIIAKMYQGGEAGGPAAGGMDEDVPPSAGGAGPKIEEVD

SEQ ID NO: 50767 - protein, 586 aa, Arabidopsis thaliana
  peptide (1)..(586): Ceres Seq. ID no. 12558928
  misc_feature (1)..(586): Homolog of NCBI NO: 21327033 NR Description: heat shock protein 70 [Saussurea medusa]
MNPINTVFDAKRLIGRRFTDSSVQSDIKLWPFTLKSGPAEKPMIVVNYKGEDKEFSAEEISSMILIKMREIAEAYLGTTIKNAVVTVPAYFNDSQRQATKDAGVIAGLNVMRIINEPTAAAIAYGLDKKATSVGEKNVLIFDLGGGTFDVSLLTIEEGIFEVKATAGDTHLGGEDFDNRMVNHFVQEFKRKNKKDISGNPRALRRLRTACERAKRTLSSTAQTTIEIDSLFDGIDFYAPITRARFEELNIDLFRKCMEPVEKCLRDAKMDKNSIDDVVLVGGSTRIPKVQQLLVDFFNGKELCKSINPDEAVAYGAAVQAAILSGEGNEKVQDLLLLDVTPLSLGLETAGGVMTVLIQRNTTIPTKKEQVFSTYSDNQPGVLIQVYEGERARTKDNNLLGKFELSGIPPAPRGVPQITVCFDIDANGILNVSAEDKTTGQKNKITITNDKGRLSKDEIEKMVQEAEKYKSEDEEHKKKVDAKNALENYAYNMRNTIRDEKIGEKLAGDDKKKIEDSIEAAIEWLEANQLAECDEFEDKMKELESICNPIIAKMYQGGEAGGPAAGGMDEDVPPSAGGAGPKIEEVD

SEQ ID NO: 50768 - protein, 544 aa, Arabidopsis thaliana
  peptide (1)..(544): Ceres Seq. ID no. 12558929
  misc_feature (1)..(544): Homolog of NCBI NO: 21327033 NR Description: heat shock protein 70 [Saussurea medusa]
MIVVNYKGEDKEFSAEEISSMILIKMREIAEAYLGTTIKNAVVTVPAYFNDSQRQATKDAGVIAGLNVMRIINEPTAAAIAYGLDKKATSVGEKNVLIFDLGGGTFDVSLLTIEEGIFEVKATAGDTHLGGEDFDNRMVNHFVQEFKRKNKKDISGNPRALRRLRTACERAKRTLSSTAQTTIEIDSLFDGIDFYAPITRARFEELNIDLFRKCMEPVEKCLRDAKMDKNSIDDVVLVGGSTRIPKVQQLLVDFFNGKELCKSINPDEAVAYGAAVQAAILSGEGNEKVQDLLLLDVTPLSLGLETAGGVMTVLIQRNTTIPTKKEQVFSTYSDNQPGVLIQVYEGERARTKDNNLLGKFELSGIPPAPRGVPQITVCFDIDANGILNVSAEDKTTGQKNKITITNDKGRLSKDEIEKMVQEAEKYKSEDEEHKKKVDAKNALENYAYNMRNTIRDEKIGEKLAGDDKKKIEDSIEAAIEWLEANQLAECDEFEDKMKELESICNPIIAKMYQGGEAGGPAAGGMDEDVPPSAGGAGPKIEEVD

SEQ ID NO: 50769 - DNA, 1902 bp, Arabidopsis thaliana
  misc_feature (1)..(1902): Ceres Seq. ID no. 12558930
  misc_feature: MA Experiment ID: 20000184 Result: Down-regulated in Transcription
  misc_feature: MA Experiment 20000184 PARAMETER Experiment Name: At_Shoots__P Parameter: Age (day) Value: 7
  misc_feature: MA Experiment 20000184 PARAMETER Experiment Name: At_Shoots__P Parameter: Tissue Value: Shoots vs. Whole Plant
  misc_feature: MA Experiment ID: 20000234 Result: Down-regulated in Transcription
  misc_feature: MA Experiment 20000234 PARAMETER Experiment Name: At_Siliques_P Parameter: Age (day) Value: 21
  misc_feature: MA Experiment 20000234 PARAMETER Experiment Name: At_Siliques_P Parameter: Organism Value: A. thaliana
  misc_feature: MA Experiment 20000234 PARAMETER Experiment Name: At_Siliques_P Parameter: Plant Line Value: WS
  misc_feature: MA Experiment 20000234 PARAMETER Experiment Name: At_Siliques_P Parameter: Tissue Value: Less Than 5mm Siliques vs. Whole Plant
  misc_feature: MA Experiment ID: 20000264 Result: Down-regulated in Transcription
  misc_feature: MA Experiment 20000264 PARAMETER Experiment Name: At_Open_Flower_P Parameter: Age (day) Value: 21
  misc_feature: MA Experiment 20000264 PARAMETER Experiment Name: At_Open_Flower_P Parameter: Plant Line Value: WS
  misc_feature: MA Experiment 20000264 PARAMETER Experiment Name: At_Open_Flower_P Parameter: Tissue Value: Open Flower vs. Whole Plant
  misc_feature: MA Experiment ID: 20000265 Result: Down-regulated in Transcription
  misc_feature: MA Experiment 20000265 PARAMETER Experiment Name: At_Open_Flower_P Parameter: Age (day) Value: 21
  misc_feature: MA Experiment 20000265 PARAMETER Experiment Name: At_Open_Flower_P Parameter: Plant Line Value: WS
  misc_feature: MA Experiment 20000265 PARAMETER Experiment Name: At_Open_Flower_P Parameter: Tissue Value: Closed Flower vs. Whole Plant
  misc_feature: MA Experiment ID: 20000286 Result: Down-regulated in Transcription
  misc_feature: MA Experiment 20000286 PARAMETER Experiment Name: At_Open_Flower_P Parameter: Age (day) Value: 21
  misc_feature: MA Experiment 20000286 PARAMETER Experiment Name: At_Open_Flower_P Parameter: Plant Line Value: WS
  misc_feature: MA Experiment 20000286 PARAMETER Experiment Name: At_Open_Flower_P Parameter: Tissue Value: Half Open vs. Whole Plant
  misc_feature: MA Experiment ID: 20000438 Result: Down-regulated in Transcription
  misc_feature: MA Experiment 20000438 PARAMETER Experiment Name: At_Shoots__P Parameter: Age (day) Value: 14
  misc_feature: MA Experiment 20000438 PARAMETER Experiment Name: At_Shoots__P Parameter: Tissue Value: Shoots vs. Whole Plant
  misc_feature: MA Experiment ID: 20000441 Result: Up-regulated in Transcription
  misc_feature: MA Experiment 20000441 PARAMETER Experiment Name: At_1uM_BR-BRZ__P Parameter: Tissue Value: Shoot Apices
  misc_feature: MA Experiment 20000441 PARAMETER Experiment Name: At_1uM_BR-BRZ__P Parameter: Treatment Value: 1uM BR vs. No Treatment
  misc_feature: MA Experiment ID: 20000460 Result: Up-regulated in Transcription
  misc_feature: MA Experiment 20000460 PARAMETER Experiment Name: At_10percent_PEG_P Parameter: Age (day) Value: 12
  misc_feature: MA Experiment 20000460 PARAMETER Experiment Name: At_10percent_PEG_P Parameter: Organism Value: A. thaliana
  misc_feature: MA Experiment 20000460 PARAMETER Experiment Name: At_10percent_PEG_P Parameter: Plant Line Value: WS
  misc_feature: MA Experiment 20000460 PARAMETER Experiment Name: At_10percent_PEG_P Parameter: Timepoint (day) Value: 12
  misc_feature: MA Experiment 20000460 PARAMETER Experiment Name: At_10percent_PEG_P Parameter: Tissue Value: Whole Plant
  misc_feature: MA Experiment 20000460 PARAMETER Experiment Name: At_10percent_PEG_P Parameter: Treatment Value: 10percent PEG vs. No Treatment
  misc_feature: MA Experiment ID: 20000573 Result: Down-regulated in Transcription
  misc_feature: MA Experiment 20000573 PARAMETER Experiment Name: At_100uM_ABA_Mutants__P Parameter: Organism Value: A. thaliana
  misc_feature: MA Experiment 20000573 PARAMETER Experiment Name: At_100uM_ABA_Mutants__P Parameter: Plant Line Value: CS22 vs. Ler wt
  misc_feature: MA Experiment 20000573 PARAMETER Experiment Name: At_100uM_ABA_Mutants__P Parameter: Timepoint (hr) Value: N/A
  misc_feature: MA Experiment 20000573 PARAMETER Experiment Name: At_100uM_ABA_Mutants__P Parameter: Tissue Value: Whole Plant
  misc_feature: MA Experiment 20000573 PARAMETER Experiment Name: At_100uM_ABA_Mutants__P Parameter: Treatment Value: None
  misc_feature: MA Experiment ID: 20000574 Result: Down-regulated in Transcription
  misc_feature: MA Experiment 20000574 PARAMETER Experiment Name: At_100uM_ABA_Mutants__P Parameter: Organism Value: A. thaliana
  misc_feature: MA Experiment 20000574 PARAMETER Experiment Name: At_100uM_ABA_Mutants__P Parameter: Plant Line Value: CS23 vs. Ler wt
  misc_feature: MA Experiment 20000574 PARAMETER Experiment Name: At_100uM_ABA_Mutants__P Parameter: Timepoint (hr) Value: N/A
  misc_feature: MA Experiment 20000574 PARAMETER Experiment Name: At_100uM_ABA_Mutants__P Parameter: Tissue Value: Whole Plant
  misc_feature: MA Experiment 20000574 PARAMETER Experiment Name: At_100uM_ABA_Mutants__P Parameter: Treatment Value: None
  misc_feature: MA Experiment ID: 20001757 Result: Down-regulated in Transcription
  misc_feature: MA Experiment 20001757 PARAMETER Experiment Name: At_50mM_NH4NO3_L-to-H_P Parameter: Timepoint (hr) Value: 6
  misc_feature: MA Experiment 20001757 PARAMETER Experiment Name: At_50mM_NH4NO3_L-to-H_P Parameter: Tissue Value: Leaf
  misc_feature: MA Experiment 20001757 PARAMETER Experiment Name: At_50mM_NH4NO3_L-to-H_P Parameter: Treatment Value: 50mM NH4NO3 vs 100mM Mannitol
  misc_feature: MA Experiment ID: 20001905 Result: Up-regulated in Transcription
  misc_feature: MA Experiment 20001905 PARAMETER Experiment Name: At_Drought_Reproduction_P Parameter: Age (day) Value: 40
  misc_feature: MA Experiment 20001905 PARAMETER Experiment Name: At_Drought_Reproduction_P Parameter: Organism Value: A. thaliana
  misc_feature: MA Experiment 20001905 PARAMETER Experiment Name: At_Drought_Reproduction_P Parameter: Plant Line Value: WS
  misc_feature: MA Experiment 20001905 PARAMETER Experiment Name: At_Drought_Reproduction_P Parameter: Timepoint (day) Value: 10
  misc_feature: MA Experiment 20001905 PARAMETER Experiment Name: At_Drought_Reproduction_P Parameter: Tissue Value: Rosettes
  misc_feature: MA Experiment 20001905 PARAMETER Experiment Name: At_Drought_Reproduction_P Parameter: Treatment Value: Drought vs. No Drought
  misc_feature: MA Experiment ID: 20001911 Result: Up-regulated in Transcription
  misc_feature: MA Experiment 20001911 PARAMETER Experiment Name: At_Drought_Reproduction_P Parameter: Age (day) Value: 40
  misc_feature: MA Experiment 20001911 PARAMETER Experiment Name: At_Drought_Reproduction_P Parameter: Organism Value: A. thaliana
  misc_feature: MA Experiment 20001911 PARAMETER Experiment Name: At_Drought_Reproduction_P Parameter: Plant Line Value: WS
  misc_feature: MA Experiment 20001911 PARAMETER Experiment Name: At_Drought_Reproduction_P Parameter: Timepoint (day) Value: 10
  misc_feature: MA Experiment 20001911 PARAMETER Experiment Name: At_Drought_Reproduction_P Parameter: Tissue Value: Flowers
  misc_feature: MA Experiment 20001911 PARAMETER Experiment Name: At_Drought_Reproduction_P Parameter: Treatment Value: Drought vs. No Drought
aatttttcgcaattttaattttcgaacaaatgatttgacgttcttcttggtattcacgcgttgaaaatttccaccctttcatatattgttcttcacctccttcgtttttttctcatccatctcttccagaattctcttaaagtttcctactttcctggaatttcagtcctcaatctctcaagtttcatcggttttgatttgggtttgatcggaaaagtcatgggtaattgttgcggaacagcaggatcattggctcaaaacgataacaaacccaaaaaaggaaggaagaagcaaaaccctttctcgattgattacggtcttcaccacggtggtggagatggaggtggaagacctcttaagcttatcgttttgaatgatccaacaggtcgtgagatcgagtctaaatacacgttggggagagagctaggtcgtggagaattcggtgttacgtatctatgtactgataaggagacagacgacgtttttgcttgtaaatcgattttgaagaagaagctgaggacagctgttgatattgaagatgttaggagagaggttgagattatgaggcatatgcctgagcatcctaatgttgttactttgaaggagacttatgaggatgagcatgctgttcatttggttatggagctttgtgaaggtggtgaattgtttgataggattgttgctagagggcattatactgagagagctgctgctgctgtcactaagaccatcatggaagttgttcaggtgtgtcataagcatggggtaatgcacagggacctgaaacctgagaacttcttgtttggaaacaagaaggagactgcacctcttaaggcgattgattttggtctctctgttttctttaaaccaggcgagaggtttaacgaaatcgttggtagtccgtactacatggctcccgaggtgctaaaacggaattatggtccagaagttgatatttggagtgcaggtgtaattctttacatactgctatgtggtgtcccgcctttctgggcagaaactgaacaaggagttgcacaagcaattattcgatctgtactagacttcagaagggacccatggcccaaggtttctgaaaacgcaaaagaccttatcaggaaaatgcttgatcctgaccaaaagcgtcgtcttacagctcaacaagtcctagatcacccgtggttacagaatgcaaagacagcccccaatgtatcattgggtgaaacagtgagggcaaggttgaagcagttcaccgtcatgaacaagctcaagaaacgagcactcagggttattgctgagcatttatcagatgaagaagcttcaggtataagagaagggttccaaataatggacacaagccaaagagggaagattaacatcgacgagcttaaaatcgggttgcagaaacttggtcatgccattccgcaagatgatttacaaattttgatggatgctggagacatcgatagagatggatatttggactgtgacgagtttattgccatatcggtacacctaaggaaaatgggcaatgacgagcatctcaagaaagcgtttgcgttctttgatcaaaacaataacggatatatcgaaatagaggagttaagggaagccttgtctgacgaacttggtacaagtgaagaagttgttgatgccattatccgtgatgttgacaccgacaaggatggaagaataagttacgaagagtttgtaacgatgatgaaaacaggaacagattggagaaaagcttcgagacagtactcgagagaacggtttaacagtatcagtctcaaactgatgcaagatgcgtcgttgcagagttgtgtgtttgatatcctggctaatgagcgagctgagtatggggatcaagagagaaaaaccgtgttggcctttggctgtgtgtag

SEQ ID NO: 50770 - protein, 560 aa, Arabidopsis thaliana
  peptide (1)..(560): Ceres Seq. ID no. 12558931
  misc_feature (63)..(321): Pfam Name: Protein kinase domain Pfam Description: Protein kinase domain
  misc_feature (1)..(531): Homolog of NCBI NO: 30699042 NR Description: calcium-dependent protein kinase, putative (CDPK)
  misc_feature (19)..(531): Homolog of NCBI NO: 14484895 NR Description: calcium-dependent protein kinase [Funaria
  misc_feature (1)..(532): Homolog of NCBI NO: 34907990 NR Description: putative calcium-dependent protein kinase
  misc_feature (13)..(532): Homolog of NCBI NO: 34899838 NR Description: putative calcium-dependent protein kinase
  misc_feature (1)..(532): Homolog of NCBI NO: 15239742 NR Description: calcium-dependent protein kinase
  misc_feature (1)..(532): Homolog of NCBI NO: 18416872 NR Description: calcium-dependent protein kinase-like protein
  misc_feature (1)..(532): Homolog of NCBI NO: 2665890 NR Description: calcium-dependent protein kinase [Fragaria x
  misc_feature (1)..(533): Homolog of NCBI NO: 15227452 NR Description: putative calcium-dependent protein kinase
  misc_feature (1)..(532): Homolog of NCBI NO: 30694663 NR Description: calcium-dependent protein kinase, putative (CDPK)
  misc_feature (1)..(560): Homolog of NCBI NO: 11259874 NR Description: calcium-dependent protein kinase - Arabidopsis
MGNCCGTAGSLAQNDNKPKKGRKKQNPFSIDYGLHHGGGDGGGRPLKLIVLNDPTGREIESKYTLGRELGRGEFGVTYLCTDKETDDVFACKSILKKKLRTAVDIEDVRREVEIMRHMPEHPNVVTLKETYEDEHAVHLVMELCEGGELFDRIVARGHYTERAAAAVTKTIMEVVQVCHKHGVMHRDLKPENFLFGNKKETAPLKAIDFGLSVFFKPGERFNEIVGSPYYMAPEVLKRNYGPEVDIWSAGVILYILLCGVPPFWAETEQGVAQAIIRSVLDFRRDPWPKVSENAKDLIRKMLDPDQKRRLTAQQVLDHPWLQNAKTAPNVSLGETVRARLKQFTVMNKLKKRALRVIAEHLSDEEASGIREGFQIMDTSQRGKINIDELKIGLQKLGHAIPQDDLQILMDAGDIDRDGYLDCDEFIAISVHLRKMGNDEHLKKAFAFFDQNNNGYIEIEELREALSDELGTSEEVVDAIIRDVDTDKDGRISYEEFVTMMKTGTDWRKASRQYSRERFNSISLKLMQDASLQSCVFDILANERAEYGDQERKTVLAFGCV

SEQ ID NO: 50771 - protein, 446 aa, Arabidopsis thaliana
  peptide (1)..(446): Ceres Seq. ID no. 12558932
  misc_feature (1)..(207): Pfam Name: Protein kinase domain Pfam Description: Protein kinase domain
  misc_feature (1)..(417): Homolog of NCBI NO: 30699042 NR Description: calcium-dependent protein kinase, putative (CDPK)
  misc_feature (1)..(417): Homolog of NCBI NO: 14484895 NR Description: calcium-dependent protein kinase [Funaria
  misc_feature (1)..(418): Homolog of NCBI NO: 34907990 NR Description: putative calcium-dependent protein kinase
  misc_feature (1)..(418): Homolog of NCBI NO: 34899838 NR Description: putative calcium-dependent protein kinase
  misc_feature (1)..(418): Homolog of NCBI NO: 15239742 NR Description: calcium-dependent protein kinase
  misc_feature (1)..(418): Homolog of NCBI NO: 18416872 NR Description: calcium-dependent protein kinase-like protein
  misc_feature (1)..(418): Homolog of NCBI NO: 2665890 NR Description: calcium-dependent protein kinase [Fragaria x
  misc_feature (1)..(419): Homolog of NCBI NO: 15227452 NR Description: putative calcium-dependent protein kinase
  misc_feature (1)..(418): Homolog of NCBI NO: 30694663 NR Description: calcium-dependent protein kinase, putative (CDPK)
  misc_feature (1)..(446): Homolog of NCBI NO: 11259874 NR Description: calcium-dependent protein kinase - Arabidopsis
MRHMPEHPNVVTLKETYEDEHAVHLVMELCEGGELFDRIVARGHYTERAAAAVTKTIMEVVQVCHKHGVMHRDLKPENFLFGNKKETAPLKAIDFGLSVFFKPGERFNEIVGSPYYMAPEVLKRNYGPEVDIWSAGVILYILLCGVPPFWAETEQGVAQAIIRSVLDFRRDPWPKVSENAKDLIRKMLDPDQKRRLTAQQVLDHPWLQNAKTAPNVSLGETVRARLKQFTVMNKLKKRALRVIAEHLSDEEASGIREGFQIMDTSQRGKINIDELKIGLQKLGHAIPQDDLQILMDAGDIDRDGYLDCDEFIAISVHLRKMGNDEHLKKAFAFFDQNNNGYIEIEELREALSDELGTSEEVVDAIIRDVDTDKDGRISYEEFVTMMKTGTDWRKASRQYSRERFNSISLKLMQDASLQSCVFDILANERAEYGDQERKTVLAFGCV

SEQ ID NO: 50772 - protein, 443 aa, Arabidopsis thaliana
  peptide (1)..(443): Ceres Seq. ID no. 12558933
  misc_feature (1)..(204): Pfam Name: Protein kinase domain Pfam Description: Protein kinase domain
  misc_feature (1)..(414): Homolog of NCBI NO: 30699042 NR Description: calcium-dependent protein kinase, putative (CDPK)
  misc_feature (1)..(414): Homolog of NCBI NO: 14484895 NR Description: calcium-dependent protein kinase [Funaria
  misc_feature (1)..(415): Homolog of NCBI NO: 34907990 NR Description: putative calcium-dependent protein kinase
  misc_feature (1)..(415): Homolog of NCBI NO: 34899838 NR Description: putative calcium-dependent protein kinase
  misc_feature (1)..(415): Homolog of NCBI NO: 15239742 NR Description: calcium-dependent protein kinase
  misc_feature (1)..(415): Homolog of NCBI NO: 18416872 NR Description: calcium-dependent protein kinase-like protein
  misc_feature (1)..(415): Homolog of NCBI NO: 2665890 NR Description: calcium-dependent protein kinase [Fragaria x
  misc_feature (1)..(416): Homolog of NCBI NO: 15227452 NR Description: putative calcium-dependent protein kinase
  misc_feature (1)..(415): Homolog of NCBI NO: 30694663 NR Description: calcium-dependent protein kinase, putative (CDPK)
  misc_feature (1)..(443): Homolog of NCBI NO: 11259874 NR Description: calcium-dependent protein kinase - Arabidopsis
MPEHPNVVTLKETYEDEHAVHLVMELCEGGELFDRIVARGHYTERAAAAVTKTIMEVVQVCHKHGVMHRDLKPENFLFGNKKETAPLKAIDFGLSVFFKPGERFNEIVGSPYYMAPEVLKRNYGPEVDIWSAGVILYILLCGVPPFWAETEQGVAQAIIRSVLDFRRDPWPKVSENAKDLIRKMLDPDQKRRLTAQQVLDHPWLQNAKTAPNVSLGETVRARLKQFTVMNKLKKRALRVIAEHLSDEEASGIREGFQIMDTSQRGKINIDELKIGLQKLGHAIPQDDLQILMDAGDIDRDGYLDCDEFIAISVHLRKMGNDEHLKKAFAFFDQNNNGYIEIEELREALSDELGTSEEVVDAIIRDVDTDKDGRISYEEFVTMMKTGTDWRKASRQYSRERFNSISLKLMQDASLQSCVFDILANERAEYGDQERKTVLAFGCV

SEQ ID NO: 50773 - DNA, 1006 bp, Arabidopsis thaliana; identical to SEQ ID NO: 40003
  misc_feature (1)..(1006): Ceres Seq. ID no. 12371342
  misc_feature: MA Experiment ID: 108434 Result: Up-regulated in Transcription
  misc_feature: MA Experiment 108434 PARAMETER Experiment Name: At_Root_Tips_cDNA_P Parameter: Tissue Value: Root Tips
  misc_feature: MA Experiment ID: 108462 Result: Up-regulated in Transcription
  misc_feature: MA Experiment 108462 PARAMETER Experiment Name: At_Germinating_Seeds_cDNA_P Parameter: Age (day) Value: 2 vs. 0
  misc_feature: MA Experiment 108462 PARAMETER Experiment Name: At_Germinating_Seeds_cDNA_P Parameter: Tissue Value: Germinating Seeds
  misc_feature: MA Experiment ID: 108463 Result: Up-regulated in Transcription
  misc_feature: MA Experiment 108463 PARAMETER Experiment Name: At_Germinating_Seeds_cDNA_P Parameter: Age (day) Value: 3 vs. 0
  misc_feature: MA Experiment 108463 PARAMETER Experiment Name: At_Germinating_Seeds_cDNA_P Parameter: Tissue Value: Germinating Seeds
  misc_feature: MA Experiment ID: 108464 Result: Up-regulated in Transcription
  misc_feature: MA Experiment 108464 PARAMETER Experiment Name: At_Germinating_Seeds_cDNA_P Parameter: Age (day) Value: 4 vs. 0
  misc_feature: MA Experiment 108464 PARAMETER Experiment Name: At_Germinating_Seeds_cDNA_P Parameter: Tissue Value: Germinating Seeds
  misc_feature: MA Experiment ID: 108576 Result: Down-regulated in Transcription
  misc_feature: MA Experiment 108576 PARAMETER Experiment Name: At_42deg_Heat_cDNA_P Parameter: Temperature (deg C) Value: 42 vs. 22
  misc_feature: MA Experiment 108576 PARAMETER Experiment Name: At_42deg_Heat_cDNA_P Parameter: Timepoint (hr) Value: 1
  misc_feature: MA Experiment 108576 PARAMETER Experiment Name: At_42deg_Heat_cDNA_P Parameter: Tissue Value: Aerial
  misc_feature: MA Experiment ID: 20000179 Result: Up-regulated in Transcription
  misc_feature: MA Experiment 20000179 PARAMETER Experiment Name: At_Germinating_Seeds_P Parameter: Age (hr) Value: 6 vs. 0
  misc_feature: MA Experiment 20000179 PARAMETER Experiment Name: At_Germinating_Seeds_P Parameter: Tissue Value: Germinating Seeds
  misc_feature: MA Experiment ID: 20000180 Result: Up-regulated in Transcription
  misc_feature: MA Experiment 20000180 PARAMETER Experiment Name: At_Germinating_Seeds_P Parameter: Age (hr) Value: 24 vs. 0
  misc_feature: MA Experiment 20000180 PARAMETER Experiment Name: At_Germinating_Seeds_P Parameter: Tissue Value: Germinating Seeds
  misc_feature: MA Experiment ID: 20000184 Result: Up-regulated in Transcription
  misc_feature: MA Experiment 20000184 PARAMETER Experiment Name: At_Shoots__P Parameter: Age (day) Value: 7
  misc_feature: MA Experiment 20000184 PARAMETER Experiment Name: At_Shoots__P Parameter: Tissue Value: Shoots vs. Whole Plant
  misc_feature: MA Experiment ID: 20000234 Result: Up-regulated in Transcription
  misc_feature: MA Experiment 20000234 PARAMETER Experiment Name: At_Siliques_P Parameter: Age (day) Value: 21
  misc_feature: MA Experiment 20000234 PARAMETER Experiment Name: At_Siliques_P Parameter: Organism Value: A. thaliana
  misc_feature: MA Experiment 20000234 PARAMETER Experiment Name: At_Siliques_P Parameter: Plant Line Value: WS
  misc_feature: MA Experiment 20000234 PARAMETER Experiment Name: At_Siliques_P Parameter: Tissue Value: Less Than 5mm Siliques vs. Whole Plant
  misc_feature: MA Experiment ID: 20000235 Result: Up-regulated in Transcription
  misc_feature: MA Experiment 20000235 PARAMETER Experiment Name: At_Siliques_P Parameter: Age (day) Value: 21
  misc_feature: MA Experiment 20000235 PARAMETER Experiment Name: At_Siliques_P Parameter: Organism Value: A. thaliana
  misc_feature: MA Experiment 20000235 PARAMETER Experiment Name: At_Siliques_P Parameter: Plant Line Value: WS
  misc_feature: MA Experiment 20000235 PARAMETER Experiment Name: At_Siliques_P Parameter: Tissue Value: 5-10mm Siliques vs. Whole Plant
  misc_feature: MA Experiment ID: 20000495 Result: Up-regulated in Transcription
  misc_feature: MA Experiment 20000495 PARAMETER Experiment Name: At_Guard_Cells_P Parameter: Harvest Date Value: 8/2/2002
  misc_feature: MA Experiment 20000495 PARAMETER Experiment Name: At_Guard_Cells_P Parameter: Organism Value: A. thaliana
  misc_feature: MA Experiment 20000495 PARAMETER Experiment Name: At_Guard_Cells_P Parameter: Tissue Value: Guard Cells vs. Leaves
  misc_feature: MA Experiment ID: 20000794 Result: Down-regulated in Transcription
  misc_feature: MA Experiment 20000794 PARAMETER Experiment Name: At_Petals_P Parameter: Age (day) Value: 23-25 days
  misc_feature: MA Experiment 20000794 PARAMETER Experiment Name: At_Petals_P Parameter: Plant Line Value: WS
  misc_feature: MA Experiment 20000794 PARAMETER Experiment Name: At_Petals_P Parameter: Tissue Value: Petals vs. Whole plant
  misc_feature: MA Experiment ID: 20001248 Result: Up-regulated in Transcription
  misc_feature: MA Experiment 20001248 PARAMETER Experiment Name: At_Far-red-induction_P Parameter: Age (day) Value: 7
  misc_feature: MA Experiment 20001248 PARAMETER Experiment Name: At_Far-red-induction_P Parameter: Light Value: Far-red vs. White
  misc_feature: MA Experiment 20001248 PARAMETER Experiment Name: At_Far-red-induction_P Parameter: Organism Value: A. thaliana
  misc_feature: MA Experiment 20001248 PARAMETER Experiment Name: At_Far-red-induction_P Parameter: Plant Line Value: Columbia
  misc_feature: MA Experiment 20001248 PARAMETER Experiment Name: At_Far-red-induction_P Parameter: Timepoint (hr) Value: 4
  misc_feature: MA Experiment 20001248 PARAMETER Experiment Name: At_Far-red-induction_P Parameter: Tissue Value: Whole Plant
  misc_feature: MA Experiment ID: 20001557 Result: Up-regulated in Transcription
  misc_feature: MA Experiment 20001557 PARAMETER Experiment Name: At_Drought_Soil_Dry_P Parameter: Age (day) Value: 27
  misc_feature: MA Experiment 20001557 PARAMETER Experiment Name: At_Drought_Soil_Dry_P Parameter: Organism Value: A. thaliana
  misc_feature: MA Experiment 20001557 PARAMETER Experiment Name: At_Drought_Soil_Dry_P Parameter: Plant Line Value: WS
  misc_feature: MA Experiment 20001557 PARAMETER Experiment Name: At_Drought_Soil_Dry_P Parameter: Post Timepoint (hr) Value: 3
  misc_feature: MA Experiment 20001557 PARAMETER Experiment Name: At_Drought_Soil_Dry_P Parameter: Post-Treatment Value: Re-Water vs. No Drought
  misc_feature: MA Experiment 20001557 PARAMETER Experiment Name: At_Drought_Soil_Dry_P Parameter: Timepoint (day) Value: 13
  misc_feature: MA Experiment 20001557 PARAMETER Experiment Name: At_Drought_Soil_Dry_P Parameter: Treatment Value: Drought vs. No Drought
  misc_feature: MA Experiment ID: 20001560 Result: Up-regulated in Transcription
  misc_feature: MA Experiment 20001560 PARAMETER Experiment Name: At_Drought_Soil_Dry_P Parameter: Age (day) Value: 28
  misc_feature: MA Experiment 20001560 PARAMETER Experiment Name: At_Drought_Soil_Dry_P Parameter: Organism Value: A. thaliana
  misc_feature: MA Experiment 20001560 PARAMETER Experiment Name: At_Drought_Soil_Dry_P Parameter: Plant Line Value: WS
  misc_feature: MA Experiment 20001560 PARAMETER Experiment Name: At_Drought_Soil_Dry_P Parameter: Post Timepoint (hr) Value: None
  misc_feature: MA Experiment 20001560 PARAMETER Experiment Name: At_Drought_Soil_Dry_P Parameter: Post-Treatment Value: None
  misc_feature: MA Experiment 20001560 PARAMETER Experiment Name: At_Drought_Soil_Dry_P Parameter: Timepoint (day) Value: 14
  misc_feature: MA Experiment 20001560 PARAMETER Experiment Name: At_Drought_Soil_Dry_P Parameter: Treatment Value: Drought vs. No Drought

SEQ ID NO: 50774 - protein, 169 aa, Arabidopsis thaliana; identical to SEQ ID NO: 40004
  peptide (1)..(169): Ceres Seq. ID no. 12371343
  misc_feature (7)..(160): Homolog of NCBI NO: 34909192 NR Description: P0425G02.19 [Oryza sativa (japonica
  misc_feature (20)..(169): Homolog of NCBI NO: 38344198 NR Description: OSJNBa0064G10.14 [Oryza sativa (japonica
  misc_feature (1)..(160): Homolog of NCBI NO: 18401317 NR Description: expressed protein
  misc_feature (1)..(159): Homolog of NCBI NO: 34914304 NR Description: B1151A10.19 [Oryza sativa (japonica
  misc_feature (7)..(164): Homolog of NCBI NO: 34903552 NR Description: P0001B06.28 [Oryza sativa (japonica
  misc_feature (26)..(160): Homolog of NCBI NO: 18394509 NR Description: expressed protein
  misc_feature (26)..(160): Homolog of NCBI NO: 11762174 NR Description: At1g17620 [Arabidopsis thaliana]
  misc_feature (1)..(166): Homolog of NCBI NO: 15239804 NR Description: putative protein
  misc_feature (1)..(166): Homolog of NCBI NO: 21536796 NR Description: unknown [Arabidopsis thaliana]
  misc_feature (7)..(160): Homolog of NCBI NO: 34909192 NR Description: P0425G02.19 [Oryza sativa (japonica
  misc_feature (20)..(169): Homolog of NCBI NO: 38344198 NR Description: OSJNBa0064G10.14 [Oryza sativa (japonica
  misc_feature (1)..(160): Homolog of NCBI NO: 18401317 NR Description: expressed protein
  misc_feature (1)..(159): Homolog of NCBI NO: 34914304 NR Description: B1151A10.19 [Oryza sativa (japonica
  misc_feature (7)..(164): Homolog of NCBI NO: 34903552 NR Description: P0001B06.28 [Oryza sativa (japonica
  misc_feature (26)..(160): Homolog of NCBI NO: 18394509 NR Description: expressed protein
  misc_feature (26)..(160): Homolog of NCBI NO: 11762174 NR Description: At1g17620 [Arabidopsis thaliana]
  misc_feature (1)..(166): Homolog of NCBI NO: 15239804 NR Description: putative protein
  misc_feature (1)..(166): Homolog of NCBI NO: 21536796 NR Description: unknown [Arabidopsis thaliana]

SEQ ID NO: 50775 - protein, 128 aa, Arabidopsis thaliana; identical to SEQ ID NO: 40005
  peptide (1)..(128): Ceres Seq. ID no. 12371344
  misc_feature (1)..(119): Homolog of NCBI NO: 34909192 NR Description: P0425G02.19 [Oryza sativa (japonica
  misc_feature (1)..(128): Homolog of NCBI NO: 38344198 NR Description: OSJNBa0064G10.14 [Oryza sativa (japonica
  misc_feature (1)..(119): Homolog of NCBI NO: 18401317 NR Description: expressed protein
  misc_feature (1)..(118): Homolog of NCBI NO: 34914304 NR Description: B1151A10.19 [Oryza sativa (japonica
  misc_feature (1)..(123): Homolog of NCBI NO: 34903552 NR Description: P0001B06.28 [Oryza sativa (japonica
  misc_feature (1)..(119): Homolog of NCBI NO: 18394509 NR Description: expressed protein
  misc_feature (1)..(119): Homolog of NCBI NO: 11762174 NR Description: At1g17620 [Arabidopsis thaliana]
  misc_feature (1)..(125): Homolog of NCBI NO: 15239804 NR Description: putative protein
  misc_feature (1)..(125): Homolog of NCBI NO: 21536796 NR Description: unknown [Arabidopsis thaliana]
  misc_feature (1)..(119): Homolog of NCBI NO: 34909192 NR Description: P0425G02.19 [Oryza sativa (japonica
  misc_feature (1)..(128): Homolog of NCBI NO: 38344198 NR Description: OSJNBa0064G10.14 [Oryza sativa (japonica
  misc_feature (1)..(119): Homolog of NCBI NO: 18401317 NR Description: expressed protein
  misc_feature (1)..(118): Homolog of NCBI NO: 34914304 NR Description: B1151A10.19 [Oryza sativa (japonica
  misc_feature (1)..(123): Homolog of NCBI NO: 34903552 NR Description: P0001B06.28 [Oryza sativa (japonica
  misc_feature (1)..(119): Homolog of NCBI NO: 18394509 NR Description: expressed protein
  misc_feature (1)..(119): Homolog of NCBI NO: 11762174 NR Description: At1g17620 [Arabidopsis thaliana]
  misc_feature (1)..(125): Homolog of NCBI NO: 15239804 NR Description: putative protein
  misc_feature (1)..(125): Homolog of NCBI NO: 21536796 NR Description: unknown [Arabidopsis thaliana]

SEQ ID NO: 50776 - protein, 114 aa, Arabidopsis thaliana; identical to SEQ ID NO: 40006
  peptide (1)..(114): Ceres Seq. ID no. 12371345
  misc_feature (1)..(114): Homolog of NCBI NO: 18394509 NR Description: expressed protein
  misc_feature (1)..(114): Homolog of NCBI NO: 11762174 NR Description: At1g17620 [Arabidopsis thaliana]
  misc_feature (1)..(114): Homolog of NCBI NO: 15239804 NR Description: putative protein
  misc_feature (1)..(114): Homolog of NCBI NO: 21536796 NR Description: unknown [Arabidopsis thaliana]
  misc_feature (1)..(114): Homolog of NCBI NO: 18394509 NR Description: expressed protein
  misc_feature (1)..(114): Homolog of NCBI NO: 11762174 NR Description: At1g17620 [Arabidopsis thaliana]
  misc_feature (1)..(114): Homolog of NCBI NO: 15239804 NR Description: putative protein
  misc_feature (1)..(114): Homolog of NCBI NO: 21536796 NR Description: unknown [Arabidopsis thaliana]

SEQ ID NO: 50777 - DNA, 2745 bp, Arabidopsis thaliana; identical to SEQ ID NO: 45606
  misc_feature (1)..(2745): Ceres Seq. ID no. 13591675
  misc_feature: MA Experiment ID: 20000185 Result: Down-regulated in Transcription
  misc_feature: MA Experiment 20000185 PARAMETER Experiment Name: At_Roots__P Parameter: Age (day) Value: 7 vs. 21
  misc_feature: MA Experiment 20000185 PARAMETER Experiment Name: At_Roots__P Parameter: Organism Value: A. thaliana
  misc_feature: MA Experiment 20000185 PARAMETER Experiment Name: At_Roots__P Parameter: Tissue Value: Roots vs. Whole Plant
  misc_feature: MA Experiment ID: 20000234 Result: Down-regulated in Transcription
  misc_feature: MA Experiment 20000234 PARAMETER Experiment Name: At_Siliques_P Parameter: Age (day) Value: 21
  misc_feature: MA Experiment 20000234 PARAMETER Experiment Name: At_Siliques_P Parameter: Organism Value: A. thaliana
  misc_feature: MA Experiment 20000234 PARAMETER Experiment Name: At_Siliques_P Parameter: Plant Line Value: WS
  misc_feature: MA Experiment 20000234 PARAMETER Experiment Name: At_Siliques_P Parameter: Tissue Value: Less Than 5mm Siliques vs. Whole Plant
  misc_feature: MA Experiment ID: 20000286 Result: Down-regulated in Transcription
  misc_feature: MA Experiment 20000286 PARAMETER Experiment Name: At_Open_Flower_P Parameter: Age (day) Value: 21
  misc_feature: MA Experiment 20000286 PARAMETER Experiment Name: At_Open_Flower_P Parameter: Plant Line Value: WS
  misc_feature: MA Experiment 20000286 PARAMETER Experiment Name: At_Open_Flower_P Parameter: Tissue Value: Half Open vs. Whole Plant
  misc_feature: MA Experiment ID: 20000445 Result: Down-regulated in Transcription
  misc_feature: MA Experiment 20000445 PARAMETER Experiment Name: At_100uM_NAA__P Parameter: Age (day) Value: 14
  misc_feature: MA Experiment 20000445 PARAMETER Experiment Name: At_100uM_NAA__P Parameter: Organism Value: A. thaliana
  misc_feature: MA Experiment 20000445 PARAMETER Experiment Name: At_100uM_NAA__P Parameter: Plant Line Value: WS
  misc_feature: MA Experiment 20000445 PARAMETER Experiment Name: At_100uM_NAA__P Parameter: Timepoint (hr) Value: 6
  misc_feature: MA Experiment 20000445 PARAMETER Experiment Name: At_100uM_NAA__P Parameter: Tissue Value: Aerial
  misc_feature: MA Experiment 20000445 PARAMETER Experiment Name: At_100uM_NAA__P Parameter: Treatment Value: 100uM NAA vs. No Treatment
  misc_feature: MA Experiment ID: 20000496 Result: Up-regulated in Transcription
  misc_feature: MA Experiment 20000496 PARAMETER Experiment Name: At_Guard_Cells_P Parameter: Harvest Date Value: 7/19/2002
  misc_feature: MA Experiment 20000496 PARAMETER Experiment Name: At_Guard_Cells_P Parameter: Organism Value: Canola
  misc_feature: MA Experiment 20000496 PARAMETER Experiment Name: At_Guard_Cells_P Parameter: Tissue Value: Guard Cells vs. Leaves
  misc_feature: MA Experiment ID: 20000709 Result: Down-regulated in Transcription
  misc_feature: MA Experiment 20000709 PARAMETER Experiment Name: At_15mM_NH4NO3_L-to-H_P Parameter: Age (hr) Value: 14
  misc_feature: MA Experiment 20000709 PARAMETER Experiment Name: At_15mM_NH4NO3_L-to-H_P Parameter: Organism Value: A. thaliana
  misc_feature: MA Experiment 20000709 PARAMETER Experiment Name: At_15mM_NH4NO3_L-to-H_P Parameter: Plant Line Value: WS
  misc_feature: MA Experiment 20000709 PARAMETER Experiment Name: At_15mM_NH4NO3_L-to-H_P Parameter: Timepoint (hr) Value: 4
  misc_feature: MA Experiment 20000709 PARAMETER Experiment Name: At_15mM_NH4NO3_L-to-H_P Parameter: Tissue Value: Aerial
  misc_feature: MA Experiment 20000709 PARAMETER Experiment Name: At_15mM_NH4NO3_L-to-H_P Parameter: Treatment Value: 15mM NH4NO3 vs. 30mM Mannitol
  misc_feature: MA Experiment ID: 20001451 Result: Up-regulated in Transcription
  misc_feature: MA Experiment 20001451 PARAMETER Experiment Name: At_Far-red-induction_P Parameter: Age (day) Value: 7
  misc_feature: MA Experiment 20001451 PARAMETER Experiment Name: At_Far-red-induction_P Parameter: Light Value: Far-red vs. White
  misc_feature: MA Experiment 20001451 PARAMETER Experiment Name: At_Far-red-induction_P Parameter: Organism Value: A. thaliana
  misc_feature: MA Experiment 20001451 PARAMETER Experiment Name: At_Far-red-induction_P Parameter: Plant Line Value: Columbia
  misc_feature: MA Experiment 20001451 PARAMETER Experiment Name: At_Far-red-induction_P Parameter: Timepoint (hr) Value: 24
  misc_feature: MA Experiment 20001451 PARAMETER Experiment Name: At_Far-red-induction_P Parameter: Tissue Value: Whole Plant
  misc_feature: MA Experiment ID: 20001557 Result: Up-regulated in Transcription
  misc_feature: MA Experiment 20001557 PARAMETER Experiment Name: At_Drought_Soil_Dry_P Parameter: Age (day) Value: 27
  misc_feature: MA Experiment 20001557 PARAMETER Experiment Name: At_Drought_Soil_Dry_P Parameter: Organism Value: A. thaliana
  misc_feature: MA Experiment 20001557 PARAMETER Experiment Name: At_Drought_Soil_Dry_P Parameter: Plant Line Value: WS
  misc_feature: MA Experiment 20001557 PARAMETER Experiment Name: At_Drought_Soil_Dry_P Parameter: Post Timepoint (hr) Value: 3
  misc_feature: MA Experiment 20001557 PARAMETER Experiment Name: At_Drought_Soil_Dry_P Parameter: Post-Treatment Value: Re-Water vs. No Drought
  misc_feature: MA Experiment 20001557 PARAMETER Experiment Name: At_Drought_Soil_Dry_P Parameter: Timepoint (day) Value: 13
  misc_feature: MA Experiment 20001557 PARAMETER Experiment Name: At_Drought_Soil_Dry_P Parameter: Treatment Value: Drought vs. No Drought
  misc_feature: MA Experiment ID: 20001756 Result: Down-regulated in Transcription
  misc_feature: MA Experiment 20001756 PARAMETER Experiment Name: At_50mM_NH4NO3_L-to-H_P Parameter: Timepoint (hr) Value: 4
  misc_feature: MA Experiment 20001756 PARAMETER Experiment Name: At_50mM_NH4NO3_L-to-H_P Parameter: Tissue Value: Leaf
  misc_feature: MA Experiment 20001756 PARAMETER Experiment Name: At_50mM_NH4NO3_L-to-H_P Parameter: Treatment Value: 50mM NH4NO3 vs 100mM Mannitol
  misc_feature: MA Experiment ID: 20001757 Result: Up-regulated in Transcription
  misc_feature: MA Experiment 20001757 PARAMETER Experiment Name: At_50mM_NH4NO3_L-to-H_P Parameter: Timepoint (hr) Value: 6
  misc_feature: MA Experiment 20001757 PARAMETER Experiment Name: At_50mM_NH4NO3_L-to-H_P Parameter: Tissue Value: Leaf
  misc_feature: MA Experiment 20001757 PARAMETER Experiment Name: At_50mM_NH4NO3_L-to-H_P Parameter: Treatment Value: 50mM NH4NO3 vs 100mM Mannitol
  misc_feature: MA Experiment ID: 20001761 Result: Up-regulated in Transcription
  misc_feature: MA Experiment 20001761 PARAMETER Experiment Name: At_50mM_NH4NO3_L-to-H_P Parameter: Timepoint (hr) Value: 4
  misc_feature: MA Experiment 20001761 PARAMETER Experiment Name: At_50mM_NH4NO3_L-to-H_P Parameter: Tissue Value: Siliques
  misc_feature: MA Experiment 20001761 PARAMETER Experiment Name: At_50mM_NH4NO3_L-to-H_P Parameter: Treatment Value: 50mM NH4NO3 vs 100mM Mannitol

SEQ ID NO: 50778 - protein, 98 aa, Arabidopsis thaliana; identical to SEQ ID NO: 45607
  peptide (1)..(98): Ceres Seq. ID no. 13591676

SEQ ID NO: 50779 - protein, 55 aa, Arabidopsis thaliana; identical to SEQ ID NO: 45608
  peptide (1)..(55): Ceres Seq. ID no. 13591677
  misc_feature (1)..(41): Homolog of NCBI NO: 34876464 NR Description: similar to putative transcription factor [Rattus
  misc_feature (1)..(39): Homolog of NCBI NO: 5531330 NR Description: putative transcription factor [Periplaneta
  misc_feature (1)..(41): Homolog of NCBI NO: 34876464 NR Description: similar to putative transcription factor [Rattus
  misc_feature (1)..(39): Homolog of NCBI NO: 5531330 NR Description: putative transcription factor [Periplaneta
  misc_feature (1)..(41): Homolog of NCBI NO: 34876464 NR Description: similar to putative transcription factor [Rattus
  misc_feature (1)..(39): Homolog of NCBI NO: 5531330 NR Description: putative transcription factor [Periplaneta
  misc_feature (1)..(41): Homolog of NCBI NO: 34876464 NR Description: similar to putative transcription factor [Rattus
  misc_feature (1)..(39): Homolog of NCBI NO: 5531330 NR Description: putative transcription factor [Periplaneta
  misc_feature (1)..(41): Homolog of NCBI NO: 34876464 NR Description: similar to putative transcription factor [Rattus
  misc_feature (1)..(39): Homolog of NCBI NO: 5531330 NR Description: putative transcription factor [Periplaneta

SEQ ID NO: 50780 - DNA, 3102 bp, Arabidopsis thaliana
  misc_feature (1)..(3102): Ceres Seq. ID no. 12558946
  misc_feature: MA Experiment ID: 20000173 Result: Down-regulated in Transcription
  misc_feature: MA Experiment 20000173 PARAMETER Experiment Name: At_42deg_Heat_P Parameter: Age (day) Value: 14
  misc_feature: MA Experiment 20000173 PARAMETER Experiment Name: At_42deg_Heat_P Parameter: Organism Value: A. thaliana
  misc_feature: MA Experiment 20000173 PARAMETER Experiment Name: At_42deg_Heat_P Parameter: Plant Line Value: WS
  misc_feature: MA Experiment 20000173 PARAMETER Experiment Name: At_42deg_Heat_P Parameter: Temperature (deg C) Value: 42 vs. 22
  misc_feature: MA Experiment 20000173 PARAMETER Experiment Name: At_42deg_Heat_P Parameter: Timepoint (hr) Value: 6
  misc_feature: MA Experiment 20000173 PARAMETER Experiment Name: At_42deg_Heat_P Parameter: Tissue Value: Aerial
  misc_feature: MA Experiment ID: 20000286 Result: Up-regulated in Transcription
  misc_feature: MA Experiment 20000286 PARAMETER Experiment Name: At_Open_Flower_P Parameter: Age (day) Value: 21
  misc_feature: MA Experiment 20000286 PARAMETER Experiment Name: At_Open_Flower_P Parameter: Plant Line Value: WS
  misc_feature: MA Experiment 20000286 PARAMETER Experiment Name: At_Open_Flower_P Parameter: Tissue Value: Half Open vs. Whole Plant
atctccgccgtattaatacaagctctctgaacgcactctacgacgagcctaacgtctttctccgatcgccggttagcagattcaagcgagatacgagatccgacgagcagatcttctgcttaatctgtaaacatgcctctcagactagatatcaagagaaagtttgctcaacgatcagagagagtcaaatctgttgatctgcatcctactgaaccatggattctagcaagtttgtattctggaaccgtgtgtatttggaactaccagacacagacgattacaaaatccttcgaggtgacggaattgccagttaggtcggccaagtttattccgcgcaagcaatgggttgtggctggagcggatgatatgtacatccgtgtatacaattacaatacaatggacaaggtcaaagtatttgaggctcattcggattacattaggtgtgtagctgtccatccgacccttccatatgtgctgtcatcttctgatgatatgctcataaagctttgggactgggaaaacggttgggcttgtactcagatatttgagggacattcgcactatgtgatgcaagtggtatttaatccaaaagataccaacacttttgccagtgcttcgcttgatcgtaccataaagatatggaatcttggttccccagacccaaattttacactggatgctcatcagaaaggagtcaactgtgtagattatttcacagggggtgataaaccctatctaattaccggctctgatgatcatactgctaaggtatgggactatcaaaccaaaagttgtgtccagacgctagatgggcacacacacaatgtttctgccgtatgtttccatccagagcttccaataataatcacaggttctgaggatggcactgttcgcatttggcacgccactacctacaggctagaaaacacattaaattatggtctcgagagagtttgggccattggttacatcaaaagttctcggcgggttgtgattggatatgatgaaggaaccatcatggttaaacttggacgagaaattcctgtcgctagcatggacagtagcggaaaaatcatatgggctaagcataatgaaattcaaaccgcaaacatcaaaagtattggtgcaggttacgaggctactgatggagaaagacttcccttgtctgttaaagagttggggacctgtgatctttatccacaaagcttgaagcacaaccctaatgggaggtttgtcgtagtctgcggtgatggagagtacataatctacactgctttggcgtggagaaatagatcttttgggtctggcctggaatttgtttggtcatctgagggggaatgtgcggttagagaaagctcatcaaagataaagatattcagtaaaaatttccaggaaaggaagagtatccggcctactttctcagctgagaagatttttggaggaaccttgttagcaatgtgttcgaatgatttcatctgcttctatgattgggccgaatgcaggctgattcaacaaattgatgtcaccgtaaagaatctttattgggctgaaagtggtgatttagtagccattgctagtgatacgtcattctacatcttgaagtacaatcgagagttggtttcctcgcattttgatagtggaagaccaactgatgaagagggtgttgaggatgcttttgaggttctccacgagaatgatgaacgtgttaggaccggtatatgggttggggactgcttcatttacaacaactcttcttggaagcttaactattgtgttggaggcgaggtaaccacaatgtatcatttggaccgcccaatgtatttgttaggctatattgccaaccaaagccgggtttacttggtagacaaagaattcaatgtcataggatataccctgctgcttagcctgattgaatacaagactcttgtgatgcgaggcgatttggatagagccaatcaaattttacctacaattcctaaagagcagcataacaatgttgctcatttcttggaatctcggggaatgattgaagatgctttagaaattgcgacagatccagactacaaatttgatctggccatacaactgggtagacttgaaattgcaaaggaaattgctgaagaagtacagagcgagtctaaatggaagcagttaggagagttagccatgtcctcggggaagctgcaattggccgaggattgcatgaagtacgctatggatttgagtggtttgttactactatattcttctttgggagatgctgaaggggtgtcaaaacttgcatgccttgctaaggaacaggggaagaacaatgttgcctttctttgcttatttacgctgggtagattggaagattgtctgcagttattggtggagagtaaccggataccagaagctgctctgatggcacgttcttatcttccaagcaaagtttcggagatagtagctctatggagggaagatctcagcaaggttaatccaaaagcagctgaatctttagctgatcctgaagagtactcaaatctttttgaggattggcaagttgctctttctgttgaagcgaacactgcagagacaaggggagtttataccgctgcagaaaattatccatcccatgccgataaaccttccattacccttgtggaagcctttagaaacctgcaagttgaagcagaggaatcacttgaaaatggaaacatcgatcacgaggtagcagaagaaaacggtcatgtagagaatgaaggagatgaagaggaacaacaggaagaagaagtgaatgaagaagagggagttgtggatgcagactctacggacggtgctgtacttgttaatggaagtgaggtgcttacgccacatccctagctagatccagtagccggcaccgatactccaagcaggaatcgattcttggtggatggagagtataaagacgaagatgggattggtggattaaggaatttggtgttgtggttttttcaactaatgattgtggttttcatctgaaagagtatattataacacagtagagagttatacaaattttctgctttagatttcagctcaaaattacaaatttctggtgcatatataattctttggaag

SEQ ID NO: 50781 - protein, 909 aa, Arabidopsis thaliana
  peptide (1)..(909): Ceres Seq. ID no. 12558947
  misc_feature (319)..(779): Pfam Name: Coatomer WD associated region Pfam Description: Coatomer WD associated region
  misc_feature (512)..(885): Homolog of NCBI NO: 23613580 NR Description: beta subunit of coatomer complex, putative
  misc_feature (1)..(491): Homolog of NCBI NO: 23613580 NR Description: beta subunit of coatomer complex, putative
  misc_feature (3)..(762): Homolog of NCBI NO: 6321301 NR Description: Involved in endoplasmic-to-Golgi protein
  misc_feature (1)..(856): Homolog of NCBI NO: 3287963 NR Description: PROBABLE COATOMER BETA' SUBUNIT (BETA'-COAT
  misc_feature (1)..(856): Homolog of NCBI NO: 17540286 NR Description: Coatomer (111.1 kD) [Caenorhabditis elegans]
  misc_feature (1)..(825): Homolog of NCBI NO: 27697187 NR Description: Similar to coatomer protein complex, subunit beta
  misc_feature (1)..(894): Homolog of NCBI NO: 11120716 NR Description: beta prime COP [Rattus norvegicus]
  misc_feature (1)..(894): Homolog of NCBI NO: 27805865 NR Description: coatomer protein complex, subunit beta 2 (beta
  misc_feature (1)..(894): Homolog of NCBI NO: 486784 NR Description: Golgi-associated particle 102K chain - human
  misc_feature (1)..(894): Homolog of NCBI NO: 4758032 NR Description: coatomer protein complex, subunit beta 2 (beta
MPLRLDIKRKFAQRSERVKSVDLHPTEPWILASLYSGTVCIWNYQTQTITKSFEVTELPVRSAKFIPRKQWVVAGADDMYIRVYNYNTMDKVKVFEAHSDYIRCVAVHPTLPYVLSSSDDMLIKLWDWENGWACTQIFEGHSHYVMQVVFNPKDTNTFASASLDRTIKIWNLGSPDPNFTLDAHQKGVNCVDYFTGGDKPYLITGSDDHTAKVWDYQTKSCVQTLDGHTHNVSAVCFHPELPIIITGSEDGTVRIWHATTYRLENTLNYGLERVWAIGYIKSSRRVVIGYDEGTIMVKLGREIPVASMDSSGKIIWAKHNEIQTANIKSIGAGYEATDGERLPLSVKELGTCDLYPQSLKHNPNGRFVVVCGDGEYIIYTALAWRNRSFGSGLEFVWSSEGECAVRESSSKIKIFSKNFQERKSIRPTFSAEKIFGGTLLAMCSNDFICFYDWAECRLIQQIDVTVKNLYWAESGDLVAIASDTSFYILKYNRELVSSHFDSGRPTDEEGVEDAFEVLHENDERVRTGIWVGDCFIYNNSSWKLNYCVGGEVTTMYHLDRPMYLLGYIANQSRVYLVDKEFNVIGYTLLLSLIEYKTLVMRGDLDRANQILPTIPKEQHNNVAHFLESRGMIEDALEIATDPDYKFDLAIQLGRLEIAKEIAEEVQSESKWKQLGELAMSSGKLQLAEDCMKYAMDLSGLLLLYSSLGDAEGVSKLACLAKEQGKNNVAFLCLFTLGRLEDCLQLLVESNRIPEAALMARSYLPSKVSEIVALWREDLSKVNPKAAESLADPEEYSNLFEDWQVALSVEANTAETRGVYTAAENYPSHADKPSITLVEAFRNLQVEAEESLENGNIDHEVAEENGHVENEGDEEEQQEEEVNEEEGVVDADSTDGAVLVNGSEVLTPHP

SEQ ID NO: 50782 - protein, 831 aa, Arabidopsis thaliana
  peptide (1)..(831): Ceres Seq. ID no. 12558948
  misc_feature (241)..(701): Pfam Name: Coatomer WD associated region Pfam Description: Coatomer WD associated region
  misc_feature (434)..(807): Homolog of NCBI NO: 23613580 NR Description: beta subunit of coatomer complex, putative
  misc_feature (1)..(413): Homolog of NCBI NO: 23613580 NR Description: beta subunit of coatomer complex, putative
  misc_feature (1)..(684): Homolog of NCBI NO: 6321301 NR Description: Involved in endoplasmic-to-Golgi protein
  misc_feature (1)..(778): Homolog of NCBI NO: 3287963 NR Description: PROBABLE COATOMER BETA' SUBUNIT (BETA'-COAT
  misc_feature (1)..(778): Homolog of NCBI NO: 17540286 NR Description: Coatomer (111.1 kD) [Caenorhabditis elegans]
  misc_feature (1)..(747): Homolog of NCBI NO: 27697187 NR Description: Similar to coatomer protein complex, subunit beta
  misc_feature (1)..(816): Homolog of NCBI NO: 11120716 NR Description: beta prime COP [Rattus norvegicus]
  misc_feature (1)..(816): Homolog of NCBI NO: 27805865 NR Description: coatomer protein complex, subunit beta 2 (beta
  misc_feature (1)..(816): Homolog of NCBI NO: 486784 NR Description: Golgi-associated particle 102K chain - human
  misc_feature (1)..(816): Homolog of NCBI NO: 4758032 NR Description: coatomer protein complex, subunit beta 2 (beta
MYIRVYNYNTMDKVKVFEAHSDYIRCVAVHPTLPYVLSSSDDMLIKLWDWENGWACTQIFEGHSHYVMQVVFNPKDTNTFASASLDRTIKIWNLGSPDPNFTLDAHQKGVNCVDYFTGGDKPYLITGSDDHTAKVWDYQTKSCVQTLDGHTHNVSAVCFHPELPIIITGSEDGTVRIWHATTYRLENTLNYGLERVWAIGYIKSSRRVVIGYDEGTIMVKLGREIPVASMDSSGKIIWAKHNEIQTANIKSIGAGYEATDGERLPLSVKELGTCDLYPQSLKHNPNGRFVVVCGDGEYIIYTALAWRNRSFGSGLEFVWSSEGECAVRESSSKIKIFSKNFQERKSIRPTFSAEKIFGGTLLAMCSNDFICFYDWAECRLIQQIDVTVKNLYWAESGDLVAIASDTSFYILKYNRELVSSHFDSGRPTDEEGVEDAFEVLHENDERVRTGIWVGDCFIYNNSSWKLNYCVGGEVTTMYHLDRPMYLLGYIANQSRVYLVDKEFNVIGYTLLLSLIEYKTLVMRGDLDRANQILPTIPKEQHNNVAHFLESRGMIEDALEIATDPDYKFDLAIQLGRLEIAKEIAEEVQSESKWKQLGELAMSSGKLQLAEDCMKYAMDLSGLLLLYSSLGDAEGVSKLACLAKEQGKNNVAFLCLFTLGRLEDCLQLLVESNRIPEAALMARSYLPSKVSEIVALWREDLSKVNPKAAESLADPEEYSNLFEDWQVALSVEANTAETRGVYTAAENYPSHADKPSITLVEAFRNLQVEAEESLENGNIDHEVAEENGHVENEGDEEEQQEEEVNEEEGVVDADSTDGAVLVNGSEVLTPHP

SEQ ID NO: 50783 - protein, 821 aa, Arabidopsis thaliana
  peptide (1)..(821): Ceres Seq. ID no. 12558949
  misc_feature (231)..(691): Pfam Name: Coatomer WD associated region Pfam Description: Coatomer WD associated region
  misc_feature (424)..(797): Homolog of NCBI NO: 23613580 NR Description: beta subunit of coatomer complex, putative
  misc_feature (1)..(403): Homolog of NCBI NO: 23613580 NR Description: beta subunit of coatomer complex, putative
  misc_feature (1)..(674): Homolog of NCBI NO: 6321301 NR Description: Involved in endoplasmic-to-Golgi protein
  misc_feature (1)..(768): Homolog of NCBI NO: 3287963 NR Description: PROBABLE COATOMER BETA' SUBUNIT (BETA'-COAT
  misc_feature (1)..(768): Homolog of NCBI NO: 17540286 NR Description: Coatomer (111.1 kD) [Caenorhabditis elegans]
  misc_feature (1)..(737): Homolog of NCBI NO: 27697187 NR Description: Similar to coatomer protein complex, subunit beta
  misc_feature (1)..(806): Homolog of NCBI NO: 11120716 NR Description: beta prime COP [Rattus norvegicus]
  misc_feature (1)..(806): Homolog of NCBI NO: 27805865 NR Description: coatomer protein complex, subunit beta 2 (beta
  misc_feature (1)..(806): Homolog of NCBI NO: 486784 NR Description: Golgi-associated particle 102K chain - human
  misc_feature (1)..(806): Homolog of NCBI NO: 4758032 NR Description: coatomer protein complex, subunit beta 2 (beta
MDKVKVFEAHSDYIRCVAVHPTLPYVLSSSDDMLIKLWDWENGWACTQIFEGHSHYVMQVVFNPKDTNTFASASLDRTIKIWNLGSPDPNFTLDAHQKGVNCVDYFTGGDKPYLITGSDDHTAKVWDYQTKSCVQTLDGHTHNVSAVCFHPELPIIITGSEDGTVRIWHATTYRLENTLNYGLERVWAIGYIKSSRRVVIGYDEGTIMVKLGREIPVASMDSSGKIIWAKHNEIQTANIKSIGAGYEATDGERLPLSVKELGTCDLYPQSLKHNPNGRFVVVCGDGEYIIYTALAWRNRSFGSGLEFVWSSEGECAVRESSSKIKIFSKNFQERKSIRPTFSAEKIFGGTLLAMCSNDFICFYDWAECRLIQQIDVTVKNLYWAESGDLVAIASDTSFYILKYNRELVSSHFDSGRPTDEEGVEDAFEVLHENDERVRTGIWVGDCFIYNNSSWKLNYCVGGEVTTMYHLDRPMYLLGYIANQSRVYLVDKEFNVIGYTLLLSLIEYKTLVMRGDLDRANQILPTIPKEQHNNVAHFLESRGMIEDALEIATDPDYKFDLAIQLGRLEIAKEIAEEVQSESKWKQLGELAMSSGKLQLAEDCMKYAMDLSGLLLLYSSLGDAEGVSKLACLAKEQGKNNVAFLCLFTLGRLEDCLQLLVESNRIPEAALMARSYLPSKVSEIVALWREDLSKVNPKAAESLADPEEYSNLFEDWQVALSVEANTAETRGVYTAAENYPSHADKPSITLVEAFRNLQVEAEESLENGNIDHEVAEENGHVENEGDEEEQQEEEVNEEEGVVDADSTDGAVLVNGSEVLTPHP

SEQ ID NO: 50784 - DNA, 1206 bp, Arabidopsis thaliana; identical to SEQ ID NO: 29329
  misc_feature (1)..(1206): Ceres Seq. ID no. 12601145
  misc_feature: MA Experiment ID: 108561 Result: Down-regulated in Transcription
  misc_feature: MA Experiment 108561 PARAMETER Experiment Name: At_100uM_ABA_cDNA_P Parameter: Timepoint (hr) Value: 6
  misc_feature: MA Experiment 108561 PARAMETER Experiment Name: At_100uM_ABA_cDNA_P Parameter: Tissue Value: Aerial
  misc_feature: MA Experiment 108561 PARAMETER Experiment Name: At_100uM_ABA_cDNA_P Parameter: Treatment Value: 100uM ABA vs. No Treatment
  misc_feature: MA Experiment ID: 108585 Result: Down-regulated in Transcription
  misc_feature: MA Experiment 108585 PARAMETER Experiment Name: At_5mM_NaNP_cDNA_P Parameter: Timepoint (hr) Value: 6
  misc_feature: MA Experiment 108585 PARAMETER Experiment Name: At_5mM_NaNP_cDNA_P Parameter: Tissue Value: Aerial
  misc_feature: MA Experiment 108585 PARAMETER Experiment Name: At_5mM_NaNP_cDNA_P Parameter: Treatment Value: null
  misc_feature: MA Experiment ID: 20000180 Result: Up-regulated in Transcription
  misc_feature: MA Experiment 20000180 PARAMETER Experiment Name: At_Germinating_Seeds_P Parameter: Age (hr) Value: 24 vs. 0
  misc_feature: MA Experiment 20000180 PARAMETER Experiment Name: At_Germinating_Seeds_P Parameter: Tissue Value: Germinating Seeds
  misc_feature: MA Experiment ID: 20000185 Result: Down-regulated in Transcription
  misc_feature: MA Experiment 20000185 PARAMETER Experiment Name: At_Roots__P Parameter: Age (day) Value: 7 vs. 21
  misc_feature: MA Experiment 20000185 PARAMETER Experiment Name: At_Roots__P Parameter: Organism Value: A. thaliana
  misc_feature: MA Experiment 20000185 PARAMETER Experiment Name: At_Roots__P Parameter: Tissue Value: Roots vs. Whole Plant
  misc_feature: MA Experiment ID: 20000234 Result: Up-regulated in Transcription
  misc_feature: MA Experiment 20000234 PARAMETER Experiment Name: At_Siliques_P Parameter: Age (day) Value: 21
  misc_feature: MA Experiment 20000234 PARAMETER Experiment Name: At_Siliques_P Parameter: Organism Value: A. thaliana
  misc_feature: MA Experiment 20000234 PARAMETER Experiment Name: At_Siliques_P Parameter: Plant Line Value: WS
  misc_feature: MA Experiment 20000234 PARAMETER Experiment Name: At_Siliques_P Parameter: Tissue Value: Less Than 5mm Siliques vs. Whole Plant
  misc_feature: MA Experiment ID: 20000436 Result: Down-regulated in Transcription
  misc_feature: MA Experiment 20000436 PARAMETER Experiment Name: At_Drought_P Parameter: Age (day) Value: 7
  misc_feature: MA Experiment 20000436 PARAMETER Experiment Name: At_Drought_P Parameter: Organism Value: A. thaliana
  misc_feature: MA Experiment 20000436 PARAMETER Experiment Name: At_Drought_P Parameter: Plant Line Value: WS
  misc_feature: MA Experiment 20000436 PARAMETER Experiment Name: At_Drought_P Parameter: Timepoint (hr) Value: 12
  misc_feature: MA Experiment 20000436 PARAMETER Experiment Name: At_Drought_P Parameter: Tissue Value: Whole Plant
  misc_feature: MA Experiment 20000436 PARAMETER Experiment Name: At_Drought_P Parameter: Treatment Value: Drought vs. No Drought
  misc_feature: MA Experiment ID: 20000437 Result: Down-regulated in Transcription
  misc_feature: MA Experiment 20000437 PARAMETER Experiment Name: At_Drought_P Parameter: Age (day) Value: 8
  misc_feature: MA Experiment 20000437 PARAMETER Experiment Name: At_Drought_P Parameter: Organism Value: A. thaliana
  misc_feature: MA Experiment 20000437 PARAMETER Experiment Name: At_Drought_P Parameter: Plant Line Value: WS
  misc_feature: MA Experiment 20000437 PARAMETER Experiment Name: At_Drought_P Parameter: Timepoint (hr) Value: 24
  misc_feature: MA Experiment 20000437 PARAMETER Experiment Name: At_Drought_P Parameter: Tissue Value: Whole Plant
  misc_feature: MA Experiment 20000437 PARAMETER Experiment Name: At_Drought_P Parameter: Treatment Value: Drought vs. No Drought
  misc_feature: MA Experiment ID: 20000439 Result: Down-regulated in Transcription
  misc_feature: MA Experiment 20000439 PARAMETER Experiment Name: At_Roots__P Parameter: Age (day) Value: 14 vs. 21
  misc_feature: MA Experiment 20000439 PARAMETER Experiment Name: At_Roots__P Parameter: Organism Value: A. thaliana
  misc_feature: MA Experiment 20000439 PARAMETER Experiment Name: At_Roots__P Parameter: Tissue Value: Roots vs. Whole Plant
  misc_feature: MA Experiment ID: 20000794 Result: Down-regulated in Transcription
  misc_feature: MA Experiment 20000794 PARAMETER Experiment Name: At_Petals_P Parameter: Age (day) Value: 23-25 days
  misc_feature: MA Experiment 20000794 PARAMETER Experiment Name: At_Petals_P Parameter: Plant Line Value: WS
  misc_feature: MA Experiment 20000794 PARAMETER Experiment Name: At_Petals_P Parameter: Tissue Value: Petals vs. Whole plant
  misc_feature: MA Experiment ID: 20001248 Result: Down-regulated in Transcription
  misc_feature: MA Experiment 20001248 PARAMETER Experiment Name: At_Far-red-induction_P Parameter: Age (day) Value: 7
  misc_feature: MA Experiment 20001248 PARAMETER Experiment Name: At_Far-red-induction_P Parameter: Light Value: Far-red vs. White
  misc_feature: MA Experiment 20001248 PARAMETER Experiment Name: At_Far-red-induction_P Parameter: Organism Value: A. thaliana
  misc_feature: MA Experiment 20001248 PARAMETER Experiment Name: At_Far-red-induction_P Parameter: Plant Line Value: Columbia
  misc_feature: MA Experiment 20001248 PARAMETER Experiment Name: At_Far-red-induction_P Parameter: Timepoint (hr) Value: 4
  misc_feature: MA Experiment 20001248 PARAMETER Experiment Name: At_Far-red-induction_P Parameter: Tissue Value: Whole Plant
  misc_feature: MA Experiment ID: 20001450 Result: Down-regulated in Transcription
  misc_feature: MA Experiment 20001450 PARAMETER Experiment Name: At_Far-red-induction_P Parameter: Age (day) Value: 7
  misc_feature: MA Experiment 20001450 PARAMETER Experiment Name: At_Far-red-induction_P Parameter: Light Value: Far-red vs. White
  misc_feature: MA Experiment 20001450 PARAMETER Experiment Name: At_Far-red-induction_P Parameter: Organism Value: A. thaliana
  misc_feature: MA Experiment 20001450 PARAMETER Experiment Name: At_Far-red-induction_P Parameter: Plant Line Value: Columbia
  misc_feature: MA Experiment 20001450 PARAMETER Experiment Name: At_Far-red-induction_P Parameter: Timepoint (hr) Value: 8
  misc_feature: MA Experiment 20001450 PARAMETER Experiment Name: At_Far-red-induction_P Parameter: Tissue Value: Whole Plant
  misc_feature: MA Experiment ID: 20001560 Result: Up-regulated in Transcription
  misc_feature: MA Experiment 20001560 PARAMETER Experiment Name: At_Drought_Soil_Dry_P Parameter: Age (day) Value: 28
  misc_feature: MA Experiment 20001560 PARAMETER Experiment Name: At_Drought_Soil_Dry_P Parameter: Organism Value: A. thaliana
  misc_feature: MA Experiment 20001560 PARAMETER Experiment Name: At_Drought_Soil_Dry_P Parameter: Plant Line Value: WS
  misc_feature: MA Experiment 20001560 PARAMETER Experiment Name: At_Drought_Soil_Dry_P Parameter: Post Timepoint (hr) Value: None
  misc_feature: MA Experiment 20001560 PARAMETER Experiment Name: At_Drought_Soil_Dry_P Parameter: Post-Treatment Value: None
  misc_feature: MA Experiment 20001560 PARAMETER Experiment Name: At_Drought_Soil_Dry_P Parameter: Timepoint (day) Value: 14
  misc_feature: MA Experiment 20001560 PARAMETER Experiment Name: At_Drought_Soil_Dry_P Parameter: Treatment Value: Drought vs. No Drought
  misc_feature: MA Experiment ID: 20001757 Result: Up-regulated in Transcription
  misc_feature: MA Experiment 20001757 PARAMETER Experiment Name: At_50mM_NH4NO3_L-to-H_P Parameter: Timepoint (hr) Value: 6
  misc_feature: MA Experiment 20001757 PARAMETER Experiment Name: At_50mM_NH4NO3_L-to-H_P Parameter: Tissue Value: Leaf
  misc_feature: MA Experiment 20001757 PARAMETER Experiment Name: At_50mM_NH4NO3_L-to-H_P Parameter: Treatment Value: 50mM NH4NO3 vs 100mM Mannitol
  misc_feature: MA Experiment ID: 20001905 Result: Down-regulated in Transcription
  misc_feature: MA Experiment 20001905 PARAMETER Experiment Name: At_Drought_Reproduction_P Parameter: Age (day) Value: 40
  misc_feature: MA Experiment 20001905 PARAMETER Experiment Name: At_Drought_Reproduction_P Parameter: Organism Value: A. thaliana
  misc_feature: MA Experiment 20001905 PARAMETER Experiment Name: At_Drought_Reproduction_P Parameter: Plant Line Value: WS
  misc_feature: MA Experiment 20001905 PARAMETER Experiment Name: At_Drought_Reproduction_P Parameter: Timepoint (day) Value: 10
  misc_feature: MA Experiment 20001905 PARAMETER Experiment Name: At_Drought_Reproduction_P Parameter: Tissue Value: Rosettes
  misc_feature: MA Experiment 20001905 PARAMETER Experiment Name: At_Drought_Reproduction_P Parameter: Treatment Value: Drought vs. No Drought

SEQ ID NO: 50785 - protein, 325 aa, Arabidopsis thaliana; identical to SEQ ID NO: 29330
  peptide (1)..(325): Ceres Seq. ID no. 12601146
  misc_feature (164)..(320): Homolog of NCBI NO: 17230243 NR Description: hypothetical protein [Nostoc sp. PCC 7120]
  misc_feature (170)..(311): Homolog of NCBI NO: 37523053 NR Description: hypothetical protein gll3484 [Gloeobacter
  misc_feature (164)..(321): Homolog of NCBI NO: 16330694 NR Description: hypothetical protein [Synechocystis sp. PCC 6803]
  misc_feature (3)..(324): Homolog of NCBI NO: 30689062 NR Description: expressed protein [Arabidopsis thaliana]
  misc_feature (78)..(320): Homolog of NCBI NO: 11358410 NR Description: hypothetical protein T7H20.290 - Arabidopsis
  misc_feature (78)..(325): Homolog of NCBI NO: 18413869 NR Description: putative protein
  misc_feature (78)..(325): Homolog of NCBI NO: 34897418 NR Description: unknown protein [Oryza sativa (japonica
  misc_feature (62)..(325): Homolog of NCBI NO: 14719331 NR Description: putative 3-beta hydroxysteroid
  misc_feature (1)..(325): Homolog of NCBI NO: 7485430 NR Description: hypothetical protein At2g37660 [imported] -
  misc_feature (1)..(325): Homolog of NCBI NO: 18404496 NR Description: expressed protein
  misc_feature (164)..(320): Homolog of NCBI NO: 17230243 NR Description: hypothetical protein [Nostoc sp. PCC 7120]
  misc_feature (170)..(311): Homolog of NCBI NO: 37523053 NR Description: hypothetical protein gll3484 [Gloeobacter
  misc_feature (164)..(321): Homolog of NCBI NO: 16330694 NR Description: hypothetical protein [Synechocystis sp. PCC 6803]
  misc_feature (3)..(324): Homolog of NCBI NO: 30689062 NR Description: expressed protein [Arabidopsis thaliana]
  misc_feature (78)..(320): Homolog of NCBI NO: 11358410 NR Description: hypothetical protein T7H20.290 - Arabidopsis
  misc_feature (78)..(325): Homolog of NCBI NO: 18413869 NR Description: putative protein
  misc_feature (78)..(325): Homolog of NCBI NO: 34897418 NR Description: unknown protein [Oryza sativa (japonica
  misc_feature (62)..(325): Homolog of NCBI NO: 14719331 NR Description: putative 3-beta hydroxysteroid
  misc_feature (1)..(325): Homolog of NCBI NO: 7485430 NR Description: hypothetical protein At2g37660 [imported] -
  misc_feature (1)..(325): Homolog of NCBI NO: 18404496 NR Description: expressed protein
  misc_feature (164)..(320): Homolog of NCBI NO: 17230243 NR Description: hypothetical protein [Nostoc sp. PCC 7120]
  misc_feature (170)..(311): Homolog of NCBI NO: 37523053 NR Description: hypothetical protein gll3484 [Gloeobacter
  misc_feature (164)..(321): Homolog of NCBI NO: 16330694 NR Description: hypothetical protein [Synechocystis sp. PCC 6803]
  misc_feature (3)..(324): Homolog of NCBI NO: 30689062 NR Description: expressed protein [Arabidopsis thaliana]
  misc_feature (78)..(320): Homolog of NCBI NO: 11358410 NR Description: hypothetical protein T7H20.290 - Arabidopsis
  misc_feature (78)..(325): Homolog of NCBI NO: 18413869 NR Description: putative protein
  misc_feature (78)..(325): Homolog of NCBI NO: 34897418 NR Description: unknown protein [Oryza sativa (japonica
  misc_feature (62)..(325): Homolog of NCBI NO: 14719331 NR Description: putative 3-beta hydroxysteroid
  misc_feature (1)..(325): Homolog of NCBI NO: 7485430 NR Description: hypothetical protein At2g37660 [imported] -
  misc_feature (1)..(325): Homolog of NCBI NO: 18404496 NR Description: expressed protein
  misc_feature (164)..(320): Homolog of NCBI NO: 17230243 NR Description: hypothetical protein [Nostoc sp. PCC 7120]
  misc_feature (170)..(311): Homolog of NCBI NO: 37523053 NR Description: hypothetical protein gll3484 [Gloeobacter
  misc_feature (164)..(321): Homolog of NCBI NO: 16330694 NR Description: hypothetical protein [Synechocystis sp. PCC 6803]
  misc_feature (3)..(324): Homolog of NCBI NO: 30689062 NR Description: expressed protein [Arabidopsis thaliana]
  misc_feature (78)..(320): Homolog of NCBI NO: 11358410 NR Description: hypothetical protein T7H20.290 - Arabidopsis
  misc_feature (78)..(325): Homolog of NCBI NO: 18413869 NR Description: putative protein
  misc_feature (78)..(325): Homolog of NCBI NO: 34897418 NR Description: unknown protein [Oryza sativa (japonica
  misc_feature (62)..(325): Homolog of NCBI NO: 14719331 NR Description: putative 3-beta hydroxysteroid
  misc_feature (1)..(325): Homolog of NCBI NO: 7485430 NR Description: hypothetical protein At2g37660 [imported] -
  misc_feature (1)..(325): Homolog of NCBI NO: 18404496 NR Description: expressed protein

SEQ ID NO: 50786 - protein, 323 aa, Arabidopsis thaliana; identical to SEQ ID NO: 29331
  peptide (1)..(323): Ceres Seq. ID no. 12601147
  misc_feature (162)..(318): Homolog of NCBI NO: 17230243 NR Description: hypothetical protein [Nostoc sp. PCC 7120]
  misc_feature (168)..(309): Homolog of NCBI NO: 37523053 NR Description: hypothetical protein gll3484 [Gloeobacter
  misc_feature (162)..(319): Homolog of NCBI NO: 16330694 NR Description: hypothetical protein [Synechocystis sp. PCC 6803]
  misc_feature (1)..(322): Homolog of NCBI NO: 30689062 NR Description: expressed protein [Arabidopsis thaliana]
  misc_feature (76)..(318): Homolog of NCBI NO: 11358410 NR Description: hypothetical protein T7H20.290 - Arabidopsis
  misc_feature (76)..(323): Homolog of NCBI NO: 18413869 NR Description: putative protein
  misc_feature (76)..(323): Homolog of NCBI NO: 34897418 NR Description: unknown protein [Oryza sativa (japonica
  misc_feature (60)..(323): Homolog of NCBI NO: 14719331 NR Description: putative 3-beta hydroxysteroid
  misc_feature (1)..(323): Homolog of NCBI NO: 7485430 NR Description: hypothetical protein At2g37660 [imported] -
  misc_feature (1)..(323): Homolog of NCBI NO: 18404496 NR Description: expressed protein
  misc_feature (162)..(318): Homolog of NCBI NO: 17230243 NR Description: hypothetical protein [Nostoc sp. PCC 7120]
  misc_feature (168)..(309): Homolog of NCBI NO: 37523053 NR Description: hypothetical protein gll3484 [Gloeobacter
  misc_feature (162)..(319): Homolog of NCBI NO: 16330694 NR Description: hypothetical protein [Synechocystis sp. PCC 6803]
  misc_feature (1)..(322): Homolog of NCBI NO: 30689062 NR Description: expressed protein [Arabidopsis thaliana]
  misc_feature (76)..(318): Homolog of NCBI NO: 11358410 NR Description: hypothetical protein T7H20.290 - Arabidopsis
  misc_feature (76)..(323): Homolog of NCBI NO: 18413869 NR Description: putative protein
  misc_feature (76)..(323): Homolog of NCBI NO: 34897418 NR Description: unknown protein [Oryza sativa (japonica
  misc_feature (60)..(323): Homolog of NCBI NO: 14719331 NR Description: putative 3-beta hydroxysteroid
  misc_feature (1)..(323): Homolog of NCBI NO: 7485430 NR Description: hypothetical protein At2g37660 [imported] -
  misc_feature (1)..(323): Homolog of NCBI NO: 18404496 NR Description: expressed protein
  misc_feature (162)..(318): Homolog of NCBI NO: 17230243 NR Description: hypothetical protein [Nostoc sp. PCC 7120]
  misc_feature (168)..(309): Homolog of NCBI NO: 37523053 NR Description: hypothetical protein gll3484 [Gloeobacter
  misc_feature (162)..(319): Homolog of NCBI NO: 16330694 NR Description: hypothetical protein [Synechocystis sp. PCC 6803]
  misc_feature (1)..(322): Homolog of NCBI NO: 30689062 NR Description: expressed protein [Arabidopsis thaliana]
  misc_feature (76)..(318): Homolog of NCBI NO: 11358410 NR Description: hypothetical protein T7H20.290 - Arabidopsis
  misc_feature (76)..(323): Homolog of NCBI NO: 18413869 NR Description: putative protein
  misc_feature (76)..(323): Homolog of NCBI NO: 34897418 NR Description: unknown protein [Oryza sativa (japonica
  misc_feature (60)..(323): Homolog of NCBI NO: 14719331 NR Description: putative 3-beta hydroxysteroid
  misc_feature (1)..(323): Homolog of NCBI NO: 7485430 NR Description: hypothetical protein At2g37660 [imported] -
  misc_feature (1)..(323): Homolog of NCBI NO: 18404496 NR Description: expressed protein
  misc_feature (162)..(318): Homolog of NCBI NO: 17230243 NR Description: hypothetical protein [Nostoc sp. PCC 7120]
  misc_feature (168)..(309): Homolog of NCBI NO: 37523053 NR Description: hypothetical protein gll3484 [Gloeobacter
  misc_feature (162)..(319): Homolog of NCBI NO: 16330694 NR Description: hypothetical protein [Synechocystis sp. PCC 6803]
  misc_feature (1)..(322): Homolog of NCBI NO: 30689062 NR Description: expressed protein [Arabidopsis thaliana]
  misc_feature (76)..(318): Homolog of NCBI NO: 11358410 NR Description: hypothetical protein T7H20.290 - Arabidopsis
  misc_feature (76)..(323): Homolog of NCBI NO: 18413869 NR Description: putative protein
  misc_feature (76)..(323): Homolog of NCBI NO: 34897418 NR Description: unknown protein [Oryza sativa (japonica
  misc_feature (60)..(323): Homolog of NCBI NO: 14719331 NR Description: putative 3-beta hydroxysteroid
  misc_feature (1)..(323): Homolog of NCBI NO: 7485430 NR Description: hypothetical protein At2g37660 [imported] -
  misc_feature (1)..(323): Homolog of NCBI NO: 18404496 NR Description: expressed protein

SEQ ID NO: 50787 - protein, 322 aa, Arabidopsis thaliana; identical to SEQ ID NO: 29332
  peptide (1)..(322): Ceres Seq. ID no. 12601148
  misc_feature (161)..(317): Homolog of NCBI NO: 17230243 NR Description: hypothetical protein [Nostoc sp. PCC 7120]
  misc_feature (167)..(308): Homolog of NCBI NO: 37523053 NR Description: hypothetical protein gll3484 [Gloeobacter
  misc_feature (161)..(318): Homolog of NCBI NO: 16330694 NR Description: hypothetical protein [Synechocystis sp. PCC 6803]
  misc_feature (1)..(321): Homolog of NCBI NO: 30689062 NR Description: expressed protein [Arabidopsis thaliana]
  misc_feature (75)..(317): Homolog of NCBI NO: 11358410 NR Description: hypothetical protein T7H20.290 - Arabidopsis
  misc_feature (75)..(322): Homolog of NCBI NO: 18413869 NR Description: putative protein
  misc_feature (75)..(322): Homolog of NCBI NO: 34897418 NR Description: unknown protein [Oryza sativa (japonica
  misc_feature (59)..(322): Homolog of NCBI NO: 14719331 NR Description: putative 3-beta hydroxysteroid
  misc_feature (1)..(322): Homolog of NCBI NO: 7485430 NR Description: hypothetical protein At2g37660 [imported] -
  misc_feature (1)..(322): Homolog of NCBI NO: 18404496 NR Description: expressed protein
  misc_feature (161)..(317): Homolog of NCBI NO: 17230243 NR Description: hypothetical protein [Nostoc sp. PCC 7120]
  misc_feature (167)..(308): Homolog of NCBI NO: 37523053 NR Description: hypothetical protein gll3484 [Gloeobacter
  misc_feature (161)..(318): Homolog of NCBI NO: 16330694 NR Description: hypothetical protein [Synechocystis sp. PCC 6803]
  misc_feature (1)..(321): Homolog of NCBI NO: 30689062 NR Description: expressed protein [Arabidopsis thaliana]
  misc_feature (75)..(317): Homolog of NCBI NO: 11358410 NR Description: hypothetical protein T7H20.290 - Arabidopsis
  misc_feature (75)..(322): Homolog of NCBI NO: 18413869 NR Description: putative protein
  misc_feature (75)..(322): Homolog of NCBI NO: 34897418 NR Description: unknown protein [Oryza sativa (japonica
  misc_feature (59)..(322): Homolog of NCBI NO: 14719331 NR Description: putative 3-beta hydroxysteroid
  misc_feature (1)..(322): Homolog of NCBI NO: 7485430 NR Description: hypothetical protein At2g37660 [imported] -
  misc_feature (1)..(322): Homolog of NCBI NO: 18404496 NR Description: expressed protein
  misc_feature (161)..(317): Homolog of NCBI NO: 17230243 NR Description: hypothetical protein [Nostoc sp. PCC 7120]
  misc_feature (167)..(308): Homolog of NCBI NO: 37523053 NR Description: hypothetical protein gll3484 [Gloeobacter
  misc_feature (161)..(318): Homolog of NCBI NO: 16330694 NR Description: hypothetical protein [Synechocystis sp. PCC 6803]
  misc_feature (1)..(321): Homolog of NCBI NO: 30689062 NR Description: expressed protein [Arabidopsis thaliana]
  misc_feature (75)..(317): Homolog of NCBI NO: 11358410 NR Description: hypothetical protein T7H20.290 - Arabidopsis
  misc_feature (75)..(322): Homolog of NCBI NO: 18413869 NR Description: putative protein
  misc_feature (75)..(322): Homolog of NCBI NO: 34897418 NR Description: unknown protein [Oryza sativa (japonica
  misc_feature (59)..(322): Homolog of NCBI NO: 14719331 NR Description: putative 3-beta hydroxysteroid
  misc_feature (1)..(322): Homolog of NCBI NO: 7485430 NR Description: hypothetical protein At2g37660 [imported] -
  misc_feature (1)..(322): Homolog of NCBI NO: 18404496 NR Description: expressed protein
  misc_feature (161)..(317): Homolog of NCBI NO: 17230243 NR Description: hypothetical protein [Nostoc sp. PCC 7120]
  misc_feature (167)..(308): Homolog of NCBI NO: 37523053 NR Description: hypothetical protein gll3484 [Gloeobacter
  misc_feature (161)..(318): Homolog of NCBI NO: 16330694 NR Description: hypothetical protein [Synechocystis sp. PCC 6803]
  misc_feature (1)..(321): Homolog of NCBI NO: 30689062 NR Description: expressed protein [Arabidopsis thaliana]
  misc_feature (75)..(317): Homolog of NCBI NO: 11358410 NR Description: hypothetical protein T7H20.290 - Arabidopsis
  misc_feature (75)..(322): Homolog of NCBI NO: 18413869 NR Description: putative protein
  misc_feature (75)..(322): Homolog of NCBI NO: 34897418 NR Description: unknown protein [Oryza sativa (japonica
  misc_feature (59)..(322): Homolog of NCBI NO: 14719331 NR Description: putative 3-beta hydroxysteroid
  misc_feature (1)..(322): Homolog of NCBI NO: 7485430 NR Description: hypothetical protein At2g37660 [imported] -
  misc_feature (1)..(322): Homolog of NCBI NO: 18404496 NR Description: expressed protein

SEQ ID NO: 50788 - DNA, 1513 bp, Arabidopsis thaliana
  misc_feature (1)..(1513): Ceres Seq. ID no. 13575326
  misc_feature: MA Experiment ID: 20000180 Result: Up-regulated in Transcription
  misc_feature: MA Experiment 20000180 PARAMETER Experiment Name: At_Germinating_Seeds_P Parameter: Age (hr) Value: 24 vs. 0
  misc_feature: MA Experiment 20000180 PARAMETER Experiment Name: At_Germinating_Seeds_P Parameter: Tissue Value: Germinating Seeds
  misc_feature: MA Experiment ID: 20000265 Result: Up-regulated in Transcription
  misc_feature: MA Experiment 20000265 PARAMETER Experiment Name: At_Open_Flower_P Parameter: Age (day) Value: 21
  misc_feature: MA Experiment 20000265 PARAMETER Experiment Name: At_Open_Flower_P Parameter: Plant Line Value: WS
  misc_feature: MA Experiment 20000265 PARAMETER Experiment Name: At_Open_Flower_P Parameter: Tissue Value: Closed Flower vs. Whole Plant
  misc_feature: MA Experiment ID: 20000286 Result: Up-regulated in Transcription
  misc_feature: MA Experiment 20000286 PARAMETER Experiment Name: At_Open_Flower_P Parameter: Age (day) Value: 21
  misc_feature: MA Experiment 20000286 PARAMETER Experiment Name: At_Open_Flower_P Parameter: Plant Line Value: WS
  misc_feature: MA Experiment 20000286 PARAMETER Experiment Name: At_Open_Flower_P Parameter: Tissue Value: Half Open vs. Whole Plant
  misc_feature: MA Experiment ID: 20000437 Result: Down-regulated in Transcription
  misc_feature: MA Experiment 20000437 PARAMETER Experiment Name: At_Drought_P Parameter: Age (day) Value: 8
  misc_feature: MA Experiment 20000437 PARAMETER Experiment Name: At_Drought_P Parameter: Organism Value: A. thaliana
  misc_feature: MA Experiment 20000437 PARAMETER Experiment Name: At_Drought_P Parameter: Plant Line Value: WS
  misc_feature: MA Experiment 20000437 PARAMETER Experiment Name: At_Drought_P Parameter: Timepoint (hr) Value: 24
  misc_feature: MA Experiment 20000437 PARAMETER Experiment Name: At_Drought_P Parameter: Tissue Value: Whole Plant
  misc_feature: MA Experiment 20000437 PARAMETER Experiment Name: At_Drought_P Parameter: Treatment Value: Drought vs. No Drought
  misc_feature: MA Experiment ID: 20001248 Result: Down-regulated in Transcription
  misc_feature: MA Experiment 20001248 PARAMETER Experiment Name: At_Far-red-induction_P Parameter: Age (day) Value: 7
  misc_feature: MA Experiment 20001248 PARAMETER Experiment Name: At_Far-red-induction_P Parameter: Light Value: Far-red vs. White
  misc_feature: MA Experiment 20001248 PARAMETER Experiment Name: At_Far-red-induction_P Parameter: Organism Value: A. thaliana
  misc_feature: MA Experiment 20001248 PARAMETER Experiment Name: At_Far-red-induction_P Parameter: Plant Line Value: Columbia
  misc_feature: MA Experiment 20001248 PARAMETER Experiment Name: At_Far-red-induction_P Parameter: Timepoint (hr) Value: 4
  misc_feature: MA Experiment 20001248 PARAMETER Experiment Name: At_Far-red-induction_P Parameter: Tissue Value: Whole Plant
aacttcacattctccgatattctctctctctatcaatctctcactctcaaactttctacatacctgaagaaaaaaataatctacgaattcgagccaaaaagatcgaaactttttaatctatgggtgcttcagggaaatgggtcaagtccattatcggtctcaagaagctagagaaggatgaaatcgaaaagggtaatgggaaaaacaagaaatggaagctatggaggactacttcagtagattcatggaagggttttcgaggaaaacatcggtctgattcagacggtgttgattcttctactgtttactctgctgctgttgctactgttcttagagctcctcctaaagatttcaaagctgttagagaagaatgggctgctattagaatccaaaccgcttttcgtggattcttggcgagaagagcgttgagggcattgaaagggatagtgaggttacaagctttagtgagaggaagacaagttaggaaacaagcagctgttacattgagatgcatgcaagctttggtgagagtacaagctcgtgttagagctcgtcgtgtgaggatgactgttgaaggacaagctgttcaaaagcttttagatgaacatagaaccaaatctgatctcttgaaagaagtcgaggaagggtggtgtgataggaaaggtactgtggatgatattaagtcaaagttgcagcagagacaagaaggtgcttttaagagggaacgtgctttggcttatgctcttgctcaaaagcaatggaggtcaactactagctcaaaccttaagacgaatagttcgatttcgtatcttaaaagtcaagagtttgataagaatagttggggatggagttggttggagcgttggatggctgctaggccatgggagactagacttatggacactgttgataccgctgccacgcctcctcctctgcctcataaacatttgaaatcaccggaaactgcggatgttgttcaagttagaagaaacaatgtgaccactagagtatctgcaaaacctcctcctcatatgctgtcttcaagtcctggttatgagtttaacgagagctcaggttcatcctcgatttgtacttcaactacgcctgtttctggaaaaactggacttgtttcagataactctagcagtcaagcaaaaaagcacaagccaagttacatgagcttgactgaatcgacaaaggctaagcgaagaactaaccgcggtctcaggcaatctatggatgagtttcagtttatgaagaactctggaatgtttacaggggaattgaagactagtccttcctcagatccttttgttagtttctccaaaccactcggtgttcctactcgattcgagaagccgagaggttaaatgtgaccttgttagattggagtttcaacagcttgttgttgtcttgtgtgttgtgagatatctgtgtatgttgttaattgttctttttcctttggaactacattggagttttgaatttaaatataaatttcagtcttgctttt

SEQ ID NO: 50789 - protein, 416 aa, Arabidopsis thaliana
  peptide (1)..(416): Ceres Seq. ID no. 13575327
  misc_feature (84)..(104): Pfam Name: IQ calmodulin-binding motif Pfam Description: IQ calmodulin-binding motif
  misc_feature (83)..(391): Homolog of NCBI NO: 15231175 NR Description: expressed protein [Arabidopsis thaliana]
  misc_feature (64)..(414): Homolog of NCBI NO: 15982840 NR Description: AT5g03040/F15A17_70 [Arabidopsis thaliana]
  misc_feature (1)..(243): Homolog of NCBI NO: 15220114 NR Description: hypothetical protein [Arabidopsis thaliana]
  misc_feature (1)..(391): Homolog of NCBI NO: 11994738 NR Description: contains similarity to SF16
  misc_feature (1)..(394): Homolog of NCBI NO: 15233296 NR Description: hypothetical protein [Arabidopsis thaliana]
  misc_feature (1)..(332): Homolog of NCBI NO: 15218562 NR Description: expressed protein [Arabidopsis thaliana]
  misc_feature (1)..(362): Homolog of NCBI NO: 34910454 NR Description: P0456F08.2 [Oryza sativa (japonica
  misc_feature (15)..(302): Homolog of NCBI NO: 34903518 NR Description: P0001B06.11 [Oryza sativa (japonica
  misc_feature (114)..(416): Homolog of NCBI NO: 7487190 NR Description: hypothetical protein T19L18.1 - Arabidopsis
  misc_feature (1)..(416): Homolog of NCBI NO: 15225258 NR Description: SF16 protein {Helianthus annuus} -related
MGASGKWVKSIIGLKKLEKDEIEKGNGKNKKWKLWRTTSVDSWKGFRGKHRSDSDGVDSSTVYSAAVATVLRAPPKDFKAVREEWAAIRIQTAFRGFLARRALRALKGIVRLQALVRGRQVRKQAAVTLRCMQALVRVQARVRARRVRMTVEGQAVQKLLDEHRTKSDLLKEVEEGWCDRKGTVDDIKSKLQQRQEGAFKRERALAYALAQKQWRSTTSSNLKTNSSISYLKSQEFDKNSWGWSWLERWMAARPWETRLMDTVDTAATPPPLPHKHLKSPETADVVQVRRNNVTTRVSAKPPPHMLSSSPGYEFNESSGSSSICTSTTPVSGKTGLVSDNSSSQAKKHKPSYMSLTESTKAKRRTNRGLRQSMDEFQFMKNSGMFTGELKTSPSSDPFVSFSKPLGVPTRFEKPRG

SEQ ID NO: 50790 - protein, 285 aa, Arabidopsis thaliana
  peptide (1)..(285): Ceres Seq. ID no. 13575328
  misc_feature (1)..(260): Homolog of NCBI NO: 15231175 NR Description: expressed protein [Arabidopsis thaliana]
  misc_feature (1)..(283): Homolog of NCBI NO: 15982840 NR Description: AT5g03040/F15A17_70 [Arabidopsis thaliana]
  misc_feature (1)..(112): Homolog of NCBI NO: 15220114 NR Description: hypothetical protein [Arabidopsis thaliana]
  misc_feature (1)..(260): Homolog of NCBI NO: 11994738 NR Description: contains similarity to SF16
  misc_feature (1)..(263): Homolog of NCBI NO: 15233296 NR Description: hypothetical protein [Arabidopsis thaliana]
  misc_feature (1)..(201): Homolog of NCBI NO: 15218562 NR Description: expressed protein [Arabidopsis thaliana]
  misc_feature (1)..(231): Homolog of NCBI NO: 34910454 NR Description: P0456F08.2 [Oryza sativa (japonica
  misc_feature (1)..(171): Homolog of NCBI NO: 34903518 NR Description: P0001B06.11 [Oryza sativa (japonica
  misc_feature (1)..(285): Homolog of NCBI NO: 7487190 NR Description: hypothetical protein T19L18.1 - Arabidopsis
  misc_feature (1)..(285): Homolog of NCBI NO: 15225258 NR Description: SF16 protein {Helianthus annuus} -related
MQALVRVQARVRARRVRMTVEGQAVQKLLDEHRTKSDLLKEVEEGWCDRKGTVDDIKSKLQQRQEGAFKRERALAYALAQKQWRSTTSSNLKTNSSISYLKSQEFDKNSWGWSWLERWMAARPWETRLMDTVDTAATPPPLPHKHLKSPETADVVQVRRNNVTTRVSAKPPPHMLSSSPGYEFNESSGSSSICTSTTPVSGKTGLVSDNSSSQAKKHKPSYMSLTESTKAKRRTNRGLRQSMDEFQFMKNSGMFTGELKTSPSSDPFVSFSKPLGVPTRFEKPRG

SEQ ID NO: 50791 - protein, 268 aa, Arabidopsis thaliana
  peptide (1)..(268): Ceres Seq. ID no. 13575329
  misc_feature (1)..(243): Homolog of NCBI NO: 15231175 NR Description: expressed protein [Arabidopsis thaliana]
  misc_feature (1)..(266): Homolog of NCBI NO: 15982840 NR Description: AT5g03040/F15A17_70 [Arabidopsis thaliana]
  misc_feature (1)..(95): Homolog of NCBI NO: 15220114 NR Description: hypothetical protein [Arabidopsis thaliana]
  misc_feature (1)..(243): Homolog of NCBI NO: 11994738 NR Description: contains similarity to SF16
  misc_feature (1)..(246): Homolog of NCBI NO: 15233296 NR Description: hypothetical protein [Arabidopsis thaliana]
  misc_feature (1)..(184): Homolog of NCBI NO: 15218562 NR Description: expressed protein [Arabidopsis thaliana]
  misc_feature (1)..(214): Homolog of NCBI NO: 34910454 NR Description: P0456F08.2 [Oryza sativa (japonica
  misc_feature (1)..(154): Homolog of NCBI NO: 34903518 NR Description: P0001B06.11 [Oryza sativa (japonica
  misc_feature (1)..(268): Homolog of NCBI NO: 7487190 NR Description: hypothetical protein T19L18.1 - Arabidopsis
  misc_feature (1)..(268): Homolog of NCBI NO: 15225258 NR Description: SF16 protein {Helianthus annuus} -related
MTVEGQAVQKLLDEHRTKSDLLKEVEEGWCDRKGTVDDIKSKLQQRQEGAFKRERALAYALAQKQWRSTTSSNLKTNSSISYLKSQEFDKNSWGWSWLERWMAARPWETRLMDTVDTAATPPPLPHKHLKSPETADVVQVRRNNVTTRVSAKPPPHMLSSSPGYEFNESSGSSSICTSTTPVSGKTGLVSDNSSSQAKKHKPSYMSLTESTKAKRRTNRGLRQSMDEFQFMKNSGMFTGELKTSPSSDPFVSFSKPLGVPTRFEKPRG

SEQ ID NO: 50792 - DNA, 724 bp, Arabidopsis thaliana
  misc_feature (1)..(724): Ceres Seq. ID no. 13591447
  misc_feature: MA Experiment ID: 20000173 Result: Down-regulated in Transcription
  misc_feature: MA Experiment 20000173 PARAMETER Experiment Name: At_42deg_Heat_P Parameter: Age (day) Value: 14
  misc_feature: MA Experiment 20000173 PARAMETER Experiment Name: At_42deg_Heat_P Parameter: Organism Value: A. thaliana
  misc_feature: MA Experiment 20000173 PARAMETER Experiment Name: At_42deg_Heat_P Parameter: Plant Line Value: WS
  misc_feature: MA Experiment 20000173 PARAMETER Experiment Name: At_42deg_Heat_P Parameter: Temperature (deg C) Value: 42 vs. 22
  misc_feature: MA Experiment 20000173 PARAMETER Experiment Name: At_42deg_Heat_P Parameter: Timepoint (hr) Value: 6
  misc_feature: MA Experiment 20000173 PARAMETER Experiment Name: At_42deg_Heat_P Parameter: Tissue Value: Aerial
  misc_feature: MA Experiment ID: 20000180 Result: Up-regulated in Transcription
  misc_feature: MA Experiment 20000180 PARAMETER Experiment Name: At_Germinating_Seeds_P Parameter: Age (hr) Value: 24 vs. 0
  misc_feature: MA Experiment 20000180 PARAMETER Experiment Name: At_Germinating_Seeds_P Parameter: Tissue Value: Germinating Seeds
  misc_feature: MA Experiment ID: 20000185 Result: Down-regulated in Transcription
  misc_feature: MA Experiment 20000185 PARAMETER Experiment Name: At_Roots__P Parameter: Age (day) Value: 7 vs. 21
  misc_feature: MA Experiment 20000185 PARAMETER Experiment Name: At_Roots__P Parameter: Organism Value: A. thaliana
  misc_feature: MA Experiment 20000185 PARAMETER Experiment Name: At_Roots__P Parameter: Tissue Value: Roots vs. Whole Plant
  misc_feature: MA Experiment ID: 20000234 Result: Up-regulated in Transcription
  misc_feature: MA Experiment 20000234 PARAMETER Experiment Name: At_Siliques_P Parameter: Age (day) Value: 21
  misc_feature: MA Experiment 20000234 PARAMETER Experiment Name: At_Siliques_P Parameter: Organism Value: A. thaliana
  misc_feature: MA Experiment 20000234 PARAMETER Experiment Name: At_Siliques_P Parameter: Plant Line Value: WS
  misc_feature: MA Experiment 20000234 PARAMETER Experiment Name: At_Siliques_P Parameter: Tissue Value: Less Than 5mm Siliques vs. Whole Plant
  misc_feature: MA Experiment ID: 20000235 Result: Up-regulated in Transcription
  misc_feature: MA Experiment 20000235 PARAMETER Experiment Name: At_Siliques_P Parameter: Age (day) Value: 21
  misc_feature: MA Experiment 20000235 PARAMETER Experiment Name: At_Siliques_P Parameter: Organism Value: A. thaliana
  misc_feature: MA Experiment 20000235 PARAMETER Experiment Name: At_Siliques_P Parameter: Plant Line Value: WS
  misc_feature: MA Experiment 20000235 PARAMETER Experiment Name: At_Siliques_P Parameter: Tissue Value: 5-10mm Siliques vs. Whole Plant
  misc_feature: MA Experiment ID: 20000436 Result: Down-regulated in Transcription
  misc_feature: MA Experiment 20000436 PARAMETER Experiment Name: At_Drought_P Parameter: Age (day) Value: 7
  misc_feature: MA Experiment 20000436 PARAMETER Experiment Name: At_Drought_P Parameter: Organism Value: A. thaliana
  misc_feature: MA Experiment 20000436 PARAMETER Experiment Name: At_Drought_P Parameter: Plant Line Value: WS
  misc_feature: MA Experiment 20000436 PARAMETER Experiment Name: At_Drought_P Parameter: Timepoint (hr) Value: 12
  misc_feature: MA Experiment 20000436 PARAMETER Experiment Name: At_Drought_P Parameter: Tissue Value: Whole Plant
  misc_feature: MA Experiment 20000436 PARAMETER Experiment Name: At_Drought_P Parameter: Treatment Value: Drought vs. No Drought
  misc_feature: MA Experiment ID: 20000437 Result: Down-regulated in Transcription
  misc_feature: MA Experiment 20000437 PARAMETER Experiment Name: At_Drought_P Parameter: Age (day) Value: 8
  misc_feature: MA Experiment 20000437 PARAMETER Experiment Name: At_Drought_P Parameter: Organism Value: A. thaliana
  misc_feature: MA Experiment 20000437 PARAMETER Experiment Name: At_Drought_P Parameter: Plant Line Value: WS
  misc_feature: MA Experiment 20000437 PARAMETER Experiment Name: At_Drought_P Parameter: Timepoint (hr) Value: 24
  misc_feature: MA Experiment 20000437 PARAMETER Experiment Name: At_Drought_P Parameter: Tissue Value: Whole Plant
  misc_feature: MA Experiment 20000437 PARAMETER Experiment Name: At_Drought_P Parameter: Treatment Value: Drought vs. No Drought
  misc_feature: MA Experiment ID: 20000438 Result: Up-regulated in Transcription
  misc_feature: MA Experiment 20000438 PARAMETER Experiment Name: At_Shoots__P Parameter: Age (day) Value: 14
  misc_feature: MA Experiment 20000438 PARAMETER Experiment Name: At_Shoots__P Parameter: Tissue Value: Shoots vs. Whole Plant
  misc_feature: MA Experiment ID: 20000495 Result: Down-regulated in Transcription
  misc_feature: MA Experiment 20000495 PARAMETER Experiment Name: At_Guard_Cells_P Parameter: Harvest Date Value: 8/2/2002
  misc_feature: MA Experiment 20000495 PARAMETER Experiment Name: At_Guard_Cells_P Parameter: Organism Value: A. thaliana
  misc_feature: MA Experiment 20000495 PARAMETER Experiment Name: At_Guard_Cells_P Parameter: Tissue Value: Guard Cells vs. Leaves
  misc_feature: MA Experiment ID: 20000794 Result: Down-regulated in Transcription
  misc_feature: MA Experiment 20000794 PARAMETER Experiment Name: At_Petals_P Parameter: Age (day) Value: 23-25 days
  misc_feature: MA Experiment 20000794 PARAMETER Experiment Name: At_Petals_P Parameter: Plant Line Value: WS
  misc_feature: MA Experiment 20000794 PARAMETER Experiment Name: At_Petals_P Parameter: Tissue Value: Petals vs. Whole plant
  misc_feature: MA Experiment ID: 20001555 Result: Down-regulated in Transcription
  misc_feature: MA Experiment 20001555 PARAMETER Experiment Name: At_Drought_Soil_Dry_P Parameter: Age (day) Value: 24
  misc_feature: MA Experiment 20001555 PARAMETER Experiment Name: At_Drought_Soil_Dry_P Parameter: Organism Value: A. thaliana
  misc_feature: MA Experiment 20001555 PARAMETER Experiment Name: At_Drought_Soil_Dry_P Parameter: Plant Line Value: WS
  misc_feature: MA Experiment 20001555 PARAMETER Experiment Name: At_Drought_Soil_Dry_P Parameter: Post Timepoint (hr) Value: None
  misc_feature: MA Experiment 20001555 PARAMETER Experiment Name: At_Drought_Soil_Dry_P Parameter: Post-Treatment Value: None
  misc_feature: MA Experiment 20001555 PARAMETER Experiment Name: At_Drought_Soil_Dry_P Parameter: Timepoint (day) Value: 10
  misc_feature: MA Experiment 20001555 PARAMETER Experiment Name: At_Drought_Soil_Dry_P Parameter: Treatment Value: Drought vs. No Drought
  misc_feature: MA Experiment ID: 20001757 Result: Up-regulated in Transcription
  misc_feature: MA Experiment 20001757 PARAMETER Experiment Name: At_50mM_NH4NO3_L-to-H_P Parameter: Timepoint (hr) Value: 6
  misc_feature: MA Experiment 20001757 PARAMETER Experiment Name: At_50mM_NH4NO3_L-to-H_P Parameter: Tissue Value: Leaf
  misc_feature: MA Experiment 20001757 PARAMETER Experiment Name: At_50mM_NH4NO3_L-to-H_P Parameter: Treatment Value: 50mM NH4NO3 vs 100mM Mannitol
  misc_feature: MA Experiment ID: 20001904 Result: Down-regulated in Transcription
  misc_feature: MA Experiment 20001904 PARAMETER Experiment Name: At_Drought_Reproduction_P Parameter: Age (day) Value: 37
  misc_feature: MA Experiment 20001904 PARAMETER Experiment Name: At_Drought_Reproduction_P Parameter: Organism Value: A. thaliana
  misc_feature: MA Experiment 20001904 PARAMETER Experiment Name: At_Drought_Reproduction_P Parameter: Plant Line Value: WS
  misc_feature: MA Experiment 20001904 PARAMETER Experiment Name: At_Drought_Reproduction_P Parameter: Timepoint (day) Value: 7
  misc_feature: MA Experiment 20001904 PARAMETER Experiment Name: At_Drought_Reproduction_P Parameter: Tissue Value: Rosettes
  misc_feature: MA Experiment 20001904 PARAMETER Experiment Name: At_Drought_Reproduction_P Parameter: Treatment Value: Drought vs. No Drought
  misc_feature: MA Experiment ID: 20001905 Result: Down-regulated in Transcription
  misc_feature: MA Experiment 20001905 PARAMETER Experiment Name: At_Drought_Reproduction_P Parameter: Age (day) Value: 40
  misc_feature: MA Experiment 20001905 PARAMETER Experiment Name: At_Drought_Reproduction_P Parameter: Organism Value: A. thaliana
  misc_feature: MA Experiment 20001905 PARAMETER Experiment Name: At_Drought_Reproduction_P Parameter: Plant Line Value: WS
  misc_feature: MA Experiment 20001905 PARAMETER Experiment Name: At_Drought_Reproduction_P Parameter: Timepoint (day) Value: 10
  misc_feature: MA Experiment 20001905 PARAMETER Experiment Name: At_Drought_Reproduction_P Parameter: Tissue Value: Rosettes
  misc_feature: MA Experiment 20001905 PARAMETER Experiment Name: At_Drought_Reproduction_P Parameter: Treatment Value: Drought vs. No Drought
  misc_feature: MA Experiment ID: 20001906 Result: Down-regulated in Transcription
  misc_feature: MA Experiment 20001906 PARAMETER Experiment Name: At_Drought_Reproduction_P Parameter: Age (day) Value: 35
  misc_feature: MA Experiment 20001906 PARAMETER Experiment Name: At_Drought_Reproduction_P Parameter: Organism Value: A. thaliana
  misc_feature: MA Experiment 20001906 PARAMETER Experiment Name: At_Drought_Reproduction_P Parameter: Plant Line Value: WS
  misc_feature: MA Experiment 20001906 PARAMETER Experiment Name: At_Drought_Reproduction_P Parameter: Timepoint (day) Value: 5
  misc_feature: MA Experiment 20001906 PARAMETER Experiment Name: At_Drought_Reproduction_P Parameter: Tissue Value: Siliques
  misc_feature: MA Experiment 20001906 PARAMETER Experiment Name: At_Drought_Reproduction_P Parameter: Treatment Value: Drought vs. No Drought
gaacggataagtgttatcctcatctagtcatcttcaccctctaactcaccgagaaagaaaagtaaagagagtttggtgtcactatgaacattgccattcataattaccgtcactcaaaattcatcgtaaatcctcacatagacaagacttttgcaaggactcgacaggcaagatcaaataatattacattcatgacaagtactcatggaagaagaagaacgatgggactttgtttggtaagagcaagtgccgagaccggagaagaagaatccgacgatcaaaacaagcctgagagaagaagtttcttgagcttagcagaagctggtctagtcgaaatctcaggccttggtgcacacgagaagtttctctgtcgactaacgatatcatcattgaatttgctaagagtgatatcagagcaagaaggatgttcaatagaagagttgaatgctggcaaaatatgtgattggttccttaaggacaagctgaagagagagcataacattgaatctgctgttcttcaatgggatgatcccgattttcctttttaaatatccttattttttacattcaagccacacaaaagtatgatcattaacaaggtgaatatgtatcgtaagtcttaattagtctattgtggtctgactaggaaaatataaaccttttgttaagtcctacaataaaacgtattcaacaattccaaatattatccatgactgaaatacat

SEQ ID NO: 50793 - protein, 154 aa, Arabidopsis thaliana
  peptide (1)..(154): Ceres Seq. ID no. 13591448
  misc_feature (72)..(147): Homolog of NCBI NO: 16332247 NR Description: unknown protein [Synechocystis sp. PCC 6803]
  misc_feature (74)..(147): Homolog of NCBI NO: 23129621 NR Description: hypothetical protein [Nostoc punctiforme]
  misc_feature (74)..(147): Homolog of NCBI NO: 17229982 NR Description: hypothetical protein [Nostoc sp. PCC 7120]
  misc_feature (60)..(152): Homolog of NCBI NO: 38344806 NR Description: OSJNBa0043L09.26 [Oryza sativa (japonica
  misc_feature (1)..(154): Homolog of NCBI NO: 22328854 NR Description: receptor-interacting protein (PRIP) -related
MNIAIHNYRHSKFIVNPHIDKTFARTRQARSNNITFMTSTHGRRRTMGLCLVRASAETGEEESDDQNKPERRSFLSLAEAGLVEISGLGAHEKFLCRLTISSLNLLRVISEQEGCSIEELNAGKICDWFLKDKLKREHNIESAVLQWDDPDFPF

SEQ ID NO: 50794 - protein, 118 aa, Arabidopsis thaliana
  peptide (1)..(118): Ceres Seq. ID no. 13591449
  misc_feature (36)..(111): Homolog of NCBI NO: 16332247 NR Description: unknown protein [Synechocystis sp. PCC 6803]
  misc_feature (38)..(111): Homolog of NCBI NO: 23129621 NR Description: hypothetical protein [Nostoc punctiforme]
  misc_feature (38)..(111): Homolog of NCBI NO: 17229982 NR Description: hypothetical protein [Nostoc sp. PCC 7120]
  misc_feature (24)..(116): Homolog of NCBI NO: 38344806 NR Description: OSJNBa0043L09.26 [Oryza sativa (japonica
  misc_feature (1)..(118): Homolog of NCBI NO: 22328854 NR Description: receptor-interacting protein (PRIP) -related
MTSTHGRRRTMGLCLVRASAETGEEESDDQNKPERRSFLSLAEAGLVEISGLGAHEKFLCRLTISSLNLLRVISEQEGCSIEELNAGKICDWFLKDKLKREHNIESAVLQWDDPDFPF

SEQ ID NO: 50795 - protein, 108 aa, Arabidopsis thaliana
  peptide (1)..(108): Ceres Seq. ID no. 13591450
  misc_feature (26)..(101): Homolog of NCBI NO: 16332247 NR Description: unknown protein [Synechocystis sp. PCC 6803]
  misc_feature (28)..(101): Homolog of NCBI NO: 23129621 NR Description: hypothetical protein [Nostoc punctiforme]
  misc_feature (28)..(101): Homolog of NCBI NO: 17229982 NR Description: hypothetical protein [Nostoc sp. PCC 7120]
  misc_feature (14)..(106): Homolog of NCBI NO: 38344806 NR Description: OSJNBa0043L09.26 [Oryza sativa (japonica
  misc_feature (1)..(108): Homolog of NCBI NO: 22328854 NR Description: receptor-interacting protein (PRIP) -related
MGLCLVRASAETGEEESDDQNKPERRSFLSLAEAGLVEISGLGAHEKFLCRLTISSLNLLRVISEQEGCSIEELNAGKICDWFLKDKLKREHNIESAVLQWDDPDFPF

SEQ ID NO: 50796 - DNA, 860 bp, Arabidopsis thaliana; identical to SEQ ID NO: 26402
  misc_feature (1)..(860): Ceres Seq. ID no. 13505019
  misc_feature: MA Experiment ID: 108488 Result: Down-regulated in Transcription
  misc_feature: MA Experiment ID: 108576 Result: Down-regulated in Transcription
  misc_feature: MA Experiment 108576 PARAMETER Experiment Name: At_42deg_Heat_cDNA_P Parameter: Temperature (deg C) Value: 42 vs. 22
  misc_feature: MA Experiment 108576 PARAMETER Experiment Name: At_42deg_Heat_cDNA_P Parameter: Timepoint (hr) Value: 1
  misc_feature: MA Experiment 108576 PARAMETER Experiment Name: At_42deg_Heat_cDNA_P Parameter: Tissue Value: Aerial
  misc_feature: MA Experiment ID: 108577 Result: Down-regulated in Transcription
  misc_feature: MA Experiment 108577 PARAMETER Experiment Name: At_42deg_Heat_cDNA_P Parameter: Temperature (deg C) Value: 42 vs. 22
  misc_feature: MA Experiment 108577 PARAMETER Experiment Name: At_42deg_Heat_cDNA_P Parameter: Timepoint (hr) Value: 6
  misc_feature: MA Experiment 108577 PARAMETER Experiment Name: At_42deg_Heat_cDNA_P Parameter: Tissue Value: Aerial
  misc_feature: MA Experiment ID: 20000111 Result: Down-regulated in Transcription
  misc_feature: MA Experiment 20000111 PARAMETER Experiment Name: At_42deg_Heat_cDNA_P Parameter: Temperature (deg C) Value: 42 vs. 22
  misc_feature: MA Experiment 20000111 PARAMETER Experiment Name: At_42deg_Heat_cDNA_P Parameter: Timepoint (hr) Value: 6
  misc_feature: MA Experiment 20000111 PARAMETER Experiment Name: At_42deg_Heat_cDNA_P Parameter: Tissue Value: Aerial
  misc_feature: MA Experiment ID: 20000113 Result: Down-regulated in Transcription
  misc_feature: MA Experiment 20000113 PARAMETER Experiment Name: At_42deg_Heat_cDNA_P Parameter: Temperature (deg C) Value: 42 vs. 22
  misc_feature: MA Experiment 20000113 PARAMETER Experiment Name: At_42deg_Heat_cDNA_P Parameter: Timepoint (hr) Value: 8
  misc_feature: MA Experiment 20000113 PARAMETER Experiment Name: At_42deg_Heat_cDNA_P Parameter: Tissue Value: Aerial
  misc_feature: MA Experiment ID: 20000144 Result: Down-regulated in Transcription
  misc_feature: MA Experiment 20000144 PARAMETER Experiment Name: At_42deg_Heat_cDNA_P Parameter: Temperature (deg C) Value: 42 vs. 22
  misc_feature: MA Experiment 20000144 PARAMETER Experiment Name: At_42deg_Heat_cDNA_P Parameter: Timepoint (hr) Value: 1
  misc_feature: MA Experiment 20000144 PARAMETER Experiment Name: At_42deg_Heat_cDNA_P Parameter: Tissue Value: Aerial
  misc_feature: MA Experiment ID: 20000224 Result: Down-regulated in Transcription
  misc_feature: MA Experiment ID: 20000227 Result: Down-regulated in Transcription
  misc_feature: MA Experiment 20000227 PARAMETER Experiment Name: At_Root-Tips-vs-Tops_P Parameter: Tissue Value: Root Tips vs. Root Tops

SEQ ID NO: 50797 - protein, 136 aa, Arabidopsis thaliana; identical to SEQ ID NO: 26403
  peptide (1)..(136): Ceres Seq. ID no. 13505020
  misc_feature (17)..(135): Pfam Name: Core histone H2A/H2B/H3/H4 Pfam Description: Core histone H2A/H2B/H3/H4
  misc_feature (17)..(135): Pfam Name: Core histone H2A/H2B/H3/H4 Pfam Description: Core histone H2A/H2B/H3/H4
  misc_feature (1)..(136): Homolog of NCBI NO: 34876394 NR Description: similar to histone protein Hist2h3c1 [Rattus
  misc_feature (1)..(136): Homolog of NCBI NO: 30061401 NR Description: histone 2, H3ca1 [Mus musculus]
  misc_feature (1)..(136): Homolog of NCBI NO: 7305139 NR Description: histone 1, H3f; histone H3; histone gene complex
  misc_feature (1)..(136): Homolog of NCBI NO: 2119013 NR Description: histone H3.2 protein - shrew mouse
  misc_feature (1)..(136): Homolog of NCBI NO: 34858260 NR Description: similar to histone protein Hist2h3c1 [Rattus
  misc_feature (1)..(136): Homolog of NCBI NO: 34876394 NR Description: similar to histone protein Hist2h3c1 [Rattus
  misc_feature (1)..(136): Homolog of NCBI NO: 7305139 NR Description: histone 1, H3f; histone H3; histone gene complex
  misc_feature (1)..(136): Homolog of NCBI NO: 34858260 NR Description: similar to histone protein Hist2h3c1 [Rattus
  misc_feature (1)..(136): Homolog of NCBI NO: 15236103 NR Description: histone H3.2 [Arabidopsis thaliana]
  misc_feature (1)..(136): Homolog of NCBI NO: 18698662 NR Description: disease-resistent-related protein [Oryza sativa]
  misc_feature (1)..(136): Homolog of NCBI NO: 34876396 NR Description: similar to H3 histone family, member I [Rattus
  misc_feature (1)..(136): Homolog of NCBI NO: 34876364 NR Description: similar to CG31613-PA [Rattus norvegicus]
  misc_feature (1)..(136): Homolog of NCBI NO: 34858254 NR Description: similar to histone protein Hist2h3c1 [Rattus
  misc_feature (1)..(136): Homolog of NCBI NO: 2119013 NR Description: histone H3.2 protein - shrew mouse
  misc_feature (1)..(136): Homolog of NCBI NO: 30061401 NR Description: histone 2, H3ca1 [Mus musculus]
  misc_feature (1)..(136): Homolog of NCBI NO: 34858254 NR Description: similar to histone protein Hist2h3c1 [Rattus
  misc_feature (1)..(136): Homolog of NCBI NO: 34876364 NR Description: similar to CG31613-PA [Rattus norvegicus]
  misc_feature (1)..(136): Homolog of NCBI NO: 34876396 NR Description: similar to H3 histone family, member I [Rattus
  misc_feature (1)..(136): Homolog of NCBI NO: 18698662 NR Description: disease-resistent-related protein [Oryza sativa]
  misc_feature (1)..(136): Homolog of NCBI NO: 15236103 NR Description: histone H3.2 [Arabidopsis thaliana]

SEQ ID NO: 50798 - DNA, 1262 bp, Arabidopsis thaliana; identical to SEQ ID NO: 46078
  misc_feature (1)..(1262): Ceres Seq. ID no. 13578513
  misc_feature: MA Experiment ID: 20000173 Result: Up-regulated in Transcription
  misc_feature: MA Experiment 20000173 PARAMETER Experiment Name: At_42deg_Heat_P Parameter: Age (day) Value: 14
  misc_feature: MA Experiment 20000173 PARAMETER Experiment Name: At_42deg_Heat_P Parameter: Organism Value: A. thaliana
  misc_feature: MA Experiment 20000173 PARAMETER Experiment Name: At_42deg_Heat_P Parameter: Plant Line Value: WS
  misc_feature: MA Experiment 20000173 PARAMETER Experiment Name: At_42deg_Heat_P Parameter: Temperature (deg C) Value: 42 vs. 22
  misc_feature: MA Experiment 20000173 PARAMETER Experiment Name: At_42deg_Heat_P Parameter: Timepoint (hr) Value: 6
  misc_feature: MA Experiment 20000173 PARAMETER Experiment Name: At_42deg_Heat_P Parameter: Tissue Value: Aerial
  misc_feature: MA Experiment ID: 20000234 Result: Down-regulated in Transcription
  misc_feature: MA Experiment 20000234 PARAMETER Experiment Name: At_Siliques_P Parameter: Age (day) Value: 21
  misc_feature: MA Experiment 20000234 PARAMETER Experiment Name: At_Siliques_P Parameter: Organism Value: A. thaliana
  misc_feature: MA Experiment 20000234 PARAMETER Experiment Name: At_Siliques_P Parameter: Plant Line Value: WS
  misc_feature: MA Experiment 20000234 PARAMETER Experiment Name: At_Siliques_P Parameter: Tissue Value: Less Than 5mm Siliques vs. Whole Plant
  misc_feature: MA Experiment ID: 20000264 Result: Down-regulated in Transcription
  misc_feature: MA Experiment 20000264 PARAMETER Experiment Name: At_Open_Flower_P Parameter: Age (day) Value: 21
  misc_feature: MA Experiment 20000264 PARAMETER Experiment Name: At_Open_Flower_P Parameter: Plant Line Value: WS
  misc_feature: MA Experiment 20000264 PARAMETER Experiment Name: At_Open_Flower_P Parameter: Tissue Value: Open Flower vs. Whole Plant
  misc_feature: MA Experiment ID: 20000265 Result: Down-regulated in Transcription
  misc_feature: MA Experiment 20000265 PARAMETER Experiment Name: At_Open_Flower_P Parameter: Age (day) Value: 21
  misc_feature: MA Experiment 20000265 PARAMETER Experiment Name: At_Open_Flower_P Parameter: Plant Line Value: WS
  misc_feature: MA Experiment 20000265 PARAMETER Experiment Name: At_Open_Flower_P Parameter: Tissue Value: Closed Flower vs. Whole Plant
  misc_feature: MA Experiment ID: 20000455 Result: Up-regulated in Transcription
  misc_feature: MA Experiment 20000455 PARAMETER Experiment Name: At_100uM_ABA_P Parameter: Age (day) Value: 16
  misc_feature: MA Experiment 20000455 PARAMETER Experiment Name: At_100uM_ABA_P Parameter: Organism Value: A. thaliana
  misc_feature: MA Experiment 20000455 PARAMETER Experiment Name: At_100uM_ABA_P Parameter: Plant Line Value: WS
  misc_feature: MA Experiment 20000455 PARAMETER Experiment Name: At_100uM_ABA_P Parameter: Timepoint (hr) Value: 48
  misc_feature: MA Experiment 20000455 PARAMETER Experiment Name: At_100uM_ABA_P Parameter: Tissue Value: Aerial
  misc_feature: MA Experiment 20000455 PARAMETER Experiment Name: At_100uM_ABA_P Parameter: Treatment Value: 100uM ABA vs. No Treatment
  misc_feature: MA Experiment ID: 20000495 Result: Down-regulated in Transcription
  misc_feature: MA Experiment 20000495 PARAMETER Experiment Name: At_Guard_Cells_P Parameter: Harvest Date Value: 8/2/2002
  misc_feature: MA Experiment 20000495 PARAMETER Experiment Name: At_Guard_Cells_P Parameter: Organism Value: A. thaliana
  misc_feature: MA Experiment 20000495 PARAMETER Experiment Name: At_Guard_Cells_P Parameter: Tissue Value: Guard Cells vs. Leaves
  misc_feature: MA Experiment ID: 20000496 Result: Down-regulated in Transcription
  misc_feature: MA Experiment 20000496 PARAMETER Experiment Name: At_Guard_Cells_P Parameter: Harvest Date Value: 7/19/2002
  misc_feature: MA Experiment 20000496 PARAMETER Experiment Name: At_Guard_Cells_P Parameter: Organism Value: Canola
  misc_feature: MA Experiment 20000496 PARAMETER Experiment Name: At_Guard_Cells_P Parameter: Tissue Value: Guard Cells vs. Leaves
  misc_feature: MA Experiment ID: 20001450 Result: Up-regulated in Transcription
  misc_feature: MA Experiment 20001450 PARAMETER Experiment Name: At_Far-red-induction_P Parameter: Age (day) Value: 7
  misc_feature: MA Experiment 20001450 PARAMETER Experiment Name: At_Far-red-induction_P Parameter: Light Value: Far-red vs. White
  misc_feature: MA Experiment 20001450 PARAMETER Experiment Name: At_Far-red-induction_P Parameter: Organism Value: A. thaliana
  misc_feature: MA Experiment 20001450 PARAMETER Experiment Name: At_Far-red-induction_P Parameter: Plant Line Value: Columbia
  misc_feature: MA Experiment 20001450 PARAMETER Experiment Name: At_Far-red-induction_P Parameter: Timepoint (hr) Value: 8
  misc_feature: MA Experiment 20001450 PARAMETER Experiment Name: At_Far-red-induction_P Parameter: Tissue Value: Whole Plant
  misc_feature: MA Experiment ID: 20001560 Result: Down-regulated in Transcription
  misc_feature: MA Experiment 20001560 PARAMETER Experiment Name: At_Drought_Soil_Dry_P Parameter: Age (day) Value: 28
  misc_feature: MA Experiment 20001560 PARAMETER Experiment Name: At_Drought_Soil_Dry_P Parameter: Organism Value: A. thaliana
  misc_feature: MA Experiment 20001560 PARAMETER Experiment Name: At_Drought_Soil_Dry_P Parameter: Plant Line Value: WS
  misc_feature: MA Experiment 20001560 PARAMETER Experiment Name: At_Drought_Soil_Dry_P Parameter: Post Timepoint (hr) Value: None
  misc_feature: MA Experiment 20001560 PARAMETER Experiment Name: At_Drought_Soil_Dry_P Parameter: Post-Treatment Value: None
  misc_feature: MA Experiment 20001560 PARAMETER Experiment Name: At_Drought_Soil_Dry_P Parameter: Timepoint (day) Value: 14
  misc_feature: MA Experiment 20001560 PARAMETER Experiment Name: At_Drought_Soil_Dry_P Parameter: Treatment Value: Drought vs. No Drought
  misc_feature: MA Experiment ID: 20001761 Result: Down-regulated in Transcription
  misc_feature: MA Experiment 20001761 PARAMETER Experiment Name: At_50mM_NH4NO3_L-to-H_P Parameter: Timepoint (hr) Value: 4
  misc_feature: MA Experiment 20001761 PARAMETER Experiment Name: At_50mM_NH4NO3_L-to-H_P Parameter: Tissue Value: Siliques
  misc_feature: MA Experiment 20001761 PARAMETER Experiment Name: At_50mM_NH4NO3_L-to-H_P Parameter: Treatment Value: 50mM NH4NO3 vs 100mM Mannitol

SEQ ID NO: 50799 - protein, 304 aa, Arabidopsis thaliana; identical to SEQ ID NO: 46079
  peptide (1)..(304): Ceres Seq. ID no. 13578514
  misc_feature (93)..(163): Pfam Name: Keratin Pfam Description: Keratin
  misc_feature (93)..(163): Pfam Name: Keratin Pfam Description: Keratin
  misc_feature (79)..(177): Homolog of NCBI NO: 15221187 NR Description: glycine-rich RNA-binding protein [Arabidopsis
  misc_feature (36)..(180): Homolog of NCBI NO: 14140115 NR Description: putative protein [Oryza sativa]
  misc_feature (80)..(174): Homolog of NCBI NO: 17555156 NR Description: Predicted CDS, putative protein, nematode
  misc_feature (81)..(177): Homolog of NCBI NO: 37534900 NR Description: putative glycine-rich protein
  misc_feature (80)..(177): Homolog of NCBI NO: 39588898 NR Description: Hypothetical protein CBG15737 [Caenorhabditis
  misc_feature (79)..(177): Homolog of NCBI NO: 15221187 NR Description: glycine-rich RNA-binding protein [Arabidopsis
  misc_feature (80)..(174): Homolog of NCBI NO: 17555156 NR Description: Predicted CDS, putative protein, nematode
  misc_feature (80)..(177): Homolog of NCBI NO: 39588898 NR Description: Hypothetical protein CBG15737 [Caenorhabditis
  misc_feature (1)..(304): Homolog of NCBI NO: 15231481 NR Description: glycine-rich protein [Arabidopsis thaliana]
  misc_feature (8)..(304): Homolog of NCBI NO: 34395055 NR Description: putative glycine-rich protein
  misc_feature (80)..(193): Homolog of NCBI NO: 17555156 NR Description: Predicted CDS, putative protein, nematode
  misc_feature (80)..(177): Homolog of NCBI NO: 39588898 NR Description: Hypothetical protein CBG15737 [Caenorhabditis
  misc_feature (63)..(257): Homolog of NCBI NO: 2498763 NR Description: Peroxisomal membrane protein PEX13 (Peroxin-13)
  misc_feature (81)..(177): Homolog of NCBI NO: 37534900 NR Description: putative glycine-rich protein
  misc_feature (36)..(180): Homolog of NCBI NO: 14140115 NR Description: putative protein [Oryza sativa]
  misc_feature (63)..(257): Homolog of NCBI NO: 2498763 NR Description: Peroxisomal membrane protein PEX13 (Peroxin-13)
  misc_feature (80)..(177): Homolog of NCBI NO: 39588898 NR Description: Hypothetical protein CBG15737 [Caenorhabditis
  misc_feature (80)..(193): Homolog of NCBI NO: 17555156 NR Description: Predicted CDS, putative protein, nematode
  misc_feature (8)..(304): Homolog of NCBI NO: 34395055 NR Description: putative glycine-rich protein
  misc_feature (1)..(304): Homolog of NCBI NO: 15231481 NR Description: glycine-rich protein [Arabidopsis thaliana]

SEQ ID NO: 50800 - protein, 242 aa, Arabidopsis thaliana; identical to SEQ ID NO: 46080
  peptide (1)..(242): Ceres Seq. ID no. 13578515
  misc_feature (31)..(101): Pfam Name: Keratin Pfam Description: Keratin
  misc_feature (31)..(101): Pfam Name: Keratin Pfam Description: Keratin
  misc_feature (17)..(115): Homolog of NCBI NO: 15221187 NR Description: glycine-rich RNA-binding protein [Arabidopsis
  misc_feature (1)..(118): Homolog of NCBI NO: 14140115 NR Description: putative protein [Oryza sativa]
  misc_feature (18)..(112): Homolog of NCBI NO: 17555156 NR Description: Predicted CDS, putative protein, nematode
  misc_feature (19)..(115): Homolog of NCBI NO: 37534900 NR Description: putative glycine-rich protein
  misc_feature (18)..(115): Homolog of NCBI NO: 39588898 NR Description: Hypothetical protein CBG15737 [Caenorhabditis
  misc_feature (17)..(115): Homolog of NCBI NO: 15221187 NR Description: glycine-rich RNA-binding protein [Arabidopsis
  misc_feature (18)..(112): Homolog of NCBI NO: 17555156 NR Description: Predicted CDS, putative protein, nematode
  misc_feature (18)..(115): Homolog of NCBI NO: 39588898 NR Description: Hypothetical protein CBG15737 [Caenorhabditis
  misc_feature (1)..(242): Homolog of NCBI NO: 15231481 NR Description: glycine-rich protein [Arabidopsis thaliana]
  misc_feature (1)..(242): Homolog of NCBI NO: 34395055 NR Description: putative glycine-rich protein
  misc_feature (18)..(131): Homolog of NCBI NO: 17555156 NR Description: Predicted CDS, putative protein, nematode
  misc_feature (18)..(115): Homolog of NCBI NO: 39588898 NR Description: Hypothetical protein CBG15737 [Caenorhabditis
  misc_feature (1)..(195): Homolog of NCBI NO: 2498763 NR Description: Peroxisomal membrane protein PEX13 (Peroxin-13)
  misc_feature (19)..(115): Homolog of NCBI NO: 37534900 NR Description: putative glycine-rich protein
  misc_feature (1)..(118): Homolog of NCBI NO: 14140115 NR Description: putative protein [Oryza sativa]
  misc_feature (1)..(195): Homolog of NCBI NO: 2498763 NR Description: Peroxisomal membrane protein PEX13 (Peroxin-13)
  misc_feature (18)..(115): Homolog of NCBI NO: 39588898 NR Description: Hypothetical protein CBG15737 [Caenorhabditis
  misc_feature (18)..(131): Homolog of NCBI NO: 17555156 NR Description: Predicted CDS, putative protein, nematode
  misc_feature (1)..(242): Homolog of NCBI NO: 34395055 NR Description: putative glycine-rich protein
  misc_feature (1)..(242): Homolog of NCBI NO: 15231481 NR Description: glycine-rich protein [Arabidopsis thaliana]

SEQ ID NO: 50801 - protein, 221 aa, Arabidopsis thaliana; identical to SEQ ID NO: 46081
  peptide (1)..(221): Ceres Seq. ID no. 13578516
  misc_feature (10)..(80): Pfam Name: Keratin Pfam Description: Keratin
  misc_feature (10)..(80): Pfam Name: Keratin Pfam Description: Keratin
  misc_feature (1)..(94): Homolog of NCBI NO: 15221187 NR Description: glycine-rich RNA-binding protein [Arabidopsis
  misc_feature (1)..(97): Homolog of NCBI NO: 14140115 NR Description: putative protein [Oryza sativa]
  misc_feature (1)..(91): Homolog of NCBI NO: 17555156 NR Description: Predicted CDS, putative protein, nematode
  misc_feature (1)..(94): Homolog of NCBI NO: 37534900 NR Description: putative glycine-rich protein
  misc_feature (1)..(94): Homolog of NCBI NO: 39588898 NR Description: Hypothetical protein CBG15737 [Caenorhabditis
  misc_feature (1)..(94): Homolog of NCBI NO: 15221187 NR Description: glycine-rich RNA-binding protein [Arabidopsis
  misc_feature (1)..(91): Homolog of NCBI NO: 17555156 NR Description: Predicted CDS, putative protein, nematode
  misc_feature (1)..(94): Homolog of NCBI NO: 39588898 NR Description: Hypothetical protein CBG15737 [Caenorhabditis
  misc_feature (1)..(221): Homolog of NCBI NO: 15231481 NR Description: glycine-rich protein [Arabidopsis thaliana]
  misc_feature (1)..(221): Homolog of NCBI NO: 34395055 NR Description: putative glycine-rich protein
  misc_feature (1)..(110): Homolog of NCBI NO: 17555156 NR Description: Predicted CDS, putative protein, nematode
  misc_feature (1)..(94): Homolog of NCBI NO: 39588898 NR Description: Hypothetical protein CBG15737 [Caenorhabditis
  misc_feature (1)..(174): Homolog of NCBI NO: 2498763 NR Description: Peroxisomal membrane protein PEX13 (Peroxin-13)
  misc_feature (1)..(94): Homolog of NCBI NO: 37534900 NR Description: putative glycine-rich protein
  misc_feature (1)..(97): Homolog of NCBI NO: 14140115 NR Description: putative protein [Oryza sativa]
  misc_feature (1)..(174): Homolog of NCBI NO: 2498763 NR Description: Peroxisomal membrane protein PEX13 (Peroxin-13)
  misc_feature (1)..(94): Homolog of NCBI NO: 39588898 NR Description: Hypothetical protein CBG15737 [Caenorhabditis
  misc_feature (1)..(110): Homolog of NCBI NO: 17555156 NR Description: Predicted CDS, putative protein, nematode
  misc_feature (1)..(221): Homolog of NCBI NO: 34395055 NR Description: putative glycine-rich protein
  misc_feature (1)..(221): Homolog of NCBI NO: 15231481 NR Description: glycine-rich protein [Arabidopsis thaliana]

SEQ ID NO: 50802 - DNA, 1030 bp, Arabidopsis thaliana; identical to SEQ ID NO: 48152
  misc_feature (1)..(1030): Ceres Seq. ID no. 13649803
  misc_feature: MA Experiment ID: 20000171 Result: Up-regulated in Transcription
  misc_feature: MA Experiment 20000171 PARAMETER Experiment Name: At_42deg_Heat_P Parameter: Age (day) Value: 14
  misc_feature: MA Experiment 20000171 PARAMETER Experiment Name: At_42deg_Heat_P Parameter: Organism Value: A. thaliana
  misc_feature: MA Experiment 20000171 PARAMETER Experiment Name: At_42deg_Heat_P Parameter: Plant Line Value: WS
  misc_feature: MA Experiment 20000171 PARAMETER Experiment Name: At_42deg_Heat_P Parameter: Temperature (deg C) Value: 42 vs. 22
  misc_feature: MA Experiment 20000171 PARAMETER Experiment Name: At_42deg_Heat_P Parameter: Timepoint (hr) Value: 1
  misc_feature: MA Experiment 20000171 PARAMETER Experiment Name: At_42deg_Heat_P Parameter: Tissue Value: Aerial
  misc_feature: MA Experiment ID: 20000173 Result: Up-regulated in Transcription
  misc_feature: MA Experiment 20000173 PARAMETER Experiment Name: At_42deg_Heat_P Parameter: Age (day) Value: 14
  misc_feature: MA Experiment 20000173 PARAMETER Experiment Name: At_42deg_Heat_P Parameter: Organism Value: A. thaliana
  misc_feature: MA Experiment 20000173 PARAMETER Experiment Name: At_42deg_Heat_P Parameter: Plant Line Value: WS
  misc_feature: MA Experiment 20000173 PARAMETER Experiment Name: At_42deg_Heat_P Parameter: Temperature (deg C) Value: 42 vs. 22
  misc_feature: MA Experiment 20000173 PARAMETER Experiment Name: At_42deg_Heat_P Parameter: Timepoint (hr) Value: 6
  misc_feature: MA Experiment 20000173 PARAMETER Experiment Name: At_42deg_Heat_P Parameter: Tissue Value: Aerial
  misc_feature: MA Experiment ID: 20000180 Result: Up-regulated in Transcription
  misc_feature: MA Experiment 20000180 PARAMETER Experiment Name: At_Germinating_Seeds_P Parameter: Age (hr) Value: 24 vs. 0
  misc_feature: MA Experiment 20000180 PARAMETER Experiment Name: At_Germinating_Seeds_P Parameter: Tissue Value: Germinating Seeds
  misc_feature: MA Experiment ID: 20000182 Result: Up-regulated in Transcription
  misc_feature: MA Experiment 20000182 PARAMETER Experiment Name: At_2mM_SA_P Parameter: Age (day) Value: 14
  misc_feature: MA Experiment 20000182 PARAMETER Experiment Name: At_2mM_SA_P Parameter: Organism Value: A. thaliana
  misc_feature: MA Experiment 20000182 PARAMETER Experiment Name: At_2mM_SA_P Parameter: Plant Line Value: WS
  misc_feature: MA Experiment 20000182 PARAMETER Experiment Name: At_2mM_SA_P Parameter: Timepoint (hr) Value: 6
  misc_feature: MA Experiment 20000182 PARAMETER Experiment Name: At_2mM_SA_P Parameter: Tissue Value: Aerial
  misc_feature: MA Experiment 20000182 PARAMETER Experiment Name: At_2mM_SA_P Parameter: Treatment Value: 2mM SA vs. No Treatment
  misc_feature: MA Experiment ID: 20000184 Result: Up-regulated in Transcription
  misc_feature: MA Experiment 20000184 PARAMETER Experiment Name: At_Shoots__P Parameter: Age (day) Value: 7
  misc_feature: MA Experiment 20000184 PARAMETER Experiment Name: At_Shoots__P Parameter: Tissue Value: Shoots vs. Whole Plant
  misc_feature: MA Experiment ID: 20000185 Result: Up-regulated in Transcription
  misc_feature: MA Experiment 20000185 PARAMETER Experiment Name: At_Roots__P Parameter: Age (day) Value: 7 vs. 21
  misc_feature: MA Experiment 20000185 PARAMETER Experiment Name: At_Roots__P Parameter: Organism Value: A. thaliana
  misc_feature: MA Experiment 20000185 PARAMETER Experiment Name: At_Roots__P Parameter: Tissue Value: Roots vs. Whole Plant
  misc_feature: MA Experiment ID: 20000213 Result: Up-regulated in Transcription
  misc_feature: MA Experiment 20000213 PARAMETER Experiment Name: At_4deg_Cold_P Parameter: Timepoint (hr) Value: 2
  misc_feature: MA Experiment ID: 20000264 Result: Down-regulated in Transcription
  misc_feature: MA Experiment 20000264 PARAMETER Experiment Name: At_Open_Flower_P Parameter: Age (day) Value: 21
  misc_feature: MA Experiment 20000264 PARAMETER Experiment Name: At_Open_Flower_P Parameter: Plant Line Value: WS
  misc_feature: MA Experiment 20000264 PARAMETER Experiment Name: At_Open_Flower_P Parameter: Tissue Value: Open Flower vs. Whole Plant
  misc_feature: MA Experiment ID: 20000265 Result: Down-regulated in Transcription
  misc_feature: MA Experiment 20000265 PARAMETER Experiment Name: At_Open_Flower_P Parameter: Age (day) Value: 21
  misc_feature: MA Experiment 20000265 PARAMETER Experiment Name: At_Open_Flower_P Parameter: Plant Line Value: WS
  misc_feature: MA Experiment 20000265 PARAMETER Experiment Name: At_Open_Flower_P Parameter: Tissue Value: Closed Flower vs. Whole Plant
  misc_feature: MA Experiment ID: 20000439 Result: Up-regulated in Transcription
  misc_feature: MA Experiment 20000439 PARAMETER Experiment Name: At_Roots__P Parameter: Age (day) Value: 14 vs. 21
  misc_feature: MA Experiment 20000439 PARAMETER Experiment Name: At_Roots__P Parameter: Organism Value: A. thaliana
  misc_feature: MA Experiment 20000439 PARAMETER Experiment Name: At_Roots__P Parameter: Tissue Value: Roots vs. Whole Plant
  misc_feature: MA Experiment ID: 20000441 Result: Up-regulated in Transcription
  misc_feature: MA Experiment 20000441 PARAMETER Experiment Name: At_1uM_BR-BRZ__P Parameter: Tissue Value: Shoot Apices
  misc_feature: MA Experiment 20000441 PARAMETER Experiment Name: At_1uM_BR-BRZ__P Parameter: Treatment Value: 1uM BR vs. No Treatment
  misc_feature: MA Experiment ID: 20000443 Result: Up-regulated in Transcription
  misc_feature: MA Experiment 20000443 PARAMETER Experiment Name: At_1uM_BR-BRZ__P Parameter: Tissue Value: Shoot Apices
  misc_feature: MA Experiment 20000443 PARAMETER Experiment Name: At_1uM_BR-BRZ__P Parameter: Treatment Value: 1uM BRZ vs. No Treatment
  misc_feature: MA Experiment ID: 20000496 Result: Down-regulated in Transcription
  misc_feature: MA Experiment 20000496 PARAMETER Experiment Name: At_Guard_Cells_P Parameter: Harvest Date Value: 7/19/2002
  misc_feature: MA Experiment 20000496 PARAMETER Experiment Name: At_Guard_Cells_P Parameter: Organism Value: Canola
  misc_feature: MA Experiment 20000496 PARAMETER Experiment Name: At_Guard_Cells_P Parameter: Tissue Value: Guard Cells vs. Leaves
  misc_feature: MA Experiment ID: 20000709 Result: Up-regulated in Transcription
  misc_feature: MA Experiment 20000709 PARAMETER Experiment Name: At_15mM_NH4NO3_L-to-H_P Parameter: Age (hr) Value: 14
  misc_feature: MA Experiment 20000709 PARAMETER Experiment Name: At_15mM_NH4NO3_L-to-H_P Parameter: Organism Value: A. thaliana
  misc_feature: MA Experiment 20000709 PARAMETER Experiment Name: At_15mM_NH4NO3_L-to-H_P Parameter: Plant Line Value: WS
  misc_feature: MA Experiment 20000709 PARAMETER Experiment Name: At_15mM_NH4NO3_L-to-H_P Parameter: Timepoint (hr) Value: 4
  misc_feature: MA Experiment 20000709 PARAMETER Experiment Name: At_15mM_NH4NO3_L-to-H_P Parameter: Tissue Value: Aerial
  misc_feature: MA Experiment 20000709 PARAMETER Experiment Name: At_15mM_NH4NO3_L-to-H_P Parameter: Treatment Value: 15mM NH4NO3 vs. 30mM Mannitol
  misc_feature: MA Experiment ID: 20000794 Result: Down-regulated in Transcription
  misc_feature: MA Experiment 20000794 PARAMETER Experiment Name: At_Petals_P Parameter: Age (day) Value: 23-25 days
  misc_feature: MA Experiment 20000794 PARAMETER Experiment Name: At_Petals_P Parameter: Plant Line Value: WS
  misc_feature: MA Experiment 20000794 PARAMETER Experiment Name: At_Petals_P Parameter: Tissue Value: Petals vs. Whole plant
  misc_feature: MA Experiment ID: 20001248 Result: Down-regulated in Transcription
  misc_feature: MA Experiment 20001248 PARAMETER Experiment Name: At_Far-red-induction_P Parameter: Age (day) Value: 7
  misc_feature: MA Experiment 20001248 PARAMETER Experiment Name: At_Far-red-induction_P Parameter: Light Value: Far-red vs. White
  misc_feature: MA Experiment 20001248 PARAMETER Experiment Name: At_Far-red-induction_P Parameter: Organism Value: A. thaliana
  misc_feature: MA Experiment 20001248 PARAMETER Experiment Name: At_Far-red-induction_P Parameter: Plant Line Value: Columbia
  misc_feature: MA Experiment 20001248 PARAMETER Experiment Name: At_Far-red-induction_P Parameter: Timepoint (hr) Value: 4
  misc_feature: MA Experiment 20001248 PARAMETER Experiment Name: At_Far-red-induction_P Parameter: Tissue Value: Whole Plant
  misc_feature: MA Experiment ID: 20001450 Result: Down-regulated in Transcription
  misc_feature: MA Experiment 20001450 PARAMETER Experiment Name: At_Far-red-induction_P Parameter: Age (day) Value: 7
  misc_feature: MA Experiment 20001450 PARAMETER Experiment Name: At_Far-red-induction_P Parameter: Light Value: Far-red vs. White
  misc_feature: MA Experiment 20001450 PARAMETER Experiment Name: At_Far-red-induction_P Parameter: Organism Value: A. thaliana
  misc_feature: MA Experiment 20001450 PARAMETER Experiment Name: At_Far-red-induction_P Parameter: Plant Line Value: Columbia
  misc_feature: MA Experiment 20001450 PARAMETER Experiment Name: At_Far-red-induction_P Parameter: Timepoint (hr) Value: 8
  misc_feature: MA Experiment 20001450 PARAMETER Experiment Name: At_Far-red-induction_P Parameter: Tissue Value: Whole Plant
  misc_feature: MA Experiment ID: 20001451 Result: Down-regulated in Transcription
  misc_feature: MA Experiment 20001451 PARAMETER Experiment Name: At_Far-red-induction_P Parameter: Age (day) Value: 7
  misc_feature: MA Experiment 20001451 PARAMETER Experiment Name: At_Far-red-induction_P Parameter: Light Value: Far-red vs. White
  misc_feature: MA Experiment 20001451 PARAMETER Experiment Name: At_Far-red-induction_P Parameter: Organism Value: A. thaliana
  misc_feature: MA Experiment 20001451 PARAMETER Experiment Name: At_Far-red-induction_P Parameter: Plant Line Value: Columbia
  misc_feature: MA Experiment 20001451 PARAMETER Experiment Name: At_Far-red-induction_P Parameter: Timepoint (hr) Value: 24
  misc_feature: MA Experiment 20001451 PARAMETER Experiment Name: At_Far-red-induction_P Parameter: Tissue Value: Whole Plant
  misc_feature: MA Experiment ID: 20001555 Result: Down-regulated in Transcription
  misc_feature: MA Experiment 20001555 PARAMETER Experiment Name: At_Drought_Soil_Dry_P Parameter: Age (day) Value: 24
  misc_feature: MA Experiment 20001555 PARAMETER Experiment Name: At_Drought_Soil_Dry_P Parameter: Organism Value: A. thaliana
  misc_feature: MA Experiment 20001555 PARAMETER Experiment Name: At_Drought_Soil_Dry_P Parameter: Plant Line Value: WS
  misc_feature: MA Experiment 20001555 PARAMETER Experiment Name: At_Drought_Soil_Dry_P Parameter: Post Timepoint (hr) Value: None
  misc_feature: MA Experiment 20001555 PARAMETER Experiment Name: At_Drought_Soil_Dry_P Parameter: Post-Treatment Value: None
  misc_feature: MA Experiment 20001555 PARAMETER Experiment Name: At_Drought_Soil_Dry_P Parameter: Timepoint (day) Value: 10
  misc_feature: MA Experiment 20001555 PARAMETER Experiment Name: At_Drought_Soil_Dry_P Parameter: Treatment Value: Drought vs. No Drought
  misc_feature: MA Experiment ID: 20001556 Result: Down-regulated in Transcription
  misc_feature: MA Experiment 20001556 PARAMETER Experiment Name: At_Drought_Soil_Dry_P Parameter: Age (day) Value: 26
  misc_feature: MA Experiment 20001556 PARAMETER Experiment Name: At_Drought_Soil_Dry_P Parameter: Organism Value: A. thaliana
  misc_feature: MA Experiment 20001556 PARAMETER Experiment Name: At_Drought_Soil_Dry_P Parameter: Plant Line Value: WS
  misc_feature: MA Experiment 20001556 PARAMETER Experiment Name: At_Drought_Soil_Dry_P Parameter: Post Timepoint (hr) Value: None
  misc_feature: MA Experiment 20001556 PARAMETER Experiment Name: At_Drought_Soil_Dry_P Parameter: Post-Treatment Value: None
  misc_feature: MA Experiment 20001556 PARAMETER Experiment Name: At_Drought_Soil_Dry_P Parameter: Timepoint (day) Value: 12
  misc_feature: MA Experiment 20001556 PARAMETER Experiment Name: At_Drought_Soil_Dry_P Parameter: Treatment Value: Drought vs. No Drought
  misc_feature: MA Experiment ID: 20001557 Result: Down-regulated in Transcription
  misc_feature: MA Experiment 20001557 PARAMETER Experiment Name: At_Drought_Soil_Dry_P Parameter: Age (day) Value: 27
  misc_feature: MA Experiment 20001557 PARAMETER Experiment Name: At_Drought_Soil_Dry_P Parameter: Organism Value: A. thaliana
  misc_feature: MA Experiment 20001557 PARAMETER Experiment Name: At_Drought_Soil_Dry_P Parameter: Plant Line Value: WS
  misc_feature: MA Experiment 20001557 PARAMETER Experiment Name: At_Drought_Soil_Dry_P Parameter: Post Timepoint (hr) Value: 3
  misc_feature: MA Experiment 20001557 PARAMETER Experiment Name: At_Drought_Soil_Dry_P Parameter: Post-Treatment Value: Re-Water vs. No Drought
  misc_feature: MA Experiment 20001557 PARAMETER Experiment Name: At_Drought_Soil_Dry_P Parameter: Timepoint (day) Value: 13
  misc_feature: MA Experiment 20001557 PARAMETER Experiment Name: At_Drought_Soil_Dry_P Parameter: Treatment Value: Drought vs. No Drought
  misc_feature: MA Experiment ID: 20001904 Result: Down-regulated in Transcription
  misc_feature: MA Experiment 20001904 PARAMETER Experiment Name: At_Drought_Reproduction_P Parameter: Age (day) Value: 37
  misc_feature: MA Experiment 20001904 PARAMETER Experiment Name: At_Drought_Reproduction_P Parameter: Organism Value: A. thaliana
  misc_feature: MA Experiment 20001904 PARAMETER Experiment Name: At_Drought_Reproduction_P Parameter: Plant Line Value: WS
  misc_feature: MA Experiment 20001904 PARAMETER Experiment Name: At_Drought_Reproduction_P Parameter: Timepoint (day) Value: 7
  misc_feature: MA Experiment 20001904 PARAMETER Experiment Name: At_Drought_Reproduction_P Parameter: Tissue Value: Rosettes
  misc_feature: MA Experiment 20001904 PARAMETER Experiment Name: At_Drought_Reproduction_P Parameter: Treatment Value: Drought vs. No Drought
  misc_feature: MA Experiment ID: 20001907 Result: Down-regulated in Transcription
  misc_feature: MA Experiment 20001907 PARAMETER Experiment Name: At_Drought_Reproduction_P Parameter: Age (day) Value: 37
  misc_feature: MA Experiment 20001907 PARAMETER Experiment Name: At_Drought_Reproduction_P Parameter: Organism Value: A. thaliana
  misc_feature: MA Experiment 20001907 PARAMETER Experiment Name: At_Drought_Reproduction_P Parameter: Plant Line Value: WS
  misc_feature: MA Experiment 20001907 PARAMETER Experiment Name: At_Drought_Reproduction_P Parameter: Timepoint (day) Value: 7
  misc_feature: MA Experiment 20001907 PARAMETER Experiment Name: At_Drought_Reproduction_P Parameter: Tissue Value: Siliques
  misc_feature: MA Experiment 20001907 PARAMETER Experiment Name: At_Drought_Reproduction_P Parameter: Treatment Value: Drought vs. No Drought

SEQ ID NO: 50803 - protein, 263 aa, Arabidopsis thaliana [sequence omitted]

SEQ ID NO: 50804 - protein, 215 aa, Arabidopsis thaliana; identical to SEQ ID NO: 48154
  peptide (1)..(215): Ceres Seq. ID no. 13649805
  misc_feature (3)..(214): Homolog of NCBI NO: 232202 NR Description: GLUTATHIONE S-TRANSFERASE PARB (GST CLASS-PHI)
  misc_feature (3)..(215): Homolog of NCBI NO: 444341 NR Description: glutathione S-transferase
  misc_feature (3)..(215): Homolog of NCBI NO: 417093 NR Description: GLUTATHIONE S-TRANSFERASE (GST CLASS-PHI)
  misc_feature (3)..(214): Homolog of NCBI NO: 1170088 NR Description: GLUTATHIONE S-TRANSFERASE APIC (GST CLASS-PHI)
  misc_feature (4)..(214): Homolog of NCBI NO: 1170094 NR Description: Glutathione S-transferase (GST class-PHI) (25 kDa
  misc_feature (3)..(215): Homolog of NCBI NO: 7434067 NR Description: glutathione transferase (EC 2.5.1.18), class-phi
  misc_feature (1)..(177): Homolog of NCBI NO: 14532562 NR Description: At2g47730/F17A22.12 [Arabidopsis thaliana]
  misc_feature (1)..(215): Homolog of NCBI NO: 1402898 NR Description: gst6 [Arabidopsis thaliana]
  misc_feature (1)..(215): Homolog of NCBI NO: 12643792 NR Description: Glutathione S-transferase 6 (GST class phi)
  misc_feature (1)..(215): Homolog of NCBI NO: 30690772 NR Description: glutathione transferase, putative (GST6)
  misc_feature (3)..(214): Homolog of NCBI NO: 232202 NR Description: GLUTATHIONE S-TRANSFERASE PARB (GST CLASS-PHI)
  misc_feature (3)..(215): Homolog of NCBI NO: 444341 NR Description: glutathione S-transferase
  misc_feature (3)..(215): Homolog of NCBI NO: 417093 NR Description: GLUTATHIONE S-TRANSFERASE (GST CLASS-PHI)
  misc_feature (3)..(214): Homolog of NCBI NO: 1170088 NR Description: GLUTATHIONE S-TRANSFERASE APIC (GST CLASS-PHI)
  misc_feature (4)..(214): Homolog of NCBI NO: 1170094 NR Description: Glutathione S-transferase (GST class-PHI) (25 kDa
  misc_feature (3)..(215): Homolog of NCBI NO: 7434067 NR Description: glutathione transferase (EC 2.5.1.18), class-phi
  misc_feature (1)..(177): Homolog of NCBI NO: 14532562 NR Description: At2g47730/F17A22.12 [Arabidopsis thaliana]
  misc_feature (1)..(215): Homolog of NCBI NO: 1402898 NR Description: gst6 [Arabidopsis thaliana]
  misc_feature (1)..(215): Homolog of NCBI NO: 12643792 NR Description: Glutathione S-transferase 6 (GST class phi)
  misc_feature (1)..(215): Homolog of NCBI NO: 30690772 NR Description: glutathione transferase, putative (GST6)

SEQ ID NO: 50805 - protein, 205 aa, Arabidopsis thaliana; identical to SEQ ID NO: 48155
  peptide (1)..(205): Ceres Seq. ID no. 13649806
  misc_feature (1)..(204): Homolog of NCBI NO: 232202 NR Description: GLUTATHIONE S-TRANSFERASE PARB (GST CLASS-PHI)
  misc_feature (1)..(205): Homolog of NCBI NO: 444341 NR Description: glutathione S-transferase
  misc_feature (1)..(205): Homolog of NCBI NO: 417093 NR Description: GLUTATHIONE S-TRANSFERASE (GST CLASS-PHI)
  misc_feature (1)..(204): Homolog of NCBI NO: 1170088 NR Description: GLUTATHIONE S-TRANSFERASE APIC (GST CLASS-PHI)
  misc_feature (1)..(204): Homolog of NCBI NO: 1170094 NR Description: Glutathione S-transferase (GST class-PHI) (25 kDa
  misc_feature (1)..(205): Homolog of NCBI NO: 7434067 NR Description: glutathione transferase (EC 2.5.1.18), class-phi
  misc_feature (1)..(167): Homolog of NCBI NO: 14532562 NR Description: At2g47730/F17A22.12 [Arabidopsis thaliana]
  misc_feature (1)..(205): Homolog of NCBI NO: 1402898 NR Description: gst6 [Arabidopsis thaliana]
  misc_feature (1)..(205): Homolog of NCBI NO: 12643792 NR Description: Glutathione S-transferase 6 (GST class phi)
  misc_feature (1)..(205): Homolog of NCBI NO: 30690772 NR Description: glutathione transferase, putative (GST6)
  misc_feature (1)..(204): Homolog of NCBI NO: 232202 NR Description: GLUTATHIONE S-TRANSFERASE PARB (GST CLASS-PHI)
  misc_feature (1)..(205): Homolog of NCBI NO: 444341 NR Description: glutathione S-transferase
  misc_feature (1)..(205): Homolog of NCBI NO: 417093 NR Description: GLUTATHIONE S-TRANSFERASE (GST CLASS-PHI)
  misc_feature (1)..(204): Homolog of NCBI NO: 1170088 NR Description: GLUTATHIONE S-TRANSFERASE APIC (GST CLASS-PHI)
  misc_feature (1)..(204): Homolog of NCBI NO: 1170094 NR Description: Glutathione S-transferase (GST class-PHI) (25 kDa
  misc_feature (1)..(205): Homolog of NCBI NO: 7434067 NR Description: glutathione transferase (EC 2.5.1.18), class-phi
  misc_feature (1)..(167): Homolog of NCBI NO: 14532562 NR Description: At2g47730/F17A22.12 [Arabidopsis thaliana]
  misc_feature (1)..(205): Homolog of NCBI NO: 1402898 NR Description: gst6 [Arabidopsis thaliana]
  misc_feature (1)..(205): Homolog of NCBI NO: 12643792 NR Description: Glutathione S-transferase 6 (GST class phi)
  misc_feature (1)..(205): Homolog of NCBI NO: 30690772 NR Description: glutathione transferase, putative (GST6)

SEQ ID NO: 50806 - DNA, 548 bp, Arabidopsis thaliana; identical to SEQ ID NO: 24388
  misc_feature (1)..(548): Ceres Seq. ID no. 12395205
  misc_feature: MA Experiment ID: 108434 Result: Down-regulated in Transcription
  misc_feature: MA Experiment 108434 PARAMETER Experiment Name: At_Root_Tips_cDNA_P Parameter: Tissue Value: Root Tips
  misc_feature: MA Experiment ID: 108435 Result: Down-regulated in Transcription
  misc_feature: MA Experiment 108435 PARAMETER Experiment Name: At_stm_Mutants_cDNA_P Parameter: Plant Line Value: wt Landsburg vs stm
  misc_feature: MA Experiment 108435 PARAMETER Experiment Name: At_stm_Mutants_cDNA_P Parameter: Tissue Value: Shoot Apical Meristem Region
  misc_feature: MA Experiment ID: 108461 Result: Up-regulated in Transcription
  misc_feature: MA Experiment 108461 PARAMETER Experiment Name: At_Germinating_Seeds_cDNA_P Parameter: Age (day) Value: 1 vs. 0
  misc_feature: MA Experiment 108461 PARAMETER Experiment Name: At_Germinating_Seeds_cDNA_P Parameter: Tissue Value: Germinating Seeds
  misc_feature: MA Experiment ID: 108462 Result: Up-regulated in Transcription
  misc_feature: MA Experiment 108462 PARAMETER Experiment Name: At_Germinating_Seeds_cDNA_P Parameter: Age (day) Value: 2 vs. 0
  misc_feature: MA Experiment 108462 PARAMETER Experiment Name: At_Germinating_Seeds_cDNA_P Parameter: Tissue Value: Germinating Seeds
  misc_feature: MA Experiment ID: 108464 Result: Up-regulated in Transcription
  misc_feature: MA Experiment 108464 PARAMETER Experiment Name: At_Germinating_Seeds_cDNA_P Parameter: Age (day) Value: 4 vs. 0
  misc_feature: MA Experiment 108464 PARAMETER Experiment Name: At_Germinating_Seeds_cDNA_P Parameter: Tissue Value: Germinating Seeds
  misc_feature: MA Experiment ID: 108488 Result: Up-regulated in Transcription
  misc_feature: MA Experiment ID: 20000113 Result: Down-regulated in Transcription
  misc_feature: MA Experiment 20000113 PARAMETER Experiment Name: At_42deg_Heat_cDNA_P Parameter: Temperature (deg C) Value: 42 vs. 22
  misc_feature: MA Experiment 20000113 PARAMETER Experiment Name: At_42deg_Heat_cDNA_P Parameter: Timepoint (hr) Value: 8
  misc_feature: MA Experiment 20000113 PARAMETER Experiment Name: At_42deg_Heat_cDNA_P Parameter: Tissue Value: Aerial
  misc_feature: MA Experiment ID: 20000117 Result: Down-regulated in Transcription
  misc_feature: MA Experiment 20000117 PARAMETER Experiment Name: At_100uM_ABA_Mutants_cDNA_P Parameter: Plant Line Value: Columbia
  misc_feature: MA Experiment 20000117 PARAMETER Experiment Name: At_100uM_ABA_Mutants_cDNA_P Parameter: Timepoint (hr) Value: 6
  misc_feature: MA Experiment 20000117 PARAMETER Experiment Name: At_100uM_ABA_Mutants_cDNA_P Parameter: Tissue Value: Aerial
  misc_feature: MA Experiment 20000117 PARAMETER Experiment Name: At_100uM_ABA_Mutants_cDNA_P Parameter: Treatment Value: 100uM ABA vs. No Treatment
  misc_feature: MA Experiment ID: 20000180 Result: Up-regulated in Transcription
  misc_feature: MA Experiment 20000180 PARAMETER Experiment Name: At_Germinating_Seeds_P Parameter: Age (hr) Value: 24 vs. 0
  misc_feature: MA Experiment 20000180 PARAMETER Experiment Name: At_Germinating_Seeds_P Parameter: Tissue Value: Germinating Seeds
  misc_feature: MA Experiment ID: 20000437 Result: Down-regulated in Transcription
  misc_feature: MA Experiment 20000437 PARAMETER Experiment Name: At_Drought_P Parameter: Age (day) Value: 8
  misc_feature: MA Experiment 20000437 PARAMETER Experiment Name: At_Drought_P Parameter: Organism Value: A. thaliana
  misc_feature: MA Experiment 20000437 PARAMETER Experiment Name: At_Drought_P Parameter: Plant Line Value: WS
  misc_feature: MA Experiment 20000437 PARAMETER Experiment Name: At_Drought_P Parameter: Timepoint (hr) Value: 24
  misc_feature: MA Experiment 20000437 PARAMETER Experiment Name: At_Drought_P Parameter: Tissue Value: Whole Plant
  misc_feature: MA Experiment 20000437 PARAMETER Experiment Name: At_Drought_P Parameter: Treatment Value: Drought vs. No Drought
  misc_feature: MA Experiment ID: 20000438 Result: Up-regulated in Transcription
  misc_feature: MA Experiment 20000438 PARAMETER Experiment Name: At_Shoots__P Parameter: Age (day) Value: 14
  misc_feature: MA Experiment 20000438 PARAMETER Experiment Name: At_Shoots__P Parameter: Tissue Value: Shoots vs. Whole Plant
  misc_feature: MA Experiment ID: 20000439 Result: Down-regulated in Transcription
  misc_feature: MA Experiment 20000439 PARAMETER Experiment Name: At_Roots__P Parameter: Age (day) Value: 14 vs. 21
  misc_feature: MA Experiment 20000439 PARAMETER Experiment Name: At_Roots__P Parameter: Organism Value: A. thaliana
  misc_feature: MA Experiment 20000439 PARAMETER Experiment Name: At_Roots__P Parameter: Tissue Value: Roots vs. Whole Plant
  misc_feature: MA Experiment ID: 20000794 Result: Down-regulated in Transcription
  misc_feature: MA Experiment 20000794 PARAMETER Experiment Name: At_Petals_P Parameter: Age (day) Value: 23-25 days
  misc_feature: MA Experiment 20000794 PARAMETER Experiment Name: At_Petals_P Parameter: Plant Line Value: WS
  misc_feature: MA Experiment 20000794 PARAMETER Experiment Name: At_Petals_P Parameter: Tissue Value: Petals vs. Whole plant
  misc_feature: MA Experiment ID: 20001450 Result: Down-regulated in Transcription
  misc_feature: MA Experiment 20001450 PARAMETER Experiment Name: At_Far-red-induction_P Parameter: Age (day) Value: 7
  misc_feature: MA Experiment 20001450 PARAMETER Experiment Name: At_Far-red-induction_P Parameter: Light Value: Far-red vs. White
  misc_feature: MA Experiment 20001450 PARAMETER Experiment Name: At_Far-red-induction_P Parameter: Organism Value: A. thaliana
  misc_feature: MA Experiment 20001450 PARAMETER Experiment Name: At_Far-red-induction_P Parameter: Plant Line Value: Columbia
  misc_feature: MA Experiment 20001450 PARAMETER Experiment Name: At_Far-red-induction_P Parameter: Timepoint (hr) Value: 8
  misc_feature: MA Experiment 20001450 PARAMETER Experiment Name: At_Far-red-induction_P Parameter: Tissue Value: Whole Plant
  misc_feature: MA Experiment ID: 20001555 Result: Down-regulated in Transcription
  misc_feature: MA Experiment 20001555 PARAMETER Experiment Name: At_Drought_Soil_Dry_P Parameter: Age (day) Value: 24
  misc_feature: MA Experiment 20001555 PARAMETER Experiment Name: At_Drought_Soil_Dry_P Parameter: Organism Value: A. thaliana
  misc_feature: MA Experiment 20001555 PARAMETER Experiment Name: At_Drought_Soil_Dry_P Parameter: Plant Line Value: WS
  misc_feature: MA Experiment 20001555 PARAMETER Experiment Name: At_Drought_Soil_Dry_P Parameter: Post Timepoint (hr) Value: None
  misc_feature: MA Experiment 20001555 PARAMETER Experiment Name: At_Drought_Soil_Dry_P Parameter: Post-Treatment Value: None
  misc_feature: MA Experiment 20001555 PARAMETER Experiment Name: At_Drought_Soil_Dry_P Parameter: Timepoint (day) Value: 10
  misc_feature: MA Experiment 20001555 PARAMETER Experiment Name: At_Drought_Soil_Dry_P Parameter: Treatment Value: Drought vs. No Drought
  misc_feature: MA Experiment ID: 20001557 Result: Down-regulated in Transcription
  misc_feature: MA Experiment 20001557 PARAMETER Experiment Name: At_Drought_Soil_Dry_P Parameter: Age (day) Value: 27
  misc_feature: MA Experiment 20001557 PARAMETER Experiment Name: At_Drought_Soil_Dry_P Parameter: Organism Value: A. thaliana
  misc_feature: MA Experiment 20001557 PARAMETER Experiment Name: At_Drought_Soil_Dry_P Parameter: Plant Line Value: WS
  misc_feature: MA Experiment 20001557 PARAMETER Experiment Name: At_Drought_Soil_Dry_P Parameter: Post Timepoint (hr) Value: 3
  misc_feature: MA Experiment 20001557 PARAMETER Experiment Name: At_Drought_Soil_Dry_P Parameter: Post-Treatment Value: Re-Water vs. No Drought
  misc_feature: MA Experiment 20001557 PARAMETER Experiment Name: At_Drought_Soil_Dry_P Parameter: Timepoint (day) Value: 13
  misc_feature: MA Experiment 20001557 PARAMETER Experiment Name: At_Drought_Soil_Dry_P Parameter: Treatment Value: Drought vs. No Drought
  misc_feature: MA Experiment ID: 20001757 Result: Up-regulated in Transcription
  misc_feature: MA Experiment 20001757 PARAMETER Experiment Name: At_50mM_NH4NO3_L-to-H_P Parameter: Timepoint (hr) Value: 6
  misc_feature: MA Experiment 20001757 PARAMETER Experiment Name: At_50mM_NH4NO3_L-to-H_P Parameter: Tissue Value: Leaf
  misc_feature: MA Experiment 20001757 PARAMETER Experiment Name: At_50mM_NH4NO3_L-to-H_P Parameter: Treatment Value: 50mM NH4NO3 vs 100mM Mannitol
  misc_feature: MA Experiment ID: 20001904 Result: Down-regulated in Transcription
  misc_feature: MA Experiment 20001904 PARAMETER Experiment Name: At_Drought_Reproduction_P Parameter: Age (day) Value: 37
  misc_feature: MA Experiment 20001904 PARAMETER Experiment Name: At_Drought_Reproduction_P Parameter: Organism Value: A. thaliana
  misc_feature: MA Experiment 20001904 PARAMETER Experiment Name: At_Drought_Reproduction_P Parameter: Plant Line Value: WS
  misc_feature: MA Experiment 20001904 PARAMETER Experiment Name: At_Drought_Reproduction_P Parameter: Timepoint (day) Value: 7
  misc_feature: MA Experiment 20001904 PARAMETER Experiment Name: At_Drought_Reproduction_P Parameter: Tissue Value: Rosettes
  misc_feature: MA Experiment 20001904 PARAMETER Experiment Name: At_Drought_Reproduction_P Parameter: Treatment Value: Drought vs. No Drought
  misc_feature: MA Experiment ID: 20001905 Result: Down-regulated in Transcription
  misc_feature: MA Experiment 20001905 PARAMETER Experiment Name: At_Drought_Reproduction_P Parameter: Age (day) Value: 40
  misc_feature: MA Experiment 20001905 PARAMETER Experiment Name: At_Drought_Reproduction_P Parameter: Organism Value: A. thaliana
  misc_feature: MA Experiment 20001905 PARAMETER Experiment Name: At_Drought_Reproduction_P Parameter: Plant Line Value: WS
  misc_feature: MA Experiment 20001905 PARAMETER Experiment Name: At_Drought_Reproduction_P Parameter: Timepoint (day) Value: 10
  misc_feature: MA Experiment 20001905 PARAMETER Experiment Name: At_Drought_Reproduction_P Parameter: Tissue Value: Rosettes
  misc_feature: MA Experiment 20001905 PARAMETER Experiment Name: At_Drought_Reproduction_P Parameter: Treatment Value: Drought vs. No Drought
  misc_feature: MA Experiment ID: 20001906 Result: Down-regulated in Transcription
  misc_feature: MA Experiment 20001906 PARAMETER Experiment Name: At_Drought_Reproduction_P Parameter: Age (day) Value: 35
  misc_feature: MA Experiment 20001906 PARAMETER Experiment Name: At_Drought_Reproduction_P Parameter: Organism Value: A. thaliana
  misc_feature: MA Experiment 20001906 PARAMETER Experiment Name: At_Drought_Reproduction_P Parameter: Plant Line Value: WS
  misc_feature: MA Experiment 20001906 PARAMETER Experiment Name: At_Drought_Reproduction_P Parameter: Timepoint (day) Value: 5
  misc_feature: MA Experiment 20001906 PARAMETER Experiment Name: At_Drought_Reproduction_P Parameter: Tissue Value: Siliques
  misc_feature: MA Experiment 20001906 PARAMETER Experiment Name: At_Drought_Reproduction_P Parameter: Treatment Value: Drought vs. No Drought
  misc_feature: MA Experiment ID: 20001908 Result: Down-regulated in Transcription
  misc_feature: MA Experiment 20001908 PARAMETER Experiment Name: At_Drought_Reproduction_P Parameter: Age (day) Value: 40
  misc_feature: MA Experiment 20001908 PARAMETER Experiment Name: At_Drought_Reproduction_P Parameter: Organism Value: A. thaliana
  misc_feature: MA Experiment 20001908 PARAMETER Experiment Name: At_Drought_Reproduction_P Parameter: Plant Line Value: WS
  misc_feature: MA Experiment 20001908 PARAMETER Experiment Name: At_Drought_Reproduction_P Parameter: Timepoint (day) Value: 10
  misc_feature: MA Experiment 20001908 PARAMETER Experiment Name: At_Drought_Reproduction_P Parameter: Tissue Value: Siliques
  misc_feature: MA Experiment 20001908 PARAMETER Experiment Name: At_Drought_Reproduction_P Parameter: Treatment Value: Drought vs. No Drought

SEQ ID NO: 50807 - protein, 141 aa, Arabidopsis thaliana; identical to SEQ ID NO: 24389
  peptide (1)..(141): Ceres Seq. ID no. 12395206
  misc_feature (39)..(140): Homolog of NCBI NO: 400198 NR Description: Photosystem II 5 kDa protein, chloroplast
  misc_feature (39)..(140): Homolog of NCBI NO: 18403499 NR Description: photosystem II 5 KD protein
  misc_feature (39)..(140): Homolog of NCBI NO: 21537121 NR Description: photosystem II [Arabidopsis thaliana]
  misc_feature (39)..(141): Homolog of NCBI NO: 2129671 NR Description: photosystem II protein psbT - Arabidopsis thaliana
  misc_feature (39)..(141): Homolog of NCBI NO: 1465366 NR Description: photosystem II [Arabidopsis thaliana]
  misc_feature (39)..(141): Homolog of NCBI NO: 18402859 NR Description: Expressed protein
  misc_feature (39)..(140): Homolog of NCBI NO: 400198 NR Description: Photosystem II 5 kDa protein, chloroplast
  misc_feature (39)..(140): Homolog of NCBI NO: 18403499 NR Description: photosystem II 5 KD protein
  misc_feature (39)..(140): Homolog of NCBI NO: 21537121 NR Description: photosystem II [Arabidopsis thaliana]
  misc_feature (39)..(141): Homolog of NCBI NO: 2129671 NR Description: photosystem II protein psbT - Arabidopsis thaliana
  misc_feature (39)..(141): Homolog of NCBI NO: 1465366 NR Description: photosystem II [Arabidopsis thaliana]
  misc_feature (39)..(141): Homolog of NCBI NO: 18402859 NR Description: Expressed protein

SEQ ID NO: 50808 - protein, 103 aa, Arabidopsis thaliana; identical to SEQ ID NO: 24390
  peptide (1)..(103): Ceres Seq. ID no. 12395207
  misc_feature (1)..(102): Homolog of NCBI NO: 400198 NR Description: Photosystem II 5 kDa protein, chloroplast
  misc_feature (1)..(102): Homolog of NCBI NO: 18403499 NR Description: photosystem II 5 KD protein
  misc_feature (1)..(102): Homolog of NCBI NO: 21537121 NR Description: photosystem II [Arabidopsis thaliana]
  misc_feature (1)..(103): Homolog of NCBI NO: 2129671 NR Description: photosystem II protein psbT - Arabidopsis thaliana
  misc_feature (1)..(103): Homolog of NCBI NO: 1465366 NR Description: photosystem II [Arabidopsis thaliana]
  misc_feature (1)..(103): Homolog of NCBI NO: 18402859 NR Description: Expressed protein
  misc_feature (1)..(102): Homolog of NCBI NO: 21537121 NR Description: photosystem II [Arabidopsis thaliana]
  misc_feature (1)..(103): Homolog of NCBI NO: 2129671 NR Description: photosystem II protein psbT - Arabidopsis thaliana
  misc_feature (1)..(103): Homolog of NCBI NO: 1465366 NR Description: photosystem II [Arabidopsis thaliana]
  misc_feature (1)..(103): Homolog of NCBI NO: 18402859 NR Description: Expressed protein
  misc_feature (1)..(102): Homolog of NCBI NO: 400198 NR Description: Photosystem II 5 kDa protein, chloroplast
  misc_feature (1)..(102): Homolog of NCBI NO: 18403499 NR Description: photosystem II 5 KD protein

SEQ ID NO: 50809 - protein, 100 aa, Arabidopsis thaliana; identical to SEQ ID NO: 24391
  peptide (1)..(100): Ceres Seq. ID no. 12395208
  misc_feature (1)..(99): Homolog of NCBI NO: 400198 NR Description: Photosystem II 5 kDa protein, chloroplast
  misc_feature (1)..(99): Homolog of NCBI NO: 18403499 NR Description: photosystem II 5 KD protein
  misc_feature (1)..(99): Homolog of NCBI NO: 21537121 NR Description: photosystem II [Arabidopsis thaliana]
  misc_feature (1)..(100): Homolog of NCBI NO: 2129671 NR Description: photosystem II protein psbT - Arabidopsis thaliana
  misc_feature (1)..(100): Homolog of NCBI NO: 1465366 NR Description: photosystem II [Arabidopsis thaliana]
  misc_feature (1)..(100): Homolog of NCBI NO: 18402859 NR Description: Expressed protein
  misc_feature (1)..(99): Homolog of NCBI NO: 400198 NR Description: Photosystem II 5 kDa protein, chloroplast
  misc_feature (1)..(99): Homolog of NCBI NO: 18403499 NR Description: photosystem II 5 KD protein
  misc_feature (1)..(99): Homolog of NCBI NO: 21537121 NR Description: photosystem II [Arabidopsis thaliana]
  misc_feature (1)..(100): Homolog of NCBI NO: 2129671 NR Description: photosystem II protein psbT - Arabidopsis thaliana
  misc_feature (1)..(100): Homolog of NCBI NO: 1465366 NR Description: photosystem II [Arabidopsis thaliana]
  misc_feature (1)..(100): Homolog of NCBI NO: 18402859 NR Description: Expressed protein

SEQ ID NO: 50810 - DNA, 1569 bp, Arabidopsis thaliana
  misc_feature (1)..(1569): Ceres Seq. ID no. 13575342
  misc_feature: MA Experiment ID: 20000265 Result: Up-regulated in Transcription
  misc_feature: MA Experiment 20000265 PARAMETER Experiment Name: At_Open_Flower_P Parameter: Age (day) Value: 21
  misc_feature: MA Experiment 20000265 PARAMETER Experiment Name: At_Open_Flower_P Parameter: Plant Line Value: WS
  misc_feature: MA Experiment 20000265 PARAMETER Experiment Name: At_Open_Flower_P Parameter: Tissue Value: Closed Flower vs. Whole Plant
  misc_feature: MA Experiment ID: 20000495 Result: Up-regulated in Transcription
  misc_feature: MA Experiment 20000495 PARAMETER Experiment Name: At_Guard_Cells_P Parameter: Harvest Date Value: 8/2/2002
  misc_feature: MA Experiment 20000495 PARAMETER Experiment Name: At_Guard_Cells_P Parameter: Organism Value: A. thaliana
  misc_feature: MA Experiment 20000495 PARAMETER Experiment Name: At_Guard_Cells_P Parameter: Tissue Value: Guard Cells vs. Leaves
  misc_feature: MA Experiment ID: 20000794 Result: Up-regulated in Transcription
  misc_feature: MA Experiment 20000794 PARAMETER Experiment Name: At_Petals_P Parameter: Age (day) Value: 23-25 days
  misc_feature: MA Experiment 20000794 PARAMETER Experiment Name: At_Petals_P Parameter: Plant Line Value: WS
  misc_feature: MA Experiment 20000794 PARAMETER Experiment Name: At_Petals_P Parameter: Tissue Value: Petals vs. Whole plant
gaataatcagaatccggttagagattgaatttgggttttgttagttttgcttcttctctctgcaaaaatcctccatccgcttcctcacgaaaaaccctagcacagctccgagatcccttttgtcgccatgggagactccggcgatcctttcttgcgtaatccaaacgccgctgttcaagctcgcgctaaagttcagaacagagccaatgttcttcagcttaagctgatgggtcagagccaccctactggcttaacaaacaatctcttgaagctttttgagccacgtccgccattggagtacaaaccaccaccagagaagagaaagtgcccgccttatacaggtatggctcagtttgtaagtaactttgctgagcctggggatccagaatacgctccacctaagccagaagttgaattaccttcgcagaaaagggaaagaattcataaattgcgactggagaaaggtgttgaaaaggctgctgaggacttaaagaaatatgaccccaataatgatccaaatgctactggagatccatacaagacattgttcgtttcaagacttaactacgaatcctcagagagtaagattaaaagggagtttgaatcttatggaccaattaaacgggttcatttggtgactgatcagctgaccaataaacccaaaggatatgctttcattgagtacatgcacacccgtgacatgaaagctgcatataagcaagctgatggacaaaagattgacggcagaagagttttggttgatgtggagagaggtagaaccgtcccaaactggcgtccacgcaggcttggtggtggacttgggacctcaagagtgggtggtggtgaagaaattgttggggaacaacaaccgcaaggaagaacctcccagtcagaggagccatcgagaccacgggaagagcgtgagaaatctcgggaaaagggaaaagaaagggaaaggtctcgtgagctgtctcacgaacaacctcgagagaggtctcgtgacagaccgagagaggataagcaccacagagaccgagaccaaggaggcagagacagggatagggacagcagacgtgatcgtgaccggacccgtgacagaggagacagagaccgccgtgaccgtgacaggggacgggatcgtacttcaagggatcatgaccgagaccgcagtagaaagaaggagcgggattatgaaggaggtgaatatgagcatgagggtggtggtcggtcccgtgagagagatgcagagtaccgtggcgagccagaagaaactcgtggctactatgaagacgatcaaggggacacagaccggtacagtcatcgctacgataaaatggaggaagatgacttcagatatgaacgtgagtacaagcggtctaagagatcagaatcgcgagagtatgttcgttgatgtttcattcggctgtttaaaactctaaaaacttaagaatcctttttgtttattctaaatcaaaacttgatgcaattctgtttgttacctctgaacttgattgctattttttctcttttgaagtttgtcatattattaatcaaaatcaaaccaacttt

SEQ ID NO: 50811 - protein, 427 aa, Arabidopsis thaliana
  peptide (1)..(427): Ceres Seq. ID no. 13575343
  misc_feature (140)..(211): Pfam Name: RNA recognition motif. (a.k.a. RRM, RBD, or RNP domain) Pfam Description: RNA recognition motif. (a.k.a. RRM, RBD, or RNP
  misc_feature (42)..(388): Homolog of NCBI NO: 103057 NR Description: 70K U1 small nuclear ribonucleoprotein - fruit
  misc_feature (54)..(424): Homolog of NCBI NO: 134091 NR Description: U1 small nuclear ribonucleoprotein 70 kDa (U1
  misc_feature (42)..(377): Homolog of NCBI NO: 34856077 NR Description: similar to U1 small nuclear ribonucleoprotein 70
  misc_feature (42)..(423): Homolog of NCBI NO: 29568103 NR Description: U1 small nuclear ribonucleoprotein 70 kDa
  misc_feature (42)..(405): Homolog of NCBI NO: 337445 NR Description: ribonucleoprotein antigen
  misc_feature (17)..(423): Homolog of NCBI NO: 88959 NR Description: U1 snRNP 70K protein - human
  misc_feature (42)..(424): Homolog of NCBI NO: 134091 NR Description: U1 small nuclear ribonucleoprotein 70 kDa (U1
  misc_feature (1)..(167): Homolog of NCBI NO: 30693345 NR Description: U1 small nuclear ribonucleoprotein 70 (U1-70k)
  misc_feature (107)..(408): Homolog of NCBI NO: 322618 NR Description: U1 snRNP 70K protein - Arabidopsis thaliana
  misc_feature (1)..(427): Homolog of NCBI NO: 15229825 NR Description: U1 small nuclear ribonucleoprotein 70 (U1-70k)
MGDSGDPFLRNPNAAVQARAKVQNRANVLQLKLMGQSHPTGLTNNLLKLFEPRPPLEYKPPPEKRKCPPYTGMAQFVSNFAEPGDPEYAPPKPEVELPSQKRERIHKLRLEKGVEKAAEDLKKYDPNNDPNATGDPYKTLFVSRLNYESSESKIKREFESYGPIKRVHLVTDQLTNKPKGYAFIEYMHTRDMKAAYKQADGQKIDGRRVLVDVERGRTVPNWRPRRLGGGLGTSRVGGGEEIVGEQQPQGRTSQSEEPSRPREEREKSREKGKERERSRELSHEQPRERSRDRPREDKHHRDRDQGGRDRDRDSRRDRDRTRDRGDRDRRDRDRGRDRTSRDHDRDRSRKKERDYEGGEYEHEGGGRSRERDAEYRGEPEETRGYYEDDQGDTDRYSHRYDKMEEDDFRYEREYKRSKRSESREYVR

SEQ ID NO: 50812 - protein, 394 aa, Arabidopsis thaliana
  peptide (1)..(394): Ceres Seq. ID no. 13575344
  misc_feature (107)..(178): Pfam Name: RNA recognition motif. (a.k.a. RRM, RBD, or RNP domain) Pfam Description: RNA recognition motif. (a.k.a. RRM, RBD, or RNP
  misc_feature (9)..(355): Homolog of NCBI NO: 103057 NR Description: 70K U1 small nuclear ribonucleoprotein - fruit
  misc_feature (21)..(391): Homolog of NCBI NO: 134091 NR Description: U1 small nuclear ribonucleoprotein 70 kDa (U1
  misc_feature (9)..(344): Homolog of NCBI NO: 34856077 NR Description: similar to U1 small nuclear ribonucleoprotein 70
  misc_feature (9)..(390): Homolog of NCBI NO: 29568103 NR Description: U1 small nuclear ribonucleoprotein 70 kDa
  misc_feature (9)..(372): Homolog of NCBI NO: 337445 NR Description: ribonucleoprotein antigen
  misc_feature (1)..(390): Homolog of NCBI NO: 88959 NR Description: U1 snRNP 70K protein - human
  misc_feature (9)..(391): Homolog of NCBI NO: 134091 NR Description: U1 small nuclear ribonucleoprotein 70 kDa (U1
  misc_feature (1)..(134): Homolog of NCBI NO: 30693345 NR Description: U1 small nuclear ribonucleoprotein 70 (U1-70k)
  misc_feature (74)..(375): Homolog of NCBI NO: 322618 NR Description: U1 snRNP 70K protein - Arabidopsis thaliana
  misc_feature (1)..(394): Homolog of NCBI NO: 15229825 NR Description: U1 small nuclear ribonucleoprotein 70 (U1-70k)
MGQSHPTGLTNNLLKLFEPRPPLEYKPPPEKRKCPPYTGMAQFVSNFAEPGDPEYAPPKPEVELPSQKRERIHKLRLEKGVEKAAEDLKKYDPNNDPNATGDPYKTLFVSRLNYESSESKIKREFESYGPIKRVHLVTDQLTNKPKGYAFIEYMHTRDMKAAYKQADGQKIDGRRVLVDVERGRTVPNWRPRRLGGGLGTSRVGGGEEIVGEQQPQGRTSQSEEPSRPREEREKSREKGKERERSRELSHEQPRERSRDRPREDKHHRDRDQGGRDRDRDSRRDRDRTRDRGDRDRRDRDRGRDRTSRDHDRDRSRKKERDYEGGEYEHEGGGRSRERDAEYRGEPEETRGYYEDDQGDTDRYSHRYDKMEEDDFRYEREYKRSKRSESREYVR

SEQ ID NO: 50813 - protein, 355 aa, Arabidopsis thaliana
  peptide (1)..(355): Ceres Seq. ID no. 13575345
  misc_feature (68)..(139): Pfam Name: RNA recognition motif. (a.k.a. RRM, RBD, or RNP domain) Pfam Description: RNA recognition motif. (a.k.a. RRM, RBD, or RNP
  misc_feature (1)..(316): Homolog of NCBI NO: 103057 NR Description: 70K U1 small nuclear ribonucleoprotein - fruit
  misc_feature (1)..(352): Homolog of NCBI NO: 134091 NR Description: U1 small nuclear ribonucleoprotein 70 kDa (U1
  misc_feature (1)..(305): Homolog of NCBI NO: 34856077 NR Description: similar to U1 small nuclear ribonucleoprotein 70
  misc_feature (1)..(351): Homolog of NCBI NO: 29568103 NR Description: U1 small nuclear ribonucleoprotein 70 kDa
  misc_feature (1)..(333): Homolog of NCBI NO: 337445 NR Description: ribonucleoprotein antigen
  misc_feature (1)..(351): Homolog of NCBI NO: 88959 NR Description: U1 snRNP 70K protein - human
  misc_feature (1)..(352): Homolog of NCBI NO: 134091 NR Description: U1 small nuclear ribonucleoprotein 70 kDa (U1
  misc_feature (1)..(95): Homolog of NCBI NO: 30693345 NR Description: U1 small nuclear ribonucleoprotein 70 (U1-70k)
  misc_feature (35)..(336): Homolog of NCBI NO: 322618 NR Description: U1 snRNP 70K protein - Arabidopsis thaliana
  misc_feature (1)..(355): Homolog of NCBI NO: 15229825 NR Description: U1 small nuclear ribonucleoprotein 70 (U1-70k)
MAQFVSNFAEPGDPEYAPPKPEVELPSQKRERIHKLRLEKGVEKAAEDLKKYDPNNDPNATGDPYKTLFVSRLNYESSESKIKREFESYGPIKRVHLVTDQLTNKPKGYAFIEYMHTRDMKAAYKQADGQKIDGRRVLVDVERGRTVPNWRPRRLGGGLGTSRVGGGEEIVGEQQPQGRTSQSEEPSRPREEREKSREKGKERERSRELSHEQPRERSRDRPREDKHHRDRDQGGRDRDRDSRRDRDRTRDRGDRDRRDRDRGRDRTSRDHDRDRSRKKERDYEGGEYEHEGGGRSRERDAEYRGEPEETRGYYEDDQGDTDRYSHRYDKMEEDDFRYEREYKRSKRSESREYVR

SEQ ID NO: 50814 - DNA, 1229 bp, Arabidopsis thaliana; identical to SEQ ID NO: 49371
  misc_feature (1)..(1229): Ceres Seq. ID no. 12601816
  misc_feature: MA Experiment ID: 20000314 Result: Down-regulated in Transcription
  misc_feature: MA Experiment 20000314 PARAMETER Experiment Name: At_14day_Shoots-Roots_Sub_P Parameter: Age (day) Value: 14
  misc_feature: MA Experiment 20000314 PARAMETER Experiment Name: At_14day_Shoots-Roots_Sub_P Parameter: Organism Value: A. thaliana
  misc_feature: MA Experiment 20000314 PARAMETER Experiment Name: At_14day_Shoots-Roots_Sub_P Parameter: Plant Line Value: WS
  misc_feature: MA Experiment 20000314 PARAMETER Experiment Name: At_14day_Shoots-Roots_Sub_P Parameter: Tissue Value: Roots vs. Whole Plant
  misc_feature: MA Experiment ID: 20000315 Result: Down-regulated in Transcription
  misc_feature: MA Experiment 20000315 PARAMETER Experiment Name: At_14day_Shoots-Roots_Sub_P Parameter: Age (day) Value: 14
  misc_feature: MA Experiment 20000315 PARAMETER Experiment Name: At_14day_Shoots-Roots_Sub_P Parameter: Organism Value: A. thaliana
  misc_feature: MA Experiment 20000315 PARAMETER Experiment Name: At_14day_Shoots-Roots_Sub_P Parameter: Plant Line Value: WS
  misc_feature: MA Experiment 20000315 PARAMETER Experiment Name: At_14day_Shoots-Roots_Sub_P Parameter: Tissue Value: Shoots vs. Whole Plant
  misc_feature: MA Experiment ID: 20000352 Result: Down-regulated in Transcription
  misc_feature: MA Experiment 20000352 PARAMETER Experiment Name: At_Drought_Sub_P Parameter: Age (day) Value: 7
  misc_feature: MA Experiment 20000352 PARAMETER Experiment Name: At_Drought_Sub_P Parameter: Organism Value: A. thaliana
  misc_feature: MA Experiment 20000352 PARAMETER Experiment Name: At_Drought_Sub_P Parameter: Plant Line Value: WS
  misc_feature: MA Experiment 20000352 PARAMETER Experiment Name: At_Drought_Sub_P Parameter: Timepoint (hr) Value: 6
  misc_feature: MA Experiment 20000352 PARAMETER Experiment Name: At_Drought_Sub_P Parameter: Tissue Value: Whole Plant
  misc_feature: MA Experiment 20000352 PARAMETER Experiment Name: At_Drought_Sub_P Parameter: Treatment Value: Drought vs. No Drought
  misc_feature: MA Experiment ID: 20001807 Result: Down-regulated in Transcription
  misc_feature: MA Experiment 20001807 PARAMETER Experiment Name: At_50mM_NH4NO3_L-to-H_Sub_P Parameter: Timepoint (hr) Value: 6
  misc_feature: MA Experiment 20001807 PARAMETER Experiment Name: At_50mM_NH4NO3_L-to-H_Sub_P Parameter: Tissue Value: Leaf
  misc_feature: MA Experiment 20001807 PARAMETER Experiment Name: At_50mM_NH4NO3_L-to-H_Sub_P Parameter: Treatment Value: 50mM NH4NO3 vs 100mM Mannitol

SEQ ID NO: 50815 - protein, 318 aa, Arabidopsis thaliana; identical to SEQ ID NO: 49372
  peptide (1)..(318): Ceres Seq. ID no. 12601817
  misc_feature (62)..(318): Pfam Name: Family of unknown function (DUF706) Pfam Description: Family of unknown function (DUF706)
  misc_feature (62)..(318): Pfam Name: Family of unknown function (DUF706) Pfam Description: Family of unknown function (DUF706)
  misc_feature (77)..(318): Homolog of NCBI NO: 13877657 NR Description: Unknown protein [Arabidopsis thaliana]
  misc_feature (18)..(310): Homolog of NCBI NO: 7262695 NR Description: Strong similarity to an unknown protein from
  misc_feature (20)..(318): Homolog of NCBI NO: 26451656 NR Description: unknown protein [Arabidopsis thaliana]
  misc_feature (20)..(318): Homolog of NCBI NO: 30683840 NR Description: expressed protein [Arabidopsis thaliana]
  misc_feature (1)..(318): Homolog of NCBI NO: 21554393 NR Description: unknown [Arabidopsis thaliana]
  misc_feature (77)..(318): Homolog of NCBI NO: 13877657 NR Description: Unknown protein [Arabidopsis thaliana]
  misc_feature (20)..(318): Homolog of NCBI NO: 26451656 NR Description: unknown protein [Arabidopsis thaliana]
  misc_feature (1)..(318): Homolog of NCBI NO: 21554393 NR Description: unknown [Arabidopsis thaliana]
  misc_feature (1)..(318): Homolog of NCBI NO: 7487428 NR Description: hypothetical protein T25K17.70 - Arabidopsis
  misc_feature (1)..(318): Homolog of NCBI NO: 30687167 NR Description: expressed protein [Arabidopsis thaliana]
  misc_feature (1)..(318): Homolog of NCBI NO: 21536858 NR Description: unknown [Arabidopsis thaliana]
  misc_feature (1)..(318): Homolog of NCBI NO: 15241891 NR Description: putative protein
  misc_feature (1)..(318): Homolog of NCBI NO: 18399158 NR Description: expressed protein
  misc_feature (20)..(318): Homolog of NCBI NO: 30683840 NR Description: expressed protein [Arabidopsis thaliana]
  misc_feature (18)..(310): Homolog of NCBI NO: 7262695 NR Description: Strong similarity to an unknown protein from
  misc_feature (1)..(318): Homolog of NCBI NO: 18399158 NR Description: expressed protein
  misc_feature (1)..(318): Homolog of NCBI NO: 15241891 NR Description: putative protein
  misc_feature (1)..(318): Homolog of NCBI NO: 21536858 NR Description: unknown [Arabidopsis thaliana]
  misc_feature (1)..(318): Homolog of NCBI NO: 30687167 NR Description: expressed protein [Arabidopsis thaliana]
  misc_feature (1)..(318): Homolog of NCBI NO: 7487428 NR Description: hypothetical protein T25K17.70 - Arabidopsis

SEQ ID NO: 50816 - protein, 284 aa, Arabidopsis thaliana; identical to SEQ ID NO: 49373
  peptide (1)..(284): Ceres Seq. ID no. 12601818
  misc_feature (28)..(284): Pfam Name: Family of unknown function (DUF706) Pfam Description: Family of unknown function (DUF706)
  misc_feature (28)..(284): Pfam Name: Family of unknown function (DUF706) Pfam Description: Family of unknown function (DUF706)
  misc_feature (43)..(284): Homolog of NCBI NO: 13877657 NR Description: Unknown protein [Arabidopsis thaliana]
  misc_feature (1)..(276): Homolog of NCBI NO: 7262695 NR Description: Strong similarity to an unknown protein from
  misc_feature (1)..(284): Homolog of NCBI NO: 26451656 NR Description: unknown protein [Arabidopsis thaliana]
  misc_feature (1)..(284): Homolog of NCBI NO: 30683840 NR Description: expressed protein [Arabidopsis thaliana]
  misc_feature (1)..(284): Homolog of NCBI NO: 21554393 NR Description: unknown [Arabidopsis thaliana]
  misc_feature (43)..(284): Homolog of NCBI NO: 13877657 NR Description: Unknown protein [Arabidopsis thaliana]
  misc_feature (1)..(284): Homolog of NCBI NO: 26451656 NR Description: unknown protein [Arabidopsis thaliana]
  misc_feature (1)..(284): Homolog of NCBI NO: 21554393 NR Description: unknown [Arabidopsis thaliana]
  misc_feature (1)..(284): Homolog of NCBI NO: 7487428 NR Description: hypothetical protein T25K17.70 - Arabidopsis
  misc_feature (1)..(284): Homolog of NCBI NO: 30687167 NR Description: expressed protein [Arabidopsis thaliana]
  misc_feature (1)..(284): Homolog of NCBI NO: 21536858 NR Description: unknown [Arabidopsis thaliana]
  misc_feature (1)..(284): Homolog of NCBI NO: 15241891 NR Description: putative protein
  misc_feature (1)..(284): Homolog of NCBI NO: 18399158 NR Description: expressed protein
  misc_feature (1)..(284): Homolog of NCBI NO: 30683840 NR Description: expressed protein [Arabidopsis thaliana]
  misc_feature (1)..(276): Homolog of NCBI NO: 7262695 NR Description: Strong similarity to an unknown protein from
  misc_feature (1)..(284): Homolog of NCBI NO: 18399158 NR Description: expressed protein
  misc_feature (1)..(284): Homolog of NCBI NO: 15241891 NR Description: putative protein
  misc_feature (1)..(284): Homolog of NCBI NO: 21536858 NR Description: unknown [Arabidopsis thaliana]
  misc_feature (1)..(284): Homolog of NCBI NO: 30687167 NR Description: expressed protein [Arabidopsis thaliana]
  misc_feature (1)..(284): Homolog of NCBI NO: 7487428 NR Description: hypothetical protein T25K17.70 - Arabidopsis

SEQ ID NO: 50817 - protein, 281 aa, Arabidopsis thaliana; identical to SEQ ID NO: 49374
  peptide (1)..(281): Ceres Seq. ID no. 12601819
  misc_feature (25)..(281): Pfam Name: Family of unknown function (DUF706) Pfam Description: Family of unknown function (DUF706)
  misc_feature (25)..(281): Pfam Name: Family of unknown function (DUF706) Pfam Description: Family of unknown function (DUF706)
  misc_feature (40)..(281): Homolog of NCBI NO: 13877657 NR Description: Unknown protein [Arabidopsis thaliana]
  misc_feature (1)..(273): Homolog of NCBI NO: 7262695 NR Description: Strong similarity to an unknown protein from
  misc_feature (1)..(281): Homolog of NCBI NO: 26451656 NR Description: unknown protein [Arabidopsis thaliana]
  misc_feature (1)..(281): Homolog of NCBI NO: 30683840 NR Description: expressed protein [Arabidopsis thaliana]
  misc_feature (1)..(281): Homolog of NCBI NO: 21554393 NR Description: unknown [Arabidopsis thaliana]
  misc_feature (40)..(281): Homolog of NCBI NO: 13877657 NR Description: Unknown protein [Arabidopsis thaliana]
  misc_feature (1)..(281): Homolog of NCBI NO: 26451656 NR Description: unknown protein [Arabidopsis thaliana]
  misc_feature (1)..(281): Homolog of NCBI NO: 21554393 NR Description: unknown [Arabidopsis thaliana]
  misc_feature (1)..(281): Homolog of NCBI NO: 7487428 NR Description: hypothetical protein T25K17.70 - Arabidopsis
  misc_feature (1)..(281): Homolog of NCBI NO: 30687167 NR Description: expressed protein [Arabidopsis thaliana]
  misc_feature (1)..(281): Homolog of NCBI NO: 21536858 NR Description: unknown [Arabidopsis thaliana]
  misc_feature (1)..(281): Homolog of NCBI NO: 15241891 NR Description: putative protein
  misc_feature (1)..(281): Homolog of NCBI NO: 18399158 NR Description: expressed protein
  misc_feature (1)..(281): Homolog of NCBI NO: 30683840 NR Description: expressed protein [Arabidopsis thaliana]
  misc_feature (1)..(273): Homolog of NCBI NO: 7262695 NR Description: Strong similarity to an unknown protein from
  misc_feature (1)..(281): Homolog of NCBI NO: 18399158 NR Description: expressed protein
  misc_feature (1)..(281): Homolog of NCBI NO: 15241891 NR Description: putative protein
  misc_feature (1)..(281): Homolog of NCBI NO: 21536858 NR Description: unknown [Arabidopsis thaliana]
  misc_feature (1)..(281): Homolog of NCBI NO: 30687167 NR Description: expressed protein [Arabidopsis thaliana]
  misc_feature (1)..(281): Homolog of NCBI NO: 7487428 NR Description: hypothetical protein T25K17.70 - Arabidopsis

SEQ ID NO: 50818 - DNA, 1620 bp, Arabidopsis thaliana; identical to SEQ ID NO: 48248
  misc_feature (1)..(1620): Ceres Seq. ID no. 12559488
  misc_feature: MA Experiment ID: 20000171 Result: Up-regulated in Transcription
  misc_feature: MA Experiment 20000171 PARAMETER Experiment Name: At_42deg_Heat_P Parameter: Age (day) Value: 14
  misc_feature: MA Experiment 20000171 PARAMETER Experiment Name: At_42deg_Heat_P Parameter: Organism Value: A. thaliana
  misc_feature: MA Experiment 20000171 PARAMETER Experiment Name: At_42deg_Heat_P Parameter: Plant Line Value: WS
  misc_feature: MA Experiment 20000171 PARAMETER Experiment Name: At_42deg_Heat_P Parameter: Temperature (deg C) Value: 42 vs. 22
  misc_feature: MA Experiment 20000171 PARAMETER Experiment Name: At_42deg_Heat_P Parameter: Timepoint (hr) Value: 1
  misc_feature: MA Experiment 20000171 PARAMETER Experiment Name: At_42deg_Heat_P Parameter: Tissue Value: Aerial
  misc_feature: MA Experiment ID: 20000173 Result: Up-regulated in Transcription
  misc_feature: MA Experiment 20000173 PARAMETER Experiment Name: At_42deg_Heat_P Parameter: Age (day) Value: 14
  misc_feature: MA Experiment 20000173 PARAMETER Experiment Name: At_42deg_Heat_P Parameter: Organism Value: A. thaliana
  misc_feature: MA Experiment 20000173 PARAMETER Experiment Name: At_42deg_Heat_P Parameter: Plant Line Value: WS
  misc_feature: MA Experiment 20000173 PARAMETER Experiment Name: At_42deg_Heat_P Parameter: Temperature (deg C) Value: 42 vs. 22
  misc_feature: MA Experiment 20000173 PARAMETER Experiment Name: At_42deg_Heat_P Parameter: Timepoint (hr) Value: 6
  misc_feature: MA Experiment 20000173 PARAMETER Experiment Name: At_42deg_Heat_P Parameter: Tissue Value: Aerial
  misc_feature: MA Experiment ID: 20000437 Result: Up-regulated in Transcription
  misc_feature: MA Experiment 20000437 PARAMETER Experiment Name: At_Drought_P Parameter: Age (day) Value: 8
  misc_feature: MA Experiment 20000437 PARAMETER Experiment Name: At_Drought_P Parameter: Organism Value: A. thaliana
  misc_feature: MA Experiment 20000437 PARAMETER Experiment Name: At_Drought_P Parameter: Plant Line Value: WS
  misc_feature: MA Experiment 20000437 PARAMETER Experiment Name: At_Drought_P Parameter: Timepoint (hr) Value: 24
  misc_feature: MA Experiment 20000437 PARAMETER Experiment Name: At_Drought_P Parameter: Tissue Value: Whole Plant
  misc_feature: MA Experiment 20000437 PARAMETER Experiment Name: At_Drought_P Parameter: Treatment Value: Drought vs. No Drought
  misc_feature: MA Experiment ID: 20001451 Result: Up-regulated in Transcription
  misc_feature: MA Experiment 20001451 PARAMETER Experiment Name: At_Far-red-induction_P Parameter: Age (day) Value: 7
  misc_feature: MA Experiment 20001451 PARAMETER Experiment Name: At_Far-red-induction_P Parameter: Light Value: Far-red vs. White
  misc_feature: MA Experiment 20001451 PARAMETER Experiment Name: At_Far-red-induction_P Parameter: Organism Value: A. thaliana
  misc_feature: MA Experiment 20001451 PARAMETER Experiment Name: At_Far-red-induction_P Parameter: Plant Line Value: Columbia
  misc_feature: MA Experiment 20001451 PARAMETER Experiment Name: At_Far-red-induction_P Parameter: Timepoint (hr) Value: 24
  misc_feature: MA Experiment 20001451 PARAMETER Experiment Name: At_Far-red-induction_P Parameter: Tissue Value: Whole Plant
  misc_feature: MA Experiment ID: 20001905 Result: Up-regulated in Transcription
  misc_feature: MA Experiment 20001905 PARAMETER Experiment Name: At_Drought_Reproduction_P Parameter: Age (day) Value: 40
  misc_feature: MA Experiment 20001905 PARAMETER Experiment Name: At_Drought_Reproduction_P Parameter: Organism Value: A. thaliana
  misc_feature: MA Experiment 20001905 PARAMETER Experiment Name: At_Drought_Reproduction_P Parameter: Plant Line Value: WS
  misc_feature: MA Experiment 20001905 PARAMETER Experiment Name: At_Drought_Reproduction_P Parameter: Timepoint (day) Value: 10
  misc_feature: MA Experiment 20001905 PARAMETER Experiment Name: At_Drought_Reproduction_P Parameter: Tissue Value: Rosettes
  misc_feature: MA Experiment 20001905 PARAMETER Experiment Name: At_Drought_Reproduction_P Parameter: Treatment Value: Drought vs. No Drought
  misc_feature: MA Experiment ID: 20001911 Result: Up-regulated in Transcription
  misc_feature: MA Experiment 20001911 PARAMETER Experiment Name: At_Drought_Reproduction_P Parameter: Age (day) Value: 40
  misc_feature: MA Experiment 20001911 PARAMETER Experiment Name: At_Drought_Reproduction_P Parameter: Organism Value: A. thaliana
  misc_feature: MA Experiment 20001911 PARAMETER Experiment Name: At_Drought_Reproduction_P Parameter: Plant Line Value: WS
  misc_feature: MA Experiment 20001911 PARAMETER Experiment Name: At_Drought_Reproduction_P Parameter: Timepoint (day) Value: 10
  misc_feature: MA Experiment 20001911 PARAMETER Experiment Name: At_Drought_Reproduction_P Parameter: Tissue Value: Flowers
  misc_feature: MA Experiment 20001911 PARAMETER Experiment Name: At_Drought_Reproduction_P Parameter: Treatment Value: Drought vs. No Drought

SEQ ID NO: 50819 - protein, 351 aa, Arabidopsis thaliana; identical to SEQ ID NO: 48249
  peptide (1)..(351): Ceres Seq. ID no. 12559489
  misc_feature (223)..(263): Pfam Name: Zinc finger, C3HC4 type (RING finger) Pfam Description: Zinc finger, C3HC4 type (RING finger)
  misc_feature (223)..(263): Pfam Name: Zinc finger, C3HC4 type (RING finger) Pfam Description: Zinc finger, C3HC4 type (RING finger)
  misc_feature (173)..(290): Homolog of NCBI NO: 11994207 NR Description: gene_id:MPN9.20~unknown protein [Arabidopsis
  misc_feature (2)..(302): Homolog of NCBI NO: 34903272 NR Description: unnamed protein product [Oryza sativa (japonica
  misc_feature (312)..(351): Homolog of NCBI NO: 22328949 NR Description: putative protein
  misc_feature (312)..(351): Homolog of NCBI NO: 7486783 NR Description: hypothetical protein M3E9.170 - Arabidopsis
  misc_feature (11)..(306): Homolog of NCBI NO: 22328949 NR Description: putative protein
  misc_feature (173)..(290): Homolog of NCBI NO: 11994207 NR Description: gene_id:MPN9.20~unknown protein [Arabidopsis
  misc_feature (312)..(351): Homolog of NCBI NO: 22328949 NR Description: putative protein
  misc_feature (11)..(306): Homolog of NCBI NO: 22328949 NR Description: putative protein
  misc_feature (1)..(351): Homolog of NCBI NO: 18405411 NR Description: expressed protein
  misc_feature (1)..(303): Homolog of NCBI NO: 15231238 NR Description: unknown protein; protein id: At3g13430.1
  misc_feature (1)..(303): Homolog of NCBI NO: 38454178 NR Description: At3g13430 [Arabidopsis thaliana]
  misc_feature (99)..(351): Homolog of NCBI NO: 15241188 NR Description: putative protein
  misc_feature (11)..(306): Homolog of NCBI NO: 7486783 NR Description: hypothetical protein M3E9.170 - Arabidopsis
  misc_feature (312)..(351): Homolog of NCBI NO: 7486783 NR Description: hypothetical protein M3E9.170 - Arabidopsis
  misc_feature (2)..(302): Homolog of NCBI NO: 34903272 NR Description: unnamed protein product [Oryza sativa (japonica
  misc_feature (11)..(306): Homolog of NCBI NO: 7486783 NR Description: hypothetical protein M3E9.170 - Arabidopsis
  misc_feature (99)..(351): Homolog of NCBI NO: 15241188 NR Description: putative protein
  misc_feature (1)..(303): Homolog of NCBI NO: 38454178 NR Description: At3g13430 [Arabidopsis thaliana]
  misc_feature (1)..(303): Homolog of NCBI NO: 15231238 NR Description: unknown protein; protein id: At3g13430.1
  misc_feature (1)..(351): Homolog of NCBI NO: 18405411 NR Description: expressed protein

SEQ ID NO: 50820 - protein, 339 aa, Arabidopsis thaliana; identical to SEQ ID NO: 48250
  peptide (1)..(339): Ceres Seq. ID no. 12559490
  misc_feature (211)..(251): Pfam Name: Zinc finger, C3HC4 type (RING finger) Pfam Description: Zinc finger, C3HC4 type (RING finger)
  misc_feature (211)..(251): Pfam Name: Zinc finger, C3HC4 type (RING finger) Pfam Description: Zinc finger, C3HC4 type (RING finger)
  misc_feature (161)..(278): Homolog of NCBI NO: 11994207 NR Description: gene_id:MPN9.20~unknown protein [Arabidopsis
  misc_feature (1)..(290): Homolog of NCBI NO: 34903272 NR Description: unnamed protein product [Oryza sativa (japonica
  misc_feature (300)..(339): Homolog of NCBI NO: 22328949 NR Description: putative protein
  misc_feature (300)..(339): Homolog of NCBI NO: 7486783 NR Description: hypothetical protein M3E9.170 - Arabidopsis
  misc_feature (1)..(294): Homolog of NCBI NO: 22328949 NR Description: putative protein
  misc_feature (161)..(278): Homolog of NCBI NO: 11994207 NR Description: gene_id:MPN9.20~unknown protein [Arabidopsis
  misc_feature (300)..(339): Homolog of NCBI NO: 22328949 NR Description: putative protein
  misc_feature (1)..(294): Homolog of NCBI NO: 22328949 NR Description: putative protein
  misc_feature (1)..(339): Homolog of NCBI NO: 18405411 NR Description: expressed protein
  misc_feature (1)..(291): Homolog of NCBI NO: 15231238 NR Description: unknown protein; protein id: At3g13430.1
  misc_feature (1)..(291): Homolog of NCBI NO: 38454178 NR Description: At3g13430 [Arabidopsis thaliana]
  misc_feature (87)..(339): Homolog of NCBI NO: 15241188 NR Description: putative protein
  misc_feature (1)..(294): Homolog of NCBI NO: 7486783 NR Description: hypothetical protein M3E9.170 - Arabidopsis
  misc_feature (300)..(339): Homolog of NCBI NO: 7486783 NR Description: hypothetical protein M3E9.170 - Arabidopsis
  misc_feature (1)..(290): Homolog of NCBI NO: 34903272 NR Description: unnamed protein product [Oryza sativa (japonica
  misc_feature (1)..(294): Homolog of NCBI NO: 7486783 NR Description: hypothetical protein M3E9.170 - Arabidopsis
  misc_feature (87)..(339): Homolog of NCBI NO: 15241188 NR Description: putative protein
  misc_feature (1)..(291): Homolog of NCBI NO: 38454178 NR Description: At3g13430 [Arabidopsis thaliana]
  misc_feature (1)..(291): Homolog of NCBI NO: 15231238 NR Description: unknown protein; protein id: At3g13430.1
  misc_feature (1)..(339): Homolog of NCBI NO: 18405411 NR Description: expressed protein

SEQ ID NO: 50821 - protein, 330 aa, Arabidopsis thaliana; identical to SEQ ID NO: 48251
  peptide (1)..(330): Ceres Seq. ID no. 12559491
  misc_feature (202)..(242): Pfam Name: Zinc finger, C3HC4 type (RING finger) Pfam Description: Zinc finger, C3HC4 type (RING finger)
  misc_feature (202)..(242): Pfam Name: Zinc finger, C3HC4 type (RING finger) Pfam Description: Zinc finger, C3HC4 type (RING finger)
  misc_feature (152)..(269): Homolog of NCBI NO: 11994207 NR Description: gene_id:MPN9.20~unknown protein [Arabidopsis
  misc_feature (1)..(281): Homolog of NCBI NO: 34903272 NR Description: unnamed protein product [Oryza sativa (japonica
  misc_feature (291)..(330): Homolog of NCBI NO: 22328949 NR Description: putative protein
  misc_feature (291)..(330): Homolog of NCBI NO: 7486783 NR Description: hypothetical protein M3E9.170 - Arabidopsis
  misc_feature (1)..(285): Homolog of NCBI NO: 22328949 NR Description: putative protein
  misc_feature (152)..(269): Homolog of NCBI NO: 11994207 NR Description: gene_id:MPN9.20~unknown protein [Arabidopsis
  misc_feature (291)..(330): Homolog of NCBI NO: 22328949 NR Description: putative protein
  misc_feature (1)..(285): Homolog of NCBI NO: 22328949 NR Description: putative protein
  misc_feature (1)..(330): Homolog of NCBI NO: 18405411 NR Description: expressed protein
  misc_feature (1)..(282): Homolog of NCBI NO: 15231238 NR Description: unknown protein; protein id: At3g13430.1
  misc_feature (1)..(282): Homolog of NCBI NO: 38454178 NR Description: At3g13430 [Arabidopsis thaliana]
  misc_feature (78)..(330): Homolog of NCBI NO: 15241188 NR Description: putative protein
  misc_feature (1)..(285): Homolog of NCBI NO: 7486783 NR Description: hypothetical protein M3E9.170 - Arabidopsis
  misc_feature (291)..(330): Homolog of NCBI NO: 7486783 NR Description: hypothetical protein M3E9.170 - Arabidopsis
  misc_feature (1)..(281): Homolog of NCBI NO: 34903272 NR Description: unnamed protein product [Oryza sativa (japonica
  misc_feature (1)..(285): Homolog of NCBI NO: 7486783 NR Description: hypothetical protein M3E9.170 - Arabidopsis
  misc_feature (78)..(330): Homolog of NCBI NO: 15241188 NR Description: putative protein
  misc_feature (1)..(282): Homolog of NCBI NO: 38454178 NR Description: At3g13430 [Arabidopsis thaliana]
  misc_feature (1)..(282): Homolog of NCBI NO: 15231238 NR Description: unknown protein; protein id: At3g13430.1
  misc_feature (1)..(330): Homolog of NCBI NO: 18405411 NR Description: expressed protein

SEQ ID NO: 50822 - DNA, 682 bp, Arabidopsis thaliana; identical to SEQ ID NO: 47245
  misc_feature (1)..(682): Ceres Seq. ID no. 12601843
  misc_feature: MA Experiment ID: 20000306 Result: Up-regulated in Transcription
  misc_feature: MA Experiment 20000306 PARAMETER Experiment Name: At_Germinating_Seeds_Sub_P Parameter: Age (hr) Value: 6 vs. 0
  misc_feature: MA Experiment 20000306 PARAMETER Experiment Name: At_Germinating_Seeds_Sub_P Parameter: Organism Value: A. thaliana
  misc_feature: MA Experiment 20000306 PARAMETER Experiment Name: At_Germinating_Seeds_Sub_P Parameter: Plant Line Value: WS
  misc_feature: MA Experiment 20000306 PARAMETER Experiment Name: At_Germinating_Seeds_Sub_P Parameter: Tissue Value: Germinating Seeds
  misc_feature: MA Experiment ID: 20000307 Result: Up-regulated in Transcription
  misc_feature: MA Experiment 20000307 PARAMETER Experiment Name: At_Germinating_Seeds_Sub_P Parameter: Age (hr) Value: 24 vs. 0
  misc_feature: MA Experiment 20000307 PARAMETER Experiment Name: At_Germinating_Seeds_Sub_P Parameter: Organism Value: A. thaliana
  misc_feature: MA Experiment 20000307 PARAMETER Experiment Name: At_Germinating_Seeds_Sub_P Parameter: Plant Line Value: WS
  misc_feature: MA Experiment 20000307 PARAMETER Experiment Name: At_Germinating_Seeds_Sub_P Parameter: Tissue Value: Germinating Seeds
  misc_feature: MA Experiment ID: 20000314 Result: Down-regulated in Transcription
  misc_feature: MA Experiment 20000314 PARAMETER Experiment Name: At_14day_Shoots-Roots_Sub_P Parameter: Age (day) Value: 14
  misc_feature: MA Experiment 20000314 PARAMETER Experiment Name: At_14day_Shoots-Roots_Sub_P Parameter: Organism Value: A. thaliana
  misc_feature: MA Experiment 20000314 PARAMETER Experiment Name: At_14day_Shoots-Roots_Sub_P Parameter: Plant Line Value: WS
  misc_feature: MA Experiment 20000314 PARAMETER Experiment Name: At_14day_Shoots-Roots_Sub_P Parameter: Tissue Value: Roots vs. Whole Plant
  misc_feature: MA Experiment ID: 20000315 Result: Up-regulated in Transcription
  misc_feature: MA Experiment 20000315 PARAMETER Experiment Name: At_14day_Shoots-Roots_Sub_P Parameter: Age (day) Value: 14
  misc_feature: MA Experiment 20000315 PARAMETER Experiment Name: At_14day_Shoots-Roots_Sub_P Parameter: Organism Value: A. thaliana
  misc_feature: MA Experiment 20000315 PARAMETER Experiment Name: At_14day_Shoots-Roots_Sub_P Parameter: Plant Line Value: WS
  misc_feature: MA Experiment 20000315 PARAMETER Experiment Name: At_14day_Shoots-Roots_Sub_P Parameter: Tissue Value: Shoots vs. Whole Plant
  misc_feature: MA Experiment ID: 20000328 Result: Up-regulated in Transcription
  misc_feature: MA Experiment 20000328 PARAMETER Experiment Name: At_42deg_Heat_Sub_P Parameter: Age (day) Value: 14
  misc_feature: MA Experiment 20000328 PARAMETER Experiment Name: At_42deg_Heat_Sub_P Parameter: Organism Value: A. thaliana
  misc_feature: MA Experiment 20000328 PARAMETER Experiment Name: At_42deg_Heat_Sub_P Parameter: Plant Line Value: WS
  misc_feature: MA Experiment 20000328 PARAMETER Experiment Name: At_42deg_Heat_Sub_P Parameter: Temperature (deg C) Value: 42 vs. 22
  misc_feature: MA Experiment 20000328 PARAMETER Experiment Name: At_42deg_Heat_Sub_P Parameter: Timepoint (hr) Value: 6
  misc_feature: MA Experiment 20000328 PARAMETER Experiment Name: At_42deg_Heat_Sub_P Parameter: Tissue Value: Aerial
  misc_feature: MA Experiment ID: 20001807 Result: Up-regulated in Transcription
  misc_feature: MA Experiment 20001807 PARAMETER Experiment Name: At_50mM_NH4NO3_L-to-H_Sub_P Parameter: Timepoint (hr) Value: 6
  misc_feature: MA Experiment 20001807 PARAMETER Experiment Name: At_50mM_NH4NO3_L-to-H_Sub_P Parameter: Tissue Value: Leaf
  misc_feature: MA Experiment 20001807 PARAMETER Experiment Name: At_50mM_NH4NO3_L-to-H_Sub_P Parameter: Treatment Value: 50mM NH4NO3 vs 100mM Mannitol

SEQ ID NO: 50823 - protein, 181 aa, Arabidopsis thaliana; identical to SEQ ID NO: 47246
  peptide (1)..(181): Ceres Seq. ID no. 12601844
  misc_feature (1)..(179): Homolog of NCBI NO: 68063 NR Description: ribulose-bisphosphate carboxylase (EC 4.1.1.39)
  misc_feature (1)..(179): Homolog of NCBI NO: 15219826 NR Description: ribulose-bisphosphate carboxylase small unit,
  misc_feature (1)..(181): Homolog of NCBI NO: 132154 NR Description: Ribulose bisphosphate carboxylase small chain,
  misc_feature (1)..(181): Homolog of NCBI NO: 266891 NR Description: Ribulose bisphosphate carboxylase small chain,
  misc_feature (1)..(181): Homolog of NCBI NO: 132091 NR Description: Ribulose bisphosphate carboxylase small chain F1,
  misc_feature (1)..(181): Homolog of NCBI NO: 15240901 NR Description: ribulose bisphosphate carboxylase small chain 3b
  misc_feature (1)..(181): Homolog of NCBI NO: 68060 NR Description: ribulose-bisphosphate carboxylase (EC 4.1.1.39)
  misc_feature (1)..(181): Homolog of NCBI NO: 15240912 NR Description: ribulose bisphosphate carboxylase small chain 1b
  misc_feature (1)..(181): Homolog of NCBI NO: 15240903 NR Description: ribulose bisphosphate carboxylase small chain 2b
  misc_feature (1)..(181): Homolog of NCBI NO: 68061 NR Description: ribulose-bisphosphate carboxylase (EC 4.1.1.39)
  misc_feature (1)..(179): Homolog of NCBI NO: 68063 NR Description: ribulose-bisphosphate carboxylase (EC 4.1.1.39)
  misc_feature (1)..(179): Homolog of NCBI NO: 15219826 NR Description: ribulose-bisphosphate carboxylase small unit,
  misc_feature (1)..(181): Homolog of NCBI NO: 132154 NR Description: Ribulose bisphosphate carboxylase small chain,
  misc_feature (1)..(181): Homolog of NCBI NO: 266891 NR Description: Ribulose bisphosphate carboxylase small chain,
  misc_feature (1)..(181): Homolog of NCBI NO: 132091 NR Description: Ribulose bisphosphate carboxylase small chain F1,
  misc_feature (1)..(181): Homolog of NCBI NO: 15240901 NR Description: ribulose bisphosphate carboxylase small chain 3b
  misc_feature (1)..(181): Homolog of NCBI NO: 68060 NR Description: ribulose-bisphosphate carboxylase (EC 4.1.1.39)
  misc_feature (1)..(181): Homolog of NCBI NO: 15240912 NR Description: ribulose bisphosphate carboxylase small chain 1b
  misc_feature (1)..(181): Homolog of NCBI NO: 15240903 NR Description: ribulose bisphosphate carboxylase small chain 2b
  misc_feature (1)..(181): Homolog of NCBI NO: 68061 NR Description: ribulose-bisphosphate carboxylase (EC 4.1.1.39)
  misc_feature (1)..(179): Homolog of NCBI NO: 68063 NR Description: ribulose-bisphosphate carboxylase (EC 4.1.1.39)
  misc_feature (1)..(179): Homolog of NCBI NO: 15219826 NR Description: ribulose-bisphosphate carboxylase small unit,
  misc_feature (1)..(181): Homolog of NCBI NO: 132154 NR Description: Ribulose bisphosphate carboxylase small chain,
  misc_feature (1)..(181): Homolog of NCBI NO: 266891 NR Description: Ribulose bisphosphate carboxylase small chain,
  misc_feature (1)..(181): Homolog of NCBI NO: 132091 NR Description: Ribulose bisphosphate carboxylase small chain F1,
  misc_feature (1)..(181): Homolog of NCBI NO: 15240901 NR Description: ribulose bisphosphate carboxylase small chain 3b
  misc_feature (1)..(181): Homolog of NCBI NO: 68060 NR Description: ribulose-bisphosphate carboxylase (EC 4.1.1.39)
  misc_feature (1)..(181): Homolog of NCBI NO: 15240912 NR Description: ribulose bisphosphate carboxylase small chain 1b
  misc_feature (1)..(181): Homolog of NCBI NO: 15240903 NR Description: ribulose bisphosphate carboxylase small chain 2b
  misc_feature (1)..(181): Homolog of NCBI NO: 68061 NR Description: ribulose-bisphosphate carboxylase (EC 4.1.1.39)

SEQ ID NO: 50824 - protein, 177 aa, Arabidopsis thaliana; identical to SEQ ID NO: 47247
  peptide (1)..(177): Ceres Seq. ID no. 12601845
  misc_feature (1)..(175): Homolog of NCBI NO: 68063 NR Description: ribulose-bisphosphate carboxylase (EC 4.1.1.39)
  misc_feature (1)..(175): Homolog of NCBI NO: 15219826 NR Description: ribulose-bisphosphate carboxylase small unit,
  misc_feature (1)..(177): Homolog of NCBI NO: 132154 NR Description: Ribulose bisphosphate carboxylase small chain,
  misc_feature (1)..(177): Homolog of NCBI NO: 266891 NR Description: Ribulose bisphosphate carboxylase small chain,
  misc_feature (1)..(177): Homolog of NCBI NO: 132091 NR Description: Ribulose bisphosphate carboxylase small chain F1,
  misc_feature (1)..(177): Homolog of NCBI NO: 15240901 NR Description: ribulose bisphosphate carboxylase small chain 3b
  misc_feature (1)..(177): Homolog of NCBI NO: 68060 NR Description: ribulose-bisphosphate carboxylase (EC 4.1.1.39)
  misc_feature (1)..(177): Homolog of NCBI NO: 15240912 NR Description: ribulose bisphosphate carboxylase small chain 1b
  misc_feature (1)..(177): Homolog of NCBI NO: 15240903 NR Description: ribulose bisphosphate carboxylase small chain 2b
  misc_feature (1)..(177): Homolog of NCBI NO: 68061 NR Description: ribulose-bisphosphate carboxylase (EC 4.1.1.39)
  misc_feature (1)..(175): Homolog of NCBI NO: 68063 NR Description: ribulose-bisphosphate carboxylase (EC 4.1.1.39)
  misc_feature (1)..(175): Homolog of NCBI NO: 15219826 NR Description: ribulose-bisphosphate carboxylase small unit,
  misc_feature (1)..(177): Homolog of NCBI NO: 132154 NR Description: Ribulose bisphosphate carboxylase small chain,
  misc_feature (1)..(177): Homolog of NCBI NO: 266891 NR Description: Ribulose bisphosphate carboxylase small chain,
  misc_feature (1)..(177): Homolog of NCBI NO: 132091 NR Description: Ribulose bisphosphate carboxylase small chain F1,
  misc_feature (1)..(177): Homolog of NCBI NO: 15240901 NR Description: ribulose bisphosphate carboxylase small chain 3b
  misc_feature (1)..(177): Homolog of NCBI NO: 68060 NR Description: ribulose-bisphosphate carboxylase (EC 4.1.1.39)
  misc_feature (1)..(177): Homolog of NCBI NO: 15240912 NR Description: ribulose bisphosphate carboxylase small chain 1b
  misc_feature (1)..(177): Homolog of NCBI NO: 15240903 NR Description: ribulose bisphosphate carboxylase small chain 2b
  misc_feature (1)..(177): Homolog of NCBI NO: 68061 NR Description: ribulose-bisphosphate carboxylase (EC 4.1.1.39)
  misc_feature (1)..(175): Homolog of NCBI NO: 68063 NR Description: ribulose-bisphosphate carboxylase (EC 4.1.1.39)
  misc_feature (1)..(175): Homolog of NCBI NO: 15219826 NR Description: ribulose-bisphosphate carboxylase small unit,
  misc_feature (1)..(177): Homolog of NCBI NO: 132154 NR Description: Ribulose bisphosphate carboxylase small chain,
  misc_feature (1)..(177): Homolog of NCBI NO: 266891 NR Description: Ribulose bisphosphate carboxylase small chain,
  misc_feature (1)..(177): Homolog of NCBI NO: 132091 NR Description: Ribulose bisphosphate carboxylase small chain F1,
  misc_feature (1)..(177): Homolog of NCBI NO: 15240901 NR Description: ribulose bisphosphate carboxylase small chain 3b
  misc_feature (1)..(177): Homolog of NCBI NO: 68060 NR Description: ribulose-bisphosphate carboxylase (EC 4.1.1.39)
  misc_feature (1)..(177): Homolog of NCBI NO: 15240912 NR Description: ribulose bisphosphate carboxylase small chain 1b
  misc_feature (1)..(177): Homolog of NCBI NO: 15240903 NR Description: ribulose bisphosphate carboxylase small chain 2b
  misc_feature (1)..(177): Homolog of NCBI NO: 68061 NR Description: ribulose-bisphosphate carboxylase (EC 4.1.1.39)

SEQ ID NO: 50825 - protein, 162 aa, Arabidopsis thaliana; identical to SEQ ID NO: 47248
  peptide (1)..(162): Ceres Seq. ID no. 12601846
  misc_feature (1)..(160): Homolog of NCBI NO: 68063 NR Description: ribulose-bisphosphate carboxylase (EC 4.1.1.39)
  misc_feature (1)..(160): Homolog of NCBI NO: 15219826 NR Description: ribulose-bisphosphate carboxylase small unit,
  misc_feature (1)..(162): Homolog of NCBI NO: 132154 NR Description: Ribulose bisphosphate carboxylase small chain,
  misc_feature (1)..(162): Homolog of NCBI NO: 266891 NR Description: Ribulose bisphosphate carboxylase small chain,
  misc_feature (1)..(162): Homolog of NCBI NO: 132091 NR Description: Ribulose bisphosphate carboxylase small chain F1,
  misc_feature (1)..(162): Homolog of NCBI NO: 15240901 NR Description: ribulose bisphosphate carboxylase small chain 3b
  misc_feature (1)..(162): Homolog of NCBI NO: 68060 NR Description: ribulose-bisphosphate carboxylase (EC 4.1.1.39)
  misc_feature (1)..(162): Homolog of NCBI NO: 15240912 NR Description: ribulose bisphosphate carboxylase small chain 1b
  misc_feature (1)..(162): Homolog of NCBI NO: 15240903 NR Description: ribulose bisphosphate carboxylase small chain 2b
  misc_feature (1)..(162): Homolog of NCBI NO: 68061 NR Description: ribulose-bisphosphate carboxylase (EC 4.1.1.39)
  misc_feature (1)..(160): Homolog of NCBI NO: 68063 NR Description: ribulose-bisphosphate carboxylase (EC 4.1.1.39)
  misc_feature (1)..(160): Homolog of NCBI NO: 15219826 NR Description: ribulose-bisphosphate carboxylase small unit,
  misc_feature (1)..(162): Homolog of NCBI NO: 132154 NR Description: Ribulose bisphosphate carboxylase small chain,
  misc_feature (1)..(162): Homolog of NCBI NO: 266891 NR Description: Ribulose bisphosphate carboxylase small chain,
  misc_feature (1)..(162): Homolog of NCBI NO: 132091 NR Description: Ribulose bisphosphate carboxylase small chain F1,
  misc_feature (1)..(162): Homolog of NCBI NO: 15240901 NR Description: ribulose bisphosphate carboxylase small chain 3b
  misc_feature (1)..(162): Homolog of NCBI NO: 68060 NR Description: ribulose-bisphosphate carboxylase (EC 4.1.1.39)
  misc_feature (1)..(162): Homolog of NCBI NO: 15240912 NR Description: ribulose bisphosphate carboxylase small chain 1b
  misc_feature (1)..(162): Homolog of NCBI NO: 15240903 NR Description: ribulose bisphosphate carboxylase small chain 2b
  misc_feature (1)..(162): Homolog of NCBI NO: 68061 NR Description: ribulose-bisphosphate carboxylase (EC 4.1.1.39)
  misc_feature (1)..(160): Homolog of NCBI NO: 68063 NR Description: ribulose-bisphosphate carboxylase (EC 4.1.1.39)
  misc_feature (1)..(160): Homolog of NCBI NO: 15219826 NR Description: ribulose-bisphosphate carboxylase small unit,
  misc_feature (1)..(162): Homolog of NCBI NO: 132154 NR Description: Ribulose bisphosphate carboxylase small chain,
  misc_feature (1)..(162): Homolog of NCBI NO: 266891 NR Description: Ribulose bisphosphate carboxylase small chain,
  misc_feature (1)..(162): Homolog of NCBI NO: 132091 NR Description: Ribulose bisphosphate carboxylase small chain F1,
  misc_feature (1)..(162): Homolog of NCBI NO: 15240901 NR Description: ribulose bisphosphate carboxylase small chain 3b
  misc_feature (1)..(162): Homolog of NCBI NO: 68060 NR Description: ribulose-bisphosphate carboxylase (EC 4.1.1.39)
  misc_feature (1)..(162): Homolog of NCBI NO: 15240912 NR Description: ribulose bisphosphate carboxylase small chain 1b
  misc_feature (1)..(162): Homolog of NCBI NO: 15240903 NR Description: ribulose bisphosphate carboxylase small chain 2b
  misc_feature (1)..(162): Homolog of NCBI NO: 68061 NR Description: ribulose-bisphosphate carboxylase (EC 4.1.1.39)

SEQ ID NO: 50826 - DNA, 1988 bp, Arabidopsis thaliana
  misc_feature (1)..(1988): Ceres Seq. ID no. 12558999
  misc_feature: MA Experiment ID: 20000171 Result: Down-regulated in Transcription
  misc_feature: MA Experiment 20000171 PARAMETER Experiment Name: At_42deg_Heat_P Parameter: Age (day) Value: 14
  misc_feature: MA Experiment 20000171 PARAMETER Experiment Name: At_42deg_Heat_P Parameter: Organism Value: A. thaliana
  misc_feature: MA Experiment 20000171 PARAMETER Experiment Name: At_42deg_Heat_P Parameter: Plant Line Value: WS
  misc_feature: MA Experiment 20000171 PARAMETER Experiment Name: At_42deg_Heat_P Parameter: Temperature (deg C) Value: 42 vs. 22
  misc_feature: MA Experiment 20000171 PARAMETER Experiment Name: At_42deg_Heat_P Parameter: Timepoint (hr) Value: 1
  misc_feature: MA Experiment 20000171 PARAMETER Experiment Name: At_42deg_Heat_P Parameter: Tissue Value: Aerial
  misc_feature: MA Experiment ID: 20000173 Result: Down-regulated in Transcription
  misc_feature: MA Experiment 20000173 PARAMETER Experiment Name: At_42deg_Heat_P Parameter: Age (day) Value: 14
  misc_feature: MA Experiment 20000173 PARAMETER Experiment Name: At_42deg_Heat_P Parameter: Organism Value: A. thaliana
  misc_feature: MA Experiment 20000173 PARAMETER Experiment Name: At_42deg_Heat_P Parameter: Plant Line Value: WS
  misc_feature: MA Experiment 20000173 PARAMETER Experiment Name: At_42deg_Heat_P Parameter: Temperature (deg C) Value: 42 vs. 22
  misc_feature: MA Experiment 20000173 PARAMETER Experiment Name: At_42deg_Heat_P Parameter: Timepoint (hr) Value: 6
  misc_feature: MA Experiment 20000173 PARAMETER Experiment Name: At_42deg_Heat_P Parameter: Tissue Value: Aerial
  misc_feature: MA Experiment ID: 20000182 Result: Down-regulated in Transcription
  misc_feature: MA Experiment 20000182 PARAMETER Experiment Name: At_2mM_SA_P Parameter: Age (day) Value: 14
  misc_feature: MA Experiment 20000182 PARAMETER Experiment Name: At_2mM_SA_P Parameter: Organism Value: A. thaliana
  misc_feature: MA Experiment 20000182 PARAMETER Experiment Name: At_2mM_SA_P Parameter: Plant Line Value: WS
  misc_feature: MA Experiment 20000182 PARAMETER Experiment Name: At_2mM_SA_P Parameter: Timepoint (hr) Value: 6
  misc_feature: MA Experiment 20000182 PARAMETER Experiment Name: At_2mM_SA_P Parameter: Tissue Value: Aerial
  misc_feature: MA Experiment 20000182 PARAMETER Experiment Name: At_2mM_SA_P Parameter: Treatment Value: 2mM SA vs. No Treatment
  misc_feature: MA Experiment ID: 20000185 Result: Down-regulated in Transcription
  misc_feature: MA Experiment 20000185 PARAMETER Experiment Name: At_Roots__P Parameter: Age (day) Value: 7 vs. 21
  misc_feature: MA Experiment 20000185 PARAMETER Experiment Name: At_Roots__P Parameter: Organism Value: A. thaliana
  misc_feature: MA Experiment 20000185 PARAMETER Experiment Name: At_Roots__P Parameter: Tissue Value: Roots vs. Whole Plant
  misc_feature: MA Experiment ID: 20000227 Result: Down-regulated in Transcription
  misc_feature: MA Experiment 20000227 PARAMETER Experiment Name: At_Root-Tips-vs-Tops_P Parameter: Tissue Value: Root Tips vs. Root Tops
  misc_feature: MA Experiment ID: 20000234 Result: Up-regulated in Transcription
  misc_feature: MA Experiment 20000234 PARAMETER Experiment Name: At_Siliques_P Parameter: Age (day) Value: 21
  misc_feature: MA Experiment 20000234 PARAMETER Experiment Name: At_Siliques_P Parameter: Organism Value: A. thaliana
  misc_feature: MA Experiment 20000234 PARAMETER Experiment Name: At_Siliques_P Parameter: Plant Line Value: WS
  misc_feature: MA Experiment 20000234 PARAMETER Experiment Name: At_Siliques_P Parameter: Tissue Value: Less Than 5mm Siliques vs. Whole Plant
  misc_feature: MA Experiment ID: 20000235 Result: Up-regulated in Transcription
  misc_feature: MA Experiment 20000235 PARAMETER Experiment Name: At_Siliques_P Parameter: Age (day) Value: 21
  misc_feature: MA Experiment 20000235 PARAMETER Experiment Name: At_Siliques_P Parameter: Organism Value: A. thaliana
  misc_feature: MA Experiment 20000235 PARAMETER Experiment Name: At_Siliques_P Parameter: Plant Line Value: WS
  misc_feature: MA Experiment 20000235 PARAMETER Experiment Name: At_Siliques_P Parameter: Tissue Value: 5-10mm Siliques vs. Whole Plant
  misc_feature: MA Experiment ID: 20000264 Result: Up-regulated in Transcription
  misc_feature: MA Experiment 20000264 PARAMETER Experiment Name: At_Open_Flower_P Parameter: Age (day) Value: 21
  misc_feature: MA Experiment 20000264 PARAMETER Experiment Name: At_Open_Flower_P Parameter: Plant Line Value: WS
  misc_feature: MA Experiment 20000264 PARAMETER Experiment Name: At_Open_Flower_P Parameter: Tissue Value: Open Flower vs. Whole Plant
  misc_feature: MA Experiment ID: 20000265 Result: Up-regulated in Transcription
  misc_feature: MA Experiment 20000265 PARAMETER Experiment Name: At_Open_Flower_P Parameter: Age (day) Value: 21
  misc_feature: MA Experiment 20000265 PARAMETER Experiment Name: At_Open_Flower_P Parameter: Plant Line Value: WS
  misc_feature: MA Experiment 20000265 PARAMETER Experiment Name: At_Open_Flower_P Parameter: Tissue Value: Closed Flower vs. Whole Plant
  misc_feature: MA Experiment ID: 20000286 Result: Up-regulated in Transcription
  misc_feature: MA Experiment 20000286 PARAMETER Experiment Name: At_Open_Flower_P Parameter: Age (day) Value: 21
  misc_feature: MA Experiment 20000286 PARAMETER Experiment Name: At_Open_Flower_P Parameter: Plant Line Value: WS
  misc_feature: MA Experiment 20000286 PARAMETER Experiment Name: At_Open_Flower_P Parameter: Tissue Value: Half Open vs. Whole Plant
  misc_feature: MA Experiment ID: 20000495 Result: Down-regulated in Transcription
  misc_feature: MA Experiment 20000495 PARAMETER Experiment Name: At_Guard_Cells_P Parameter: Harvest Date Value: 8/2/2002
  misc_feature: MA Experiment 20000495 PARAMETER Experiment Name: At_Guard_Cells_P Parameter: Organism Value: A. thaliana
  misc_feature: MA Experiment 20000495 PARAMETER Experiment Name: At_Guard_Cells_P Parameter: Tissue Value: Guard Cells vs. Leaves
  misc_feature: MA Experiment ID: 20000496 Result: Down-regulated in Transcription
  misc_feature: MA Experiment 20000496 PARAMETER Experiment Name: At_Guard_Cells_P Parameter: Harvest Date Value: 7/19/2002
  misc_feature: MA Experiment 20000496 PARAMETER Experiment Name: At_Guard_Cells_P Parameter: Organism Value: Canola
  misc_feature: MA Experiment 20000496 PARAMETER Experiment Name: At_Guard_Cells_P Parameter: Tissue Value: Guard Cells vs. Leaves
  misc_feature: MA Experiment ID: 20000527 Result: Down-regulated in Transcription
  misc_feature: MA Experiment 20000527 PARAMETER Experiment Name: At_10percent_PEG_P Parameter: Age (day) Value: 20
  misc_feature: MA Experiment 20000527 PARAMETER Experiment Name: At_10percent_PEG_P Parameter: Organism Value: A. thaliana
  misc_feature: MA Experiment 20000527 PARAMETER Experiment Name: At_10percent_PEG_P Parameter: Plant Line Value: WS
  misc_feature: MA Experiment 20000527 PARAMETER Experiment Name: At_10percent_PEG_P Parameter: Timepoint (day) Value: 20
  misc_feature: MA Experiment 20000527 PARAMETER Experiment Name: At_10percent_PEG_P Parameter: Tissue Value: Whole Plant
  misc_feature: MA Experiment 20000527 PARAMETER Experiment Name: At_10percent_PEG_P Parameter: Treatment Value: 10percent PEG vs. No Treatment
  misc_feature: MA Experiment ID: 20000794 Result: Up-regulated in Transcription
  misc_feature: MA Experiment 20000794 PARAMETER Experiment Name: At_Petals_P Parameter: Age (day) Value: 23-25 days
  misc_feature: MA Experiment 20000794 PARAMETER Experiment Name: At_Petals_P Parameter: Plant Line Value: WS
  misc_feature: MA Experiment 20000794 PARAMETER Experiment Name: At_Petals_P Parameter: Tissue Value: Petals vs. Whole plant
  misc_feature: MA Experiment ID: 20001247 Result: Down-regulated in Transcription
  misc_feature: MA Experiment 20001247 PARAMETER Experiment Name: At_Far-red-induction_P Parameter: Age (day) Value: 7
  misc_feature: MA Experiment 20001247 PARAMETER Experiment Name: At_Far-red-induction_P Parameter: Light Value: Far-red vs. White
  misc_feature: MA Experiment 20001247 PARAMETER Experiment Name: At_Far-red-induction_P Parameter: Organism Value: A. thaliana
  misc_feature: MA Experiment 20001247 PARAMETER Experiment Name: At_Far-red-induction_P Parameter: Plant Line Value: Columbia
  misc_feature: MA Experiment 20001247 PARAMETER Experiment Name: At_Far-red-induction_P Parameter: Timepoint (hr) Value: 1
  misc_feature: MA Experiment 20001247 PARAMETER Experiment Name: At_Far-red-induction_P Parameter: Tissue Value: Whole Plant
  misc_feature: MA Experiment ID: 20001248 Result: Down-regulated in Transcription
  misc_feature: MA Experiment 20001248 PARAMETER Experiment Name: At_Far-red-induction_P Parameter: Age (day) Value: 7
  misc_feature: MA Experiment 20001248 PARAMETER Experiment Name: At_Far-red-induction_P Parameter: Light Value: Far-red vs. White
  misc_feature: MA Experiment 20001248 PARAMETER Experiment Name: At_Far-red-induction_P Parameter: Organism Value: A. thaliana
  misc_feature: MA Experiment 20001248 PARAMETER Experiment Name: At_Far-red-induction_P Parameter: Plant Line Value: Columbia
  misc_feature: MA Experiment 20001248 PARAMETER Experiment Name: At_Far-red-induction_P Parameter: Timepoint (hr) Value: 4
  misc_feature: MA Experiment 20001248 PARAMETER Experiment Name: At_Far-red-induction_P Parameter: Tissue Value: Whole Plant
  misc_feature: MA Experiment ID: 20001450 Result: Down-regulated in Transcription
  misc_feature: MA Experiment 20001450 PARAMETER Experiment Name: At_Far-red-induction_P Parameter: Age (day) Value: 7
  misc_feature: MA Experiment 20001450 PARAMETER Experiment Name: At_Far-red-induction_P Parameter: Light Value: Far-red vs. White
  misc_feature: MA Experiment 20001450 PARAMETER Experiment Name: At_Far-red-induction_P Parameter: Organism Value: A. thaliana
  misc_feature: MA Experiment 20001450 PARAMETER Experiment Name: At_Far-red-induction_P Parameter: Plant Line Value: Columbia
  misc_feature: MA Experiment 20001450 PARAMETER Experiment Name: At_Far-red-induction_P Parameter: Timepoint (hr) Value: 8
  misc_feature: MA Experiment 20001450 PARAMETER Experiment Name: At_Far-red-induction_P Parameter: Tissue Value: Whole Plant
  misc_feature: MA Experiment ID: 20001451 Result: Down-regulated in Transcription
  misc_feature: MA Experiment 20001451 PARAMETER Experiment Name: At_Far-red-induction_P Parameter: Age (day) Value: 7
  misc_feature: MA Experiment 20001451 PARAMETER Experiment Name: At_Far-red-induction_P Parameter: Light Value: Far-red vs. White
  misc_feature: MA Experiment 20001451 PARAMETER Experiment Name: At_Far-red-induction_P Parameter: Organism Value: A. thaliana
  misc_feature: MA Experiment 20001451 PARAMETER Experiment Name: At_Far-red-induction_P Parameter: Plant Line Value: Columbia
  misc_feature: MA Experiment 20001451 PARAMETER Experiment Name: At_Far-red-induction_P Parameter: Timepoint (hr) Value: 24
  misc_feature: MA Experiment 20001451 PARAMETER Experiment Name: At_Far-red-induction_P Parameter: Tissue Value: Whole Plant
  misc_feature: MA Experiment ID: 20001558 Result: Up-regulated in Transcription
  misc_feature: MA Experiment 20001558 PARAMETER Experiment Name: At_Drought_Soil_Dry_P Parameter: Age (day) Value: 27
  misc_feature: MA Experiment 20001558 PARAMETER Experiment Name: At_Drought_Soil_Dry_P Parameter: Organism Value: A. thaliana
  misc_feature: MA Experiment 20001558 PARAMETER Experiment Name: At_Drought_Soil_Dry_P Parameter: Plant Line Value: WS
  misc_feature: MA Experiment 20001558 PARAMETER Experiment Name: At_Drought_Soil_Dry_P Parameter: Post Timepoint (hr) Value: 6
  misc_feature: MA Experiment 20001558 PARAMETER Experiment Name: At_Drought_Soil_Dry_P Parameter: Post-Treatment Value: Re-Water vs. No Drought
  misc_feature: MA Experiment 20001558 PARAMETER Experiment Name: At_Drought_Soil_Dry_P Parameter: Timepoint (day) Value: 13
  misc_feature: MA Experiment 20001558 PARAMETER Experiment Name: At_Drought_Soil_Dry_P Parameter: Treatment Value: Drought vs. No Drought
  misc_feature: MA Experiment ID: 20001911 Result: Down-regulated in Transcription
  misc_feature: MA Experiment 20001911 PARAMETER Experiment Name: At_Drought_Reproduction_P Parameter: Age (day) Value: 40
  misc_feature: MA Experiment 20001911 PARAMETER Experiment Name: At_Drought_Reproduction_P Parameter: Organism Value: A. thaliana
  misc_feature: MA Experiment 20001911 PARAMETER Experiment Name: At_Drought_Reproduction_P Parameter: Plant Line Value: WS
  misc_feature: MA Experiment 20001911 PARAMETER Experiment Name: At_Drought_Reproduction_P Parameter: Timepoint (day) Value: 10
  misc_feature: MA Experiment 20001911 PARAMETER Experiment Name: At_Drought_Reproduction_P Parameter: Tissue Value: Flowers
  misc_feature: MA Experiment 20001911 PARAMETER Experiment Name: At_Drought_Reproduction_P Parameter: Treatment Value: Drought vs. No Drought
gaccacattctcaaagagagagagaaaagatcatatcacacttattttctcttgccctcttttctttttccttttgaatatttctgggttactaatatttaatttgttggttcttcggtttctccgactctttccccttgaacctagcttaacagagaaaatcaaagagagaggaaaaatgagtggaggtggtggagaaatggaagagagactgttaaatgggtcagagacagaacaaaggagagagagtctctacttgagaaaaaagatttggagtgaagtaaggaagatgtggagaatagctttaccatcaactttgttcagagttatgtcgtttggatgcgtagtggtggctcaagccttcattggccactccagtgaaacgggtctcgctgcttatgctctccttcaaagcactttcattcgcttcatctacggtattatggcaggtatgtcaagtgcgacagagacgttatgtggacaagcatacggagcagaacaataccacatgatggggatatacttacaacgttcttggatagtagatacctttattgcaactctcttcgtccctttcatcgtcttagcgggtcccattctccggttattaggccaaaacgttgtgatctccgagacagtagacgagatttacccatgggtcattccttatctctacagcatcgtgttcaccatgacaatgcaaatgtacctccaagcgcagatgaaaaacgccatcataggcattctttcgaccctagccttggtcttggacattgcggccacgtggtggtgcgtaagcgtgatggggatggggatccatggtgcgcttctagggcttaatataagctcatggtcggtggccatagccgagtttgtatatgtgtttggagggtggtgcccgcatacttggaccggctttagcactgctgcttttcttgatcttattcccatgctcaagttatccatatcctccggcttcatgctttgcttagagtactggtatatgagcatcattgtcttgatgtctggatatgcaaaggatgcgaatatcgcaatttccgctttctccatatgccaatatatctactcatgggagatgaacatatgctttggcttgatgggtgcagcatgtgtacgagtggcgaatgaattgggaaaaggcgatgcggatgcggtgagattctcgataaaagtggtgcttgtggtatcagcggtgatcggtgtgatatgttccgctctttgcctagcgtttggcggtcagatttcgtatttgttctctgatagccaagcagtttcggatgcagtagctgatctctccatcgtccttagcatatctatactcttcaacatcatccagcccattctatctggggtagcaattggagcagggatgcagagtatggtagcattagtgaacttagcatcttattatgcaattggtgttcctttaggtgtcctccttgtttacgttttcaattttgggattaagggactctggtccggaatgttggctggagttggtatccaaacgttgatattgtgttatgttatttacaaaactgactgggaattggaggttaagaagacaaacgagcgtatgaaaacgtggactctaaatttacctgctgtacaatcgactactatctccacaagagatgaagagagaaagtgaacatacaactaagttaatttaaagaaatcttttaagaaattctttataaaaaaagaaagaataatttatgttgtattgtggttgtgttttgcattccctaagaatgaagtatcggtgttgagattgcattattaggttaatgcaactctcataactttgaaaaaggttaagaaggatgaactttttcttttatcagagaaaaaggttgttctcttgttcttcggatatactctttctaaacaaaaaaaaaattgtgggaggtttgaaattttaacttctttcttgattttttaatggatgtatattttgtgtgtgg

SEQ ID NO: 50827 - protein, 556 aa, Arabidopsis thaliana
  peptide (1)..(556): Ceres Seq. ID no. 12559000
  misc_feature (60)..(496): Homolog of NCBI NO: 6910584 NR Description: CDS [Arabidopsis thaliana]
  misc_feature (86)..(539): Homolog of NCBI NO: 15240080 NR Description: putative protein; protein id: At5g44050.1
  misc_feature (60)..(537): Homolog of NCBI NO: 15238439 NR Description: putative protein
  misc_feature (60)..(538): Homolog of NCBI NO: 15223394 NR Description: unknown protein; protein id: At1g33100.1
  misc_feature (60)..(538): Homolog of NCBI NO: 15223391 NR Description: hypothetical protein; protein id: At1g33090.1
  misc_feature (60)..(538): Homolog of NCBI NO: 15223402 NR Description: unknown protein
  misc_feature (65)..(536): Homolog of NCBI NO: 22329916 NR Description: hypothetical protein
  misc_feature (67)..(526): Homolog of NCBI NO: 15228595 NR Description: unknown protein; protein id: At3g03620.1
  misc_feature (60)..(526): Homolog of NCBI NO: 9759047 NR Description: gb|AAF03470.1~gene_id:MVA3.5~strong similarity to
  misc_feature (60)..(556): Homolog of NCBI NO: 22326870 NR Description: putative protein
TTFSKRERKDHITLIFSCPLFFFLLNISGLLIFNLLVLRFLRLFPLEPSLTEKIKERGKMSGGGGEMEERLLNGSETEQRRESLYLRKKIWSEVRKMWRIALPSTLFRVMSFGCVVVAQAFIGHSSETGLAAYALLQSTFIRFIYGIMAGMSSATETLCGQAYGAEQYHMMGIYLQRSWIVDTFIATLFVPFIVLAGPILRLLGQNVVISETVDEIYPWVIPYLYSIVFTMTMQMYLQAQMKNAIIGILSTLALVLDIAATWWCVSVMGMGIHGALLGLNISSWSVAIAEFVYVFGGWCPHTWTGFSTAAFLDLIPMLKLSISSGFMLCLEYWYMSIIVLMSGYAKDANIAISAFSICQYIYSWEMNICFGLMGAACVRVANELGKGDADAVRFSIKVVLVVSAVIGVICSALCLAFGGQISYLFSDSQAVSDAVADLSIVLSISILFNIIQPILSGVAIGAGMQSMVALVNLASYYAIGVPLGVLLVYVFNFGIKGLWSGMLAGVGIQTLILCYVIYKTDWELEVKKTNERMKTWTLNLPAVQSTTISTRDEERK

SEQ ID NO: 50828 - protein, 497 aa, Arabidopsis thaliana
  peptide (1)..(497): Ceres Seq. ID no. 12559001
  misc_feature (1)..(437): Homolog of NCBI NO: 6910584 NR Description: CDS [Arabidopsis thaliana]
  misc_feature (27)..(480): Homolog of NCBI NO: 15240080 NR Description: putative protein; protein id: At5g44050.1
  misc_feature (1)..(478): Homolog of NCBI NO: 15238439 NR Description: putative protein
  misc_feature (1)..(479): Homolog of NCBI NO: 15223394 NR Description: unknown protein; protein id: At1g33100.1
  misc_feature (1)..(479): Homolog of NCBI NO: 15223391 NR Description: hypothetical protein; protein id: At1g33090.1
  misc_feature (1)..(479): Homolog of NCBI NO: 15223402 NR Description: unknown protein
  misc_feature (6)..(477): Homolog of NCBI NO: 22329916 NR Description: hypothetical protein
  misc_feature (8)..(467): Homolog of NCBI NO: 15228595 NR Description: unknown protein; protein id: At3g03620.1
  misc_feature (1)..(467): Homolog of NCBI NO: 9759047 NR Description: gb|AAF03470.1~gene_id:MVA3.5~strong similarity to
  misc_feature (1)..(497): Homolog of NCBI NO: 22326870 NR Description: putative protein
MSGGGGEMEERLLNGSETEQRRESLYLRKKIWSEVRKMWRIALPSTLFRVMSFGCVVVAQAFIGHSSETGLAAYALLQSTFIRFIYGIMAGMSSATETLCGQAYGAEQYHMMGIYLQRSWIVDTFIATLFVPFIVLAGPILRLLGQNVVISETVDEIYPWVIPYLYSIVFTMTMQMYLQAQMKNAIIGILSTLALVLDIAATWWCVSVMGMGIHGALLGLNISSWSVAIAEFVYVFGGWCPHTWTGFSTAAFLDLIPMLKLSISSGFMLCLEYWYMSIIVLMSGYAKDANIAISAFSICQYIYSWEMNICFGLMGAACVRVANELGKGDADAVRFSIKVVLVVSAVIGVICSALCLAFGGQISYLFSDSQAVSDAVADLSIVLSISILFNIIQPILSGVAIGAGMQSMVALVNLASYYAIGVPLGVLLVYVFNFGIKGLWSGMLAGVGIQTLILCYVIYKTDWELEVKKTNERMKTWTLNLPAVQSTTISTRDEERK

SEQ ID NO: 50829 - protein, 490 aa, Arabidopsis thaliana
  peptide (1)..(490): Ceres Seq. ID no. 12559002
  misc_feature (1)..(430): Homolog of NCBI NO: 6910584 NR Description: CDS [Arabidopsis thaliana]
  misc_feature (20)..(473): Homolog of NCBI NO: 15240080 NR Description: putative protein; protein id: At5g44050.1
  misc_feature (1)..(471): Homolog of NCBI NO: 15238439 NR Description: putative protein
  misc_feature (1)..(472): Homolog of NCBI NO: 15223394 NR Description: unknown protein; protein id: At1g33100.1
  misc_feature (1)..(472): Homolog of NCBI NO: 15223391 NR Description: hypothetical protein; protein id: At1g33090.1
  misc_feature (1)..(472): Homolog of NCBI NO: 15223402 NR Description: unknown protein
  misc_feature (1)..(470): Homolog of NCBI NO: 22329916 NR Description: hypothetical protein
  misc_feature (1)..(460): Homolog of NCBI NO: 15228595 NR Description: unknown protein; protein id: At3g03620.1
  misc_feature (1)..(460): Homolog of NCBI NO: 9759047 NR Description: gb|AAF03470.1~gene_id:MVA3.5~strong similarity to
  misc_feature (1)..(490): Homolog of NCBI NO: 22326870 NR Description: putative protein
MEERLLNGSETEQRRESLYLRKKIWSEVRKMWRIALPSTLFRVMSFGCVVVAQAFIGHSSETGLAAYALLQSTFIRFIYGIMAGMSSATETLCGQAYGAEQYHMMGIYLQRSWIVDTFIATLFVPFIVLAGPILRLLGQNVVISETVDEIYPWVIPYLYSIVFTMTMQMYLQAQMKNAIIGILSTLALVLDIAATWWCVSVMGMGIHGALLGLNISSWSVAIAEFVYVFGGWCPHTWTGFSTAAFLDLIPMLKLSISSGFMLCLEYWYMSIIVLMSGYAKDANIAISAFSICQYIYSWEMNICFGLMGAACVRVANELGKGDADAVRFSIKVVLVVSAVIGVICSALCLAFGGQISYLFSDSQAVSDAVADLSIVLSISILFNIIQPILSGVAIGAGMQSMVALVNLASYYAIGVPLGVLLVYVFNFGIKGLWSGMLAGVGIQTLILCYVIYKTDWELEVKKTNERMKTWTLNLPAVQSTTISTRDEERK

SEQ ID NO: 50830 - DNA, 1959 bp, Arabidopsis thaliana; identical to SEQ ID NO: 50010
  misc_feature (1)..(1959): Ceres Seq. ID no. 13588423
  misc_feature: MA Experiment ID: 20000171 Result: Down-regulated in Transcription
  misc_feature: MA Experiment 20000171 PARAMETER Experiment Name: At_42deg_Heat_P Parameter: Age (day) Value: 14
  misc_feature: MA Experiment 20000171 PARAMETER Experiment Name: At_42deg_Heat_P Parameter: Organism Value: A. thaliana
  misc_feature: MA Experiment 20000171 PARAMETER Experiment Name: At_42deg_Heat_P Parameter: Plant Line Value: WS
  misc_feature: MA Experiment 20000171 PARAMETER Experiment Name: At_42deg_Heat_P Parameter: Temperature (deg C) Value: 42 vs. 22
  misc_feature: MA Experiment 20000171 PARAMETER Experiment Name: At_42deg_Heat_P Parameter: Timepoint (hr) Value: 1
  misc_feature: MA Experiment 20000171 PARAMETER Experiment Name: At_42deg_Heat_P Parameter: Tissue Value: Aerial
  misc_feature: MA Experiment ID: 20000173 Result: Down-regulated in Transcription
  misc_feature: MA Experiment 20000173 PARAMETER Experiment Name: At_42deg_Heat_P Parameter: Age (day) Value: 14
  misc_feature: MA Experiment 20000173 PARAMETER Experiment Name: At_42deg_Heat_P Parameter: Organism Value: A. thaliana
  misc_feature: MA Experiment 20000173 PARAMETER Experiment Name: At_42deg_Heat_P Parameter: Plant Line Value: WS
  misc_feature: MA Experiment 20000173 PARAMETER Experiment Name: At_42deg_Heat_P Parameter: Temperature (deg C) Value: 42 vs. 22
  misc_feature: MA Experiment 20000173 PARAMETER Experiment Name: At_42deg_Heat_P Parameter: Timepoint (hr) Value: 6
  misc_feature: MA Experiment 20000173 PARAMETER Experiment Name: At_42deg_Heat_P Parameter: Tissue Value: Aerial
  misc_feature: MA Experiment ID: 20000179 Result: Up-regulated in Transcription
  misc_feature: MA Experiment 20000179 PARAMETER Experiment Name: At_Germinating_Seeds_P Parameter: Age (hr) Value: 6 vs. 0
  misc_feature: MA Experiment 20000179 PARAMETER Experiment Name: At_Germinating_Seeds_P Parameter: Tissue Value: Germinating Seeds
  misc_feature: MA Experiment ID: 20000180 Result: Up-regulated in Transcription
  misc_feature: MA Experiment 20000180 PARAMETER Experiment Name: At_Germinating_Seeds_P Parameter: Age (hr) Value: 24 vs. 0
  misc_feature: MA Experiment 20000180 PARAMETER Experiment Name: At_Germinating_Seeds_P Parameter: Tissue Value: Germinating Seeds
  misc_feature: MA Experiment ID: 20000185 Result: Down-regulated in Transcription
  misc_feature: MA Experiment 20000185 PARAMETER Experiment Name: At_Roots__P Parameter: Age (day) Value: 7 vs. 21
  misc_feature: MA Experiment 20000185 PARAMETER Experiment Name: At_Roots__P Parameter: Organism Value: A. thaliana
  misc_feature: MA Experiment 20000185 PARAMETER Experiment Name: At_Roots__P Parameter: Tissue Value: Roots vs. Whole Plant
  misc_feature: MA Experiment ID: 20000234 Result: Down-regulated in Transcription
  misc_feature: MA Experiment 20000234 PARAMETER Experiment Name: At_Siliques_P Parameter: Age (day) Value: 21
  misc_feature: MA Experiment 20000234 PARAMETER Experiment Name: At_Siliques_P Parameter: Organism Value: A. thaliana
  misc_feature: MA Experiment 20000234 PARAMETER Experiment Name: At_Siliques_P Parameter: Plant Line Value: WS
  misc_feature: MA Experiment 20000234 PARAMETER Experiment Name: At_Siliques_P Parameter: Tissue Value: Less Than 5mm Siliques vs. Whole Plant
  misc_feature: MA Experiment ID: 20000264 Result: Up-regulated in Transcription
  misc_feature: MA Experiment 20000264 PARAMETER Experiment Name: At_Open_Flower_P Parameter: Age (day) Value: 21
  misc_feature: MA Experiment 20000264 PARAMETER Experiment Name: At_Open_Flower_P Parameter: Plant Line Value: WS
  misc_feature: MA Experiment 20000264 PARAMETER Experiment Name: At_Open_Flower_P Parameter: Tissue Value: Open Flower vs. Whole Plant
  misc_feature: MA Experiment ID: 20000451 Result: Down-regulated in Transcription
  misc_feature: MA Experiment 20000451 PARAMETER Experiment Name: At_CS6879_Shoots-Roots_P Parameter: Age (day) Value: 14
  misc_feature: MA Experiment 20000451 PARAMETER Experiment Name: At_CS6879_Shoots-Roots_P Parameter: Organism Value: A. thaliana
  misc_feature: MA Experiment 20000451 PARAMETER Experiment Name: At_CS6879_Shoots-Roots_P Parameter: Plant Line Value: CS6879 vs. WS
  misc_feature: MA Experiment 20000451 PARAMETER Experiment Name: At_CS6879_Shoots-Roots_P Parameter: Tissue Value: Roots
  misc_feature: MA Experiment ID: 20000794 Result: Up-regulated in Transcription
  misc_feature: MA Experiment 20000794 PARAMETER Experiment Name: At_Petals_P Parameter: Age (day) Value: 23-25 days
  misc_feature: MA Experiment 20000794 PARAMETER Experiment Name: At_Petals_P Parameter: Plant Line Value: WS
  misc_feature: MA Experiment 20000794 PARAMETER Experiment Name: At_Petals_P Parameter: Tissue Value: Petals vs. Whole plant
  misc_feature: MA Experiment ID: 20001248 Result: Down-regulated in Transcription
  misc_feature: MA Experiment 20001248 PARAMETER Experiment Name: At_Far-red-induction_P Parameter: Age (day) Value: 7
  misc_feature: MA Experiment 20001248 PARAMETER Experiment Name: At_Far-red-induction_P Parameter: Light Value: Far-red vs. White
  misc_feature: MA Experiment 20001248 PARAMETER Experiment Name: At_Far-red-induction_P Parameter: Organism Value: A. thaliana
  misc_feature: MA Experiment 20001248 PARAMETER Experiment Name: At_Far-red-induction_P Parameter: Plant Line Value: Columbia
  misc_feature: MA Experiment 20001248 PARAMETER Experiment Name: At_Far-red-induction_P Parameter: Timepoint (hr) Value: 4
  misc_feature: MA Experiment 20001248 PARAMETER Experiment Name: At_Far-red-induction_P Parameter: Tissue Value: Whole Plant
  misc_feature: MA Experiment ID: 20001457 Result: Down-regulated in Transcription
  misc_feature: MA Experiment 20001457 PARAMETER Experiment Name: At_50mM_NH4NO3_L-to-H_P Parameter: Age (day) Value: Undefined
  misc_feature: MA Experiment 20001457 PARAMETER Experiment Name: At_50mM_NH4NO3_L-to-H_P Parameter: Organism Value: Undefined
  misc_feature: MA Experiment 20001457 PARAMETER Experiment Name: At_50mM_NH4NO3_L-to-H_P Parameter: Plant Line Value: Undefined
  misc_feature: MA Experiment 20001457 PARAMETER Experiment Name: At_50mM_NH4NO3_L-to-H_P Parameter: Timepoint (hr) Value: 0.5
  misc_feature: MA Experiment 20001457 PARAMETER Experiment Name: At_50mM_NH4NO3_L-to-H_P Parameter: Tissue Value: Siliques
  misc_feature: MA Experiment 20001457 PARAMETER Experiment Name: At_50mM_NH4NO3_L-to-H_P Parameter: Treatment Value: 50mM NH4NO3 vs. 100mM Manitol
  misc_feature: MA Experiment ID: 20001556 Result: Down-regulated in Transcription
  misc_feature: MA Experiment 20001556 PARAMETER Experiment Name: At_Drought_Soil_Dry_P Parameter: Age (day) Value: 26
  misc_feature: MA Experiment 20001556 PARAMETER Experiment Name: At_Drought_Soil_Dry_P Parameter: Organism Value: A. thaliana
  misc_feature: MA Experiment 20001556 PARAMETER Experiment Name: At_Drought_Soil_Dry_P Parameter: Plant Line Value: WS
  misc_feature: MA Experiment 20001556 PARAMETER Experiment Name: At_Drought_Soil_Dry_P Parameter: Post Timepoint (hr) Value: None
  misc_feature: MA Experiment 20001556 PARAMETER Experiment Name: At_Drought_Soil_Dry_P Parameter: Post-Treatment Value: None
  misc_feature: MA Experiment 20001556 PARAMETER Experiment Name: At_Drought_Soil_Dry_P Parameter: Timepoint (day) Value: 12
  misc_feature: MA Experiment 20001556 PARAMETER Experiment Name: At_Drought_Soil_Dry_P Parameter: Treatment Value: Drought vs. No Drought
  misc_feature: MA Experiment ID: 20001557 Result: Down-regulated in Transcription
  misc_feature: MA Experiment 20001557 PARAMETER Experiment Name: At_Drought_Soil_Dry_P Parameter: Age (day) Value: 27
  misc_feature: MA Experiment 20001557 PARAMETER Experiment Name: At_Drought_Soil_Dry_P Parameter: Organism Value: A. thaliana
  misc_feature: MA Experiment 20001557 PARAMETER Experiment Name: At_Drought_Soil_Dry_P Parameter: Plant Line Value: WS
  misc_feature: MA Experiment 20001557 PARAMETER Experiment Name: At_Drought_Soil_Dry_P Parameter: Post Timepoint (hr) Value: 3
  misc_feature: MA Experiment 20001557 PARAMETER Experiment Name: At_Drought_Soil_Dry_P Parameter: Post-Treatment Value: Re-Water vs. No Drought
  misc_feature: MA Experiment 20001557 PARAMETER Experiment Name: At_Drought_Soil_Dry_P Parameter: Timepoint (day) Value: 13
  misc_feature: MA Experiment 20001557 PARAMETER Experiment Name: At_Drought_Soil_Dry_P Parameter: Treatment Value: Drought vs. No Drought
  misc_feature: MA Experiment ID: 20001904 Result: Down-regulated in Transcription
  misc_feature: MA Experiment 20001904 PARAMETER Experiment Name: At_Drought_Reproduction_P Parameter: Age (day) Value: 37
  misc_feature: MA Experiment 20001904 PARAMETER Experiment Name: At_Drought_Reproduction_P Parameter: Organism Value: A. thaliana
  misc_feature: MA Experiment 20001904 PARAMETER Experiment Name: At_Drought_Reproduction_P Parameter: Plant Line Value: WS
  misc_feature: MA Experiment 20001904 PARAMETER Experiment Name: At_Drought_Reproduction_P Parameter: Timepoint (day) Value: 7
  misc_feature: MA Experiment 20001904 PARAMETER Experiment Name: At_Drought_Reproduction_P Parameter: Tissue Value: Rosettes
  misc_feature: MA Experiment 20001904 PARAMETER Experiment Name: At_Drought_Reproduction_P Parameter: Treatment Value: Drought vs. No Drought

SEQ ID NO: 50831 - protein, 577 aa, Arabidopsis thaliana; identical to SEQ ID NO: 50011
  peptide (1)..(577): Ceres Seq. ID no. 13588424
  misc_feature (46)..(315): Pfam Name: GMC oxidoreductase Pfam Description: GMC oxidoreductase
  misc_feature (46)..(315): Pfam Name: GMC oxidoreductase Pfam Description: GMC oxidoreductase
  misc_feature (12)..(572): Homolog of NCBI NO: 38605946 NR Description: OSJNBa0019K04.7 [Oryza sativa (japonica
  misc_feature (11)..(568): Homolog of NCBI NO: 22329512 NR Description: glucose-methanol-choline (GMC) oxidoreductase
  misc_feature (11)..(568): Homolog of NCBI NO: 17978954 NR Description: At1g12570/T12C24_9 [Arabidopsis thaliana]
  misc_feature (9)..(557): Homolog of NCBI NO: 15242234 NR Description: glucose-methanol-choline (GMC) oxidoreductase
  misc_feature (9)..(557): Homolog of NCBI NO: 10177728 NR Description: mandelonitrile lyase-like protein [Arabidopsis
  misc_feature (12)..(572): Homolog of NCBI NO: 38605946 NR Description: OSJNBa0019K04.7 [Oryza sativa (japonica
  misc_feature (11)..(568): Homolog of NCBI NO: 17978954 NR Description: At1g12570/T12C24_9 [Arabidopsis thaliana]
  misc_feature (9)..(557): Homolog of NCBI NO: 10177728 NR Description: mandelonitrile lyase-like protein [Arabidopsis
  misc_feature (1)..(577): Homolog of NCBI NO: 18410417 NR Description: glucose-methanol-choline (GMC) oxidoreductase
  misc_feature (1)..(557): Homolog of NCBI NO: 11358498 NR Description: mandelonitrile lyase homolog - Arabidopsis
  misc_feature (159)..(577): Homolog of NCBI NO: 24417440 NR Description: unknown [Arabidopsis thaliana]
  misc_feature (1)..(576): Homolog of NCBI NO: 15242236 NR Description: glucose-methanol-choline (GMC) oxidoreductase
  misc_feature (1)..(557): Homolog of NCBI NO: 10177730 NR Description: mandelonitrile lyase-like protein [Arabidopsis
  misc_feature (9)..(557): Homolog of NCBI NO: 15242234 NR Description: glucose-methanol-choline (GMC) oxidoreductase
  misc_feature (11)..(568): Homolog of NCBI NO: 22329512 NR Description: glucose-methanol-choline (GMC) oxidoreductase
  misc_feature (1)..(557): Homolog of NCBI NO: 10177730 NR Description: mandelonitrile lyase-like protein [Arabidopsis
  misc_feature (1)..(576): Homolog of NCBI NO: 15242236 NR Description: glucose-methanol-choline (GMC) oxidoreductase
  misc_feature (159)..(577): Homolog of NCBI NO: 24417440 NR Description: unknown [Arabidopsis thaliana]
  misc_feature (1)..(557): Homolog of NCBI NO: 11358498 NR Description: mandelonitrile lyase homolog - Arabidopsis
  misc_feature (1)..(577): Homolog of NCBI NO: 18410417 NR Description: glucose-methanol-choline (GMC) oxidoreductase

SEQ ID NO: 50832 - protein, 544 aa, Arabidopsis thaliana; identical to SEQ ID NO: 50012
  peptide (1)..(544): Ceres Seq. ID no. 13588425
  misc_feature (13)..(282): Pfam Name: GMC oxidoreductase Pfam Description: GMC oxidoreductase
  misc_feature (13)..(282): Pfam Name: GMC oxidoreductase Pfam Description: GMC oxidoreductase
  misc_feature (1)..(539): Homolog of NCBI NO: 38605946 NR Description: OSJNBa0019K04.7 [Oryza sativa (japonica
  misc_feature (1)..(535): Homolog of NCBI NO: 22329512 NR Description: glucose-methanol-choline (GMC) oxidoreductase
  misc_feature (1)..(535): Homolog of NCBI NO: 17978954 NR Description: At1g12570/T12C24_9 [Arabidopsis thaliana]
  misc_feature (1)..(524): Homolog of NCBI NO: 15242234 NR Description: glucose-methanol-choline (GMC) oxidoreductase
  misc_feature (1)..(524): Homolog of NCBI NO: 10177728 NR Description: mandelonitrile lyase-like protein [Arabidopsis
  misc_feature (1)..(539): Homolog of NCBI NO: 38605946 NR Description: OSJNBa0019K04.7 [Oryza sativa (japonica
  misc_feature (1)..(535): Homolog of NCBI NO: 17978954 NR Description: At1g12570/T12C24_9 [Arabidopsis thaliana]
  misc_feature (1)..(524): Homolog of NCBI NO: 10177728 NR Description: mandelonitrile lyase-like protein [Arabidopsis
  misc_feature (1)..(544): Homolog of NCBI NO: 18410417 NR Description: glucose-methanol-choline (GMC) oxidoreductase
  misc_feature (1)..(524): Homolog of NCBI NO: 11358498 NR Description: mandelonitrile lyase homolog - Arabidopsis
  misc_feature (126)..(544): Homolog of NCBI NO: 24417440 NR Description: unknown [Arabidopsis thaliana]
  misc_feature (1)..(543): Homolog of NCBI NO: 15242236 NR Description: glucose-methanol-choline (GMC) oxidoreductase
  misc_feature (1)..(524): Homolog of NCBI NO: 10177730 NR Description: mandelonitrile lyase-like protein [Arabidopsis
  misc_feature (1)..(524): Homolog of NCBI NO: 15242234 NR Description: glucose-methanol-choline (GMC) oxidoreductase
  misc_feature (1)..(535): Homolog of NCBI NO: 22329512 NR Description: glucose-methanol-choline (GMC) oxidoreductase
  misc_feature (1)..(524): Homolog of NCBI NO: 10177730 NR Description: mandelonitrile lyase-like protein [Arabidopsis
  misc_feature (1)..(543): Homolog of NCBI NO: 15242236 NR Description: glucose-methanol-choline (GMC) oxidoreductase
  misc_feature (126)..(544): Homolog of NCBI NO: 24417440 NR Description: unknown [Arabidopsis thaliana]
  misc_feature (1)..(524): Homolog of NCBI NO: 11358498 NR Description: mandelonitrile lyase homolog - Arabidopsis
  misc_feature (1)..(544): Homolog of NCBI NO: 18410417 NR Description: glucose-methanol-choline (GMC) oxidoreductase

SEQ ID NO: 50833 - protein, 354 aa, Arabidopsis thaliana; identical to SEQ ID NO: 50013
  peptide (1)..(354): Ceres Seq. ID no. 13588426
  misc_feature (1)..(92): Pfam Name: GMC oxidoreductase Pfam Description: GMC oxidoreductase
  misc_feature (1)..(92): Pfam Name: GMC oxidoreductase Pfam Description: GMC oxidoreductase
  misc_feature (1)..(349): Homolog of NCBI NO: 38605946 NR Description: OSJNBa0019K04.7 [Oryza sativa (japonica
  misc_feature (1)..(345): Homolog of NCBI NO: 22329512 NR Description: glucose-methanol-choline (GMC) oxidoreductase
  misc_feature (1)..(345): Homolog of NCBI NO: 17978954 NR Description: At1g12570/T12C24_9 [Arabidopsis thaliana]
  misc_feature (1)..(334): Homolog of NCBI NO: 15242234 NR Description: glucose-methanol-choline (GMC) oxidoreductase
  misc_feature (1)..(334): Homolog of NCBI NO: 10177728 NR Description: mandelonitrile lyase-like protein [Arabidopsis
  misc_feature (1)..(349): Homolog of NCBI NO: 38605946 NR Description: OSJNBa0019K04.7 [Oryza sativa (japonica
  misc_feature (1)..(345): Homolog of NCBI NO: 17978954 NR Description: At1g12570/T12C24_9 [Arabidopsis thaliana]
  misc_feature (1)..(334): Homolog of NCBI NO: 10177728 NR Description: mandelonitrile lyase-like protein [Arabidopsis
  misc_feature (1)..(354): Homolog of NCBI NO: 18410417 NR Description: glucose-methanol-choline (GMC) oxidoreductase
  misc_feature (1)..(334): Homolog of NCBI NO: 11358498 NR Description: mandelonitrile lyase homolog - Arabidopsis
  misc_feature (1)..(354): Homolog of NCBI NO: 24417440 NR Description: unknown [Arabidopsis thaliana]
  misc_feature (1)..(353): Homolog of NCBI NO: 15242236 NR Description: glucose-methanol-choline (GMC) oxidoreductase
  misc_feature (1)..(334): Homolog of NCBI NO: 10177730 NR Description: mandelonitrile lyase-like protein [Arabidopsis
  misc_feature (1)..(334): Homolog of NCBI NO: 15242234 NR Description: glucose-methanol-choline (GMC) oxidoreductase
  misc_feature (1)..(345): Homolog of NCBI NO: 22329512 NR Description: glucose-methanol-choline (GMC) oxidoreductase
  misc_feature (1)..(334): Homolog of NCBI NO: 10177730 NR Description: mandelonitrile lyase-like protein [Arabidopsis
  misc_feature (1)..(353): Homolog of NCBI NO: 15242236 NR Description: glucose-methanol-choline (GMC) oxidoreductase
  misc_feature (1)..(354): Homolog of NCBI NO: 24417440 NR Description: unknown [Arabidopsis thaliana]
  misc_feature (1)..(334): Homolog of NCBI NO: 11358498 NR Description: mandelonitrile lyase homolog - Arabidopsis
  misc_feature (1)..(354): Homolog of NCBI NO: 18410417 NR Description: glucose-methanol-choline (GMC) oxidoreductase

SEQ ID NO: 50834 - DNA, 2153 bp, Arabidopsis thaliana
  misc_feature (1)..(2153): Ceres Seq. ID no. 13575358
  misc_feature: MA Experiment ID: 20000171 Result: Down-regulated in Transcription
  misc_feature: MA Experiment 20000171 PARAMETER Experiment Name: At_42deg_Heat_P Parameter: Age (day) Value: 14
  misc_feature: MA Experiment 20000171 PARAMETER Experiment Name: At_42deg_Heat_P Parameter: Organism Value: A. thaliana
  misc_feature: MA Experiment 20000171 PARAMETER Experiment Name: At_42deg_Heat_P Parameter: Plant Line Value: WS
  misc_feature: MA Experiment 20000171 PARAMETER Experiment Name: At_42deg_Heat_P Parameter: Temperature (deg C) Value: 42 vs. 22
  misc_feature: MA Experiment 20000171 PARAMETER Experiment Name: At_42deg_Heat_P Parameter: Timepoint (hr) Value: 1
  misc_feature: MA Experiment 20000171 PARAMETER Experiment Name: At_42deg_Heat_P Parameter: Tissue Value: Aerial
  misc_feature: MA Experiment ID: 20000184 Result: Down-regulated in Transcription
  misc_feature: MA Experiment 20000184 PARAMETER Experiment Name: At_Shoots__P Parameter: Age (day) Value: 7
  misc_feature: MA Experiment 20000184 PARAMETER Experiment Name: At_Shoots__P Parameter: Tissue Value: Shoots vs. Whole Plant
  misc_feature: MA Experiment ID: 20000185 Result: Down-regulated in Transcription
  misc_feature: MA Experiment 20000185 PARAMETER Experiment Name: At_Roots__P Parameter: Age (day) Value: 7 vs. 21
  misc_feature: MA Experiment 20000185 PARAMETER Experiment Name: At_Roots__P Parameter: Organism Value: A. thaliana
  misc_feature: MA Experiment 20000185 PARAMETER Experiment Name: At_Roots__P Parameter: Tissue Value: Roots vs. Whole Plant
  misc_feature: MA Experiment ID: 20000234 Result: Down-regulated in Transcription
  misc_feature: MA Experiment 20000234 PARAMETER Experiment Name: At_Siliques_P Parameter: Age (day) Value: 21
  misc_feature: MA Experiment 20000234 PARAMETER Experiment Name: At_Siliques_P Parameter: Organism Value: A. thaliana
  misc_feature: MA Experiment 20000234 PARAMETER Experiment Name: At_Siliques_P Parameter: Plant Line Value: WS
  misc_feature: MA Experiment 20000234 PARAMETER Experiment Name: At_Siliques_P Parameter: Tissue Value: Less Than 5mm Siliques vs. Whole Plant
  misc_feature: MA Experiment ID: 20000235 Result: Down-regulated in Transcription
  misc_feature: MA Experiment 20000235 PARAMETER Experiment Name: At_Siliques_P Parameter: Age (day) Value: 21
  misc_feature: MA Experiment 20000235 PARAMETER Experiment Name: At_Siliques_P Parameter: Organism Value: A. thaliana
  misc_feature: MA Experiment 20000235 PARAMETER Experiment Name: At_Siliques_P Parameter: Plant Line Value: WS
  misc_feature: MA Experiment 20000235 PARAMETER Experiment Name: At_Siliques_P Parameter: Tissue Value: 5-10mm Siliques vs. Whole Plant
  misc_feature: MA Experiment ID: 20000264 Result: Down-regulated in Transcription
  misc_feature: MA Experiment 20000264 PARAMETER Experiment Name: At_Open_Flower_P Parameter: Age (day) Value: 21
  misc_feature: MA Experiment 20000264 PARAMETER Experiment Name: At_Open_Flower_P Parameter: Plant Line Value: WS
  misc_feature: MA Experiment 20000264 PARAMETER Experiment Name: At_Open_Flower_P Parameter: Tissue Value: Open Flower vs. Whole Plant
  misc_feature: MA Experiment ID: 20000265 Result: Down-regulated in Transcription
  misc_feature: MA Experiment 20000265 PARAMETER Experiment Name: At_Open_Flower_P Parameter: Age (day) Value: 21
  misc_feature: MA Experiment 20000265 PARAMETER Experiment Name: At_Open_Flower_P Parameter: Plant Line Value: WS
  misc_feature: MA Experiment 20000265 PARAMETER Experiment Name: At_Open_Flower_P Parameter: Tissue Value: Closed Flower vs. Whole Plant
  misc_feature: MA Experiment ID: 20000268 Result: Down-regulated in Transcription
  misc_feature: MA Experiment 20000268 PARAMETER Experiment Name: At_100mM_NaCl__P Parameter: Age (day) Value: 14
  misc_feature: MA Experiment 20000268 PARAMETER Experiment Name: At_100mM_NaCl__P Parameter: Organism Value: A. thaliana
  misc_feature: MA Experiment 20000268 PARAMETER Experiment Name: At_100mM_NaCl__P Parameter: Plant Line Value: WS
  misc_feature: MA Experiment 20000268 PARAMETER Experiment Name: At_100mM_NaCl__P Parameter: Timepoint (hr) Value: 6
  misc_feature: MA Experiment 20000268 PARAMETER Experiment Name: At_100mM_NaCl__P Parameter: Tissue Value: Whole Plant
  misc_feature: MA Experiment 20000268 PARAMETER Experiment Name: At_100mM_NaCl__P Parameter: Treatment Value: 100mM NaCl vs. No Treatment
  misc_feature: MA Experiment ID: 20000286 Result: Down-regulated in Transcription
  misc_feature: MA Experiment 20000286 PARAMETER Experiment Name: At_Open_Flower_P Parameter: Age (day) Value: 21
  misc_feature: MA Experiment 20000286 PARAMETER Experiment Name: At_Open_Flower_P Parameter: Plant Line Value: WS
  misc_feature: MA Experiment 20000286 PARAMETER Experiment Name: At_Open_Flower_P Parameter: Tissue Value: Half Open vs. Whole Plant
  misc_feature: MA Experiment ID: 20000437 Result: Down-regulated in Transcription
  misc_feature: MA Experiment 20000437 PARAMETER Experiment Name: At_Drought_P Parameter: Age (day) Value: 8
  misc_feature: MA Experiment 20000437 PARAMETER Experiment Name: At_Drought_P Parameter: Organism Value: A. thaliana
  misc_feature: MA Experiment 20000437 PARAMETER Experiment Name: At_Drought_P Parameter: Plant Line Value: WS
  misc_feature: MA Experiment 20000437 PARAMETER Experiment Name: At_Drought_P Parameter: Timepoint (hr) Value: 24
  misc_feature: MA Experiment 20000437 PARAMETER Experiment Name: At_Drought_P Parameter: Tissue Value: Whole Plant
  misc_feature: MA Experiment 20000437 PARAMETER Experiment Name: At_Drought_P Parameter: Treatment Value: Drought vs. No Drought
  misc_feature: MA Experiment ID: 20000438 Result: Down-regulated in Transcription
  misc_feature: MA Experiment 20000438 PARAMETER Experiment Name: At_Shoots__P Parameter: Age (day) Value: 14
  misc_feature: MA Experiment 20000438 PARAMETER Experiment Name: At_Shoots__P Parameter: Tissue Value: Shoots vs. Whole Plant
  misc_feature: MA Experiment ID: 20000439 Result: Down-regulated in Transcription
  misc_feature: MA Experiment 20000439 PARAMETER Experiment Name: At_Roots__P Parameter: Age (day) Value: 14 vs. 21
  misc_feature: MA Experiment 20000439 PARAMETER Experiment Name: At_Roots__P Parameter: Organism Value: A. thaliana
  misc_feature: MA Experiment 20000439 PARAMETER Experiment Name: At_Roots__P Parameter: Tissue Value: Roots vs. Whole Plant
  misc_feature: MA Experiment ID: 20000441 Result: Up-regulated in Transcription
  misc_feature: MA Experiment 20000441 PARAMETER Experiment Name: At_1uM_BR-BRZ__P Parameter: Tissue Value: Shoot Apices
  misc_feature: MA Experiment 20000441 PARAMETER Experiment Name: At_1uM_BR-BRZ__P Parameter: Treatment Value: 1uM BR vs. No Treatment
  misc_feature: MA Experiment ID: 20000443 Result: Up-regulated in Transcription
  misc_feature: MA Experiment 20000443 PARAMETER Experiment Name: At_1uM_BR-BRZ__P Parameter: Tissue Value: Shoot Apices
  misc_feature: MA Experiment 20000443 PARAMETER Experiment Name: At_1uM_BR-BRZ__P Parameter: Treatment Value: 1uM BRZ vs. No Treatment
  misc_feature: MA Experiment ID: 20000452 Result: Up-regulated in Transcription
  misc_feature: MA Experiment 20000452 PARAMETER Experiment Name: At_CS6879_Shoots-Roots_P Parameter: Age (day) Value: 14
  misc_feature: MA Experiment 20000452 PARAMETER Experiment Name: At_CS6879_Shoots-Roots_P Parameter: Organism Value: A. thaliana
  misc_feature: MA Experiment 20000452 PARAMETER Experiment Name: At_CS6879_Shoots-Roots_P Parameter: Plant Line Value: CS6879 vs. WS
  misc_feature: MA Experiment 20000452 PARAMETER Experiment Name: At_CS6879_Shoots-Roots_P Parameter: Tissue Value: Shoots
  misc_feature: MA Experiment ID: 20000460 Result: Up-regulated in Transcription
  misc_feature: MA Experiment 20000460 PARAMETER Experiment Name: At_10percent_PEG_P Parameter: Age (day) Value: 12
  misc_feature: MA Experiment 20000460 PARAMETER Experiment Name: At_10percent_PEG_P Parameter: Organism Value: A. thaliana
  misc_feature: MA Experiment 20000460 PARAMETER Experiment Name: At_10percent_PEG_P Parameter: Plant Line Value: WS
  misc_feature: MA Experiment 20000460 PARAMETER Experiment Name: At_10percent_PEG_P Parameter: Timepoint (day) Value: 12
  misc_feature: MA Experiment 20000460 PARAMETER Experiment Name: At_10percent_PEG_P Parameter: Tissue Value: Whole Plant
  misc_feature: MA Experiment 20000460 PARAMETER Experiment Name: At_10percent_PEG_P Parameter: Treatment Value: 10percent PEG vs. No Treatment
  misc_feature: MA Experiment ID: 20000495 Result: Down-regulated in Transcription
  misc_feature: MA Experiment 20000495 PARAMETER Experiment Name: At_Guard_Cells_P Parameter: Harvest Date Value: 8/2/2002
  misc_feature: MA Experiment 20000495 PARAMETER Experiment Name: At_Guard_Cells_P Parameter: Organism Value: A. thaliana
  misc_feature: MA Experiment 20000495 PARAMETER Experiment Name: At_Guard_Cells_P Parameter: Tissue Value: Guard Cells vs. Leaves
  misc_feature: MA Experiment ID: 20000506 Result: Down-regulated in Transcription
  misc_feature: MA Experiment 20000506 PARAMETER Experiment Name: At_Wounding_P Parameter: Organism Value: A. thaliana
  misc_feature: MA Experiment 20000506 PARAMETER Experiment Name: At_Wounding_P Parameter: Plant Line Value: WS
  misc_feature: MA Experiment 20000506 PARAMETER Experiment Name: At_Wounding_P Parameter: Timepoint (hr) Value: 6
  misc_feature: MA Experiment 20000506 PARAMETER Experiment Name: At_Wounding_P Parameter: Tissue Value: Aerial
  misc_feature: MA Experiment 20000506 PARAMETER Experiment Name: At_Wounding_P Parameter: Treatment Value: Wounding vs. No Wounding
  misc_feature: MA Experiment ID: 20000527 Result: Up-regulated in Transcription
  misc_feature: MA Experiment 20000527 PARAMETER Experiment Name: At_10percent_PEG_P Parameter: Age (day) Value: 20
  misc_feature: MA Experiment 20000527 PARAMETER Experiment Name: At_10percent_PEG_P Parameter: Organism Value: A. thaliana
  misc_feature: MA Experiment 20000527 PARAMETER Experiment Name: At_10percent_PEG_P Parameter: Plant Line Value: WS
  misc_feature: MA Experiment 20000527 PARAMETER Experiment Name: At_10percent_PEG_P Parameter: Timepoint (day) Value: 20
  misc_feature: MA Experiment 20000527 PARAMETER Experiment Name: At_10percent_PEG_P Parameter: Tissue Value: Whole Plant
  misc_feature: MA Experiment 20000527 PARAMETER Experiment Name: At_10percent_PEG_P Parameter: Treatment Value: 10percent PEG vs. No Treatment
  misc_feature: MA Experiment ID: 20000573 Result: Down-regulated in Transcription
  misc_feature: MA Experiment 20000573 PARAMETER Experiment Name: At_100uM_ABA_Mutants__P Parameter: Organism Value: A. thaliana
  misc_feature: MA Experiment 20000573 PARAMETER Experiment Name: At_100uM_ABA_Mutants__P Parameter: Plant Line Value: CS22 vs. Ler wt
  misc_feature: MA Experiment 20000573 PARAMETER Experiment Name: At_100uM_ABA_Mutants__P Parameter: Timepoint (hr) Value: N/A
  misc_feature: MA Experiment 20000573 PARAMETER Experiment Name: At_100uM_ABA_Mutants__P Parameter: Tissue Value: Whole Plant
  misc_feature: MA Experiment 20000573 PARAMETER Experiment Name: At_100uM_ABA_Mutants__P Parameter: Treatment Value: None
  misc_feature: MA Experiment ID: 20000574 Result: Down-regulated in Transcription
  misc_feature: MA Experiment 20000574 PARAMETER Experiment Name: At_100uM_ABA_Mutants__P Parameter: Organism Value: A. thaliana
  misc_feature: MA Experiment 20000574 PARAMETER Experiment Name: At_100uM_ABA_Mutants__P Parameter: Plant Line Value: CS23 vs. Ler wt
  misc_feature: MA Experiment 20000574 PARAMETER Experiment Name: At_100uM_ABA_Mutants__P Parameter: Timepoint (hr) Value: N/A
  misc_feature: MA Experiment 20000574 PARAMETER Experiment Name: At_100uM_ABA_Mutants__P Parameter: Tissue Value: Whole Plant
  misc_feature: MA Experiment 20000574 PARAMETER Experiment Name: At_100uM_ABA_Mutants__P Parameter: Treatment Value: None
  misc_feature: MA Experiment ID: 20001247 Result: Up-regulated in Transcription
  misc_feature: MA Experiment 20001247 PARAMETER Experiment Name: At_Far-red-induction_P Parameter: Age (day) Value: 7
  misc_feature: MA Experiment 20001247 PARAMETER Experiment Name: At_Far-red-induction_P Parameter: Light Value: Far-red vs. White
  misc_feature: MA Experiment 20001247 PARAMETER Experiment Name: At_Far-red-induction_P Parameter: Organism Value: A. thaliana
  misc_feature: MA Experiment 20001247 PARAMETER Experiment Name: At_Far-red-induction_P Parameter: Plant Line Value: Columbia
  misc_feature: MA Experiment 20001247 PARAMETER Experiment Name: At_Far-red-induction_P Parameter: Timepoint (hr) Value: 1
  misc_feature: MA Experiment 20001247 PARAMETER Experiment Name: At_Far-red-induction_P Parameter: Tissue Value: Whole Plant
  misc_feature: MA Experiment ID: 20001557 Result: Up-regulated in Transcription
  misc_feature: MA Experiment 20001557 PARAMETER Experiment Name: At_Drought_Soil_Dry_P Parameter: Age (day) Value: 27
  misc_feature: MA Experiment 20001557 PARAMETER Experiment Name: At_Drought_Soil_Dry_P Parameter: Organism Value: A. thaliana
  misc_feature: MA Experiment 20001557 PARAMETER Experiment Name: At_Drought_Soil_Dry_P Parameter: Plant Line Value: WS
  misc_feature: MA Experiment 20001557 PARAMETER Experiment Name: At_Drought_Soil_Dry_P Parameter: Post Timepoint (hr) Value: 3
  misc_feature: MA Experiment 20001557 PARAMETER Experiment Name: At_Drought_Soil_Dry_P Parameter: Post-Treatment Value: Re-Water vs. No Drought
  misc_feature: MA Experiment 20001557 PARAMETER Experiment Name: At_Drought_Soil_Dry_P Parameter: Timepoint (day) Value: 13
  misc_feature: MA Experiment 20001557 PARAMETER Experiment Name: At_Drought_Soil_Dry_P Parameter: Treatment Value: Drought vs. No Drought
  misc_feature: MA Experiment ID: 20001773 Result: Down-regulated in Transcription
  misc_feature: MA Experiment 20001773 PARAMETER Experiment Name: At_Far-red-enriched-adult_P Parameter: Age (day) Value: 30
  misc_feature: MA Experiment 20001773 PARAMETER Experiment Name: At_Far-red-enriched-adult_P Parameter: Light Value: Far-red enriched vs. White
  misc_feature: MA Experiment 20001773 PARAMETER Experiment Name: At_Far-red-enriched-adult_P Parameter: Organism Value: A. thaliana
  misc_feature: MA Experiment 20001773 PARAMETER Experiment Name: At_Far-red-enriched-adult_P Parameter: Plant Line Value: Columbia
  misc_feature: MA Experiment 20001773 PARAMETER Experiment Name: At_Far-red-enriched-adult_P Parameter: Timepoint (hr) Value: 48
  misc_feature: MA Experiment 20001773 PARAMETER Experiment Name: At_Far-red-enriched-adult_P Parameter: Tissue Value: Aerial
  misc_feature: MA Experiment ID: 20001774 Result: Down-regulated in Transcription
  misc_feature: MA Experiment 20001774 PARAMETER Experiment Name: At_Far-red-enriched-adult_P Parameter: Age (day) Value: 31
  misc_feature: MA Experiment 20001774 PARAMETER Experiment Name: At_Far-red-enriched-adult_P Parameter: Light Value: Far-red enriched vs. White
  misc_feature: MA Experiment 20001774 PARAMETER Experiment Name: At_Far-red-enriched-adult_P Parameter: Organism Value: A. thaliana
  misc_feature: MA Experiment 20001774 PARAMETER Experiment Name: At_Far-red-enriched-adult_P Parameter: Plant Line Value: Columbia
  misc_feature: MA Experiment 20001774 PARAMETER Experiment Name: At_Far-red-enriched-adult_P Parameter: Timepoint (hr) Value: 72
  misc_feature: MA Experiment 20001774 PARAMETER Experiment Name: At_Far-red-enriched-adult_P Parameter: Tissue Value: Aerial
  misc_feature: MA Experiment ID: 20001904 Result: Down-regulated in Transcription
  misc_feature: MA Experiment 20001904 PARAMETER Experiment Name: At_Drought_Reproduction_P Parameter: Age (day) Value: 37
  misc_feature: MA Experiment 20001904 PARAMETER Experiment Name: At_Drought_Reproduction_P Parameter: Organism Value: A. thaliana
  misc_feature: MA Experiment 20001904 PARAMETER Experiment Name: At_Drought_Reproduction_P Parameter: Plant Line Value: WS
  misc_feature: MA Experiment 20001904 PARAMETER Experiment Name: At_Drought_Reproduction_P Parameter: Timepoint (day) Value: 7
  misc_feature: MA Experiment 20001904 PARAMETER Experiment Name: At_Drought_Reproduction_P Parameter: Tissue Value: Rosettes
  misc_feature: MA Experiment 20001904 PARAMETER Experiment Name: At_Drought_Reproduction_P Parameter: Treatment Value: Drought vs. No Drought
ctccttcttcattgcaaagaaagcaccaccttttaaagaatcctcctcacactccattcttcttaaaaaacccaccacaacacaattcccacttgtttcttcatcatcacctacttcaatcaaaaaacattccaactttcttctcaatttcattccaggatagtattatgtgcagtggaccaaagagcaatctctgctcttcaagaaccttaacagaaatcgaatcaaggcaaaaggaagaagaaacaatgcttctcctcgaattcgctgcttgtgatgatcttgactcgttcaagagagaggttgaagagaaagggcttgatttggatgagtcagggttatggtattgcagacgtgtcggttctaagaagatgggtcttgaagaaagaacacctttaatggttgcagctatgtatggaagcataaaggttttgactttcatcgtttccactggaaaatctgatgtgaacagagcttgtggtgaagagagagttactccgcttcactgtgctgttgctggctgttctgtgaatatgattgaagtcatcaatgtcttgcttgatgcttctgctttggttaactctgttgatgctaatgggaatcaacctttggatgtgtttgttcgagtttcgaggtttgtggctagtccgaggaggaaagcggttgagttgttgctgagaggaggaggtgttggaggattgatcgatgaggcggttgaagaagagatcaagattgtctctaagtatccagctgatgcttctttaccggatataaacgaaggggtttatggaagtgatgagtttaggatgtatagctttaaggttaagccatgttctagggcttattctcatgattggaccgagtgtgcttttgttcatccgggagaaaatgcgaggaggagagatccgaggaagtatccttacacttgtgtcccctgtcccgagttccgtaaaggatcatgcccgaaaggagattcttgcgagtatgctcacggggttttcgagtcgtggcttcaccccgcgcagtataaaacccggctttgtaaagatgaaacgggttgtgcaaggaaagtttgtttctttgctcataaacgcgaagagatgagacctgttaatgcttcaactggctctgccgtggctcagtctccgtttagcagcttggagatgatgccagggttgtctcctcttgcttattcttcaggagtttcgactcctccggtttctccaatggctaatggtgttccttcctctccaagaaacggcggatcatggcagaacagagtcaatacccttactccaccggctttgcagctcaatggtggaagcagattgaagtccacactgagcgctagagatatcgatatggagatggagatggaattgagactccgcggttttggcaacaatgtggaagagacgttcgggtcttatgtttcctctccaagtaggaattctcaaatgggtcaaaacatgaaccaacattatccatcttccccggtgagacaaccgccatctcaacacgggttcgaatcttcagcagctgcagcggttgcagtgatgaaagcgagatcaaccgcctttgcgaaacgtagcttgagcttcaaaccagctactcaagcagcaccacagtcgaatctctcggattggggatctccaaacgggaagctggaatggggaatgaaaggagaagagctgaataagatgagaagaagtgtttcctttggaatccatggaaacaacaacaataacgcagctagagactacagggacgagccagatgtgtcatgggttaactctttagttaaagacagtactgtggtgtctgagagaagctttggaatgaatgagagggttcggataatgtcgtgggctgagcaaatgtacagagagaaggagcagactgtggtgtaaacacacacaaagatggtttcttatatatattgcttttgggccatctctgcaaatttgattctttaatttttgtgactttctttagttgttactgttattagtagtatatggtttgttgtcactacgagtctacgtgatgaaaagatagaagttaattgcattagtttctatattcgtttctcatcctcttgtaatttatcaaaccatgaaatggctaagcaatccaaaccgtaatatggctgg

SEQ ID NO: 50835 - protein, 635 aa, Arabidopsis thaliana
  peptide (1)..(635): Ceres Seq. ID no. 13575359
  misc_feature (162)..(197): Pfam Name: Ankyrin repeat Pfam Description: Ankyrin repeat
  misc_feature (49)..(265): Homolog of NCBI NO: 15239917 NR Description: zinc finger transcription factor -related protein
  misc_feature (247)..(545): Homolog of NCBI NO: 15239917 NR Description: zinc finger transcription factor -related protein
  misc_feature (49)..(265): Homolog of NCBI NO: 20466590 NR Description: zinc finger transcription factor-like protein
  misc_feature (247)..(545): Homolog of NCBI NO: 20466590 NR Description: zinc finger transcription factor-like protein
  misc_feature (477)..(603): Homolog of NCBI NO: 28273376 NR Description: unknown protein [Oryza sativa (japonica
  misc_feature (85)..(255): Homolog of NCBI NO: 28273376 NR Description: unknown protein [Oryza sativa (japonica
  misc_feature (247)..(502): Homolog of NCBI NO: 28273376 NR Description: unknown protein [Oryza sativa (japonica
  misc_feature (84)..(535): Homolog of NCBI NO: 15237721 NR Description: zinc finger transcription factor-related protein
  misc_feature (56)..(635): Homolog of NCBI NO: 15225637 NR Description: CCCH-type zinc finger protein -related
  misc_feature (56)..(635): Homolog of NCBI NO: 18410398 NR Description: expressed protein [Arabidopsis thaliana]
PSSLQRKHHLLKNPPHTPFFLKNPPQHNSHLFLHHHLLQSKNIPTFFSISFQDSIMCSGPKSNLCSSRTLTEIESRQKEEETMLLLEFAACDDLDSFKREVEEKGLDLDESGLWYCRRVGSKKMGLEERTPLMVAAMYGSIKVLTFIVSTGKSDVNRACGEERVTPLHCAVAGCSVNMIEVINVLLDASALVNSVDANGNQPLDVFVRVSRFVASPRRKAVELLLRGGGVGGLIDEAVEEEIKIVSKYPADASLPDINEGVYGSDEFRMYSFKVKPCSRAYSHDWTECAFVHPGENARRRDPRKYPYTCVPCPEFRKGSCPKGDSCEYAHGVFESWLHPAQYKTRLCKDETGCARKVCFFAHKREEMRPVNASTGSAVAQSPFSSLEMMPGLSPLAYSSGVSTPPVSPMANGVPSSPRNGGSWQNRVNTLTPPALQLNGGSRLKSTLSARDIDMEMEMELRLRGFGNNVEETFGSYVSSPSRNSQMGQNMNQHYPSSPVRQPPSQHGFESSAAAAVAVMKARSTAFAKRSLSFKPATQAAPQSNLSDWGSPNGKLEWGMKGEELNKMRRSVSFGIHGNNNNNAARDYRDEPDVSWVNSLVKDSTVVSERSFGMNERVRIMSWAEQMYREKEQTVV

SEQ ID NO: 50836 - protein, 580 aa, Arabidopsis thaliana
  peptide (1)..(580): Ceres Seq. ID no. 13575360
  misc_feature (107)..(142): Pfam Name: Ankyrin repeat Pfam Description: Ankyrin repeat
  misc_feature (1)..(210): Homolog of NCBI NO: 15239917 NR Description: zinc finger transcription factor -related protein
  misc_feature (192)..(490): Homolog of NCBI NO: 15239917 NR Description: zinc finger transcription factor -related protein
  misc_feature (1)..(210): Homolog of NCBI NO: 20466590 NR Description: zinc finger transcription factor-like protein
  misc_feature (192)..(490): Homolog of NCBI NO: 20466590 NR Description: zinc finger transcription factor-like protein
  misc_feature (422)..(548): Homolog of NCBI NO: 28273376 NR Description: unknown protein [Oryza sativa (japonica
  misc_feature (30)..(200): Homolog of NCBI NO: 28273376 NR Description: unknown protein [Oryza sativa (japonica
  misc_feature (192)..(447): Homolog of NCBI NO: 28273376 NR Description: unknown protein [Oryza sativa (japonica
  misc_feature (29)..(480): Homolog of NCBI NO: 15237721 NR Description: zinc finger transcription factor-related protein
  misc_feature (1)..(580): Homolog of NCBI NO: 15225637 NR Description: CCCH-type zinc finger protein -related
  misc_feature (1)..(580): Homolog of NCBI NO: 18410398 NR Description: expressed protein [Arabidopsis thaliana]
MCSGPKSNLCSSRTLTEIESRQKEEETMLLLEFAACDDLDSFKREVEEKGLDLDESGLWYCRRVGSKKMGLEERTPLMVAAMYGSIKVLTFIVSTGKSDVNRACGEERVTPLHCAVAGCSVNMIEVINVLLDASALVNSVDANGNQPLDVFVRVSRFVASPRRKAVELLLRGGGVGGLIDEAVEEEIKIVSKYPADASLPDINEGVYGSDEFRMYSFKVKPCSRAYSHDWTECAFVHPGENARRRDPRKYPYTCVPCPEFRKGSCPKGDSCEYAHGVFESWLHPAQYKTRLCKDETGCARKVCFFAHKREEMRPVNASTGSAVAQSPFSSLEMMPGLSPLAYSSGVSTPPVSPMANGVPSSPRNGGSWQNRVNTLTPPALQLNGGSRLKSTLSARDIDMEMEMELRLRGFGNNVEETFGSYVSSPSRNSQMGQNMNQHYPSSPVRQPPSQHGFESSAAAAVAVMKARSTAFAKRSLSFKPATQAAPQSNLSDWGSPNGKLEWGMKGEELNKMRRSVSFGIHGNNNNNAARDYRDEPDVSWVNSLVKDSTVVSERSFGMNERVRIMSWAEQMYREKEQTVV

SEQ ID NO: 50837 - protein, 553 aa, Arabidopsis thaliana
  peptide (1)..(553): Ceres Seq. ID no. 13575361
  misc_feature (80)..(115): Pfam Name: Ankyrin repeat Pfam Description: Ankyrin repeat
  misc_feature (1)..(183): Homolog of NCBI NO: 15239917 NR Description: zinc finger transcription factor -related protein
  misc_feature (165)..(463): Homolog of NCBI NO: 15239917 NR Description: zinc finger transcription factor -related protein
  misc_feature (1)..(183): Homolog of NCBI NO: 20466590 NR Description: zinc finger transcription factor-like protein
  misc_feature (165)..(463): Homolog of NCBI NO: 20466590 NR Description: zinc finger transcription factor-like protein
  misc_feature (395)..(521): Homolog of NCBI NO: 28273376 NR Description: unknown protein [Oryza sativa (japonica
  misc_feature (3)..(173): Homolog of NCBI NO: 28273376 NR Description: unknown protein [Oryza sativa (japonica
  misc_feature (165)..(420): Homolog of NCBI NO: 28273376 NR Description: unknown protein [Oryza sativa (japonica
  misc_feature (2)..(453): Homolog of NCBI NO: 15237721 NR Description: zinc finger transcription factor-related protein
  misc_feature (1)..(553): Homolog of NCBI NO: 15225637 NR Description: CCCH-type zinc finger protein -related
  misc_feature (1)..(553): Homolog of NCBI NO: 18410398 NR Description: expressed protein [Arabidopsis thaliana]
MLLLEFAACDDLDSFKREVEEKGLDLDESGLWYCRRVGSKKMGLEERTPLMVAAMYGSIKVLTFIVSTGKSDVNRACGEERVTPLHCAVAGCSVNMIEVINVLLDASALVNSVDANGNQPLDVFVRVSRFVASPRRKAVELLLRGGGVGGLIDEAVEEEIKIVSKYPADASLPDINEGVYGSDEFRMYSFKVKPCSRAYSHDWTECAFVHPGENARRRDPRKYPYTCVPCPEFRKGSCPKGDSCEYAHGVFESWLHPAQYKTRLCKDETGCARKVCFFAHKREEMRPVNASTGSAVAQSPFSSLEMMPGLSPLAYSSGVSTPPVSPMANGVPSSPRNGGSWQNRVNTLTPPALQLNGGSRLKSTLSARDIDMEMEMELRLRGFGNNVEETFGSYVSSPSRNSQMGQNMNQHYPSSPVRQPPSQHGFESSAAAAVAVMKARSTAFAKRSLSFKPATQAAPQSNLSDWGSPNGKLEWGMKGEELNKMRRSVSFGIHGNNNNNAARDYRDEPDVSWVNSLVKDSTVVSERSFGMNERVRIMSWAEQMYREKEQTVV

SEQ ID NO: 50838 - DNA, 1278 bp, Arabidopsis thaliana
  misc_feature (1)..(1278): Ceres Seq. ID no. 12559007
  misc_feature: MA Experiment ID: 108434 Result: Up-regulated in Transcription
  misc_feature: MA Experiment 108434 PARAMETER Experiment Name: At_Root_Tips_cDNA_P Parameter: Tissue Value: Root Tips
  misc_feature: MA Experiment ID: 108462 Result: Down-regulated in Transcription
  misc_feature: MA Experiment 108462 PARAMETER Experiment Name: At_Germinating_Seeds_cDNA_P Parameter: Age (day) Value: 2 vs. 0
  misc_feature: MA Experiment 108462 PARAMETER Experiment Name: At_Germinating_Seeds_cDNA_P Parameter: Tissue Value: Germinating Seeds
  misc_feature: MA Experiment ID: 108463 Result: Down-regulated in Transcription
  misc_feature: MA Experiment 108463 PARAMETER Experiment Name: At_Germinating_Seeds_cDNA_P Parameter: Age (day) Value: 3 vs. 0
  misc_feature: MA Experiment 108463 PARAMETER Experiment Name: At_Germinating_Seeds_cDNA_P Parameter: Tissue Value: Germinating Seeds
  misc_feature: MA Experiment ID: 108464 Result: Down-regulated in Transcription
  misc_feature: MA Experiment 108464 PARAMETER Experiment Name: At_Germinating_Seeds_cDNA_P Parameter: Age (day) Value: 4 vs. 0
  misc_feature: MA Experiment 108464 PARAMETER Experiment Name: At_Germinating_Seeds_cDNA_P Parameter: Tissue Value: Germinating Seeds
  misc_feature: MA Experiment ID: 108488 Result: Up-regulated in Transcription
  misc_feature: MA Experiment ID: 108489 Result: Up-regulated in Transcription
  misc_feature: MA Experiment ID: 108561 Result: Down-regulated in Transcription
  misc_feature: MA Experiment 108561 PARAMETER Experiment Name: At_100uM_ABA_cDNA_P Parameter: Timepoint (hr) Value: 6
  misc_feature: MA Experiment 108561 PARAMETER Experiment Name: At_100uM_ABA_cDNA_P Parameter: Tissue Value: Aerial
  misc_feature: MA Experiment 108561 PARAMETER Experiment Name: At_100uM_ABA_cDNA_P Parameter: Treatment Value: 100uM ABA vs. No Treatment
  misc_feature: MA Experiment ID: 108576 Result: Down-regulated in Transcription
  misc_feature: MA Experiment 108576 PARAMETER Experiment Name: At_42deg_Heat_cDNA_P Parameter: Temperature (deg C) Value: 42 vs. 22
  misc_feature: MA Experiment 108576 PARAMETER Experiment Name: At_42deg_Heat_cDNA_P Parameter: Timepoint (hr) Value: 1
  misc_feature: MA Experiment 108576 PARAMETER Experiment Name: At_42deg_Heat_cDNA_P Parameter: Tissue Value: Aerial
  misc_feature: MA Experiment ID: 108595 Result: Down-regulated in Transcription
  misc_feature: MA Experiment 108595 PARAMETER Experiment Name: At_Ler-pi_Ovule_cDNA_P Parameter: Plant Line Value: null
  misc_feature: MA Experiment ID: 108607 Result: Down-regulated in Transcription
  misc_feature: MA Experiment 108607 PARAMETER Experiment Name: At_100uM_ABA_cDNA_P Parameter: Timepoint (hr) Value: 4
  misc_feature: MA Experiment 108607 PARAMETER Experiment Name: At_100uM_ABA_cDNA_P Parameter: Tissue Value: Aerial
  misc_feature: MA Experiment 108607 PARAMETER Experiment Name: At_100uM_ABA_cDNA_P Parameter: Treatment Value: 100uM ABA vs. No Treatment
tctctcttcagtcttcaacctccgcccggtattgttgaaaagttttagcctttttgttaattactactttactactcttgttgtgaatttgctgctactgttgaagccatggaagctcggattttgcagtcttcttcttcctgttattcgtctctttacgctgtcaatcgatcccggttctcttctgtgtcatctccgaaacctttctccgtcagctttgctcagacgacgagaacaaggactcgtgtattatccatgtcgaagaaagatggtcgcactgataaagatgatgacactgatagtctcaattacaaagattctggtgttgatatcgatgctggtgctgagcttgttaaacgaatcgcaaagatggctcctggaattggtggatttggtggtctctttccattaggtgatagttatcttgtagctggtacggatggtgtagggactaaattgaaattggcatttgaaactggaattcatgacaccattggaatcgacttggttgctatgagtgtgaatgatattattacttctggtgcaaagcctctgtttttccttgattactttgctactagtcgtcttgatgtagaccttgctgaaaaggtcattaaagggattgttgaaggttgtcggcaatcggaatgtgctctcttagggggagagactgcagagatgcctgacttttatgcagagggcgagtacgatctaagtgggtttgcagtaggcatagtaaagaaaacttcagttatcaacggaaaaaacattgtggccggtgatgttcttattggcctcccgtctagtggtgttcattccaatggtttttctctagtaagaagggtattggctcgaagcaatctttcgctgaaggatgcgcttccaggtggatcaagtacccttggtgatgctctaatggcacccactgtcatttacgtgaaacaggtacttgatatgatagaaaaaggaggagtgaaaggtttagctcatatcacaggcggaggtttcacagacaacattccccgagtcttcccggacggtttgggtgctgttattcacaccgatgcttgggaacttccaccgttgttcaagtggattcaacagactgggagaatagaagacagtgagatgagaaggacgtttaacctggggatagggatggttatggtggttagtccagaggcagcttcacgaatactagaagaagtcaagaatggagactatgttgcgtatcgcgtaggagaggttgtcaacggtgaaggcgtaagctatcagtag

SEQ ID NO: 50839 - protein, 389 aa, Arabidopsis thaliana
  peptide (1)..(389): Ceres Seq. ID no. 12559008
  misc_feature (222)..(389): Pfam Name: AIR synthase related protein, C-terminal domain Pfam Description: AIR synthase related protein, C-terminal domain
  misc_feature (60)..(385): Homolog of NCBI NO: 23029993 NR Description: hypothetical protein [Microbulbifer degradans
  misc_feature (65)..(389): Homolog of NCBI NO: 15677123 NR Description: phosphoribosylformylglycinamidine cyclo-ligase
  misc_feature (65)..(389): Homolog of NCBI NO: 15794333 NR Description: putative phosphoribosylformylglycinamidine
  misc_feature (66)..(380): Homolog of NCBI NO: 22976704 NR Description: hypothetical protein [Ralstonia metallidurans]
  misc_feature (66)..(380): Homolog of NCBI NO: 17547342 NR Description: PROBABLE PHOSPHORIBOSYLFORMYLGLYCINAMIDINE
  misc_feature (62)..(389): Homolog of NCBI NO: 34499070 NR Description: phosphoribosylformylglycinamidine cyclo-ligase
  misc_feature (20)..(388): Homolog of NCBI NO: 34897250 NR Description: putative 5'-phosphoribosyl-5-aminoimidazole
  misc_feature (48)..(388): Homolog of NCBI NO: 1709925 NR Description: Phosphoribosylformylglycinamidine cyclo-ligase, precursor (AIRS) (Phosphoribosyl-aminoimidazole synthetase) (AIR
  misc_feature (1)..(344): Homolog of NCBI NO: 541885 NR Description: phosphoribosylformylglycinamidine cyclo-ligase
  misc_feature (1)..(389): Homolog of NCBI NO: 15233161 NR Description: phosphoribosylformylglycinamidine cyclo-ligase
MEARILQSSSSCYSSLYAVNRSRFSSVSSPKPFSVSFAQTTRTRTRVLSMSKKDGRTDKDDDTDSLNYKDSGVDIDAGAELVKRIAKMAPGIGGFGGLFPLGDSYLVAGTDGVGTKLKLAFETGIHDTIGIDLVAMSVNDIITSGAKPLFFLDYFATSRLDVDLAEKVIKGIVEGCRQSECALLGGETAEMPDFYAEGEYDLSGFAVGIVKKTSVINGKNIVAGDVLIGLPSSGVHSNGFSLVRRVLARSNLSLKDALPGGSSTLGDALMAPTVIYVKQVLDMIEKGGVKGLAHITGGGFTDNIPRVFPDGLGAVIHTDAWELPPLFKWIQQTGRIEDSEMRRTFNLGIGMVMVVSPEAASRILEEVKNGDYVAYRVGEVVNGEGVSYQ

SEQ ID NO: 50840 - protein, 340 aa, Arabidopsis thaliana
  peptide (1)..(340): Ceres Seq. ID no. 12559009
  misc_feature (173)..(340): Pfam Name: AIR synthase related protein, C-terminal domain Pfam Description: AIR synthase related protein, C-terminal domain
  misc_feature (11)..(336): Homolog of NCBI NO: 23029993 NR Description: hypothetical protein [Microbulbifer degradans
  misc_feature (16)..(340): Homolog of NCBI NO: 15677123 NR Description: phosphoribosylformylglycinamidine cyclo-ligase
  misc_feature (16)..(340): Homolog of NCBI NO: 15794333 NR Description: putative phosphoribosylformylglycinamidine
  misc_feature (17)..(331): Homolog of NCBI NO: 22976704 NR Description: hypothetical protein [Ralstonia metallidurans]
  misc_feature (17)..(331): Homolog of NCBI NO: 17547342 NR Description: PROBABLE PHOSPHORIBOSYLFORMYLGLYCINAMIDINE
  misc_feature (13)..(340): Homolog of NCBI NO: 34499070 NR Description: phosphoribosylformylglycinamidine cyclo-ligase
  misc_feature (1)..(339): Homolog of NCBI NO: 34897250 NR Description: putative 5'-phosphoribosyl-5-aminoimidazole
  misc_feature (1)..(339): Homolog of NCBI NO: 1709925 NR Description: Phosphoribosylformylglycinamidine cyclo-ligase, precursor (AIRS) (Phosphoribosyl-aminoimidazole synthetase) (AIR
  misc_feature (1)..(295): Homolog of NCBI NO: 541885 NR Description: phosphoribosylformylglycinamidine cyclo-ligase
  misc_feature (1)..(340): Homolog of NCBI NO: 15233161 NR Description: phosphoribosylformylglycinamidine cyclo-ligase
MSKKDGRTDKDDDTDSLNYKDSGVDIDAGAELVKRIAKMAPGIGGFGGLFPLGDSYLVAGTDGVGTKLKLAFETGIHDTIGIDLVAMSVNDIITSGAKPLFFLDYFATSRLDVDLAEKVIKGIVEGCRQSECALLGGETAEMPDFYAEGEYDLSGFAVGIVKKTSVINGKNIVAGDVLIGLPSSGVHSNGFSLVRRVLARSNLSLKDALPGGSSTLGDALMAPTVIYVKQVLDMIEKGGVKGLAHITGGGFTDNIPRVFPDGLGAVIHTDAWELPPLFKWIQQTGRIEDSEMRRTFNLGIGMVMVVSPEAASRILEEVKNGDYVAYRVGEVVNGEGVSYQ

SEQ ID NO: 50841 - protein, 302 aa, Arabidopsis thaliana
  peptide (1)..(302): Ceres Seq. ID no. 12559010
  misc_feature (135)..(302): Pfam Name: AIR synthase related protein, C-terminal domain Pfam Description: AIR synthase related protein, C-terminal domain
  misc_feature (1)..(298): Homolog of NCBI NO: 23029993 NR Description: hypothetical protein [Microbulbifer degradans
  misc_feature (1)..(302): Homolog of NCBI NO: 15677123 NR Description: phosphoribosylformylglycinamidine cyclo-ligase
  misc_feature (1)..(302): Homolog of NCBI NO: 15794333 NR Description: putative phosphoribosylformylglycinamidine
  misc_feature (1)..(293): Homolog of NCBI NO: 22976704 NR Description: hypothetical protein [Ralstonia metallidurans]
  misc_feature (1)..(293): Homolog of NCBI NO: 17547342 NR Description: PROBABLE PHOSPHORIBOSYLFORMYLGLYCINAMIDINE
  misc_feature (1)..(302): Homolog of NCBI NO: 34499070 NR Description: phosphoribosylformylglycinamidine cyclo-ligase
  misc_feature (1)..(301): Homolog of NCBI NO: 34897250 NR Description: putative 5'-phosphoribosyl-5-aminoimidazole
  misc_feature (1)..(301): Homolog of NCBI NO: 1709925 NR Description: Phosphoribosylformylglycinamidine cyclo-ligase, precursor (AIRS) (Phosphoribosyl-aminoimidazole synthetase) (AIR
  misc_feature (1)..(257): Homolog of NCBI NO: 541885 NR Description: phosphoribosylformylglycinamidine cyclo-ligase
  misc_feature (1)..(302): Homolog of NCBI NO: 15233161 NR Description: phosphoribosylformylglycinamidine cyclo-ligase
MAPGIGGFGGLFPLGDSYLVAGTDGVGTKLKLAFETGIHDTIGIDLVAMSVNDIITSGAKPLFFLDYFATSRLDVDLAEKVIKGIVEGCRQSECALLGGETAEMPDFYAEGEYDLSGFAVGIVKKTSVINGKNIVAGDVLIGLPSSGVHSNGFSLVRRVLARSNLSLKDALPGGSSTLGDALMAPTVIYVKQVLDMIEKGGVKGLAHITGGGFTDNIPRVFPDGLGAVIHTDAWELPPLFKWIQQTGRIEDSEMRRTFNLGIGMVMVVSPEAASRILEEVKNGDYVAYRVGEVVNGEGVSYQ

SEQ ID NO: 50842 - DNA, 1386 bp, Arabidopsis thaliana; identical to SEQ ID NO: 30488
  misc_feature (1)..(1386): Ceres Seq. ID no. 12337305
  misc_feature: MA Experiment ID: 108434 Result: Up-regulated in Transcription
  misc_feature: MA Experiment 108434 PARAMETER Experiment Name: At_Root_Tips_cDNA_P Parameter: Tissue Value: Root Tips
  misc_feature: MA Experiment ID: 108462 Result: Up-regulated in Transcription
  misc_feature: MA Experiment 108462 PARAMETER Experiment Name: At_Germinating_Seeds_cDNA_P Parameter: Age (day) Value: 2 vs. 0
  misc_feature: MA Experiment 108462 PARAMETER Experiment Name: At_Germinating_Seeds_cDNA_P Parameter: Tissue Value: Germinating Seeds
  misc_feature: MA Experiment ID: 108464 Result: Up-regulated in Transcription
  misc_feature: MA Experiment 108464 PARAMETER Experiment Name: At_Germinating_Seeds_cDNA_P Parameter: Age (day) Value: 4 vs. 0
  misc_feature: MA Experiment 108464 PARAMETER Experiment Name: At_Germinating_Seeds_cDNA_P Parameter: Tissue Value: Germinating Seeds
  misc_feature: MA Experiment ID: 108473 Result: Down-regulated in Transcription
  misc_feature: MA Experiment 108473 PARAMETER Experiment Name: At_Drought_Flowers_cDNA_P Parameter: Timepoint (hr) Value: 7 d
  misc_feature: MA Experiment 108473 PARAMETER Experiment Name: At_Drought_Flowers_cDNA_P Parameter: Tissue Value: Flower
  misc_feature: MA Experiment 108473 PARAMETER Experiment Name: At_Drought_Flowers_cDNA_P Parameter: Treatment Value: Drought vs. No Drought
  misc_feature: MA Experiment ID: 108561 Result: Down-regulated in Transcription
  misc_feature: MA Experiment 108561 PARAMETER Experiment Name: At_100uM_ABA_cDNA_P Parameter: Timepoint (hr) Value: 6
  misc_feature: MA Experiment 108561 PARAMETER Experiment Name: At_100uM_ABA_cDNA_P Parameter: Tissue Value: Aerial
  misc_feature: MA Experiment 108561 PARAMETER Experiment Name: At_100uM_ABA_cDNA_P Parameter: Treatment Value: 100uM ABA vs. No Treatment
  misc_feature: MA Experiment ID: 20000171 Result: Down-regulated in Transcription
  misc_feature: MA Experiment 20000171 PARAMETER Experiment Name: At_42deg_Heat_P Parameter: Age (day) Value: 14
  misc_feature: MA Experiment 20000171 PARAMETER Experiment Name: At_42deg_Heat_P Parameter: Organism Value: A. thaliana
  misc_feature: MA Experiment 20000171 PARAMETER Experiment Name: At_42deg_Heat_P Parameter: Plant Line Value: WS
  misc_feature: MA Experiment 20000171 PARAMETER Experiment Name: At_42deg_Heat_P Parameter: Temperature (deg C) Value: 42 vs. 22
  misc_feature: MA Experiment 20000171 PARAMETER Experiment Name: At_42deg_Heat_P Parameter: Timepoint (hr) Value: 1
  misc_feature: MA Experiment 20000171 PARAMETER Experiment Name: At_42deg_Heat_P Parameter: Tissue Value: Aerial
  misc_feature: MA Experiment ID: 20000173 Result: Down-regulated in Transcription
  misc_feature: MA Experiment 20000173 PARAMETER Experiment Name: At_42deg_Heat_P Parameter: Age (day) Value: 14
  misc_feature: MA Experiment 20000173 PARAMETER Experiment Name: At_42deg_Heat_P Parameter: Organism Value: A. thaliana
  misc_feature: MA Experiment 20000173 PARAMETER Experiment Name: At_42deg_Heat_P Parameter: Plant Line Value: WS
  misc_feature: MA Experiment 20000173 PARAMETER Experiment Name: At_42deg_Heat_P Parameter: Temperature (deg C) Value: 42 vs. 22
  misc_feature: MA Experiment 20000173 PARAMETER Experiment Name: At_42deg_Heat_P Parameter: Timepoint (hr) Value: 6
  misc_feature: MA Experiment 20000173 PARAMETER Experiment Name: At_42deg_Heat_P Parameter: Tissue Value: Aerial
  misc_feature: MA Experiment ID: 20000179 Result: Up-regulated in Transcription
  misc_feature: MA Experiment 20000179 PARAMETER Experiment Name: At_Germinating_Seeds_P Parameter: Age (hr) Value: 6 vs. 0
  misc_feature: MA Experiment 20000179 PARAMETER Experiment Name: At_Germinating_Seeds_P Parameter: Tissue Value: Germinating Seeds
  misc_feature: MA Experiment ID: 20000180 Result: Up-regulated in Transcription
  misc_feature: MA Experiment 20000180 PARAMETER Experiment Name: At_Germinating_Seeds_P Parameter: Age (hr) Value: 24 vs. 0
  misc_feature: MA Experiment 20000180 PARAMETER Experiment Name: At_Germinating_Seeds_P Parameter: Tissue Value: Germinating Seeds
  misc_feature: MA Experiment ID: 20000182 Result: Down-regulated in Transcription
  misc_feature: MA Experiment 20000182 PARAMETER Experiment Name: At_2mM_SA_P Parameter: Age (day) Value: 14
  misc_feature: MA Experiment 20000182 PARAMETER Experiment Name: At_2mM_SA_P Parameter: Organism Value: A. thaliana
  misc_feature: MA Experiment 20000182 PARAMETER Experiment Name: At_2mM_SA_P Parameter: Plant Line Value: WS
  misc_feature: MA Experiment 20000182 PARAMETER Experiment Name: At_2mM_SA_P Parameter: Timepoint (hr) Value: 6
  misc_feature: MA Experiment 20000182 PARAMETER Experiment Name: At_2mM_SA_P Parameter: Tissue Value: Aerial
  misc_feature: MA Experiment 20000182 PARAMETER Experiment Name: At_2mM_SA_P Parameter: Treatment Value: 2mM SA vs. No Treatment
  misc_feature: MA Experiment ID: 20000184 Result: Up-regulated in Transcription
  misc_feature: MA Experiment 20000184 PARAMETER Experiment Name: At_Shoots__P Parameter: Age (day) Value: 7
  misc_feature: MA Experiment 20000184 PARAMETER Experiment Name: At_Shoots__P Parameter: Tissue Value: Shoots vs. Whole Plant
  misc_feature: MA Experiment ID: 20000185 Result: Down-regulated in Transcription
  misc_feature: MA Experiment 20000185 PARAMETER Experiment Name: At_Roots__P Parameter: Age (day) Value: 7 vs. 21
  misc_feature: MA Experiment 20000185 PARAMETER Experiment Name: At_Roots__P Parameter: Organism Value: A. thaliana
  misc_feature: MA Experiment 20000185 PARAMETER Experiment Name: At_Roots__P Parameter: Tissue Value: Roots vs. Whole Plant
  misc_feature: MA Experiment ID: 20000227 Result: Down-regulated in Transcription
  misc_feature: MA Experiment 20000227 PARAMETER Experiment Name: At_Root-Tips-vs-Tops_P Parameter: Tissue Value: Root Tips vs. Root Tops
  misc_feature: MA Experiment ID: 20000234 Result: Up-regulated in Transcription
  misc_feature: MA Experiment 20000234 PARAMETER Experiment Name: At_Siliques_P Parameter: Age (day) Value: 21
  misc_feature: MA Experiment 20000234 PARAMETER Experiment Name: At_Siliques_P Parameter: Organism Value: A. thaliana
  misc_feature: MA Experiment 20000234 PARAMETER Experiment Name: At_Siliques_P Parameter: Plant Line Value: WS
  misc_feature: MA Experiment 20000234 PARAMETER Experiment Name: At_Siliques_P Parameter: Tissue Value: Less Than 5mm Siliques vs. Whole Plant
  misc_feature: MA Experiment ID: 20000235 Result: Up-regulated in Transcription
  misc_feature: MA Experiment 20000235 PARAMETER Experiment Name: At_Siliques_P Parameter: Age (day) Value: 21
  misc_feature: MA Experiment 20000235 PARAMETER Experiment Name: At_Siliques_P Parameter: Organism Value: A. thaliana
  misc_feature: MA Experiment 20000235 PARAMETER Experiment Name: At_Siliques_P Parameter: Plant Line Value: WS
  misc_feature: MA Experiment 20000235 PARAMETER Experiment Name: At_Siliques_P Parameter: Tissue Value: 5-10mm Siliques vs. Whole Plant
  misc_feature: MA Experiment ID: 20000265 Result: Up-regulated in Transcription
  misc_feature: MA Experiment 20000265 PARAMETER Experiment Name: At_Open_Flower_P Parameter: Age (day) Value: 21
  misc_feature: MA Experiment 20000265 PARAMETER Experiment Name: At_Open_Flower_P Parameter: Plant Line Value: WS
  misc_feature: MA Experiment 20000265 PARAMETER Experiment Name: At_Open_Flower_P Parameter: Tissue Value: Closed Flower vs. Whole Plant
  misc_feature: MA Experiment ID: 20000286 Result: Up-regulated in Transcription
  misc_feature: MA Experiment 20000286 PARAMETER Experiment Name: At_Open_Flower_P Parameter: Age (day) Value: 21
  misc_feature: MA Experiment 20000286 PARAMETER Experiment Name: At_Open_Flower_P Parameter: Plant Line Value: WS
  misc_feature: MA Experiment 20000286 PARAMETER Experiment Name: At_Open_Flower_P Parameter: Tissue Value: Half Open vs. Whole Plant
  misc_feature: MA Experiment ID: 20000436 Result: Down-regulated in Transcription
  misc_feature: MA Experiment 20000436 PARAMETER Experiment Name: At_Drought_P Parameter: Age (day) Value: 7
  misc_feature: MA Experiment 20000436 PARAMETER Experiment Name: At_Drought_P Parameter: Organism Value: A. thaliana
  misc_feature: MA Experiment 20000436 PARAMETER Experiment Name: At_Drought_P Parameter: Plant Line Value: WS
  misc_feature: MA Experiment 20000436 PARAMETER Experiment Name: At_Drought_P Parameter: Timepoint (hr) Value: 12
  misc_feature: MA Experiment 20000436 PARAMETER Experiment Name: At_Drought_P Parameter: Tissue Value: Whole Plant
  misc_feature: MA Experiment 20000436 PARAMETER Experiment Name: At_Drought_P Parameter: Treatment Value: Drought vs. No Drought
  misc_feature: MA Experiment ID: 20000437 Result: Down-regulated in Transcription
  misc_feature: MA Experiment 20000437 PARAMETER Experiment Name: At_Drought_P Parameter: Age (day) Value: 8
  misc_feature: MA Experiment 20000437 PARAMETER Experiment Name: At_Drought_P Parameter: Organism Value: A. thaliana
  misc_feature: MA Experiment 20000437 PARAMETER Experiment Name: At_Drought_P Parameter: Plant Line Value: WS
  misc_feature: MA Experiment 20000437 PARAMETER Experiment Name: At_Drought_P Parameter: Timepoint (hr) Value: 24
  misc_feature: MA Experiment 20000437 PARAMETER Experiment Name: At_Drought_P Parameter: Tissue Value: Whole Plant
  misc_feature: MA Experiment 20000437 PARAMETER Experiment Name: At_Drought_P Parameter: Treatment Value: Drought vs. No Drought
  misc_feature: MA Experiment ID: 20000438 Result: Up-regulated in Transcription
  misc_feature: MA Experiment 20000438 PARAMETER Experiment Name: At_Shoots__P Parameter: Age (day) Value: 14
  misc_feature: MA Experiment 20000438 PARAMETER Experiment Name: At_Shoots__P Parameter: Tissue Value: Shoots vs. Whole Plant
  misc_feature: MA Experiment ID: 20000439 Result: Down-regulated in Transcription
  misc_feature: MA Experiment 20000439 PARAMETER Experiment Name: At_Roots__P Parameter: Age (day) Value: 14 vs. 21
  misc_feature: MA Experiment 20000439 PARAMETER Experiment Name: At_Roots__P Parameter: Organism Value: A. thaliana
  misc_feature: MA Experiment 20000439 PARAMETER Experiment Name: At_Roots__P Parameter: Tissue Value: Roots vs. Whole Plant
  misc_feature: MA Experiment ID: 20000451 Result: Up-regulated in Transcription
  misc_feature: MA Experiment 20000451 PARAMETER Experiment Name: At_CS6879_Shoots-Roots_P Parameter: Age (day) Value: 14
  misc_feature: MA Experiment 20000451 PARAMETER Experiment Name: At_CS6879_Shoots-Roots_P Parameter: Organism Value: A. thaliana
  misc_feature: MA Experiment 20000451 PARAMETER Experiment Name: At_CS6879_Shoots-Roots_P Parameter: Plant Line Value: CS6879 vs. WS
  misc_feature: MA Experiment 20000451 PARAMETER Experiment Name: At_CS6879_Shoots-Roots_P Parameter: Tissue Value: Roots
  misc_feature: MA Experiment ID: 20000573 Result: Down-regulated in Transcription
  misc_feature: MA Experiment 20000573 PARAMETER Experiment Name: At_100uM_ABA_Mutants__P Parameter: Organism Value: A. thaliana
  misc_feature: MA Experiment 20000573 PARAMETER Experiment Name: At_100uM_ABA_Mutants__P Parameter: Plant Line Value: CS22 vs. Ler wt
  misc_feature: MA Experiment 20000573 PARAMETER Experiment Name: At_100uM_ABA_Mutants__P Parameter: Timepoint (hr) Value: N/A
  misc_feature: MA Experiment 20000573 PARAMETER Experiment Name: At_100uM_ABA_Mutants__P Parameter: Tissue Value: Whole Plant
  misc_feature: MA Experiment 20000573 PARAMETER Experiment Name: At_100uM_ABA_Mutants__P Parameter: Treatment Value: None
  misc_feature: MA Experiment ID: 20000574 Result: Down-regulated in Transcription
  misc_feature: MA Experiment 20000574 PARAMETER Experiment Name: At_100uM_ABA_Mutants__P Parameter: Organism Value: A. thaliana
  misc_feature: MA Experiment 20000574 PARAMETER Experiment Name: At_100uM_ABA_Mutants__P Parameter: Plant Line Value: CS23 vs. Ler wt
  misc_feature: MA Experiment 20000574 PARAMETER Experiment Name: At_100uM_ABA_Mutants__P Parameter: Timepoint (hr) Value: N/A
  misc_feature: MA Experiment 20000574 PARAMETER Experiment Name: At_100uM_ABA_Mutants__P Parameter: Tissue Value: Whole Plant
  misc_feature: MA Experiment 20000574 PARAMETER Experiment Name: At_100uM_ABA_Mutants__P Parameter: Treatment Value: None
  misc_feature: MA Experiment ID: 20000794 Result: Down-regulated in Transcription
  misc_feature: MA Experiment 20000794 PARAMETER Experiment Name: At_Petals_P Parameter: Age (day) Value: 23-25 days
  misc_feature: MA Experiment 20000794 PARAMETER Experiment Name: At_Petals_P Parameter: Plant Line Value: WS
  misc_feature: MA Experiment 20000794 PARAMETER Experiment Name: At_Petals_P Parameter: Tissue Value: Petals vs. Whole plant
  misc_feature: MA Experiment ID: 20001248 Result: Down-regulated in Transcription
  misc_feature: MA Experiment 20001248 PARAMETER Experiment Name: At_Far-red-induction_P Parameter: Age (day) Value: 7
  misc_feature: MA Experiment 20001248 PARAMETER Experiment Name: At_Far-red-induction_P Parameter: Light Value: Far-red vs. White
  misc_feature: MA Experiment 20001248 PARAMETER Experiment Name: At_Far-red-induction_P Parameter: Organism Value: A. thaliana
  misc_feature: MA Experiment 20001248 PARAMETER Experiment Name: At_Far-red-induction_P Parameter: Plant Line Value: Columbia
  misc_feature: MA Experiment 20001248 PARAMETER Experiment Name: At_Far-red-induction_P Parameter: Timepoint (hr) Value: 4
  misc_feature: MA Experiment 20001248 PARAMETER Experiment Name: At_Far-red-induction_P Parameter: Tissue Value: Whole Plant
  misc_feature: MA Experiment ID: 20001451 Result: Down-regulated in Transcription
  misc_feature: MA Experiment 20001451 PARAMETER Experiment Name: At_Far-red-induction_P Parameter: Age (day) Value: 7
  misc_feature: MA Experiment 20001451 PARAMETER Experiment Name: At_Far-red-induction_P Parameter: Light Value: Far-red vs. White
  misc_feature: MA Experiment 20001451 PARAMETER Experiment Name: At_Far-red-induction_P Parameter: Organism Value: A. thaliana
  misc_feature: MA Experiment 20001451 PARAMETER Experiment Name: At_Far-red-induction_P Parameter: Plant Line Value: Columbia
  misc_feature: MA Experiment 20001451 PARAMETER Experiment Name: At_Far-red-induction_P Parameter: Timepoint (hr) Value: 24
  misc_feature: MA Experiment 20001451 PARAMETER Experiment Name: At_Far-red-induction_P Parameter: Tissue Value: Whole Plant
  misc_feature: MA Experiment ID: 20001459 Result: Up-regulated in Transcription
  misc_feature: MA Experiment 20001459 PARAMETER Experiment Name: At_50mM_NH4NO3_L-to-H_P Parameter: Age (day) Value: Undefined
  misc_feature: MA Experiment 20001459 PARAMETER Experiment Name: At_50mM_NH4NO3_L-to-H_P Parameter: Organism Value: Undefined
  misc_feature: MA Experiment 20001459 PARAMETER Experiment Name: At_50mM_NH4NO3_L-to-H_P Parameter: Plant Line Value: Undefined
  misc_feature: MA Experiment 20001459 PARAMETER Experiment Name: At_50mM_NH4NO3_L-to-H_P Parameter: Timepoint (hr) Value: 4
  misc_feature: MA Experiment 20001459 PARAMETER Experiment Name: At_50mM_NH4NO3_L-to-H_P Parameter: Tissue Value: Siliques
  misc_feature: MA Experiment 20001459 PARAMETER Experiment Name: At_50mM_NH4NO3_L-to-H_P Parameter: Treatment Value: 50mM NH4NO3 vs. 100mM Manitol
  misc_feature: MA Experiment ID: 20001554 Result: Down-regulated in Transcription
  misc_feature: MA Experiment 20001554 PARAMETER Experiment Name: At_Drought_Soil_Dry_P Parameter: Age (day) Value: 21
  misc_feature: MA Experiment 20001554 PARAMETER Experiment Name: At_Drought_Soil_Dry_P Parameter: Organism Value: A. thaliana
  misc_feature: MA Experiment 20001554 PARAMETER Experiment Name: At_Drought_Soil_Dry_P Parameter: Plant Line Value: WS
  misc_feature: MA Experiment 20001554 PARAMETER Experiment Name: At_Drought_Soil_Dry_P Parameter: Post Timepoint (hr) Value: None
  misc_feature: MA Experiment 20001554 PARAMETER Experiment Name: At_Drought_Soil_Dry_P Parameter: Post-Treatment Value: None
  misc_feature: MA Experiment 20001554 PARAMETER Experiment Name: At_Drought_Soil_Dry_P Parameter: Timepoint (day) Value: 7
  misc_feature: MA Experiment 20001554 PARAMETER Experiment Name: At_Drought_Soil_Dry_P Parameter: Treatment Value: Drought vs. No Drought
  misc_feature: MA Experiment ID: 20001555 Result: Down-regulated in Transcription
  misc_feature: MA Experiment 20001555 PARAMETER Experiment Name: At_Drought_Soil_Dry_P Parameter: Age (day) Value: 24
  misc_feature: MA Experiment 20001555 PARAMETER Experiment Name: At_Drought_Soil_Dry_P Parameter: Organism Value: A. thaliana
  misc_feature: MA Experiment 20001555 PARAMETER Experiment Name: At_Drought_Soil_Dry_P Parameter: Plant Line Value: WS
  misc_feature: MA Experiment 20001555 PARAMETER Experiment Name: At_Drought_Soil_Dry_P Parameter: Post Timepoint (hr) Value: None
  misc_feature: MA Experiment 20001555 PARAMETER Experiment Name: At_Drought_Soil_Dry_P Parameter: Post-Treatment Value: None
  misc_feature: MA Experiment 20001555 PARAMETER Experiment Name: At_Drought_Soil_Dry_P Parameter: Timepoint (day) Value: 10
  misc_feature: MA Experiment 20001555 PARAMETER Experiment Name: At_Drought_Soil_Dry_P Parameter: Treatment Value: Drought vs. No Drought
  misc_feature: MA Experiment ID: 20001556 Result: Down-regulated in Transcription
  misc_feature: MA Experiment 20001556 PARAMETER Experiment Name: At_Drought_Soil_Dry_P Parameter: Age (day) Value: 26
  misc_feature: MA Experiment 20001556 PARAMETER Experiment Name: At_Drought_Soil_Dry_P Parameter: Organism Value: A. thaliana
  misc_feature: MA Experiment 20001556 PARAMETER Experiment Name: At_Drought_Soil_Dry_P Parameter: Plant Line Value: WS
  misc_feature: MA Experiment 20001556 PARAMETER Experiment Name: At_Drought_Soil_Dry_P Parameter: Post Timepoint (hr) Value: None
  misc_feature: MA Experiment 20001556 PARAMETER Experiment Name: At_Drought_Soil_Dry_P Parameter: Post-Treatment Value: None
  misc_feature: MA Experiment 20001556 PARAMETER Experiment Name: At_Drought_Soil_Dry_P Parameter: Timepoint (day) Value: 12
  misc_feature: MA Experiment 20001556 PARAMETER Experiment Name: At_Drought_Soil_Dry_P Parameter: Treatment Value: Drought vs. No Drought
  misc_feature: MA Experiment ID: 20001558 Result: Up-regulated in Transcription
  misc_feature: MA Experiment 20001558 PARAMETER Experiment Name: At_Drought_Soil_Dry_P Parameter: Age (day) Value: 27
  misc_feature: MA Experiment 20001558 PARAMETER Experiment Name: At_Drought_Soil_Dry_P Parameter: Organism Value: A. thaliana
  misc_feature: MA Experiment 20001558 PARAMETER Experiment Name: At_Drought_Soil_Dry_P Parameter: Plant Line Value: WS
  misc_feature: MA Experiment 20001558 PARAMETER Experiment Name: At_Drought_Soil_Dry_P Parameter: Post Timepoint (hr) Value: 6
  misc_feature: MA Experiment 20001558 PARAMETER Experiment Name: At_Drought_Soil_Dry_P Parameter: Post-Treatment Value: Re-Water vs. No Drought
  misc_feature: MA Experiment 20001558 PARAMETER Experiment Name: At_Drought_Soil_Dry_P Parameter: Timepoint (day) Value: 13
  misc_feature: MA Experiment 20001558 PARAMETER Experiment Name: At_Drought_Soil_Dry_P Parameter: Treatment Value: Drought vs. No Drought
  misc_feature: MA Experiment ID: 20001559 Result: Down-regulated in Transcription
  misc_feature: MA Experiment 20001559 PARAMETER Experiment Name: At_Drought_Soil_Dry_P Parameter: Age (day) Value: 28
  misc_feature: MA Experiment 20001559 PARAMETER Experiment Name: At_Drought_Soil_Dry_P Parameter: Organism Value: A. thaliana
  misc_feature: MA Experiment 20001559 PARAMETER Experiment Name: At_Drought_Soil_Dry_P Parameter: Plant Line Value: WS
  misc_feature: MA Experiment 20001559 PARAMETER Experiment Name: At_Drought_Soil_Dry_P Parameter: Post Timepoint (hr) Value: 29
  misc_feature: MA Experiment 20001559 PARAMETER Experiment Name: At_Drought_Soil_Dry_P Parameter: Post-Treatment Value: Re-Water vs. No Drought
  misc_feature: MA Experiment 20001559 PARAMETER Experiment Name: At_Drought_Soil_Dry_P Parameter: Timepoint (day) Value: 14
  misc_feature: MA Experiment 20001559 PARAMETER Experiment Name: At_Drought_Soil_Dry_P Parameter: Treatment Value: Drought vs. No Drought
  misc_feature: MA Experiment ID: 20001757 Result: Up-regulated in Transcription
  misc_feature: MA Experiment 20001757 PARAMETER Experiment Name: At_50mM_NH4NO3_L-to-H_P Parameter: Timepoint (hr) Value: 6
  misc_feature: MA Experiment 20001757 PARAMETER Experiment Name: At_50mM_NH4NO3_L-to-H_P Parameter: Tissue Value: Leaf
  misc_feature: MA Experiment 20001757 PARAMETER Experiment Name: At_50mM_NH4NO3_L-to-H_P Parameter: Treatment Value: 50mM NH4NO3 vs 100mM Mannitol
  misc_feature: MA Experiment ID: 20001906 Result: Down-regulated in Transcription
  misc_feature: MA Experiment 20001906 PARAMETER Experiment Name: At_Drought_Reproduction_P Parameter: Age (day) Value: 35
  misc_feature: MA Experiment 20001906 PARAMETER Experiment Name: At_Drought_Reproduction_P Parameter: Organism Value: A. thaliana
  misc_feature: MA Experiment 20001906 PARAMETER Experiment Name: At_Drought_Reproduction_P Parameter: Plant Line Value: WS
  misc_feature: MA Experiment 20001906 PARAMETER Experiment Name: At_Drought_Reproduction_P Parameter: Timepoint (day) Value: 5
  misc_feature: MA Experiment 20001906 PARAMETER Experiment Name: At_Drought_Reproduction_P Parameter: Tissue Value: Siliques
  misc_feature: MA Experiment 20001906 PARAMETER Experiment Name: At_Drought_Reproduction_P Parameter: Treatment Value: Drought vs. No Drought
  misc_feature: MA Experiment ID: 20001911 Result: Down-regulated in Transcription
  misc_feature: MA Experiment 20001911 PARAMETER Experiment Name: At_Drought_Reproduction_P Parameter: Age (day) Value: 40
  misc_feature: MA Experiment 20001911 PARAMETER Experiment Name: At_Drought_Reproduction_P Parameter: Organism Value: A. thaliana
  misc_feature: MA Experiment 20001911 PARAMETER Experiment Name: At_Drought_Reproduction_P Parameter: Plant Line Value: WS
  misc_feature: MA Experiment 20001911 PARAMETER Experiment Name: At_Drought_Reproduction_P Parameter: Timepoint (day) Value: 10
  misc_feature: MA Experiment 20001911 PARAMETER Experiment Name: At_Drought_Reproduction_P Parameter: Tissue Value: Flowers
  misc_feature: MA Experiment 20001911 PARAMETER Experiment Name: At_Drought_Reproduction_P Parameter: Treatment Value: Drought vs. No Drought

SEQ ID NO: 50843 - protein, 257 aa, Arabidopsis thaliana; identical to SEQ ID NO: 30489
  peptide (1)..(257): Ceres Seq. ID no. 12337306
  misc_feature (164)..(241): Pfam Name: Pollen allergen Pfam Description: Pollen allergen
  misc_feature (164)..(241): Pfam Name: Pollen allergen Pfam Description: Pollen allergen
  misc_feature (1)..(257): Homolog of NCBI NO: 38046726 NR Description: alpha-expansin 1 [Populus tremula x Populus
  misc_feature (1)..(257): Homolog of NCBI NO: 20502782 NR Description: expansin 10 precursor [Rumex palustris]
  misc_feature (1)..(257): Homolog of NCBI NO: 20502786 NR Description: expansin 12 precursor [Rumex palustris]
  misc_feature (1)..(257): Homolog of NCBI NO: 20502784 NR Description: expansin 11 precursor [Rumex palustris]
  misc_feature (1)..(257): Homolog of NCBI NO: 13898655 NR Description: expansin [Prunus cerasus]
  misc_feature (1)..(257): Homolog of NCBI NO: 38046726 NR Description: alpha-expansin 1 [Populus tremula x Populus
  misc_feature (1)..(257): Homolog of NCBI NO: 20502786 NR Description: expansin 12 precursor [Rumex palustris]
  misc_feature (1)..(257): Homolog of NCBI NO: 13898655 NR Description: expansin [Prunus cerasus]
  misc_feature (1)..(257): Homolog of NCBI NO: 15227005 NR Description: expansin, putative
  misc_feature (1)..(257): Homolog of NCBI NO: 21553904 NR Description: expansin AtEx6 [Arabidopsis thaliana]
  misc_feature (1)..(257): Homolog of NCBI NO: 20138197 NR Description: Alpha-expansin 6 precursor (At-EXP6) (AtEx6)
  misc_feature (1)..(257): Homolog of NCBI NO: 7488487 NR Description: probable expansin precursor - rape
  misc_feature (1)..(257): Homolog of NCBI NO: 29466643 NR Description: expansin [Prunus persica]
  misc_feature (1)..(257): Homolog of NCBI NO: 20502784 NR Description: expansin 11 precursor [Rumex palustris]
  misc_feature (1)..(257): Homolog of NCBI NO: 20502782 NR Description: expansin 10 precursor [Rumex palustris]
  misc_feature (1)..(257): Homolog of NCBI NO: 29466643 NR Description: expansin [Prunus persica]
  misc_feature (1)..(257): Homolog of NCBI NO: 7488487 NR Description: probable expansin precursor - rape
  misc_feature (1)..(257): Homolog of NCBI NO: 20138197 NR Description: Alpha-expansin 6 precursor (At-EXP6) (AtEx6)
  misc_feature (1)..(257): Homolog of NCBI NO: 21553904 NR Description: expansin AtEx6 [Arabidopsis thaliana]
  misc_feature (1)..(257): Homolog of NCBI NO: 15227005 NR Description: expansin, putative

SEQ ID NO: 50844 - protein, 255 aa, Arabidopsis thaliana; identical to SEQ ID NO: 30490
  peptide (1)..(255): Ceres Seq. ID no. 12337307
  misc_feature (162)..(239): Pfam Name: Pollen allergen Pfam Description: Pollen allergen
  misc_feature (162)..(239): Pfam Name: Pollen allergen Pfam Description: Pollen allergen
  misc_feature (1)..(255): Homolog of NCBI NO: 38046726 NR Description: alpha-expansin 1 [Populus tremula x Populus
  misc_feature (1)..(255): Homolog of NCBI NO: 20502782 NR Description: expansin 10 precursor [Rumex palustris]
  misc_feature (1)..(255): Homolog of NCBI NO: 20502786 NR Description: expansin 12 precursor [Rumex palustris]
  misc_feature (1)..(255): Homolog of NCBI NO: 20502784 NR Description: expansin 11 precursor [Rumex palustris]
  misc_feature (1)..(255): Homolog of NCBI NO: 13898655 NR Description: expansin [Prunus cerasus]
  misc_feature (1)..(255): Homolog of NCBI NO: 38046726 NR Description: alpha-expansin 1 [Populus tremula x Populus
  misc_feature (1)..(255): Homolog of NCBI NO: 20502786 NR Description: expansin 12 precursor [Rumex palustris]
  misc_feature (1)..(255): Homolog of NCBI NO: 13898655 NR Description: expansin [Prunus cerasus]
  misc_feature (1)..(255): Homolog of NCBI NO: 15227005 NR Description: expansin, putative
  misc_feature (1)..(255): Homolog of NCBI NO: 21553904 NR Description: expansin AtEx6 [Arabidopsis thaliana]
  misc_feature (1)..(255): Homolog of NCBI NO: 20138197 NR Description: Alpha-expansin 6 precursor (At-EXP6) (AtEx6)
  misc_feature (1)..(255): Homolog of NCBI NO: 7488487 NR Description: probable expansin precursor - rape
  misc_feature (1)..(255): Homolog of NCBI NO: 29466643 NR Description: expansin [Prunus persica]
  misc_feature (1)..(255): Homolog of NCBI NO: 20502784 NR Description: expansin 11 precursor [Rumex palustris]
  misc_feature (1)..(255): Homolog of NCBI NO: 20502782 NR Description: expansin 10 precursor [Rumex palustris]
  misc_feature (1)..(255): Homolog of NCBI NO: 29466643 NR Description: expansin [Prunus persica]
  misc_feature (1)..(255): Homolog of NCBI NO: 7488487 NR Description: probable expansin precursor - rape
  misc_feature (1)..(255): Homolog of NCBI NO: 20138197 NR Description: Alpha-expansin 6 precursor (At-EXP6) (AtEx6)
  misc_feature (1)..(255): Homolog of NCBI NO: 21553904 NR Description: expansin AtEx6 [Arabidopsis thaliana]
  misc_feature (1)..(255): Homolog of NCBI NO: 15227005 NR Description: expansin, putative

SEQ ID NO: 50845 - protein, 210 aa, Arabidopsis thaliana; identical to SEQ ID NO: 30491
  peptide (1)..(210): Ceres Seq. ID no. 12337308
  misc_feature (117)..(194): Pfam Name: Pollen allergen Pfam Description: Pollen allergen
  misc_feature (117)..(194): Pfam Name: Pollen allergen Pfam Description: Pollen allergen
  misc_feature (1)..(210): Homolog of NCBI NO: 38046726 NR Description: alpha-expansin 1 [Populus tremula x Populus
  misc_feature (1)..(210): Homolog of NCBI NO: 20502782 NR Description: expansin 10 precursor [Rumex palustris]
  misc_feature (1)..(210): Homolog of NCBI NO: 20502786 NR Description: expansin 12 precursor [Rumex palustris]
  misc_feature (1)..(210): Homolog of NCBI NO: 20502784 NR Description: expansin 11 precursor [Rumex palustris]
  misc_feature (1)..(210): Homolog of NCBI NO: 13898655 NR Description: expansin [Prunus cerasus]
  misc_feature (1)..(210): Homolog of NCBI NO: 38046726 NR Description: alpha-expansin 1 [Populus tremula x Populus
  misc_feature (1)..(210): Homolog of NCBI NO: 20502786 NR Description: expansin 12 precursor [Rumex palustris]
  misc_feature (1)..(210): Homolog of NCBI NO: 13898655 NR Description: expansin [Prunus cerasus]
  misc_feature (1)..(210): Homolog of NCBI NO: 15227005 NR Description: expansin, putative
  misc_feature (1)..(210): Homolog of NCBI NO: 21553904 NR Description: expansin AtEx6 [Arabidopsis thaliana]
  misc_feature (1)..(210): Homolog of NCBI NO: 20138197 NR Description: Alpha-expansin 6 precursor (At-EXP6) (AtEx6)
  misc_feature (1)..(210): Homolog of NCBI NO: 7488487 NR Description: probable expansin precursor - rape
  misc_feature (1)..(210): Homolog of NCBI NO: 29466643 NR Description: expansin [Prunus persica]
  misc_feature (1)..(210): Homolog of NCBI NO: 20502784 NR Description: expansin 11 precursor [Rumex palustris]
  misc_feature (1)..(210): Homolog of NCBI NO: 20502782 NR Description: expansin 10 precursor [Rumex palustris]
  misc_feature (1)..(210): Homolog of NCBI NO: 29466643 NR Description: expansin [Prunus persica]
  misc_feature (1)..(210): Homolog of NCBI NO: 7488487 NR Description: probable expansin precursor - rape
  misc_feature (1)..(210): Homolog of NCBI NO: 20138197 NR Description: Alpha-expansin 6 precursor (At-EXP6) (AtEx6)
  misc_feature (1)..(210): Homolog of NCBI NO: 21553904 NR Description: expansin AtEx6 [Arabidopsis thaliana]
  misc_feature (1)..(210): Homolog of NCBI NO: 15227005 NR Description: expansin, putative

SEQ ID NO: 50846 - DNA, 1770 bp, Arabidopsis thaliana; identical to SEQ ID NO: 49181
  misc_feature (1)..(1770): Ceres Seq. ID no. 12601427
  misc_feature: MA Experiment ID: 20000166 Result: Up-regulated in Transcription
  misc_feature: MA Experiment 20000166 PARAMETER Experiment Name: At_100uM_ABA_P Parameter: Age (day) Value: 14
  misc_feature: MA Experiment 20000166 PARAMETER Experiment Name: At_100uM_ABA_P Parameter: Organism Value: A. thaliana
  misc_feature: MA Experiment 20000166 PARAMETER Experiment Name: At_100uM_ABA_P Parameter: Plant Line Value: WS
  misc_feature: MA Experiment 20000166 PARAMETER Experiment Name: At_100uM_ABA_P Parameter: Timepoint (hr) Value: 1
  misc_feature: MA Experiment 20000166 PARAMETER Experiment Name: At_100uM_ABA_P Parameter: Tissue Value: Aerial
  misc_feature: MA Experiment 20000166 PARAMETER Experiment Name: At_100uM_ABA_P Parameter: Treatment Value: 100uM ABA vs. No Treatment
  misc_feature: MA Experiment ID: 20000171 Result: Down-regulated in Transcription
  misc_feature: MA Experiment 20000171 PARAMETER Experiment Name: At_42deg_Heat_P Parameter: Age (day) Value: 14
  misc_feature: MA Experiment 20000171 PARAMETER Experiment Name: At_42deg_Heat_P Parameter: Organism Value: A. thaliana
  misc_feature: MA Experiment 20000171 PARAMETER Experiment Name: At_42deg_Heat_P Parameter: Plant Line Value: WS
  misc_feature: MA Experiment 20000171 PARAMETER Experiment Name: At_42deg_Heat_P Parameter: Temperature (deg C) Value: 42 vs. 22
  misc_feature: MA Experiment 20000171 PARAMETER Experiment Name: At_42deg_Heat_P Parameter: Timepoint (hr) Value: 1
  misc_feature: MA Experiment 20000171 PARAMETER Experiment Name: At_42deg_Heat_P Parameter: Tissue Value: Aerial
  misc_feature: MA Experiment ID: 20000180 Result: Up-regulated in Transcription
  misc_feature: MA Experiment 20000180 PARAMETER Experiment Name: At_Germinating_Seeds_P Parameter: Age (hr) Value: 24 vs. 0
  misc_feature: MA Experiment 20000180 PARAMETER Experiment Name: At_Germinating_Seeds_P Parameter: Tissue Value: Germinating Seeds
  misc_feature: MA Experiment ID: 20000211 Result: Up-regulated in Transcription
  misc_feature: MA Experiment 20000211 PARAMETER Experiment Name: At_0.001percent_MeJA__P Parameter: Age (day) Value: 14
  misc_feature: MA Experiment 20000211 PARAMETER Experiment Name: At_0.001percent_MeJA__P Parameter: Organism Value: A. thaliana
  misc_feature: MA Experiment 20000211 PARAMETER Experiment Name: At_0.001percent_MeJA__P Parameter: Plant Line Value: WS
  misc_feature: MA Experiment 20000211 PARAMETER Experiment Name: At_0.001percent_MeJA__P Parameter: Timepoint (hr) Value: 1
  misc_feature: MA Experiment 20000211 PARAMETER Experiment Name: At_0.001percent_MeJA__P Parameter: Tissue Value: Aerial
  misc_feature: MA Experiment 20000211 PARAMETER Experiment Name: At_0.001percent_MeJA__P Parameter: Treatment Value: 0.001percent MeJA vs. No Treatment
  misc_feature: MA Experiment ID: 20000265 Result: Up-regulated in Transcription
  misc_feature: MA Experiment 20000265 PARAMETER Experiment Name: At_Open_Flower_P Parameter: Age (day) Value: 21
  misc_feature: MA Experiment 20000265 PARAMETER Experiment Name: At_Open_Flower_P Parameter: Plant Line Value: WS
  misc_feature: MA Experiment 20000265 PARAMETER Experiment Name: At_Open_Flower_P Parameter: Tissue Value: Closed Flower vs. Whole Plant
  misc_feature: MA Experiment ID: 20000495 Result: Up-regulated in Transcription
  misc_feature: MA Experiment 20000495 PARAMETER Experiment Name: At_Guard_Cells_P Parameter: Harvest Date Value: 8/2/2002
  misc_feature: MA Experiment 20000495 PARAMETER Experiment Name: At_Guard_Cells_P Parameter: Organism Value: A. thaliana
  misc_feature: MA Experiment 20000495 PARAMETER Experiment Name: At_Guard_Cells_P Parameter: Tissue Value: Guard Cells vs. Leaves
  misc_feature: MA Experiment ID: 20001248 Result: Down-regulated in Transcription
  misc_feature: MA Experiment 20001248 PARAMETER Experiment Name: At_Far-red-induction_P Parameter: Age (day) Value: 7
  misc_feature: MA Experiment 20001248 PARAMETER Experiment Name: At_Far-red-induction_P Parameter: Light Value: Far-red vs. White
  misc_feature: MA Experiment 20001248 PARAMETER Experiment Name: At_Far-red-induction_P Parameter: Organism Value: A. thaliana
  misc_feature: MA Experiment 20001248 PARAMETER Experiment Name: At_Far-red-induction_P Parameter: Plant Line Value: Columbia
  misc_feature: MA Experiment 20001248 PARAMETER Experiment Name: At_Far-red-induction_P Parameter: Timepoint (hr) Value: 4
  misc_feature: MA Experiment 20001248 PARAMETER Experiment Name: At_Far-red-induction_P Parameter: Tissue Value: Whole Plant
  misc_feature: MA Experiment ID: 20001450 Result: Down-regulated in Transcription
  misc_feature: MA Experiment 20001450 PARAMETER Experiment Name: At_Far-red-induction_P Parameter: Age (day) Value: 7
  misc_feature: MA Experiment 20001450 PARAMETER Experiment Name: At_Far-red-induction_P Parameter: Light Value: Far-red vs. White
  misc_feature: MA Experiment 20001450 PARAMETER Experiment Name: At_Far-red-induction_P Parameter: Organism Value: A. thaliana
  misc_feature: MA Experiment 20001450 PARAMETER Experiment Name: At_Far-red-induction_P Parameter: Plant Line Value: Columbia
  misc_feature: MA Experiment 20001450 PARAMETER Experiment Name: At_Far-red-induction_P Parameter: Timepoint (hr) Value: 8
  misc_feature: MA Experiment 20001450 PARAMETER Experiment Name: At_Far-red-induction_P Parameter: Tissue Value: Whole Plant
  misc_feature: MA Experiment ID: 20001560 Result: Up-regulated in Transcription
  misc_feature: MA Experiment 20001560 PARAMETER Experiment Name: At_Drought_Soil_Dry_P Parameter: Age (day) Value: 28
  misc_feature: MA Experiment 20001560 PARAMETER Experiment Name: At_Drought_Soil_Dry_P Parameter: Organism Value: A. thaliana
  misc_feature: MA Experiment 20001560 PARAMETER Experiment Name: At_Drought_Soil_Dry_P Parameter: Plant Line Value: WS
  misc_feature: MA Experiment 20001560 PARAMETER Experiment Name: At_Drought_Soil_Dry_P Parameter: Post Timepoint (hr) Value: None
  misc_feature: MA Experiment 20001560 PARAMETER Experiment Name: At_Drought_Soil_Dry_P Parameter: Post-Treatment Value: None
  misc_feature: MA Experiment 20001560 PARAMETER Experiment Name: At_Drought_Soil_Dry_P Parameter: Timepoint (day) Value: 14
  misc_feature: MA Experiment 20001560 PARAMETER Experiment Name: At_Drought_Soil_Dry_P Parameter: Treatment Value: Drought vs. No Drought

SEQ ID NO: 50847 - protein, 431 aa, Arabidopsis thaliana; identical to SEQ ID NO: 49182
  peptide (1)..(431): Ceres Seq. ID no. 12601428
  misc_feature (60)..(400): Homolog of NCBI NO: 34527348 NR Description: unnamed protein product [Homo sapiens]
  misc_feature (60)..(388): Homolog of NCBI NO: 27677438 NR Description: similar to CG3552-PC [Drosophila melanogaster]
  misc_feature (91)..(399): Homolog of NCBI NO: 34907712 NR Description: P0035F12.16 [Oryza sativa (japonica
  misc_feature (2)..(55): Homolog of NCBI NO: 21070346 NR Description: VTC2 [Arabidopsis thaliana]
  misc_feature (41)..(413): Homolog of NCBI NO: 21070346 NR Description: VTC2 [Arabidopsis thaliana]
  misc_feature (2)..(55): Homolog of NCBI NO: 7452423 NR Description: hypothetical protein F10M23.190 - Arabidopsis
  misc_feature (41)..(413): Homolog of NCBI NO: 7452423 NR Description: hypothetical protein F10M23.190 - Arabidopsis
  misc_feature (2)..(413): Homolog of NCBI NO: 15810139 NR Description: unknown protein [Arabidopsis thaliana]
  misc_feature (2)..(413): Homolog of NCBI NO: 18416877 NR Description: putative protein
  misc_feature (1)..(431): Homolog of NCBI NO: 15240467 NR Description: putative protein
  misc_feature (60)..(400): Homolog of NCBI NO: 34527348 NR Description: unnamed protein product [Homo sapiens]
  misc_feature (60)..(388): Homolog of NCBI NO: 27677438 NR Description: similar to CG3552-PC [Drosophila melanogaster]
  misc_feature (91)..(399): Homolog of NCBI NO: 34907712 NR Description: P0035F12.16 [Oryza sativa (japonica
  misc_feature (2)..(55): Homolog of NCBI NO: 21070346 NR Description: VTC2 [Arabidopsis thaliana]
  misc_feature (41)..(413): Homolog of NCBI NO: 21070346 NR Description: VTC2 [Arabidopsis thaliana]
  misc_feature (2)..(55): Homolog of NCBI NO: 7452423 NR Description: hypothetical protein F10M23.190 - Arabidopsis
  misc_feature (41)..(413): Homolog of NCBI NO: 7452423 NR Description: hypothetical protein F10M23.190 - Arabidopsis
  misc_feature (2)..(413): Homolog of NCBI NO: 15810139 NR Description: unknown protein [Arabidopsis thaliana]
  misc_feature (2)..(413): Homolog of NCBI NO: 18416877 NR Description: putative protein
  misc_feature (1)..(431): Homolog of NCBI NO: 15240467 NR Description: putative protein

SEQ ID NO: 50848 - protein, 271 aa, Arabidopsis thaliana; identical to SEQ ID NO: 49183
  peptide (1)..(271): Ceres Seq. ID no. 12601429
  misc_feature (1)..(228): Homolog of NCBI NO: 26351153 NR Description: unnamed protein product [Mus musculus]
  misc_feature (1)..(228): Homolog of NCBI NO: 22766878 NR Description: Unknown (protein for MGC:47349) [Mus musculus]
  misc_feature (1)..(240): Homolog of NCBI NO: 34527348 NR Description: unnamed protein product [Homo sapiens]
  misc_feature (1)..(228): Homolog of NCBI NO: 27677438 NR Description: similar to CG3552-PC [Drosophila melanogaster]
  misc_feature (1)..(239): Homolog of NCBI NO: 34907712 NR Description: P0035F12.16 [Oryza sativa (japonica
  misc_feature (1)..(253): Homolog of NCBI NO: 21070346 NR Description: VTC2 [Arabidopsis thaliana]
  misc_feature (1)..(253): Homolog of NCBI NO: 7452423 NR Description: hypothetical protein F10M23.190 - Arabidopsis
  misc_feature (1)..(253): Homolog of NCBI NO: 15810139 NR Description: unknown protein [Arabidopsis thaliana]
  misc_feature (1)..(253): Homolog of NCBI NO: 18416877 NR Description: putative protein
  misc_feature (1)..(271): Homolog of NCBI NO: 15240467 NR Description: putative protein
  misc_feature (1)..(228): Homolog of NCBI NO: 26351153 NR Description: unnamed protein product [Mus musculus]
  misc_feature (1)..(228): Homolog of NCBI NO: 22766878 NR Description: Unknown (protein for MGC:47349) [Mus musculus]
  misc_feature (1)..(240): Homolog of NCBI NO: 34527348 NR Description: unnamed protein product [Homo sapiens]
  misc_feature (1)..(228): Homolog of NCBI NO: 27677438 NR Description: similar to CG3552-PC [Drosophila melanogaster]
  misc_feature (1)..(239): Homolog of NCBI NO: 34907712 NR Description: P0035F12.16 [Oryza sativa (japonica
  misc_feature (1)..(253): Homolog of NCBI NO: 21070346 NR Description: VTC2 [Arabidopsis thaliana]
  misc_feature (1)..(253): Homolog of NCBI NO: 7452423 NR Description: hypothetical protein F10M23.190 - Arabidopsis
  misc_feature (1)..(253): Homolog of NCBI NO: 15810139 NR Description: unknown protein [Arabidopsis thaliana]
  misc_feature (1)..(253): Homolog of NCBI NO: 18416877 NR Description: putative protein
  misc_feature (1)..(271): Homolog of NCBI NO: 15240467 NR Description: putative protein

SEQ ID NO: 50849 - protein, 223 aa, Arabidopsis thaliana; identical to SEQ ID NO: 49184
  peptide (1)..(223): Ceres Seq. ID no. 12601430
  misc_feature (1)..(180): Homolog of NCBI NO: 26351153 NR Description: unnamed protein product [Mus musculus]
  misc_feature (1)..(180): Homolog of NCBI NO: 22766878 NR Description: Unknown (protein for MGC:47349) [Mus musculus]
  misc_feature (1)..(192): Homolog of NCBI NO: 34527348 NR Description: unnamed protein product [Homo sapiens]
  misc_feature (1)..(180): Homolog of NCBI NO: 27677438 NR Description: similar to CG3552-PC [Drosophila melanogaster]
  misc_feature (1)..(191): Homolog of NCBI NO: 34907712 NR Description: P0035F12.16 [Oryza sativa (japonica
  misc_feature (1)..(205): Homolog of NCBI NO: 21070346 NR Description: VTC2 [Arabidopsis thaliana]
  misc_feature (1)..(205): Homolog of NCBI NO: 7452423 NR Description: hypothetical protein F10M23.190 - Arabidopsis
  misc_feature (1)..(205): Homolog of NCBI NO: 15810139 NR Description: unknown protein [Arabidopsis thaliana]
  misc_feature (1)..(205): Homolog of NCBI NO: 18416877 NR Description: putative protein
  misc_feature (1)..(223): Homolog of NCBI NO: 15240467 NR Description: putative protein
  misc_feature (1)..(180): Homolog of NCBI NO: 26351153 NR Description: unnamed protein product [Mus musculus]
  misc_feature (1)..(180): Homolog of NCBI NO: 22766878 NR Description: Unknown (protein for MGC:47349) [Mus musculus]
  misc_feature (1)..(192): Homolog of NCBI NO: 34527348 NR Description: unnamed protein product [Homo sapiens]
  misc_feature (1)..(180): Homolog of NCBI NO: 27677438 NR Description: similar to CG3552-PC [Drosophila melanogaster]
  misc_feature (1)..(191): Homolog of NCBI NO: 34907712 NR Description: P0035F12.16 [Oryza sativa (japonica
  misc_feature (1)..(205): Homolog of NCBI NO: 21070346 NR Description: VTC2 [Arabidopsis thaliana]
  misc_feature (1)..(205): Homolog of NCBI NO: 7452423 NR Description: hypothetical protein F10M23.190 - Arabidopsis
  misc_feature (1)..(205): Homolog of NCBI NO: 15810139 NR Description: unknown protein [Arabidopsis thaliana]
  misc_feature (1)..(205): Homolog of NCBI NO: 18416877 NR Description: putative protein
  misc_feature (1)..(223): Homolog of NCBI NO: 15240467 NR Description: putative protein

SEQ ID NO: 50850 - DNA, 840 bp, Arabidopsis thaliana
  misc_feature (1)..(840): Ceres Seq. ID no. 13575368
  misc_feature: MA Experiment ID: 20000182 Result: Up-regulated in Transcription
  misc_feature: MA Experiment 20000182 PARAMETER Experiment Name: At_2mM_SA_P Parameter: Age (day) Value: 14
  misc_feature: MA Experiment 20000182 PARAMETER Experiment Name: At_2mM_SA_P Parameter: Organism Value: A. thaliana
  misc_feature: MA Experiment 20000182 PARAMETER Experiment Name: At_2mM_SA_P Parameter: Plant Line Value: WS
  misc_feature: MA Experiment 20000182 PARAMETER Experiment Name: At_2mM_SA_P Parameter: Timepoint (hr) Value: 6
  misc_feature: MA Experiment 20000182 PARAMETER Experiment Name: At_2mM_SA_P Parameter: Tissue Value: Aerial
  misc_feature: MA Experiment 20000182 PARAMETER Experiment Name: At_2mM_SA_P Parameter: Treatment Value: 2mM SA vs. No Treatment
  misc_feature: MA Experiment ID: 20000185 Result: Up-regulated in Transcription
  misc_feature: MA Experiment 20000185 PARAMETER Experiment Name: At_Roots__P Parameter: Age (day) Value: 7 vs. 21
  misc_feature: MA Experiment 20000185 PARAMETER Experiment Name: At_Roots__P Parameter: Organism Value: A. thaliana
  misc_feature: MA Experiment 20000185 PARAMETER Experiment Name: At_Roots__P Parameter: Tissue Value: Roots vs. Whole Plant
  misc_feature: MA Experiment ID: 20000234 Result: Up-regulated in Transcription
  misc_feature: MA Experiment 20000234 PARAMETER Experiment Name: At_Siliques_P Parameter: Age (day) Value: 21
  misc_feature: MA Experiment 20000234 PARAMETER Experiment Name: At_Siliques_P Parameter: Organism Value: A. thaliana
  misc_feature: MA Experiment 20000234 PARAMETER Experiment Name: At_Siliques_P Parameter: Plant Line Value: WS
  misc_feature: MA Experiment 20000234 PARAMETER Experiment Name: At_Siliques_P Parameter: Tissue Value: Less Than 5mm Siliques vs. Whole Plant
  misc_feature: MA Experiment ID: 20000235 Result: Up-regulated in Transcription
  misc_feature: MA Experiment 20000235 PARAMETER Experiment Name: At_Siliques_P Parameter: Age (day) Value: 21
  misc_feature: MA Experiment 20000235 PARAMETER Experiment Name: At_Siliques_P Parameter: Organism Value: A. thaliana
  misc_feature: MA Experiment 20000235 PARAMETER Experiment Name: At_Siliques_P Parameter: Plant Line Value: WS
  misc_feature: MA Experiment 20000235 PARAMETER Experiment Name: At_Siliques_P Parameter: Tissue Value: 5-10mm Siliques vs. Whole Plant
  misc_feature: MA Experiment ID: 20000264 Result: Up-regulated in Transcription
  misc_feature: MA Experiment 20000264 PARAMETER Experiment Name: At_Open_Flower_P Parameter: Age (day) Value: 21
  misc_feature: MA Experiment 20000264 PARAMETER Experiment Name: At_Open_Flower_P Parameter: Plant Line Value: WS
  misc_feature: MA Experiment 20000264 PARAMETER Experiment Name: At_Open_Flower_P Parameter: Tissue Value: Open Flower vs. Whole Plant
  misc_feature: MA Experiment ID: 20000265 Result: Up-regulated in Transcription
  misc_feature: MA Experiment 20000265 PARAMETER Experiment Name: At_Open_Flower_P Parameter: Age (day) Value: 21
  misc_feature: MA Experiment 20000265 PARAMETER Experiment Name: At_Open_Flower_P Parameter: Plant Line Value: WS
  misc_feature: MA Experiment 20000265 PARAMETER Experiment Name: At_Open_Flower_P Parameter: Tissue Value: Closed Flower vs. Whole Plant
  misc_feature: MA Experiment ID: 20000286 Result: Up-regulated in Transcription
  misc_feature: MA Experiment 20000286 PARAMETER Experiment Name: At_Open_Flower_P Parameter: Age (day) Value: 21
  misc_feature: MA Experiment 20000286 PARAMETER Experiment Name: At_Open_Flower_P Parameter: Plant Line Value: WS
  misc_feature: MA Experiment 20000286 PARAMETER Experiment Name: At_Open_Flower_P Parameter: Tissue Value: Half Open vs. Whole Plant
  misc_feature: MA Experiment ID: 20000439 Result: Up-regulated in Transcription
  misc_feature: MA Experiment 20000439 PARAMETER Experiment Name: At_Roots__P Parameter: Age (day) Value: 14 vs. 21
  misc_feature: MA Experiment 20000439 PARAMETER Experiment Name: At_Roots__P Parameter: Organism Value: A. thaliana
  misc_feature: MA Experiment 20000439 PARAMETER Experiment Name: At_Roots__P Parameter: Tissue Value: Roots vs. Whole Plant
  misc_feature: MA Experiment ID: 20000495 Result: Up-regulated in Transcription
  misc_feature: MA Experiment 20000495 PARAMETER Experiment Name: At_Guard_Cells_P Parameter: Harvest Date Value: 8/2/2002
  misc_feature: MA Experiment 20000495 PARAMETER Experiment Name: At_Guard_Cells_P Parameter: Organism Value: A. thaliana
  misc_feature: MA Experiment 20000495 PARAMETER Experiment Name: At_Guard_Cells_P Parameter: Tissue Value: Guard Cells vs. Leaves
  misc_feature: MA Experiment ID: 20001560 Result: Up-regulated in Transcription
  misc_feature: MA Experiment 20001560 PARAMETER Experiment Name: At_Drought_Soil_Dry_P Parameter: Age (day) Value: 28
  misc_feature: MA Experiment 20001560 PARAMETER Experiment Name: At_Drought_Soil_Dry_P Parameter: Organism Value: A. thaliana
  misc_feature: MA Experiment 20001560 PARAMETER Experiment Name: At_Drought_Soil_Dry_P Parameter: Plant Line Value: WS
  misc_feature: MA Experiment 20001560 PARAMETER Experiment Name: At_Drought_Soil_Dry_P Parameter: Post Timepoint (hr) Value: None
  misc_feature: MA Experiment 20001560 PARAMETER Experiment Name: At_Drought_Soil_Dry_P Parameter: Post-Treatment Value: None
  misc_feature: MA Experiment 20001560 PARAMETER Experiment Name: At_Drought_Soil_Dry_P Parameter: Timepoint (day) Value: 14
  misc_feature: MA Experiment 20001560 PARAMETER Experiment Name: At_Drought_Soil_Dry_P Parameter: Treatment Value: Drought vs. No Drought
  misc_feature: MA Experiment ID: 20001905 Result: Up-regulated in Transcription
  misc_feature: MA Experiment 20001905 PARAMETER Experiment Name: At_Drought_Reproduction_P Parameter: Age (day) Value: 40
  misc_feature: MA Experiment 20001905 PARAMETER Experiment Name: At_Drought_Reproduction_P Parameter: Organism Value: A. thaliana
  misc_feature: MA Experiment 20001905 PARAMETER Experiment Name: At_Drought_Reproduction_P Parameter: Plant Line Value: WS
  misc_feature: MA Experiment 20001905 PARAMETER Experiment Name: At_Drought_Reproduction_P Parameter: Timepoint (day) Value: 10
  misc_feature: MA Experiment 20001905 PARAMETER Experiment Name: At_Drought_Reproduction_P Parameter: Tissue Value: Rosettes
  misc_feature: MA Experiment 20001905 PARAMETER Experiment Name: At_Drought_Reproduction_P Parameter: Treatment Value: Drought vs. No Drought
gctttttccatttttcttgttttttttgttttgtttttggagttgtgtttcacctgttgttggttctttantccgtcttctgggttaaacaaagaagatcggttctgtttttatttttattttgaaacaagaagaagaaagcaagctacgatgatgtttcttgctgacgccaaaagataaagacacgacttttacaaagcttaggacctgcattctcaccgttatcaaaaaatgtcgaatctttctgcaagaacaggacgagaccatcaacgttatgacaacaacttccgtcttgtttctggatgcattccgtataggctggtgaaagatgaagaagaggactcaacaagtgttgactttgaaaacaagcttcaagttcttatgatttcatctcctaatcgtcacgatcttgtcttcccaaagggaggatgggaagatgatgaaactgttcttgaagctgcttctcgtgaagctatggaagaagcaggagttaaaggaatactaagagaagatccattaggagtttgggaatttagaagtaagagtagcagtgtggaagctgattgctgcttaggtggtggatgcaaaggttatatgtttgcgttagaggtgaaggaagaacttgcgatatggcctgagcaagatgaccgcgagagaagatggctgaatgtaaaagaagccttggagctgtgtcggtatgagtggatgcagagcgctcttgaagagtttctacgagtaatggcagaagaaggaagcacaaaggaagactctcttgccatttccagcatttcaaatcgaggagagcgtcaaattgatcctcgctactgctttgtagtctaa

SEQ ID NO: 50851 - protein, 202 aa, Arabidopsis thaliana
  peptide (1)..(202): Ceres Seq. ID no. 13575369
  misc_feature (19)..(169): Pfam Name: NUDIX domain Pfam Description: NUDIX domain
  misc_feature (4)..(186): Homolog of NCBI NO: 15223919 NR Description: MutT/nudix family protein [Arabidopsis thaliana]
  misc_feature (1)..(173): Homolog of NCBI NO: 15221055 NR Description: MutT/nudix family protein [Arabidopsis thaliana]
  misc_feature (1)..(185): Homolog of NCBI NO: 34900054 NR Description: MutT-like protein~contains ESTs
  misc_feature (1)..(185): Homolog of NCBI NO: 38175436 NR Description: MutT-like protein [Oryza sativa (japonica
  misc_feature (96)..(167): Homolog of NCBI NO: 38605803 NR Description: OSJNBb0014D23.5 [Oryza sativa (japonica
  misc_feature (1)..(89): Homolog of NCBI NO: 38605803 NR Description: OSJNBb0014D23.5 [Oryza sativa (japonica
  misc_feature (1)..(165): Homolog of NCBI NO: 18399682 NR Description: MutT/nudix family protein [Arabidopsis thaliana]
  misc_feature (1)..(196): Homolog of NCBI NO: 25518008 NR Description: F13K23.14 protein - Arabidopsis thaliana
  misc_feature (1)..(202): Homolog of NCBI NO: 18391450 NR Description: MutT/nudix family protein [Arabidopsis thaliana]
  misc_feature (1)..(202): Homolog of NCBI NO: 15231598 NR Description: MutT/nudix family protein [Arabidopsis thaliana]
MSNLSARTGRDHQRYDNNFRLVSGCIPYRLVKDEEEDSTSVDFENKLQVLMISSPNRHDLVFPKGGWEDDETVLEAASREAMEEAGVKGILREDPLGVWEFRSKSSSVEADCCLGGGCKGYMFALEVKEELAIWPEQDDRERRWLNVKEALELCRYEWMQSALEEFLRVMAEEGSTKEDSLAISSISNRGERQIDPRYCFVV

SEQ ID NO: 50852 - protein, 152 aa, Arabidopsis thaliana
  peptide (1)..(152): Ceres Seq. ID no. 13575370
  misc_feature (1)..(119): Pfam Name: NUDIX domain Pfam Description: NUDIX domain
  misc_feature (1)..(136): Homolog of NCBI NO: 15223919 NR Description: MutT/nudix family protein [Arabidopsis thaliana]
  misc_feature (1)..(123): Homolog of NCBI NO: 15221055 NR Description: MutT/nudix family protein [Arabidopsis thaliana]
  misc_feature (1)..(135): Homolog of NCBI NO: 34900054 NR Description: MutT-like protein~contains ESTs
  misc_feature (1)..(135): Homolog of NCBI NO: 38175436 NR Description: MutT-like protein [Oryza sativa (japonica
  misc_feature (46)..(117): Homolog of NCBI NO: 38605803 NR Description: OSJNBb0014D23.5 [Oryza sativa (japonica
  misc_feature (1)..(39): Homolog of NCBI NO: 38605803 NR Description: OSJNBb0014D23.5 [Oryza sativa (japonica
  misc_feature (1)..(115): Homolog of NCBI NO: 18399682 NR Description: MutT/nudix family protein [Arabidopsis thaliana]
  misc_feature (1)..(146): Homolog of NCBI NO: 25518008 NR Description: F13K23.14 protein - Arabidopsis thaliana
  misc_feature (1)..(152): Homolog of NCBI NO: 18391450 NR Description: MutT/nudix family protein [Arabidopsis thaliana]
  misc_feature (1)..(152): Homolog of NCBI NO: 15231598 NR Description: MutT/nudix family protein [Arabidopsis thaliana]
MISSPNRHDLVFPKGGWEDDETVLEAASREAMEEAGVKGILREDPLGVWEFRSKSSSVEADCCLGGGCKGYMFALEVKEELAIWPEQDDRERRWLNVKEALELCRYEWMQSALEEFLRVMAEEGSTKEDSLAISSISNRGERQIDPRYCFVV

SEQ ID NO: 50853 - protein, 121 aa, Arabidopsis thaliana
  peptide (1)..(121): Ceres Seq. ID no. 13575371
  misc_feature (1)..(88): Pfam Name: NUDIX domain Pfam Description: NUDIX domain
  misc_feature (1)..(103): Homolog of NCBI NO: 18379275 NR Description: MutT/nudix family protein [Arabidopsis thaliana]
  misc_feature (1)..(105): Homolog of NCBI NO: 15223919 NR Description: MutT/nudix family protein [Arabidopsis thaliana]
  misc_feature (1)..(92): Homolog of NCBI NO: 15221055 NR Description: MutT/nudix family protein [Arabidopsis thaliana]
  misc_feature (1)..(104): Homolog of NCBI NO: 34900054 NR Description: MutT-like protein~contains ESTs
  misc_feature (1)..(104): Homolog of NCBI NO: 38175436 NR Description: MutT-like protein [Oryza sativa (japonica
  misc_feature (15)..(86): Homolog of NCBI NO: 38605803 NR Description: OSJNBb0014D23.5 [Oryza sativa (japonica
  misc_feature (1)..(84): Homolog of NCBI NO: 18399682 NR Description: MutT/nudix family protein [Arabidopsis thaliana]
  misc_feature (1)..(115): Homolog of NCBI NO: 25518008 NR Description: F13K23.14 protein - Arabidopsis thaliana
  misc_feature (1)..(121): Homolog of NCBI NO: 18391450 NR Description: MutT/nudix family protein [Arabidopsis thaliana]
  misc_feature (1)..(121): Homolog of NCBI NO: 15231598 NR Description: MutT/nudix family protein [Arabidopsis thaliana]
MEEAGVKGILREDPLGVWEFRSKSSSVEADCCLGGGCKGYMFALEVKEELAIWPEQDDRERRWLNVKEALELCRYEWMQSALEEFLRVMAEEGSTKEDSLAISSISNRGERQIDPRYCFVV

SEQ ID NO: 50854 - DNA, 1776 bp, Arabidopsis thaliana; identical to SEQ ID NO: 46570
  misc_feature (1)..(1776): Ceres Seq. ID no. 13579260
  misc_feature: MA Experiment ID: 20000169 Result: Up-regulated in Transcription
  misc_feature: MA Experiment 20000169 PARAMETER Experiment Name: At_100uM_ABA_P Parameter: Age (day) Value: 14
  misc_feature: MA Experiment 20000169 PARAMETER Experiment Name: At_100uM_ABA_P Parameter: Organism Value: A. thaliana
  misc_feature: MA Experiment 20000169 PARAMETER Experiment Name: At_100uM_ABA_P Parameter: Plant Line Value: WS
  misc_feature: MA Experiment 20000169 PARAMETER Experiment Name: At_100uM_ABA_P Parameter: Timepoint (hr) Value: 6
  misc_feature: MA Experiment 20000169 PARAMETER Experiment Name: At_100uM_ABA_P Parameter: Tissue Value: Aerial
  misc_feature: MA Experiment 20000169 PARAMETER Experiment Name: At_100uM_ABA_P Parameter: Treatment Value: 100uM ABA vs. No Treatment
  misc_feature: MA Experiment ID: 20000180 Result: Up-regulated in Transcription
  misc_feature: MA Experiment 20000180 PARAMETER Experiment Name: At_Germinating_Seeds_P Parameter: Age (hr) Value: 24 vs. 0
  misc_feature: MA Experiment 20000180 PARAMETER Experiment Name: At_Germinating_Seeds_P Parameter: Tissue Value: Germinating Seeds
  misc_feature: MA Experiment ID: 20000185 Result: Down-regulated in Transcription
  misc_feature: MA Experiment 20000185 PARAMETER Experiment Name: At_Roots__P Parameter: Age (day) Value: 7 vs. 21
  misc_feature: MA Experiment 20000185 PARAMETER Experiment Name: At_Roots__P Parameter: Organism Value: A. thaliana
  misc_feature: MA Experiment 20000185 PARAMETER Experiment Name: At_Roots__P Parameter: Tissue Value: Roots vs. Whole Plant
  misc_feature: MA Experiment ID: 20000214 Result: Down-regulated in Transcription
  misc_feature: MA Experiment 20000214 PARAMETER Experiment Name: At_4deg_Cold_P Parameter: Timepoint (hr) Value: 6
  misc_feature: MA Experiment ID: 20000267 Result: Up-regulated in Transcription
  misc_feature: MA Experiment 20000267 PARAMETER Experiment Name: At_Drought_P Parameter: Age (day) Value: 7
  misc_feature: MA Experiment 20000267 PARAMETER Experiment Name: At_Drought_P Parameter: Organism Value: A. thaliana
  misc_feature: MA Experiment 20000267 PARAMETER Experiment Name: At_Drought_P Parameter: Plant Line Value: WS
  misc_feature: MA Experiment 20000267 PARAMETER Experiment Name: At_Drought_P Parameter: Timepoint (hr) Value: 6
  misc_feature: MA Experiment 20000267 PARAMETER Experiment Name: At_Drought_P Parameter: Tissue Value: Whole Plant
  misc_feature: MA Experiment 20000267 PARAMETER Experiment Name: At_Drought_P Parameter: Treatment Value: Drought vs. No Drought
  misc_feature: MA Experiment ID: 20000268 Result: Up-regulated in Transcription
  misc_feature: MA Experiment 20000268 PARAMETER Experiment Name: At_100mM_NaCl__P Parameter: Age (day) Value: 14
  misc_feature: MA Experiment 20000268 PARAMETER Experiment Name: At_100mM_NaCl__P Parameter: Organism Value: A. thaliana
  misc_feature: MA Experiment 20000268 PARAMETER Experiment Name: At_100mM_NaCl__P Parameter: Plant Line Value: WS
  misc_feature: MA Experiment 20000268 PARAMETER Experiment Name: At_100mM_NaCl__P Parameter: Timepoint (hr) Value: 6
  misc_feature: MA Experiment 20000268 PARAMETER Experiment Name: At_100mM_NaCl__P Parameter: Tissue Value: Whole Plant
  misc_feature: MA Experiment 20000268 PARAMETER Experiment Name: At_100mM_NaCl__P Parameter: Treatment Value: 100mM NaCl vs. No Treatment
  misc_feature: MA Experiment ID: 20000436 Result: Up-regulated in Transcription
  misc_feature: MA Experiment 20000436 PARAMETER Experiment Name: At_Drought_P Parameter: Age (day) Value: 7
  misc_feature: MA Experiment 20000436 PARAMETER Experiment Name: At_Drought_P Parameter: Organism Value: A. thaliana
  misc_feature: MA Experiment 20000436 PARAMETER Experiment Name: At_Drought_P Parameter: Plant Line Value: WS
  misc_feature: MA Experiment 20000436 PARAMETER Experiment Name: At_Drought_P Parameter: Timepoint (hr) Value: 12
  misc_feature: MA Experiment 20000436 PARAMETER Experiment Name: At_Drought_P Parameter: Tissue Value: Whole Plant
  misc_feature: MA Experiment 20000436 PARAMETER Experiment Name: At_Drought_P Parameter: Treatment Value: Drought vs. No Drought
  misc_feature: MA Experiment ID: 20000437 Result: Up-regulated in Transcription
  misc_feature: MA Experiment 20000437 PARAMETER Experiment Name: At_Drought_P Parameter: Age (day) Value: 8
  misc_feature: MA Experiment 20000437 PARAMETER Experiment Name: At_Drought_P Parameter: Organism Value: A. thaliana
  misc_feature: MA Experiment 20000437 PARAMETER Experiment Name: At_Drought_P Parameter: Plant Line Value: WS
  misc_feature: MA Experiment 20000437 PARAMETER Experiment Name: At_Drought_P Parameter: Timepoint (hr) Value: 24
  misc_feature: MA Experiment 20000437 PARAMETER Experiment Name: At_Drought_P Parameter: Tissue Value: Whole Plant
  misc_feature: MA Experiment 20000437 PARAMETER Experiment Name: At_Drought_P Parameter: Treatment Value: Drought vs. No Drought
  misc_feature: MA Experiment ID: 20000439 Result: Down-regulated in Transcription
  misc_feature: MA Experiment 20000439 PARAMETER Experiment Name: At_Roots__P Parameter: Age (day) Value: 14 vs. 21
  misc_feature: MA Experiment 20000439 PARAMETER Experiment Name: At_Roots__P Parameter: Organism Value: A. thaliana
  misc_feature: MA Experiment 20000439 PARAMETER Experiment Name: At_Roots__P Parameter: Tissue Value: Roots vs. Whole Plant
  misc_feature: MA Experiment ID: 20000453 Result: Up-regulated in Transcription
  misc_feature: MA Experiment 20000453 PARAMETER Experiment Name: At_100uM_ABA_P Parameter: Age (day) Value: 15
  misc_feature: MA Experiment 20000453 PARAMETER Experiment Name: At_100uM_ABA_P Parameter: Organism Value: A. thaliana
  misc_feature: MA Experiment 20000453 PARAMETER Experiment Name: At_100uM_ABA_P Parameter: Plant Line Value: WS
  misc_feature: MA Experiment 20000453 PARAMETER Experiment Name: At_100uM_ABA_P Parameter: Timepoint (hr) Value: 24
  misc_feature: MA Experiment 20000453 PARAMETER Experiment Name: At_100uM_ABA_P Parameter: Tissue Value: Aerial
  misc_feature: MA Experiment 20000453 PARAMETER Experiment Name: At_100uM_ABA_P Parameter: Treatment Value: 100uM ABA vs. No Treatment
  misc_feature: MA Experiment ID: 20000794 Result: Up-regulated in Transcription
  misc_feature: MA Experiment 20000794 PARAMETER Experiment Name: At_Petals_P Parameter: Age (day) Value: 23-25 days
  misc_feature: MA Experiment 20000794 PARAMETER Experiment Name: At_Petals_P Parameter: Plant Line Value: WS
  misc_feature: MA Experiment 20000794 PARAMETER Experiment Name: At_Petals_P Parameter: Tissue Value: Petals vs. Whole plant
  misc_feature: MA Experiment ID: 20001248 Result: Up-regulated in Transcription
  misc_feature: MA Experiment 20001248 PARAMETER Experiment Name: At_Far-red-induction_P Parameter: Age (day) Value: 7
  misc_feature: MA Experiment 20001248 PARAMETER Experiment Name: At_Far-red-induction_P Parameter: Light Value: Far-red vs. White
  misc_feature: MA Experiment 20001248 PARAMETER Experiment Name: At_Far-red-induction_P Parameter: Organism Value: A. thaliana
  misc_feature: MA Experiment 20001248 PARAMETER Experiment Name: At_Far-red-induction_P Parameter: Plant Line Value: Columbia
  misc_feature: MA Experiment 20001248 PARAMETER Experiment Name: At_Far-red-induction_P Parameter: Timepoint (hr) Value: 4
  misc_feature: MA Experiment 20001248 PARAMETER Experiment Name: At_Far-red-induction_P Parameter: Tissue Value: Whole Plant
  misc_feature: MA Experiment ID: 20001554 Result: Up-regulated in Transcription
  misc_feature: MA Experiment 20001554 PARAMETER Experiment Name: At_Drought_Soil_Dry_P Parameter: Age (day) Value: 21
  misc_feature: MA Experiment 20001554 PARAMETER Experiment Name: At_Drought_Soil_Dry_P Parameter: Organism Value: A. thaliana
  misc_feature: MA Experiment 20001554 PARAMETER Experiment Name: At_Drought_Soil_Dry_P Parameter: Plant Line Value: WS
  misc_feature: MA Experiment 20001554 PARAMETER Experiment Name: At_Drought_Soil_Dry_P Parameter: Post Timepoint (hr) Value: None
  misc_feature: MA Experiment 20001554 PARAMETER Experiment Name: At_Drought_Soil_Dry_P Parameter: Post-Treatment Value: None
  misc_feature: MA Experiment 20001554 PARAMETER Experiment Name: At_Drought_Soil_Dry_P Parameter: Timepoint (day) Value: 7
  misc_feature: MA Experiment 20001554 PARAMETER Experiment Name: At_Drought_Soil_Dry_P Parameter: Treatment Value: Drought vs. No Drought
  misc_feature: MA Experiment ID: 20001555 Result: Up-regulated in Transcription
  misc_feature: MA Experiment 20001555 PARAMETER Experiment Name: At_Drought_Soil_Dry_P Parameter: Age (day) Value: 24
  misc_feature: MA Experiment 20001555 PARAMETER Experiment Name: At_Drought_Soil_Dry_P Parameter: Organism Value: A. thaliana
  misc_feature: MA Experiment 20001555 PARAMETER Experiment Name: At_Drought_Soil_Dry_P Parameter: Plant Line Value: WS
  misc_feature: MA Experiment 20001555 PARAMETER Experiment Name: At_Drought_Soil_Dry_P Parameter: Post Timepoint (hr) Value: None
  misc_feature: MA Experiment 20001555 PARAMETER Experiment Name: At_Drought_Soil_Dry_P Parameter: Post-Treatment Value: None
  misc_feature: MA Experiment 20001555 PARAMETER Experiment Name: At_Drought_Soil_Dry_P Parameter: Timepoint (day) Value: 10
  misc_feature: MA Experiment 20001555 PARAMETER Experiment Name: At_Drought_Soil_Dry_P Parameter: Treatment Value: Drought vs. No Drought
  misc_feature: MA Experiment ID: 20001556 Result: Up-regulated in Transcription
  misc_feature: MA Experiment 20001556 PARAMETER Experiment Name: At_Drought_Soil_Dry_P Parameter: Age (day) Value: 26
  misc_feature: MA Experiment 20001556 PARAMETER Experiment Name: At_Drought_Soil_Dry_P Parameter: Organism Value: A. thaliana
  misc_feature: MA Experiment 20001556 PARAMETER Experiment Name: At_Drought_Soil_Dry_P Parameter: Plant Line Value: WS
  misc_feature: MA Experiment 20001556 PARAMETER Experiment Name: At_Drought_Soil_Dry_P Parameter: Post Timepoint (hr) Value: None
  misc_feature: MA Experiment 20001556 PARAMETER Experiment Name: At_Drought_Soil_Dry_P Parameter: Post-Treatment Value: None
  misc_feature: MA Experiment 20001556 PARAMETER Experiment Name: At_Drought_Soil_Dry_P Parameter: Timepoint (day) Value: 12
  misc_feature: MA Experiment 20001556 PARAMETER Experiment Name: At_Drought_Soil_Dry_P Parameter: Treatment Value: Drought vs. No Drought
  misc_feature: MA Experiment ID: 20001756 Result: Up-regulated in Transcription
  misc_feature: MA Experiment 20001756 PARAMETER Experiment Name: At_50mM_NH4NO3_L-to-H_P Parameter: Timepoint (hr) Value: 4
  misc_feature: MA Experiment 20001756 PARAMETER Experiment Name: At_50mM_NH4NO3_L-to-H_P Parameter: Tissue Value: Leaf
  misc_feature: MA Experiment 20001756 PARAMETER Experiment Name: At_50mM_NH4NO3_L-to-H_P Parameter: Treatment Value: 50mM NH4NO3 vs 100mM Mannitol
  misc_feature: MA Experiment ID: 20001904 Result: Up-regulated in Transcription
  misc_feature: MA Experiment 20001904 PARAMETER Experiment Name: At_Drought_Reproduction_P Parameter: Age (day) Value: 37
  misc_feature: MA Experiment 20001904 PARAMETER Experiment Name: At_Drought_Reproduction_P Parameter: Organism Value: A. thaliana
  misc_feature: MA Experiment 20001904 PARAMETER Experiment Name: At_Drought_Reproduction_P Parameter: Plant Line Value: WS
  misc_feature: MA Experiment 20001904 PARAMETER Experiment Name: At_Drought_Reproduction_P Parameter: Timepoint (day) Value: 7
  misc_feature: MA Experiment 20001904 PARAMETER Experiment Name: At_Drought_Reproduction_P Parameter: Tissue Value: Rosettes
  misc_feature: MA Experiment 20001904 PARAMETER Experiment Name: At_Drought_Reproduction_P Parameter: Treatment Value: Drought vs. No Drought
  misc_feature: MA Experiment ID: 20001905 Result: Up-regulated in Transcription
  misc_feature: MA Experiment 20001905 PARAMETER Experiment Name: At_Drought_Reproduction_P Parameter: Age (day) Value: 40
  misc_feature: MA Experiment 20001905 PARAMETER Experiment Name: At_Drought_Reproduction_P Parameter: Organism Value: A. thaliana
  misc_feature: MA Experiment 20001905 PARAMETER Experiment Name: At_Drought_Reproduction_P Parameter: Plant Line Value: WS
  misc_feature: MA Experiment 20001905 PARAMETER Experiment Name: At_Drought_Reproduction_P Parameter: Timepoint (day) Value: 10
  misc_feature: MA Experiment 20001905 PARAMETER Experiment Name: At_Drought_Reproduction_P Parameter: Tissue Value: Rosettes
  misc_feature: MA Experiment 20001905 PARAMETER Experiment Name: At_Drought_Reproduction_P Parameter: Treatment Value: Drought vs. No Drought

SEQ ID NO: 50855 - protein, 524 aa, Arabidopsis thaliana; identical to SEQ ID NO: 46571
  peptide (1)..(524): Ceres Seq. ID no. 13579261
  misc_feature (344)..(393): Pfam Name: Helix-loop-helix DNA-binding domain Pfam Description: Helix-loop-helix DNA-binding domain
  misc_feature (344)..(393): Pfam Name: Helix-loop-helix DNA-binding domain Pfam Description: Helix-loop-helix DNA-binding domain
  misc_feature (283)..(433): Homolog of NCBI NO: 30680903 NR Description: (bHLH015) putative bHLH transcription factor
  misc_feature (277)..(447): Homolog of NCBI NO: 34902556 NR Description: P0498A12.24 [Oryza sativa (japonica
  misc_feature (25)..(193): Homolog of NCBI NO: 20127070 NR Description: putative bHLH transcription factor [Arabidopsis
  misc_feature (271)..(475): Homolog of NCBI NO: 20127070 NR Description: putative bHLH transcription factor [Arabidopsis
  misc_feature (25)..(193): Homolog of NCBI NO: 30694924 NR Description: bHLH protein family [Arabidopsis thaliana]
  misc_feature (283)..(433): Homolog of NCBI NO: 30680903 NR Description: (bHLH015) putative bHLH transcription factor
  misc_feature (25)..(193): Homolog of NCBI NO: 20127070 NR Description: putative bHLH transcription factor [Arabidopsis
  misc_feature (25)..(193): Homolog of NCBI NO: 30694924 NR Description: bHLH protein family [Arabidopsis thaliana]
  misc_feature (1)..(524): Homolog of NCBI NO: 15217533 NR Description: phytochrome interacting factor 3 (PIF3)
  misc_feature (1)..(524): Homolog of NCBI NO: 4093153 NR Description: phytochrome-associated protein 3 [Arabidopsis
  misc_feature (271)..(475): Homolog of NCBI NO: 30694919 NR Description: bHLH protein family [Arabidopsis thaliana]
  misc_feature (25)..(193): Homolog of NCBI NO: 30694919 NR Description: bHLH protein family [Arabidopsis thaliana]
  misc_feature (271)..(475): Homolog of NCBI NO: 30694924 NR Description: bHLH protein family [Arabidopsis thaliana]
  misc_feature (271)..(475): Homolog of NCBI NO: 20127070 NR Description: putative bHLH transcription factor [Arabidopsis
  misc_feature (277)..(447): Homolog of NCBI NO: 34902556 NR Description: P0498A12.24 [Oryza sativa (japonica
  misc_feature (271)..(475): Homolog of NCBI NO: 30694924 NR Description: bHLH protein family [Arabidopsis thaliana]
  misc_feature (25)..(193): Homolog of NCBI NO: 30694919 NR Description: bHLH protein family [Arabidopsis thaliana]
  misc_feature (271)..(475): Homolog of NCBI NO: 30694919 NR Description: bHLH protein family [Arabidopsis thaliana]
  misc_feature (1)..(524): Homolog of NCBI NO: 4093153 NR Description: phytochrome-associated protein 3 [Arabidopsis
  misc_feature (1)..(524): Homolog of NCBI NO: 15217533 NR Description: phytochrome interacting factor 3 (PIF3)

SEQ ID NO: 50856 - protein, 453 aa, Arabidopsis thaliana; identical to SEQ ID NO: 46572
  peptide (1)..(453): Ceres Seq. ID no. 13579262
  misc_feature (273)..(322): Pfam Name: Helix-loop-helix DNA-binding domain Pfam Description: Helix-loop-helix DNA-binding domain
  misc_feature (273)..(322): Pfam Name: Helix-loop-helix DNA-binding domain Pfam Description: Helix-loop-helix DNA-binding domain
  misc_feature (212)..(362): Homolog of NCBI NO: 30680903 NR Description: (bHLH015) putative bHLH transcription factor
  misc_feature (206)..(376): Homolog of NCBI NO: 34902556 NR Description: P0498A12.24 [Oryza sativa (japonica
  misc_feature (1)..(122): Homolog of NCBI NO: 20127070 NR Description: putative bHLH transcription factor [Arabidopsis
  misc_feature (200)..(404): Homolog of NCBI NO: 20127070 NR Description: putative bHLH transcription factor [Arabidopsis
  misc_feature (1)..(122): Homolog of NCBI NO: 30694924 NR Description: bHLH protein family [Arabidopsis thaliana]
  misc_feature (212)..(362): Homolog of NCBI NO: 30680903 NR Description: (bHLH015) putative bHLH transcription factor
  misc_feature (1)..(122): Homolog of NCBI NO: 20127070 NR Description: putative bHLH transcription factor [Arabidopsis
  misc_feature (1)..(122): Homolog of NCBI NO: 30694924 NR Description: bHLH protein family [Arabidopsis thaliana]
  misc_feature (1)..(453): Homolog of NCBI NO: 15217533 NR Description: phytochrome interacting factor 3 (PIF3)
  misc_feature (1)..(453): Homolog of NCBI NO: 4093153 NR Description: phytochrome-associated protein 3 [Arabidopsis
  misc_feature (200)..(404): Homolog of NCBI NO: 30694919 NR Description: bHLH protein family [Arabidopsis thaliana]
  misc_feature (1)..(122): Homolog of NCBI NO: 30694919 NR Description: bHLH protein family [Arabidopsis thaliana]
  misc_feature (200)..(404): Homolog of NCBI NO: 30694924 NR Description: bHLH protein family [Arabidopsis thaliana]
  misc_feature (200)..(404): Homolog of NCBI NO: 20127070 NR Description: putative bHLH transcription factor [Arabidopsis
  misc_feature (206)..(376): Homolog of NCBI NO: 34902556 NR Description: P0498A12.24 [Oryza sativa (japonica
  misc_feature (200)..(404): Homolog of NCBI NO: 30694924 NR Description: bHLH protein family [Arabidopsis thaliana]
  misc_feature (1)..(122): Homolog of NCBI NO: 30694919 NR Description: bHLH protein family [Arabidopsis thaliana]
  misc_feature (200)..(404): Homolog of NCBI NO: 30694919 NR Description: bHLH protein family [Arabidopsis thaliana]
  misc_feature (1)..(453): Homolog of NCBI NO: 4093153 NR Description: phytochrome-associated protein 3 [Arabidopsis
  misc_feature (1)..(453): Homolog of NCBI NO: 15217533 NR Description: phytochrome interacting factor 3 (PIF3)

SEQ ID NO: 50857 - protein, 447 aa, Arabidopsis thaliana; identical to SEQ ID NO: 46573
  peptide (1)..(447): Ceres Seq. ID no. 13579263
  misc_feature (267)..(316): Pfam Name: Helix-loop-helix DNA-binding domain Pfam Description: Helix-loop-helix DNA-binding domain
  misc_feature (267)..(316): Pfam Name: Helix-loop-helix DNA-binding domain Pfam Description: Helix-loop-helix DNA-binding domain
  misc_feature (206)..(356): Homolog of NCBI NO: 30680903 NR Description: (bHLH015) putative bHLH transcription factor
  misc_feature (200)..(370): Homolog of NCBI NO: 34902556 NR Description: P0498A12.24 [Oryza sativa (japonica
  misc_feature (1)..(116): Homolog of NCBI NO: 20127070 NR Description: putative bHLH transcription factor [Arabidopsis
  misc_feature (194)..(398): Homolog of NCBI NO: 20127070 NR Description: putative bHLH transcription factor [Arabidopsis
  misc_feature (1)..(116): Homolog of NCBI NO: 30694924 NR Description: bHLH protein family [Arabidopsis thaliana]
  misc_feature (206)..(356): Homolog of NCBI NO: 30680903 NR Description: (bHLH015) putative bHLH transcription factor
  misc_feature (1)..(116): Homolog of NCBI NO: 20127070 NR Description: putative bHLH transcription factor [Arabidopsis
  misc_feature (1)..(116): Homolog of NCBI NO: 30694924 NR Description: bHLH protein family [Arabidopsis thaliana]
  misc_feature (1)..(447): Homolog of NCBI NO: 15217533 NR Description: phytochrome interacting factor 3 (PIF3)
  misc_feature (1)..(447): Homolog of NCBI NO: 4093153 NR Description: phytochrome-associated protein 3 [Arabidopsis
  misc_feature (194)..(398): Homolog of NCBI NO: 30694919 NR Description: bHLH protein family [Arabidopsis thaliana]
  misc_feature (1)..(116): Homolog of NCBI NO: 30694919 NR Description: bHLH protein family [Arabidopsis thaliana]
  misc_feature (194)..(398): Homolog of NCBI NO: 30694924 NR Description: bHLH protein family [Arabidopsis thaliana]
  misc_feature (194)..(398): Homolog of NCBI NO: 20127070 NR Description: putative bHLH transcription factor [Arabidopsis
  misc_feature (200)..(370): Homolog of NCBI NO: 34902556 NR Description: P0498A12.24 [Oryza sativa (japonica
  misc_feature (194)..(398): Homolog of NCBI NO: 30694924 NR Description: bHLH protein family [Arabidopsis thaliana]
  misc_feature (1)..(116): Homolog of NCBI NO: 30694919 NR Description: bHLH protein family [Arabidopsis thaliana]
  misc_feature (194)..(398): Homolog of NCBI NO: 30694919 NR Description: bHLH protein family [Arabidopsis thaliana]
  misc_feature (1)..(447): Homolog of NCBI NO: 4093153 NR Description: phytochrome-associated protein 3 [Arabidopsis
  misc_feature (1)..(447): Homolog of NCBI NO: 15217533 NR Description: phytochrome interacting factor 3 (PIF3)

SEQ ID NO: 50858 - DNA, 1690 bp, Arabidopsis thaliana
  misc_feature (1)..(1690): Ceres Seq. ID no. 12559025
  misc_feature: MA Experiment ID: 20000307 Result: Down-regulated in Transcription
  misc_feature: MA Experiment 20000307 PARAMETER Experiment Name: At_Germinating_Seeds_Sub_P Parameter: Age (hr) Value: 24 vs. 0
  misc_feature: MA Experiment 20000307 PARAMETER Experiment Name: At_Germinating_Seeds_Sub_P Parameter: Organism Value: A. thaliana
  misc_feature: MA Experiment 20000307 PARAMETER Experiment Name: At_Germinating_Seeds_Sub_P Parameter: Plant Line Value: WS
  misc_feature: MA Experiment 20000307 PARAMETER Experiment Name: At_Germinating_Seeds_Sub_P Parameter: Tissue Value: Germinating Seeds
  misc_feature: MA Experiment ID: 20000355 Result: Down-regulated in Transcription
  misc_feature: MA Experiment 20000355 PARAMETER Experiment Name: At_Siliques_Sub_P Parameter: Age (day) Value: 21
  misc_feature: MA Experiment 20000355 PARAMETER Experiment Name: At_Siliques_Sub_P Parameter: Organism Value: A. thaliana
  misc_feature: MA Experiment 20000355 PARAMETER Experiment Name: At_Siliques_Sub_P Parameter: Plant Line Value: WS
  misc_feature: MA Experiment 20000355 PARAMETER Experiment Name: At_Siliques_Sub_P Parameter: Tissue Value: Less Than 5mm Siliques vs. Whole Plant
attaatagatatctcaaacacaactctcaaaacttgccctgtttggtccgaaaccgaaactaaccctaatctcacatcacatcacatagcaatcacttcacatcacaaaacacctcatagccgcaaaatttaatggcagacgtcaagattcaatccgaatccgaatcctcggattctcatccagtggtcgacaatcaaccacctcctccgcctccgccgccgcaacagccggcgaaagaagaggagaatcaaccaaaaacatctccgactccgccgccacactggatgcggtatccaccaacggtgataatccctcatcagatgatgtacgcgccgccgccgttcccaccttatcatcagtatccgaatcaccaccaccttcaccatcaatctcgtggtaataagcatcaaaacgcttttaatggtgagaataaaaccatatgggttggtgatttgcatcactggatggatgaggcttatcttaattcttcttttgcttccggcgacgagagagagattgtttcggtgaaggtgattcgtaataagaacaatggtttatcagaaggatatggatttgtggagtttgagtcccatgatgtagctgataaggttttgcgggagtttaacgggacgactatgccaaatactgaccaaccttttcgtttgaactgggctagttttagcaccggtgagaagcggttagagaacaatggacctgatctctctattttcgtgggggatttgtcaccagatgtttcggataatttgttgcacgagaccttctctgagaagtatccgtcggttaaagctgcgaaagttgtccttgatgctaatactggtaggtcaaaggggtatgggtttgtgaggtttggtgatgagaatgaaaggaccaaagcaatgactgagatgaatggtgttaaatgttctagtagagctatgcgcatcggtcctgctaccccgaggaagactaatggttatcaacaacaaggtggatacatgccgaatggtaccttgacgcgtcctgaaggggacataatgaacacaacaatatttgttggagggcttgactctagtgtcactgatgaagacttaaagcaacctttcaatgaattcggggaaatagtctctgtcaagattcctgttggtaaaggatgcggatttgttcagtttgttaacagaccaaatgcagaggaggctttggagaaactaaatgggactgtaattggaaaacaaacagttcggctttcttggggacgtaatcccgccaataagcagcctagagataagtatggaaaccaatgggttgatccgtactatggaggacagttttacaatgggtatggatacatggtacctcaacctgacccgagaatgtatcccgctgcaccttactatccaatgtacggtggtcatcagcaacaagttagctgaggaaactaaaagcttaatctgagcatctatctataggacaacaaaaactcactcaggttaggtgatgttaggaagaacaaggcaaaaattgttggcttcttgtctctccttgagtttagggtttatcatctagtggacatcgaatttttggtggaaaccatacagtaatttaggggacttggatttgattgattaattttatttgtttcttctgatacttttgactatggaagttattgatcaagaagaagtgagttgc

SEQ ID NO: 50859 - protein, 432 aa, Arabidopsis thaliana
  peptide (1)..(432): Ceres Seq. ID no. 12559026
  misc_feature (199)..(271): Pfam Name: RNA recognition motif. (a.k.a. RRM, RBD, or RNP domain) Pfam Description: RNA recognition motif. (a.k.a. RRM, RBD, or RNP
  misc_feature (23)..(418): Homolog of NCBI NO: 15222783 NR Description: RNA binding protein 47 (RBP47), putative; protein
  misc_feature (10)..(405): Homolog of NCBI NO: 15230291 NR Description: RNA binding protein 47 (RBP47), putative
  misc_feature (286)..(418): Homolog of NCBI NO: 25386576 NR Description: probable RNA binding protein [imported] -
  misc_feature (23)..(309): Homolog of NCBI NO: 25386576 NR Description: probable RNA binding protein [imported] -
  misc_feature (31)..(432): Homolog of NCBI NO: 7489196 NR Description: RNA binding protein homolog - common tobacco
  misc_feature (31)..(432): Homolog of NCBI NO: 40804404 NR Description: DNA-binding protein [Lycopersicon esculentum]
  misc_feature (31)..(432): Homolog of NCBI NO: 9663769 NR Description: RNA Binding Protein 47 [Nicotiana plumbaginifolia]
  misc_feature (17)..(432): Homolog of NCBI NO: 15594035 NR Description: nucleic acid binding protein [Nicotiana tabacum]
  misc_feature (1)..(432): Homolog of NCBI NO: 15220241 NR Description: RNA binding protein 47 (RBP47), putative; protein
  misc_feature (1)..(432): Homolog of NCBI NO: 15220233 NR Description: RNA binding protein 47 (RBP47), putative
MADVKIQSESESSDSHPVVDNQPPPPPPPPQQPAKEEENQPKTSPTPPPHWMRYPPTVIIPHQMMYAPPPFPPYHQYPNHHHLHHQSRGNKHQNAFNGENKTIWVGDLHHWMDEAYLNSSFASGDEREIVSVKVIRNKNNGLSEGYGFVEFESHDVADKVLREFNGTTMPNTDQPFRLNWASFSTGEKRLENNGPDLSIFVGDLSPDVSDNLLHETFSEKYPSVKAAKVVLDANTGRSKGYGFVRFGDENERTKAMTEMNGVKCSSRAMRIGPATPRKTNGYQQQGGYMPNGTLTRPEGDIMNTTIFVGGLDSSVTDEDLKQPFNEFGEIVSVKIPVGKGCGFVQFVNRPNAEEALEKLNGTVIGKQTVRLSWGRNPANKQPRDKYGNQWVDPYYGGQFYNGYGYMVPQPDPRMYPAAPYYPMYGGHQQQVS

SEQ ID NO: 50860 - protein, 381 aa, Arabidopsis thaliana
  peptide (1)..(381): Ceres Seq. ID no. 12559027
  misc_feature (148)..(220): Pfam Name: RNA recognition motif. (a.k.a. RRM, RBD, or RNP domain) Pfam Description: RNA recognition motif. (a.k.a. RRM, RBD, or RNP
  misc_feature (1)..(367): Homolog of NCBI NO: 15222783 NR Description: RNA binding protein 47 (RBP47), putative; protein
  misc_feature (1)..(354): Homolog of NCBI NO: 15230291 NR Description: RNA binding protein 47 (RBP47), putative
  misc_feature (235)..(367): Homolog of NCBI NO: 25386576 NR Description: probable RNA binding protein [imported] -
  misc_feature (1)..(258): Homolog of NCBI NO: 25386576 NR Description: probable RNA binding protein [imported] -
  misc_feature (1)..(381): Homolog of NCBI NO: 7489196 NR Description: RNA binding protein homolog - common tobacco
  misc_feature (1)..(381): Homolog of NCBI NO: 40804404 NR Description: DNA-binding protein [Lycopersicon esculentum]
  misc_feature (1)..(381): Homolog of NCBI NO: 9663769 NR Description: RNA Binding Protein 47 [Nicotiana plumbaginifolia]
  misc_feature (1)..(381): Homolog of NCBI NO: 15594035 NR Description: nucleic acid binding protein [Nicotiana tabacum]
  misc_feature (1)..(381): Homolog of NCBI NO: 15220241 NR Description: RNA binding protein 47 (RBP47), putative; protein
  misc_feature (1)..(381): Homolog of NCBI NO: 15220233 NR Description: RNA binding protein 47 (RBP47), putative
MRYPPTVIIPHQMMYAPPPFPPYHQYPNHHHLHHQSRGNKHQNAFNGENKTIWVGDLHHWMDEAYLNSSFASGDEREIVSVKVIRNKNNGLSEGYGFVEFESHDVADKVLREFNGTTMPNTDQPFRLNWASFSTGEKRLENNGPDLSIFVGDLSPDVSDNLLHETFSEKYPSVKAAKVVLDANTGRSKGYGFVRFGDENERTKAMTEMNGVKCSSRAMRIGPATPRKTNGYQQQGGYMPNGTLTRPEGDIMNTTIFVGGLDSSVTDEDLKQPFNEFGEIVSVKIPVGKGCGFVQFVNRPNAEEALEKLNGTVIGKQTVRLSWGRNPANKQPRDKYGNQWVDPYYGGQFYNGYGYMVPQPDPRMYPAAPYYPMYGGHQQQVS

SEQ ID NO: 50861 - protein, 369 aa, Arabidopsis thaliana
  peptide (1)..(369): Ceres Seq. ID no. 12559028
  misc_feature (136)..(208): Pfam Name: RNA recognition motif. (a.k.a. RRM, RBD, or RNP domain) Pfam Description: RNA recognition motif. (a.k.a. RRM, RBD, or RNP
  misc_feature (1)..(355): Homolog of NCBI NO: 15222783 NR Description: RNA binding protein 47 (RBP47), putative; protein
  misc_feature (1)..(342): Homolog of NCBI NO: 15230291 NR Description: RNA binding protein 47 (RBP47), putative
  misc_feature (223)..(355): Homolog of NCBI NO: 25386576 NR Description: probable RNA binding protein [imported] -
  misc_feature (1)..(246): Homolog of NCBI NO: 25386576 NR Description: probable RNA binding protein [imported] -
  misc_feature (1)..(369): Homolog of NCBI NO: 7489196 NR Description: RNA binding protein homolog - common tobacco
  misc_feature (1)..(369): Homolog of NCBI NO: 40804404 NR Description: DNA-binding protein [Lycopersicon esculentum]
  misc_feature (1)..(369): Homolog of NCBI NO: 9663769 NR Description: RNA Binding Protein 47 [Nicotiana plumbaginifolia]
  misc_feature (1)..(369): Homolog of NCBI NO: 15594035 NR Description: nucleic acid binding protein [Nicotiana tabacum]
  misc_feature (1)..(369): Homolog of NCBI NO: 15220241 NR Description: RNA binding protein 47 (RBP47), putative; protein
  misc_feature (1)..(369): Homolog of NCBI NO: 15220233 NR Description: RNA binding protein 47 (RBP47), putative
MMYAPPPFPPYHQYPNHHHLHHQSRGNKHQNAFNGENKTIWVGDLHHWMDEAYLNSSFASGDEREIVSVKVIRNKNNGLSEGYGFVEFESHDVADKVLREFNGTTMPNTDQPFRLNWASFSTGEKRLENNGPDLSIFVGDLSPDVSDNLLHETFSEKYPSVKAAKVVLDANTGRSKGYGFVRFGDENERTKAMTEMNGVKCSSRAMRIGPATPRKTNGYQQQGGYMPNGTLTRPEGDIMNTTIFVGGLDSSVTDEDLKQPFNEFGEIVSVKIPVGKGCGFVQFVNRPNAEEALEKLNGTVIGKQTVRLSWGRNPANKQPRDKYGNQWVDPYYGGQFYNGYGYMVPQPDPRMYPAAPYYPMYGGHQQQVS

SEQ ID NO: 50862 - DNA, 1336 bp, Arabidopsis thaliana
  misc_feature (1)..(1336): Ceres Seq. ID no. 12599967
  misc_feature: MA Experiment ID: 20000179 Result: Down-regulated in Transcription
  misc_feature: MA Experiment 20000179 PARAMETER Experiment Name: At_Germinating_Seeds_P Parameter: Age (hr) Value: 6 vs. 0
  misc_feature: MA Experiment 20000179 PARAMETER Experiment Name: At_Germinating_Seeds_P Parameter: Tissue Value: Germinating Seeds
  misc_feature: MA Experiment ID: 20000180 Result: Down-regulated in Transcription
  misc_feature: MA Experiment 20000180 PARAMETER Experiment Name: At_Germinating_Seeds_P Parameter: Age (hr) Value: 24 vs. 0
  misc_feature: MA Experiment 20000180 PARAMETER Experiment Name: At_Germinating_Seeds_P Parameter: Tissue Value: Germinating Seeds
  misc_feature: MA Experiment ID: 20000227 Result: Up-regulated in Transcription
  misc_feature: MA Experiment 20000227 PARAMETER Experiment Name: At_Root-Tips-vs-Tops_P Parameter: Tissue Value: Root Tips vs. Root Tops
  misc_feature: MA Experiment ID: 20000234 Result: Up-regulated in Transcription
  misc_feature: MA Experiment 20000234 PARAMETER Experiment Name: At_Siliques_P Parameter: Age (day) Value: 21
  misc_feature: MA Experiment 20000234 PARAMETER Experiment Name: At_Siliques_P Parameter: Organism Value: A. thaliana
  misc_feature: MA Experiment 20000234 PARAMETER Experiment Name: At_Siliques_P Parameter: Plant Line Value: WS
  misc_feature: MA Experiment 20000234 PARAMETER Experiment Name: At_Siliques_P Parameter: Tissue Value: Less Than 5mm Siliques vs. Whole Plant
  misc_feature: MA Experiment ID: 20000264 Result: Up-regulated in Transcription
  misc_feature: MA Experiment 20000264 PARAMETER Experiment Name: At_Open_Flower_P Parameter: Age (day) Value: 21
  misc_feature: MA Experiment 20000264 PARAMETER Experiment Name: At_Open_Flower_P Parameter: Plant Line Value: WS
  misc_feature: MA Experiment 20000264 PARAMETER Experiment Name: At_Open_Flower_P Parameter: Tissue Value: Open Flower vs. Whole Plant
  misc_feature: MA Experiment ID: 20000286 Result: Up-regulated in Transcription
  misc_feature: MA Experiment 20000286 PARAMETER Experiment Name: At_Open_Flower_P Parameter: Age (day) Value: 21
  misc_feature: MA Experiment 20000286 PARAMETER Experiment Name: At_Open_Flower_P Parameter: Plant Line Value: WS
  misc_feature: MA Experiment 20000286 PARAMETER Experiment Name: At_Open_Flower_P Parameter: Tissue Value: Half Open vs. Whole Plant
  misc_feature: MA Experiment ID: 20000495 Result: Up-regulated in Transcription
  misc_feature: MA Experiment 20000495 PARAMETER Experiment Name: At_Guard_Cells_P Parameter: Harvest Date Value: 8/2/2002
  misc_feature: MA Experiment 20000495 PARAMETER Experiment Name: At_Guard_Cells_P Parameter: Organism Value: A. thaliana
  misc_feature: MA Experiment 20000495 PARAMETER Experiment Name: At_Guard_Cells_P Parameter: Tissue Value: Guard Cells vs. Leaves
  misc_feature: MA Experiment ID: 20000709 Result: Up-regulated in Transcription
  misc_feature: MA Experiment 20000709 PARAMETER Experiment Name: At_15mM_NH4NO3_L-to-H_P Parameter: Age (hr) Value: 14
  misc_feature: MA Experiment 20000709 PARAMETER Experiment Name: At_15mM_NH4NO3_L-to-H_P Parameter: Organism Value: A. thaliana
  misc_feature: MA Experiment 20000709 PARAMETER Experiment Name: At_15mM_NH4NO3_L-to-H_P Parameter: Plant Line Value: WS
  misc_feature: MA Experiment 20000709 PARAMETER Experiment Name: At_15mM_NH4NO3_L-to-H_P Parameter: Timepoint (hr) Value: 4
  misc_feature: MA Experiment 20000709 PARAMETER Experiment Name: At_15mM_NH4NO3_L-to-H_P Parameter: Tissue Value: Aerial
  misc_feature: MA Experiment 20000709 PARAMETER Experiment Name: At_15mM_NH4NO3_L-to-H_P Parameter: Treatment Value: 15mM NH4NO3 vs. 30mM Mannitol
  misc_feature: MA Experiment ID: 20001557 Result: Up-regulated in Transcription
  misc_feature: MA Experiment 20001557 PARAMETER Experiment Name: At_Drought_Soil_Dry_P Parameter: Age (day) Value: 27
  misc_feature: MA Experiment 20001557 PARAMETER Experiment Name: At_Drought_Soil_Dry_P Parameter: Organism Value: A. thaliana
  misc_feature: MA Experiment 20001557 PARAMETER Experiment Name: At_Drought_Soil_Dry_P Parameter: Plant Line Value: WS
  misc_feature: MA Experiment 20001557 PARAMETER Experiment Name: At_Drought_Soil_Dry_P Parameter: Post Timepoint (hr) Value: 3
  misc_feature: MA Experiment 20001557 PARAMETER Experiment Name: At_Drought_Soil_Dry_P Parameter: Post-Treatment Value: Re-Water vs. No Drought
  misc_feature: MA Experiment 20001557 PARAMETER Experiment Name: At_Drought_Soil_Dry_P Parameter: Timepoint (day) Value: 13
  misc_feature: MA Experiment 20001557 PARAMETER Experiment Name: At_Drought_Soil_Dry_P Parameter: Treatment Value: Drought vs. No Drought
  misc_feature: MA Experiment ID: 20001558 Result: Up-regulated in Transcription
  misc_feature: MA Experiment 20001558 PARAMETER Experiment Name: At_Drought_Soil_Dry_P Parameter: Age (day) Value: 27
  misc_feature: MA Experiment 20001558 PARAMETER Experiment Name: At_Drought_Soil_Dry_P Parameter: Organism Value: A. thaliana
  misc_feature: MA Experiment 20001558 PARAMETER Experiment Name: At_Drought_Soil_Dry_P Parameter: Plant Line Value: WS
  misc_feature: MA Experiment 20001558 PARAMETER Experiment Name: At_Drought_Soil_Dry_P Parameter: Post Timepoint (hr) Value: 6
  misc_feature: MA Experiment 20001558 PARAMETER Experiment Name: At_Drought_Soil_Dry_P Parameter: Post-Treatment Value: Re-Water vs. No Drought
  misc_feature: MA Experiment 20001558 PARAMETER Experiment Name: At_Drought_Soil_Dry_P Parameter: Timepoint (day) Value: 13
  misc_feature: MA Experiment 20001558 PARAMETER Experiment Name: At_Drought_Soil_Dry_P Parameter: Treatment Value: Drought vs. No Drought
  misc_feature: MA Experiment ID: 20001560 Result: Up-regulated in Transcription
  misc_feature: MA Experiment 20001560 PARAMETER Experiment Name: At_Drought_Soil_Dry_P Parameter: Age (day) Value: 28
  misc_feature: MA Experiment 20001560 PARAMETER Experiment Name: At_Drought_Soil_Dry_P Parameter: Organism Value: A. thaliana
  misc_feature: MA Experiment 20001560 PARAMETER Experiment Name: At_Drought_Soil_Dry_P Parameter: Plant Line Value: WS
  misc_feature: MA Experiment 20001560 PARAMETER Experiment Name: At_Drought_Soil_Dry_P Parameter: Post Timepoint (hr) Value: None
  misc_feature: MA Experiment 20001560 PARAMETER Experiment Name: At_Drought_Soil_Dry_P Parameter: Post-Treatment Value: None
  misc_feature: MA Experiment 20001560 PARAMETER Experiment Name: At_Drought_Soil_Dry_P Parameter: Timepoint (day) Value: 14
  misc_feature: MA Experiment 20001560 PARAMETER Experiment Name: At_Drought_Soil_Dry_P Parameter: Treatment Value: Drought vs. No Drought
agccgtcacctcctacctcagactctattactccggccggcgaaattagggttagaatctgtagctgtttggtgagataagaataataaatgggtcgtttcaaaaacaataagaagagtagggtcattgggaaacctattgcgaagaaaaatcaagaggatgttagtcatgtcactggggataagattcccaagagttttgtcttctcaagaatgaaacttgctggccctgttaaacaactccagatggatttgaggaagctcatgcttccctacactgctctcagtcttaaggagaagaagcggaacactttaagggactttttgaatgtatcaggtccaatgggtgttacacatttccttatgctttcgaaaacagcgtcttcactgtctcttagagtagcaagaacccctcagggcccgactcttaccttcaaaattcatcagtattccttagcatcagatatagctcagtctcagcttcgacctagatgtcctcaagatcttttcaagagtcctcctttgattgtcctttctggattcggttctcaagagttgcatctgaaactggcaacgattatgtttcagaatatattcccagctattgatattaacactgtcaagctctccacctgccagagattagtactcttgaactacaacaaagacaccaagctcattgatttccggcattattctataagacttcagcctgttggagtatctcgtaggatcagaaagtttgtgcaaaatcatcaggttccagatcttaggaatctgcaggatgttagtgattttgtcaccaaggctggttacggatcagagagcgaaggagatgaagaagcggcaacagtgacactatcatctgatctaggccgagttaacaaaggtgccaccaagagcgcagtgaaactgcaagaaattggaccaagaatgactatgcaactcgttaaagtggaggaaggattgtgtacaggaggaatcatattcagtgaatatgatgttgatggaaagaaagaaaagttaaagaagaaacaggatgaagaagaagaagaagatagtgaagaagaaggcgaagagggtagtgaagaagatggggaagacatggatgaggattttgaagattgaaaagagttaaaatagagtaacactgttttcacatgagacttgagtgttgttcatcaaattttgttccttggatctctgagtagcgttgcatctattgtctgattaaactacaattacaaagccttttgtactattaaactaaatgtcttcccggaattcgtataatgaccgaattaagccttttgtactattaaactaaatgtcttccc

SEQ ID NO: 50863 - protein, 345 aa, Arabidopsis thaliana
  peptide (1)..(345): Ceres Seq. ID no. 12599968
  misc_feature (34)..(329): Homolog of NCBI NO: 4323640 NR Description: Peter Pan [Drosophila melanogaster]
  misc_feature (8)..(341): Homolog of NCBI NO: 31209775 NR Description: ENSANGP00000012208 [Anopheles gambiae]
  misc_feature (34)..(329): Homolog of NCBI NO: 17136906 NR Description: peter pan CG5786-PA [Drosophila melanogaster]
  misc_feature (34)..(322): Homolog of NCBI NO: 26332985 NR Description: unnamed protein product [Mus musculus]
  misc_feature (34)..(322): Homolog of NCBI NO: 21704228 NR Description: similar to peter pan homolog (Drosophila)
  misc_feature (5)..(342): Homolog of NCBI NO: 28422433 NR Description: Similar to peter pan homolog (Drosophila)
  misc_feature (5)..(329): Homolog of NCBI NO: 28277332 NR Description: Similar to peter pan homolog (Drosophila)
  misc_feature (1)..(337): Homolog of NCBI NO: 39794499 NR Description: Unknown (protein for MGC:76273) [Silurana
  misc_feature (1)..(345): Homolog of NCBI NO: 30697573 NR Description: Peter Pan - like protein [Arabidopsis thaliana]
  misc_feature (1)..(345): Homolog of NCBI NO: 30697571 NR Description: Peter Pan - like protein [Arabidopsis thaliana]
MGRFKNNKKSRVIGKPIAKKNQEDVSHVTGDKIPKSFVFSRMKLAGPVKQLQMDLRKLMLPYTALSLKEKKRNTLRDFLNVSGPMGVTHFLMLSKTASSLSLRVARTPQGPTLTFKIHQYSLASDIAQSQLRPRCPQDLFKSPPLIVLSGFGSQELHLKLATIMFQNIFPAIDINTVKLSTCQRLVLLNYNKDTKLIDFRHYSIRLQPVGVSRRIRKFVQNHQVPDLRNLQDVSDFVTKAGYGSESEGDEEAATVTLSSDLGRVNKGATKSAVKLQEIGPRMTMQLVKVEEGLCTGGIIFSEYDVDGKKEKLKKKQDEEEEEDSEEEGEEGSEEDGEDMDEDFED

SEQ ID NO: 50864 - protein, 304 aa, Arabidopsis thaliana
  peptide (1)..(304): Ceres Seq. ID no. 12599969
  misc_feature (1)..(288): Homolog of NCBI NO: 4323640 NR Description: Peter Pan [Drosophila melanogaster]
  misc_feature (1)..(300): Homolog of NCBI NO: 31209775 NR Description: ENSANGP00000012208 [Anopheles gambiae]
  misc_feature (1)..(288): Homolog of NCBI NO: 17136906 NR Description: peter pan CG5786-PA [Drosophila melanogaster]
  misc_feature (1)..(281): Homolog of NCBI NO: 26332985 NR Description: unnamed protein product [Mus musculus]
  misc_feature (1)..(281): Homolog of NCBI NO: 21704228 NR Description: similar to peter pan homolog (Drosophila)
  misc_feature (1)..(301): Homolog of NCBI NO: 28422433 NR Description: Similar to peter pan homolog (Drosophila)
  misc_feature (1)..(288): Homolog of NCBI NO: 28277332 NR Description: Similar to peter pan homolog (Drosophila)
  misc_feature (1)..(296): Homolog of NCBI NO: 39794499 NR Description: Unknown (protein for MGC:76273) [Silurana
  misc_feature (1)..(304): Homolog of NCBI NO: 30697573 NR Description: Peter Pan - like protein [Arabidopsis thaliana]
  misc_feature (1)..(304): Homolog of NCBI NO: 30697571 NR Description: Peter Pan - like protein [Arabidopsis thaliana]
MKLAGPVKQLQMDLRKLMLPYTALSLKEKKRNTLRDFLNVSGPMGVTHFLMLSKTASSLSLRVARTPQGPTLTFKIHQYSLASDIAQSQLRPRCPQDLFKSPPLIVLSGFGSQELHLKLATIMFQNIFPAIDINTVKLSTCQRLVLLNYNKDTKLIDFRHYSIRLQPVGVSRRIRKFVQNHQVPDLRNLQDVSDFVTKAGYGSESEGDEEAATVTLSSDLGRVNKGATKSAVKLQEIGPRMTMQLVKVEEGLCTGGIIFSEYDVDGKKEKLKKKQDEEEEEDSEEEGEEGSEEDGEDMDEDFED

SEQ ID NO: 50865 - protein, 293 aa, Arabidopsis thaliana
  peptide (1)..(293): Ceres Seq. ID no. 12599970
  misc_feature (1)..(277): Homolog of NCBI NO: 4323640 NR Description: Peter Pan [Drosophila melanogaster]
  misc_feature (1)..(289): Homolog of NCBI NO: 31209775 NR Description: ENSANGP00000012208 [Anopheles gambiae]
  misc_feature (1)..(277): Homolog of NCBI NO: 17136906 NR Description: peter pan CG5786-PA [Drosophila melanogaster]
  misc_feature (1)..(270): Homolog of NCBI NO: 26332985 NR Description: unnamed protein product [Mus musculus]
  misc_feature (1)..(270): Homolog of NCBI NO: 21704228 NR Description: similar to peter pan homolog (Drosophila)
  misc_feature (1)..(290): Homolog of NCBI NO: 28422433 NR Description: Similar to peter pan homolog (Drosophila)
  misc_feature (1)..(277): Homolog of NCBI NO: 28277332 NR Description: Similar to peter pan homolog (Drosophila)
  misc_feature (1)..(285): Homolog of NCBI NO: 39794499 NR Description: Unknown (protein for MGC:76273) [Silurana
  misc_feature (1)..(293): Homolog of NCBI NO: 30697573 NR Description: Peter Pan - like protein [Arabidopsis thaliana]
  misc_feature (1)..(293): Homolog of NCBI NO: 30697571 NR Description: Peter Pan - like protein [Arabidopsis thaliana]
MDLRKLMLPYTALSLKEKKRNTLRDFLNVSGPMGVTHFLMLSKTASSLSLRVARTPQGPTLTFKIHQYSLASDIAQSQLRPRCPQDLFKSPPLIVLSGFGSQELHLKLATIMFQNIFPAIDINTVKLSTCQRLVLLNYNKDTKLIDFRHYSIRLQPVGVSRRIRKFVQNHQVPDLRNLQDVSDFVTKAGYGSESEGDEEAATVTLSSDLGRVNKGATKSAVKLQEIGPRMTMQLVKVEEGLCTGGIIFSEYDVDGKKEKLKKKQDEEEEEDSEEEGEEGSEEDGEDMDEDFED

SEQ ID NO: 50866 - DNA, 2118 bp, Arabidopsis thaliana; identical to SEQ ID NO: 45488
  misc_feature (1)..(2118): Ceres Seq. ID no. 13646450
  misc_feature: MA Experiment ID: 20000179 Result: Down-regulated in Transcription
  misc_feature: MA Experiment 20000179 PARAMETER Experiment Name: At_Germinating_Seeds_P Parameter: Age (hr) Value: 6 vs. 0
  misc_feature: MA Experiment 20000179 PARAMETER Experiment Name: At_Germinating_Seeds_P Parameter: Tissue Value: Germinating Seeds
  misc_feature: MA Experiment ID: 20000234 Result: Down-regulated in Transcription
  misc_feature: MA Experiment 20000234 PARAMETER Experiment Name: At_Siliques_P Parameter: Age (day) Value: 21
  misc_feature: MA Experiment 20000234 PARAMETER Experiment Name: At_Siliques_P Parameter: Organism Value: A. thaliana
  misc_feature: MA Experiment 20000234 PARAMETER Experiment Name: At_Siliques_P Parameter: Plant Line Value: WS
  misc_feature: MA Experiment 20000234 PARAMETER Experiment Name: At_Siliques_P Parameter: Tissue Value: Less Than 5mm Siliques vs. Whole Plant
  misc_feature: MA Experiment ID: 20000265 Result: Down-regulated in Transcription
  misc_feature: MA Experiment 20000265 PARAMETER Experiment Name: At_Open_Flower_P Parameter: Age (day) Value: 21
  misc_feature: MA Experiment 20000265 PARAMETER Experiment Name: At_Open_Flower_P Parameter: Plant Line Value: WS
  misc_feature: MA Experiment 20000265 PARAMETER Experiment Name: At_Open_Flower_P Parameter: Tissue Value: Closed Flower vs. Whole Plant
  misc_feature: MA Experiment ID: 20000437 Result: Up-regulated in Transcription
  misc_feature: MA Experiment 20000437 PARAMETER Experiment Name: At_Drought_P Parameter: Age (day) Value: 8
  misc_feature: MA Experiment 20000437 PARAMETER Experiment Name: At_Drought_P Parameter: Organism Value: A. thaliana
  misc_feature: MA Experiment 20000437 PARAMETER Experiment Name: At_Drought_P Parameter: Plant Line Value: WS
  misc_feature: MA Experiment 20000437 PARAMETER Experiment Name: At_Drought_P Parameter: Timepoint (hr) Value: 24
  misc_feature: MA Experiment 20000437 PARAMETER Experiment Name: At_Drought_P Parameter: Tissue Value: Whole Plant
  misc_feature: MA Experiment 20000437 PARAMETER Experiment Name: At_Drought_P Parameter: Treatment Value: Drought vs. No Drought
  misc_feature: MA Experiment ID: 20001905 Result: Up-regulated in Transcription
  misc_feature: MA Experiment 20001905 PARAMETER Experiment Name: At_Drought_Reproduction_P Parameter: Age (day) Value: 40
  misc_feature: MA Experiment 20001905 PARAMETER Experiment Name: At_Drought_Reproduction_P Parameter: Organism Value: A. thaliana
  misc_feature: MA Experiment 20001905 PARAMETER Experiment Name: At_Drought_Reproduction_P Parameter: Plant Line Value: WS
  misc_feature: MA Experiment 20001905 PARAMETER Experiment Name: At_Drought_Reproduction_P Parameter: Timepoint (day) Value: 10
  misc_feature: MA Experiment 20001905 PARAMETER Experiment Name: At_Drought_Reproduction_P Parameter: Tissue Value: Rosettes
  misc_feature: MA Experiment 20001905 PARAMETER Experiment Name: At_Drought_Reproduction_P Parameter: Treatment Value: Drought vs. No Drought

SEQ ID NO: 50867 - protein, 557 aa, Arabidopsis thaliana; identical to SEQ ID NO: 45489
  peptide (1)..(557): Ceres Seq. ID no. 13646451
  misc_feature (123)..(504): Homolog of NCBI NO: 34906046 NR Description: putative serine/threonine-specific protein kinase
  misc_feature (155)..(459): Homolog of NCBI NO: 28804505 NR Description: serine/threonine protein kinase [Aster tripolium]
  misc_feature (119)..(496): Homolog of NCBI NO: 19071648 NR Description: putative protein tyrosine-serine-threonine kinase
  misc_feature (109)..(489): Homolog of NCBI NO: 34897424 NR Description: putative protein kinase [Oryza sativa (japonica
  misc_feature (121)..(513): Homolog of NCBI NO: 37534182 NR Description: putative serine /threonine kinase similar to NAK
  misc_feature (144)..(459): Homolog of NCBI NO: 15242204 NR Description: serine/threonine specific protein kinase -related
  misc_feature (126)..(517): Homolog of NCBI NO: 34912198 NR Description: putative protein kinase [Oryza sativa (japonica
  misc_feature (2)..(557): Homolog of NCBI NO: 34907816 NR Description: similar to protein kinase AtSIK
  misc_feature (1)..(557): Homolog of NCBI NO: 14581445 NR Description: protein kinase AtSIK [Arabidopsis thaliana]
  misc_feature (1)..(557): Homolog of NCBI NO: 15231963 NR Description: protein kinase family [Arabidopsis thaliana]
  misc_feature (123)..(504): Homolog of NCBI NO: 34906046 NR Description: putative serine/threonine-specific protein kinase
  misc_feature (155)..(459): Homolog of NCBI NO: 28804505 NR Description: serine/threonine protein kinase [Aster tripolium]
  misc_feature (119)..(496): Homolog of NCBI NO: 19071648 NR Description: putative protein tyrosine-serine-threonine kinase
  misc_feature (109)..(489): Homolog of NCBI NO: 34897424 NR Description: putative protein kinase [Oryza sativa (japonica
  misc_feature (121)..(513): Homolog of NCBI NO: 37534182 NR Description: putative serine /threonine kinase similar to NAK
  misc_feature (144)..(459): Homolog of NCBI NO: 15242204 NR Description: serine/threonine specific protein kinase -related
  misc_feature (126)..(517): Homolog of NCBI NO: 34912198 NR Description: putative protein kinase [Oryza sativa (japonica
  misc_feature (2)..(557): Homolog of NCBI NO: 34907816 NR Description: similar to protein kinase AtSIK
  misc_feature (1)..(557): Homolog of NCBI NO: 14581445 NR Description: protein kinase AtSIK [Arabidopsis thaliana]
  misc_feature (1)..(557): Homolog of NCBI NO: 15231963 NR Description: protein kinase family [Arabidopsis thaliana]

SEQ ID NO: 50868 - protein, 539 aa, Arabidopsis thaliana; identical to SEQ ID NO: 45490
  peptide (1)..(539): Ceres Seq. ID no. 13646452
  misc_feature (105)..(486): Homolog of NCBI NO: 34906046 NR Description: putative serine/threonine-specific protein kinase
  misc_feature (137)..(441): Homolog of NCBI NO: 28804505 NR Description: serine/threonine protein kinase [Aster tripolium]
  misc_feature (101)..(478): Homolog of NCBI NO: 19071648 NR Description: putative protein tyrosine-serine-threonine kinase
  misc_feature (91)..(471): Homolog of NCBI NO: 34897424 NR Description: putative protein kinase [Oryza sativa (japonica
  misc_feature (103)..(495): Homolog of NCBI NO: 37534182 NR Description: putative serine /threonine kinase similar to NAK
  misc_feature (126)..(441): Homolog of NCBI NO: 15242204 NR Description: serine/threonine specific protein kinase -related
  misc_feature (108)..(499): Homolog of NCBI NO: 34912198 NR Description: putative protein kinase [Oryza sativa (japonica
  misc_feature (1)..(539): Homolog of NCBI NO: 34907816 NR Description: similar to protein kinase AtSIK
  misc_feature (1)..(539): Homolog of NCBI NO: 14581445 NR Description: protein kinase AtSIK [Arabidopsis thaliana]
  misc_feature (1)..(539): Homolog of NCBI NO: 15231963 NR Description: protein kinase family [Arabidopsis thaliana]
  misc_feature (105)..(486): Homolog of NCBI NO: 34906046 NR Description: putative serine/threonine-specific protein kinase
  misc_feature (137)..(441): Homolog of NCBI NO: 28804505 NR Description: serine/threonine protein kinase [Aster tripolium]
  misc_feature (101)..(478): Homolog of NCBI NO: 19071648 NR Description: putative protein tyrosine-serine-threonine kinase
  misc_feature (91)..(471): Homolog of NCBI NO: 34897424 NR Description: putative protein kinase [Oryza sativa (japonica
  misc_feature (103)..(495): Homolog of NCBI NO: 37534182 NR Description: putative serine /threonine kinase similar to NAK
  misc_feature (126)..(441): Homolog of NCBI NO: 15242204 NR Description: serine/threonine specific protein kinase -related
  misc_feature (108)..(499): Homolog of NCBI NO: 34912198 NR Description: putative protein kinase [Oryza sativa (japonica
  misc_feature (1)..(539): Homolog of NCBI NO: 34907816 NR Description: similar to protein kinase AtSIK
  misc_feature (1)..(539): Homolog of NCBI NO: 14581445 NR Description: protein kinase AtSIK [Arabidopsis thaliana]
  misc_feature (1)..(539): Homolog of NCBI NO: 15231963 NR Description: protein kinase family [Arabidopsis thaliana]

SEQ ID NO: 50869 - protein, 491 aa, Arabidopsis thaliana; identical to SEQ ID NO: 45491
  peptide (1)..(491): Ceres Seq. ID no. 13646453
  misc_feature (57)..(438): Homolog of NCBI NO: 34906046 NR Description: putative serine/threonine-specific protein kinase
  misc_feature (89)..(393): Homolog of NCBI NO: 28804505 NR Description: serine/threonine protein kinase [Aster tripolium]
  misc_feature (53)..(430): Homolog of NCBI NO: 19071648 NR Description: putative protein tyrosine-serine-threonine kinase
  misc_feature (43)..(423): Homolog of NCBI NO: 34897424 NR Description: putative protein kinase [Oryza sativa (japonica
  misc_feature (55)..(447): Homolog of NCBI NO: 37534182 NR Description: putative serine /threonine kinase similar to NAK
  misc_feature (78)..(393): Homolog of NCBI NO: 15242204 NR Description: serine/threonine specific protein kinase -related
  misc_feature (60)..(451): Homolog of NCBI NO: 34912198 NR Description: putative protein kinase [Oryza sativa (japonica
  misc_feature (1)..(491): Homolog of NCBI NO: 34907816 NR Description: similar to protein kinase AtSIK
  misc_feature (1)..(491): Homolog of NCBI NO: 14581445 NR Description: protein kinase AtSIK [Arabidopsis thaliana]
  misc_feature (1)..(491): Homolog of NCBI NO: 15231963 NR Description: protein kinase family [Arabidopsis thaliana]
  misc_feature (57)..(438): Homolog of NCBI NO: 34906046 NR Description: putative serine/threonine-specific protein kinase
  misc_feature (89)..(393): Homolog of NCBI NO: 28804505 NR Description: serine/threonine protein kinase [Aster tripolium]
  misc_feature (53)..(430): Homolog of NCBI NO: 19071648 NR Description: putative protein tyrosine-serine-threonine kinase
  misc_feature (43)..(423): Homolog of NCBI NO: 34897424 NR Description: putative protein kinase [Oryza sativa (japonica
  misc_feature (55)..(447): Homolog of NCBI NO: 37534182 NR Description: putative serine /threonine kinase similar to NAK
  misc_feature (78)..(393): Homolog of NCBI NO: 15242204 NR Description: serine/threonine specific protein kinase -related
  misc_feature (60)..(451): Homolog of NCBI NO: 34912198 NR Description: putative protein kinase [Oryza sativa (japonica
  misc_feature (1)..(491): Homolog of NCBI NO: 34907816 NR Description: similar to protein kinase AtSIK
  misc_feature (1)..(491): Homolog of NCBI NO: 14581445 NR Description: protein kinase AtSIK [Arabidopsis thaliana]
  misc_feature (1)..(491): Homolog of NCBI NO: 15231963 NR Description: protein kinase family [Arabidopsis thaliana]

SEQ ID NO: 50870 - DNA, 549 bp, Arabidopsis thaliana; identical to SEQ ID NO: 35308
  misc_feature (1)..(549): Ceres Seq. ID no. 12397083
  misc_feature: MA Experiment ID: 20000069 Result: Up-regulated in Transcription
  misc_feature: MA Experiment 20000069 PARAMETER Experiment Name: At_100uM_ABA_Mutants_cDNA_P Parameter: Plant Line Value: CS23
  misc_feature: MA Experiment 20000069 PARAMETER Experiment Name: At_100uM_ABA_Mutants_cDNA_P Parameter: Timepoint (hr) Value: 6
  misc_feature: MA Experiment 20000069 PARAMETER Experiment Name: At_100uM_ABA_Mutants_cDNA_P Parameter: Tissue Value: Aerial
  misc_feature: MA Experiment 20000069 PARAMETER Experiment Name: At_100uM_ABA_Mutants_cDNA_P Parameter: Treatment Value: 100uM ABA vs. No Treatment
  misc_feature: MA Experiment ID: 20000071 Result: Up-regulated in Transcription
  misc_feature: MA Experiment 20000071 PARAMETER Experiment Name: At_100uM_ABA_Mutants_cDNA_P Parameter: Plant Line Value: CS8104
  misc_feature: MA Experiment 20000071 PARAMETER Experiment Name: At_100uM_ABA_Mutants_cDNA_P Parameter: Timepoint (hr) Value: 6
  misc_feature: MA Experiment 20000071 PARAMETER Experiment Name: At_100uM_ABA_Mutants_cDNA_P Parameter: Tissue Value: Aerial
  misc_feature: MA Experiment 20000071 PARAMETER Experiment Name: At_100uM_ABA_Mutants_cDNA_P Parameter: Treatment Value: 100uM ABA vs. No Treatment
  misc_feature: MA Experiment ID: 20000117 Result: Up-regulated in Transcription
  misc_feature: MA Experiment 20000117 PARAMETER Experiment Name: At_100uM_ABA_Mutants_cDNA_P Parameter: Plant Line Value: Columbia
  misc_feature: MA Experiment 20000117 PARAMETER Experiment Name: At_100uM_ABA_Mutants_cDNA_P Parameter: Timepoint (hr) Value: 6
  misc_feature: MA Experiment 20000117 PARAMETER Experiment Name: At_100uM_ABA_Mutants_cDNA_P Parameter: Tissue Value: Aerial
  misc_feature: MA Experiment 20000117 PARAMETER Experiment Name: At_100uM_ABA_Mutants_cDNA_P Parameter: Treatment Value: 100uM ABA vs. No Treatment
  misc_feature: MA Experiment ID: 20000235 Result: Down-regulated in Transcription
  misc_feature: MA Experiment 20000235 PARAMETER Experiment Name: At_Siliques_P Parameter: Age (day) Value: 21
  misc_feature: MA Experiment 20000235 PARAMETER Experiment Name: At_Siliques_P Parameter: Organism Value: A. thaliana
  misc_feature: MA Experiment 20000235 PARAMETER Experiment Name: At_Siliques_P Parameter: Plant Line Value: WS
  misc_feature: MA Experiment 20000235 PARAMETER Experiment Name: At_Siliques_P Parameter: Tissue Value: 5-10mm Siliques vs. Whole Plant
  misc_feature: MA Experiment ID: 20000438 Result: Down-regulated in Transcription
  misc_feature: MA Experiment 20000438 PARAMETER Experiment Name: At_Shoots__P Parameter: Age (day) Value: 14
  misc_feature: MA Experiment 20000438 PARAMETER Experiment Name: At_Shoots__P Parameter: Tissue Value: Shoots vs. Whole Plant
  misc_feature: MA Experiment ID: 20001557 Result: Down-regulated in Transcription
  misc_feature: MA Experiment 20001557 PARAMETER Experiment Name: At_Drought_Soil_Dry_P Parameter: Age (day) Value: 27
  misc_feature: MA Experiment 20001557 PARAMETER Experiment Name: At_Drought_Soil_Dry_P Parameter: Organism Value: A. thaliana
  misc_feature: MA Experiment 20001557 PARAMETER Experiment Name: At_Drought_Soil_Dry_P Parameter: Plant Line Value: WS
  misc_feature: MA Experiment 20001557 PARAMETER Experiment Name: At_Drought_Soil_Dry_P Parameter: Post Timepoint (hr) Value: 3
  misc_feature: MA Experiment 20001557 PARAMETER Experiment Name: At_Drought_Soil_Dry_P Parameter: Post-Treatment Value: Re-Water vs. No Drought
  misc_feature: MA Experiment 20001557 PARAMETER Experiment Name: At_Drought_Soil_Dry_P Parameter: Timepoint (day) Value: 13
  misc_feature: MA Experiment 20001557 PARAMETER Experiment Name: At_Drought_Soil_Dry_P Parameter: Treatment Value: Drought vs. No Drought
  misc_feature: MA Experiment ID: 20001905 Result: Down-regulated in Transcription
  misc_feature: MA Experiment 20001905 PARAMETER Experiment Name: At_Drought_Reproduction_P Parameter: Age (day) Value: 40
  misc_feature: MA Experiment 20001905 PARAMETER Experiment Name: At_Drought_Reproduction_P Parameter: Organism Value: A. thaliana
  misc_feature: MA Experiment 20001905 PARAMETER Experiment Name: At_Drought_Reproduction_P Parameter: Plant Line Value: WS
  misc_feature: MA Experiment 20001905 PARAMETER Experiment Name: At_Drought_Reproduction_P Parameter: Timepoint (day) Value: 10
  misc_feature: MA Experiment 20001905 PARAMETER Experiment Name: At_Drought_Reproduction_P Parameter: Tissue Value: Rosettes
  misc_feature: MA Experiment 20001905 PARAMETER Experiment Name: At_Drought_Reproduction_P Parameter: Treatment Value: Drought vs. No Drought

SEQ ID NO: 50871 - protein, 78 aa, Arabidopsis thaliana; identical to SEQ ID NO: 35309
  peptide (1)..(78): Ceres Seq. ID no. 12397084
  misc_feature (3)..(77): Pfam Name: Cytochrome oxidase c subunit VIb Pfam Description: Cytochrome oxidase c subunit VIb
  misc_feature (3)..(77): Pfam Name: Cytochrome oxidase c subunit VIb Pfam Description: Cytochrome oxidase c subunit VIb
  misc_feature (6)..(76): Homolog of NCBI NO: 38048151 NR Description: similar to Drosophila melanogaster CG14235
  misc_feature (4)..(78): Homolog of NCBI NO: 22204116 NR Description: putative cytochrome c oxidase subunit [Triticum
  misc_feature (4)..(78): Homolog of NCBI NO: 34906824 NR Description: putative cytochrome c oxidase subunit 6b-1
  misc_feature (3)..(78): Homolog of NCBI NO: 21554378 NR Description: cytochrome c oxidase subunit, putative
  misc_feature (3)..(78): Homolog of NCBI NO: 15219886 NR Description: cytochrome c oxidase subunit, putative
  misc_feature (6)..(76): Homolog of NCBI NO: 38048151 NR Description: similar to Drosophila melanogaster CG14235
  misc_feature (4)..(78): Homolog of NCBI NO: 34906824 NR Description: putative cytochrome c oxidase subunit 6b-1
  misc_feature (3)..(78): Homolog of NCBI NO: 15219886 NR Description: cytochrome c oxidase subunit, putative
  misc_feature (1)..(78): Homolog of NCBI NO: 18424030 NR Description: Expressed protein
  misc_feature (1)..(78): Homolog of NCBI NO: 21592329 NR Description: cytochrome c oxidase subunit 6b [Arabidopsis
  misc_feature (1)..(78): Homolog of NCBI NO: 15234375 NR Description: putative protein; protein id: At4g28060.1
  misc_feature (4)..(78): Homolog of NCBI NO: 9967162 NR Description: cytochrome c oxidase subunit 6b
  misc_feature (4)..(78): Homolog of NCBI NO: 4586449 NR Description: cytochrome c oxidase subunit 6b-1
  misc_feature (3)..(78): Homolog of NCBI NO: 21554378 NR Description: cytochrome c oxidase subunit, putative
  misc_feature (4)..(78): Homolog of NCBI NO: 22204116 NR Description: putative cytochrome c oxidase subunit [Triticum
  misc_feature (4)..(78): Homolog of NCBI NO: 4586449 NR Description: cytochrome c oxidase subunit 6b-1
  misc_feature (4)..(78): Homolog of NCBI NO: 9967162 NR Description: cytochrome c oxidase subunit 6b
  misc_feature (1)..(78): Homolog of NCBI NO: 15234375 NR Description: putative protein; protein id: At4g28060.1
  misc_feature (1)..(78): Homolog of NCBI NO: 21592329 NR Description: cytochrome c oxidase subunit 6b [Arabidopsis
  misc_feature (1)..(78): Homolog of NCBI NO: 18424030 NR Description: Expressed protein

SEQ ID NO: 50872 - protein, 41 aa, Arabidopsis thaliana; identical to SEQ ID NO: 35310
  peptide (1)..(41): Ceres Seq. ID no. 12397085

SEQ ID NO: 50873 - DNA, 1090 bp, Arabidopsis thaliana; identical to SEQ ID NO: 35686
  misc_feature (1)..(1090): Ceres Seq. ID no. 13490166
  misc_feature: MA Experiment ID: 108434 Result: Up-regulated in Transcription
  misc_feature: MA Experiment 108434 PARAMETER Experiment Name: At_Root_Tips_cDNA_P Parameter: Tissue Value: Root Tips
  misc_feature: MA Experiment ID: 108462 Result: Up-regulated in Transcription
  misc_feature: MA Experiment 108462 PARAMETER Experiment Name: At_Germinating_Seeds_cDNA_P Parameter: Age (day) Value: 2 vs. 0
  misc_feature: MA Experiment 108462 PARAMETER Experiment Name: At_Germinating_Seeds_cDNA_P Parameter: Tissue Value: Germinating Seeds
  misc_feature: MA Experiment ID: 108463 Result: Up-regulated in Transcription
  misc_feature: MA Experiment 108463 PARAMETER Experiment Name: At_Germinating_Seeds_cDNA_P Parameter: Age (day) Value: 3 vs. 0
  misc_feature: MA Experiment 108463 PARAMETER Experiment Name: At_Germinating_Seeds_cDNA_P Parameter: Tissue Value: Germinating Seeds
  misc_feature: MA Experiment ID: 108464 Result: Up-regulated in Transcription
  misc_feature: MA Experiment 108464 PARAMETER Experiment Name: At_Germinating_Seeds_cDNA_P Parameter: Age (day) Value: 4 vs. 0
  misc_feature: MA Experiment 108464 PARAMETER Experiment Name: At_Germinating_Seeds_cDNA_P Parameter: Tissue Value: Germinating Seeds
  misc_feature: MA Experiment ID: 108488 Result: Down-regulated in Transcription
  misc_feature: MA Experiment ID: 108572 Result: Down-regulated in Transcription
  misc_feature: MA Experiment 108572 PARAMETER Experiment Name: At_Drought_cDNA_P Parameter: Timepoint (hr) Value: 1
  misc_feature: MA Experiment 108572 PARAMETER Experiment Name: At_Drought_cDNA_P Parameter: Tissue Value: Aerial
  misc_feature: MA Experiment 108572 PARAMETER Experiment Name: At_Drought_cDNA_P Parameter: Treatment Value: Drought vs. No Drought
  misc_feature: MA Experiment ID: 108576 Result: Down-regulated in Transcription
  misc_feature: MA Experiment 108576 PARAMETER Experiment Name: At_42deg_Heat_cDNA_P Parameter: Temperature (deg C) Value: 42 vs. 22
  misc_feature: MA Experiment 108576 PARAMETER Experiment Name: At_42deg_Heat_cDNA_P Parameter: Timepoint (hr) Value: 1
  misc_feature: MA Experiment 108576 PARAMETER Experiment Name: At_42deg_Heat_cDNA_P Parameter: Tissue Value: Aerial
  misc_feature: MA Experiment ID: 108577 Result: Down-regulated in Transcription
  misc_feature: MA Experiment 108577 PARAMETER Experiment Name: At_42deg_Heat_cDNA_P Parameter: Temperature (deg C) Value: 42 vs. 22
  misc_feature: MA Experiment 108577 PARAMETER Experiment Name: At_42deg_Heat_cDNA_P Parameter: Timepoint (hr) Value: 6
  misc_feature: MA Experiment 108577 PARAMETER Experiment Name: At_42deg_Heat_cDNA_P Parameter: Tissue Value: Aerial
  misc_feature: MA Experiment ID: 108579 Result: Down-regulated in Transcription
  misc_feature: MA Experiment 108579 PARAMETER Experiment Name: At_4deg_Cold_cDNA_P Parameter: Temperature (deg C) Value: 4 vs. 22
  misc_feature: MA Experiment 108579 PARAMETER Experiment Name: At_4deg_Cold_cDNA_P Parameter: Timepoint (hr) Value: 6
  misc_feature: MA Experiment 108579 PARAMETER Experiment Name: At_4deg_Cold_cDNA_P Parameter: Tissue Value: Aerial
  misc_feature: MA Experiment ID: 20000093 Result: Down-regulated in Transcription
  misc_feature: MA Experiment 20000093 PARAMETER Experiment Name: At_42deg_Heat_cDNA_P Parameter: Temperature (deg C) Value: 42 vs. 22
  misc_feature: MA Experiment 20000093 PARAMETER Experiment Name: At_42deg_Heat_cDNA_P Parameter: Timepoint (hr) Value: 0.5
  misc_feature: MA Experiment 20000093 PARAMETER Experiment Name: At_42deg_Heat_cDNA_P Parameter: Tissue Value: Aerial
  misc_feature: MA Experiment ID: 20000111 Result: Down-regulated in Transcription
  misc_feature: MA Experiment 20000111 PARAMETER Experiment Name: At_42deg_Heat_cDNA_P Parameter: Temperature (deg C) Value: 42 vs. 22
  misc_feature: MA Experiment 20000111 PARAMETER Experiment Name: At_42deg_Heat_cDNA_P Parameter: Timepoint (hr) Value: 6
  misc_feature: MA Experiment 20000111 PARAMETER Experiment Name: At_42deg_Heat_cDNA_P Parameter: Tissue Value: Aerial
  misc_feature: MA Experiment ID: 20000113 Result: Down-regulated in Transcription
  misc_feature: MA Experiment 20000113 PARAMETER Experiment Name: At_42deg_Heat_cDNA_P Parameter: Temperature (deg C) Value: 42 vs. 22
  misc_feature: MA Experiment 20000113 PARAMETER Experiment Name: At_42deg_Heat_cDNA_P Parameter: Timepoint (hr) Value: 8
  misc_feature: MA Experiment 20000113 PARAMETER Experiment Name: At_42deg_Heat_cDNA_P Parameter: Tissue Value: Aerial
  misc_feature: MA Experiment ID: 20000144 Result: Down-regulated in Transcription
  misc_feature: MA Experiment 20000144 PARAMETER Experiment Name: At_42deg_Heat_cDNA_P Parameter: Temperature (deg C) Value: 42 vs. 22
  misc_feature: MA Experiment 20000144 PARAMETER Experiment Name: At_42deg_Heat_cDNA_P Parameter: Timepoint (hr) Value: 1
  misc_feature: MA Experiment 20000144 PARAMETER Experiment Name: At_42deg_Heat_cDNA_P Parameter: Tissue Value: Aerial
  misc_feature: MA Experiment ID: 20000171 Result: Down-regulated in Transcription
  misc_feature: MA Experiment 20000171 PARAMETER Experiment Name: At_42deg_Heat_P Parameter: Age (day) Value: 14
  misc_feature: MA Experiment 20000171 PARAMETER Experiment Name: At_42deg_Heat_P Parameter: Organism Value: A. thaliana
  misc_feature: MA Experiment 20000171 PARAMETER Experiment Name: At_42deg_Heat_P Parameter: Plant Line Value: WS
  misc_feature: MA Experiment 20000171 PARAMETER Experiment Name: At_42deg_Heat_P Parameter: Temperature (deg C) Value: 42 vs. 22
  misc_feature: MA Experiment 20000171 PARAMETER Experiment Name: At_42deg_Heat_P Parameter: Timepoint (hr) Value: 1
  misc_feature: MA Experiment 20000171 PARAMETER Experiment Name: At_42deg_Heat_P Parameter: Tissue Value: Aerial
  misc_feature: MA Experiment ID: 20000173 Result: Down-regulated in Transcription
  misc_feature: MA Experiment 20000173 PARAMETER Experiment Name: At_42deg_Heat_P Parameter: Age (day) Value: 14
  misc_feature: MA Experiment 20000173 PARAMETER Experiment Name: At_42deg_Heat_P Parameter: Organism Value: A. thaliana
  misc_feature: MA Experiment 20000173 PARAMETER Experiment Name: At_42deg_Heat_P Parameter: Plant Line Value: WS
  misc_feature: MA Experiment 20000173 PARAMETER Experiment Name: At_42deg_Heat_P Parameter: Temperature (deg C) Value: 42 vs. 22
  misc_feature: MA Experiment 20000173 PARAMETER Experiment Name: At_42deg_Heat_P Parameter: Timepoint (hr) Value: 6
  misc_feature: MA Experiment 20000173 PARAMETER Experiment Name: At_42deg_Heat_P Parameter: Tissue Value: Aerial
  misc_feature: MA Experiment ID: 20000179 Result: Up-regulated in Transcription
  misc_feature: MA Experiment 20000179 PARAMETER Experiment Name: At_Germinating_Seeds_P Parameter: Age (hr) Value: 6 vs. 0
  misc_feature: MA Experiment 20000179 PARAMETER Experiment Name: At_Germinating_Seeds_P Parameter: Tissue Value: Germinating Seeds
  misc_feature: MA Experiment ID: 20000794 Result: Up-regulated in Transcription
  misc_feature: MA Experiment 20000794 PARAMETER Experiment Name: At_Petals_P Parameter: Age (day) Value: 23-25 days
  misc_feature: MA Experiment 20000794 PARAMETER Experiment Name: At_Petals_P Parameter: Plant Line Value: WS
  misc_feature: MA Experiment 20000794 PARAMETER Experiment Name: At_Petals_P Parameter: Tissue Value: Petals vs. Whole plant
  misc_feature: MA Experiment ID: 20001556 Result: Down-regulated in Transcription
  misc_feature: MA Experiment 20001556 PARAMETER Experiment Name: At_Drought_Soil_Dry_P Parameter: Age (day) Value: 26
  misc_feature: MA Experiment 20001556 PARAMETER Experiment Name: At_Drought_Soil_Dry_P Parameter: Organism Value: A. thaliana
  misc_feature: MA Experiment 20001556 PARAMETER Experiment Name: At_Drought_Soil_Dry_P Parameter: Plant Line Value: WS
  misc_feature: MA Experiment 20001556 PARAMETER Experiment Name: At_Drought_Soil_Dry_P Parameter: Post Timepoint (hr) Value: None
  misc_feature: MA Experiment 20001556 PARAMETER Experiment Name: At_Drought_Soil_Dry_P Parameter: Post-Treatment Value: None
  misc_feature: MA Experiment 20001556 PARAMETER Experiment Name: At_Drought_Soil_Dry_P Parameter: Timepoint (day) Value: 12
  misc_feature: MA Experiment 20001556 PARAMETER Experiment Name: At_Drought_Soil_Dry_P Parameter: Treatment Value: Drought vs. No Drought
  misc_feature: MA Experiment ID: 20001558 Result: Down-regulated in Transcription
  misc_feature: MA Experiment 20001558 PARAMETER Experiment Name: At_Drought_Soil_Dry_P Parameter: Age (day) Value: 27
  misc_feature: MA Experiment 20001558 PARAMETER Experiment Name: At_Drought_Soil_Dry_P Parameter: Organism Value: A. thaliana
  misc_feature: MA Experiment 20001558 PARAMETER Experiment Name: At_Drought_Soil_Dry_P Parameter: Plant Line Value: WS
  misc_feature: MA Experiment 20001558 PARAMETER Experiment Name: At_Drought_Soil_Dry_P Parameter: Post Timepoint (hr) Value: 6
  misc_feature: MA Experiment 20001558 PARAMETER Experiment Name: At_Drought_Soil_Dry_P Parameter: Post-Treatment Value: Re-Water vs. No Drought
  misc_feature: MA Experiment 20001558 PARAMETER Experiment Name: At_Drought_Soil_Dry_P Parameter: Timepoint (day) Value: 13
  misc_feature: MA Experiment 20001558 PARAMETER Experiment Name: At_Drought_Soil_Dry_P Parameter: Treatment Value: Drought vs. No Drought
  misc_feature: MA Experiment ID: 20001560 Result: Down-regulated in Transcription
  misc_feature: MA Experiment 20001560 PARAMETER Experiment Name: At_Drought_Soil_Dry_P Parameter: Age (day) Value: 28
  misc_feature: MA Experiment 20001560 PARAMETER Experiment Name: At_Drought_Soil_Dry_P Parameter: Organism Value: A. thaliana
  misc_feature: MA Experiment 20001560 PARAMETER Experiment Name: At_Drought_Soil_Dry_P Parameter: Plant Line Value: WS
  misc_feature: MA Experiment 20001560 PARAMETER Experiment Name: At_Drought_Soil_Dry_P Parameter: Post Timepoint (hr) Value: None
  misc_feature: MA Experiment 20001560 PARAMETER Experiment Name: At_Drought_Soil_Dry_P Parameter: Post-Treatment Value: None
  misc_feature: MA Experiment 20001560 PARAMETER Experiment Name: At_Drought_Soil_Dry_P Parameter: Timepoint (day) Value: 14
  misc_feature: MA Experiment 20001560 PARAMETER Experiment Name: At_Drought_Soil_Dry_P Parameter: Treatment Value: Drought vs. No Drought
  misc_feature: MA Experiment ID: 20001905 Result: Down-regulated in Transcription
  misc_feature: MA Experiment 20001905 PARAMETER Experiment Name: At_Drought_Reproduction_P Parameter: Age (day) Value: 40
  misc_feature: MA Experiment 20001905 PARAMETER Experiment Name: At_Drought_Reproduction_P Parameter: Organism Value: A. thaliana
  misc_feature: MA Experiment 20001905 PARAMETER Experiment Name: At_Drought_Reproduction_P Parameter: Plant Line Value: WS
  misc_feature: MA Experiment 20001905 PARAMETER Experiment Name: At_Drought_Reproduction_P Parameter: Timepoint (day) Value: 10
  misc_feature: MA Experiment 20001905 PARAMETER Experiment Name: At_Drought_Reproduction_P Parameter: Tissue Value: Rosettes
  misc_feature: MA Experiment 20001905 PARAMETER Experiment Name: At_Drought_Reproduction_P Parameter: Treatment Value: Drought vs. No Drought
  misc_feature: MA Experiment ID: 20001911 Result: Down-regulated in Transcription
  misc_feature: MA Experiment 20001911 PARAMETER Experiment Name: At_Drought_Reproduction_P Parameter: Age (day) Value: 40
  misc_feature: MA Experiment 20001911 PARAMETER Experiment Name: At_Drought_Reproduction_P Parameter: Organism Value: A. thaliana
  misc_feature: MA Experiment 20001911 PARAMETER Experiment Name: At_Drought_Reproduction_P Parameter: Plant Line Value: WS
  misc_feature: MA Experiment 20001911 PARAMETER Experiment Name: At_Drought_Reproduction_P Parameter: Timepoint (day) Value: 10
  misc_feature: MA Experiment 20001911 PARAMETER Experiment Name: At_Drought_Reproduction_P Parameter: Tissue Value: Flowers
  misc_feature: MA Experiment 20001911 PARAMETER Experiment Name: At_Drought_Reproduction_P Parameter: Treatment Value: Drought vs. No Drought

SEQ ID NO: 50874 - protein, 274 aa, Arabidopsis thaliana; identical to SEQ ID NO: 30943
  peptide (1)..(274): Ceres Seq. ID no. 13490167
  misc_feature (61)..(130): Pfam Name: linker histone H1 and H5 family Pfam Description: linker histone H1 and H5 family
  misc_feature (61)..(130): Pfam Name: linker histone H1 and H5 family Pfam Description: linker histone H1 and H5 family
  misc_feature (1)..(271): Homolog of NCBI NO: 2623960 NR Description: histone H1 [Apium graveolens]
  misc_feature (12)..(274): Homolog of NCBI NO: 13540393 NR Description: histone H1 [Pisum sativum]
  misc_feature (10)..(274): Homolog of NCBI NO: 28301619 NR Description: histone H1 [Pisum sativum]
  misc_feature (25)..(271): Homolog of NCBI NO: 6681423 NR Description: histone H1 [Nicotiana tabacum]
  misc_feature (10)..(274): Homolog of NCBI NO: 29469895 NR Description: histone H1 subtype 5 [Pisum sativum]
  misc_feature (1)..(271): Homolog of NCBI NO: 2623960 NR Description: histone H1 [Apium graveolens]
  misc_feature (10)..(274): Homolog of NCBI NO: 28301619 NR Description: histone H1 [Pisum sativum]
  misc_feature (10)..(274): Homolog of NCBI NO: 29469895 NR Description: histone H1 subtype 5 [Pisum sativum]
  misc_feature (1)..(274): Homolog of NCBI NO: 15222199 NR Description: histone H1, putative [Arabidopsis thaliana]
  misc_feature (33)..(274): Homolog of NCBI NO: 16314 NR Description: histone H1-1 [Arabidopsis thaliana]
  misc_feature (4)..(274): Homolog of NCBI NO: 15224536 NR Description: histone H1 [Arabidopsis thaliana]
  misc_feature (25)..(271): Homolog of NCBI NO: 1084419 NR Description: histone H1 - common tobacco
  misc_feature (22)..(269): Homolog of NCBI NO: 121953 NR Description: HISTONE H1
  misc_feature (25)..(271): Homolog of NCBI NO: 6681423 NR Description: histone H1 [Nicotiana tabacum]
  misc_feature (12)..(274): Homolog of NCBI NO: 13540393 NR Description: histone H1 [Pisum sativum]
  misc_feature (22)..(269): Homolog of NCBI NO: 121953 NR Description: HISTONE H1
  misc_feature (25)..(271): Homolog of NCBI NO: 1084419 NR Description: histone H1 - common tobacco
  misc_feature (4)..(274): Homolog of NCBI NO: 15224536 NR Description: histone H1 [Arabidopsis thaliana]
  misc_feature (33)..(274): Homolog of NCBI NO: 16314 NR Description: histone H1-1 [Arabidopsis thaliana]
  misc_feature (1)..(274): Homolog of NCBI NO: 15222199 NR Description: histone H1, putative [Arabidopsis thaliana]

SEQ ID NO: 50875 - protein, 207 aa, Arabidopsis thaliana; identical to SEQ ID NO: 30944
  peptide (1)..(207): Ceres Seq. ID no. 13490168
  misc_feature (1)..(63): Pfam Name: linker histone H1 and H5 family Pfam Description: linker histone H1 and H5 family
  misc_feature (1)..(63): Pfam Name: linker histone H1 and H5 family Pfam Description: linker histone H1 and H5 family
  misc_feature (1)..(204): Homolog of NCBI NO: 2623960 NR Description: histone H1 [Apium graveolens]
  misc_feature (1)..(207): Homolog of NCBI NO: 13540393 NR Description: histone H1 [Pisum sativum]
  misc_feature (1)..(207): Homolog of NCBI NO: 28301619 NR Description: histone H1 [Pisum sativum]
  misc_feature (1)..(204): Homolog of NCBI NO: 6681423 NR Description: histone H1 [Nicotiana tabacum]
  misc_feature (1)..(207): Homolog of NCBI NO: 29469895 NR Description: histone H1 subtype 5 [Pisum sativum]
  misc_feature (1)..(204): Homolog of NCBI NO: 2623960 NR Description: histone H1 [Apium graveolens]
  misc_feature (1)..(207): Homolog of NCBI NO: 28301619 NR Description: histone H1 [Pisum sativum]
  misc_feature (1)..(207): Homolog of NCBI NO: 29469895 NR Description: histone H1 subtype 5 [Pisum sativum]
  misc_feature (1)..(207): Homolog of NCBI NO: 15222199 NR Description: histone H1, putative [Arabidopsis thaliana]
  misc_feature (1)..(207): Homolog of NCBI NO: 16314 NR Description: histone H1-1 [Arabidopsis thaliana]
  misc_feature (1)..(207): Homolog of NCBI NO: 15224536 NR Description: histone H1 [Arabidopsis thaliana]
  misc_feature (1)..(204): Homolog of NCBI NO: 1084419 NR Description: histone H1 - common tobacco
  misc_feature (1)..(202): Homolog of NCBI NO: 121953 NR Description: HISTONE H1
  misc_feature (1)..(204): Homolog of NCBI NO: 6681423 NR Description: histone H1 [Nicotiana tabacum]
  misc_feature (1)..(207): Homolog of NCBI NO: 13540393 NR Description: histone H1 [Pisum sativum]
  misc_feature (1)..(202): Homolog of NCBI NO: 121953 NR Description: HISTONE H1
  misc_feature (1)..(204): Homolog of NCBI NO: 1084419 NR Description: histone H1 - common tobacco
  misc_feature (1)..(207): Homolog of NCBI NO: 15224536 NR Description: histone H1 [Arabidopsis thaliana]
  misc_feature (1)..(207): Homolog of NCBI NO: 16314 NR Description: histone H1-1 [Arabidopsis thaliana]
  misc_feature (1)..(207): Homolog of NCBI NO: 15222199 NR Description: histone H1, putative [Arabidopsis thaliana]

SEQ ID NO: 50876 - DNA, 935 bp, Arabidopsis thaliana
  misc_feature (1)..(935): Ceres Seq. ID no. 13487308
  misc_feature: Phenotype: WHOLE PLANT Size-Small
  misc_feature: Phenotype: INFLORESCENCE Strength-Weak
  misc_feature: Phenotype: ROSETTE LEAVES Curled-Curled 5
  misc_feature: Phenotype: WHOLE PLANT Size-Small
  misc_feature: Phenotype: INFLORESCENCE Strength-Weak
  misc_feature: Phenotype: ROSETTE LEAVES Curled-Curled 5
  misc_feature: Phenotype: WHOLE PLANT Size-Small
  misc_feature: Phenotype: INFLORESCENCE Strength-Weak
  misc_feature: Phenotype: ROSETTE LEAVES Curled-Curled 5
  misc_feature: Phenotype: WHOLE PLANT Size-Small
  misc_feature: Phenotype: INFLORESCENCE Strength-Weak
  misc_feature: Phenotype: ROSETTE LEAVES Curled-Curled 5
  misc_feature: Phenotype: WHOLE PLANT Size-Small
  misc_feature: Phenotype: INFLORESCENCE Strength-Weak
  misc_feature: Phenotype: ROSETTE LEAVES Curled-Curled 5
  misc_feature: Phenotype: WHOLE PLANT Size-Small
  misc_feature: Phenotype: INFLORESCENCE Strength-Weak
  misc_feature: Phenotype: ROSETTE LEAVES Curled-Curled 5
  misc_feature: Phenotype: WHOLE PLANT Size-Small
  misc_feature: Phenotype: INFLORESCENCE Strength-Weak
  misc_feature: Phenotype: ROSETTE LEAVES Curled-Curled 5
  misc_feature: Phenotype: WHOLE PLANT Size-Small
  misc_feature: Phenotype: INFLORESCENCE Strength-Weak
  misc_feature: Phenotype: ROSETTE LEAVES Curled-Curled 5
  misc_feature: Phenotype: WHOLE PLANT Size-Small
  misc_feature: Phenotype: INFLORESCENCE Strength-Weak
  misc_feature: Phenotype: ROSETTE LEAVES Curled-Curled 5
  misc_feature: Phenotype: WHOLE PLANT Size-Small
  misc_feature: Phenotype: INFLORESCENCE Strength-Weak
atcttttgggagaggagaaagaaaaagaaaatgggaagagggagagtagaattgaagaggatagagaacaagatcaataggcaagtgacgtttgcaaagagaaggaatggtcttttgaagaaagcatacgagctttcagttctatgtgatgcagaagttgctctcatcatcttctcaaatagaggaaagctgtacgagttttgcagtagttcgagcatgcttcggacactggagaggtaccaaaagtgtaactatggagcaccagaacccaatgtgccttcaagagaggccttagcagttgaacttagtagccagcaggagtatctcaagcttaaggagcgttatgacgccttacaaagaacccaaaggaatctgttgggagaagatcttggacctctaagtacaaaggagcttgagtcacttgagagacagcttgattcttccttgaagcagatcagagctctcaggacacagtttatgcttgaccagctcaacgatcttcagagtaaggaacgcatgctgactgagacaaataaaactctaagactaaggttagctgatgggtatcagatgccactccagctgaaccctaaccaagaagaggttgatcactacggtcgtcatcatcatcaacaacaacaacactcccaagctttcttccagcctttggaatgtgaacccattcttcagatcgggtatcaggggcaacaagatggaatgggagcaggaccaagtgtgaataattacatgttgggttggttaccttatgacaccaactctatttgaatctttctcacttaatcaatccctctcttttttttttgacatttttaagatgatgtttctattttattacctctctcatgttttctgtcttgtgtgcatgtgtgtgtgtaatgtttatgcccttctattattcaataattttttcgact

SEQ ID NO: 50877 - protein, 261 aa, Arabidopsis thaliana
  peptide (1)..(261): Ceres Seq. ID no. 13487309
  misc_feature (85)..(187): Pfam Name: K-box region Pfam Description: K-box region
  misc_feature (11)..(255): Homolog of NCBI NO: 7446511 NR Description: MADS box protein DEFH200 - garden snapdragon
  misc_feature (11)..(254): Homolog of NCBI NO: 30314024 NR Description: SEP3-related MADS-box protein; PTM6 [Populus
  misc_feature (11)..(255): Homolog of NCBI NO: 1345965 NR Description: Agamous-like MADS box protein AGL9 homolog
  misc_feature (11)..(255): Homolog of NCBI NO: 5070138 NR Description: MADS-box protein MADS3 [Nicotiana sylvestris]
  misc_feature (11)..(255): Homolog of NCBI NO: 7446516 NR Description: MADS box protein - garden pea
  misc_feature (11)..(255): Homolog of NCBI NO: 31747210 NR Description: MADS-box protein 5 [Lycopersicon esculentum]
  misc_feature (11)..(255): Homolog of NCBI NO: 20385588 NR Description: MADS-box protein 4 [Vitis vinifera]
  misc_feature (11)..(261): Homolog of NCBI NO: 3912986 NR Description: Agamous-like MADS box protein AGL9 homolog (MADS
  misc_feature (11)..(261): Homolog of NCBI NO: 30688808 NR Description: MADS-box protein [Arabidopsis thaliana]
  misc_feature (11)..(261): Homolog of NCBI NO: 22329771 NR Description: MADS-box protein [Arabidopsis thaliana]
IFWERRKKKKMGRGRVELKRIENKINRQVTFAKRRNGLLKKAYELSVLCDAEVALIIFSNRGKLYEFCSSSSMLRTLERYQKCNYGAPEPNVPSREALAVELSSQQEYLKLKERYDALQRTQRNLLGEDLGPLSTKELESLERQLDSSLKQIRALRTQFMLDQLNDLQSKERMLTETNKTLRLRLADGYQMPLQLNPNQEEVDHYGRHHHQQQQHSQAFFQPLECEPILQIGYQGQQDGMGAGPSVNNYMLGWLPYDTNSI

SEQ ID NO: 50878 - protein, 251 aa, Arabidopsis thaliana
  peptide (1)..(251): Ceres Seq. ID no. 13487310
  misc_feature (75)..(177): Pfam Name: K-box region Pfam Description: K-box region
  misc_feature (1)..(245): Homolog of NCBI NO: 7446511 NR Description: MADS box protein DEFH200 - garden snapdragon
  misc_feature (1)..(244): Homolog of NCBI NO: 30314024 NR Description: SEP3-related MADS-box protein; PTM6 [Populus
  misc_feature (1)..(245): Homolog of NCBI NO: 1345965 NR Description: Agamous-like MADS box protein AGL9 homolog
  misc_feature (1)..(245): Homolog of NCBI NO: 5070138 NR Description: MADS-box protein MADS3 [Nicotiana sylvestris]
  misc_feature (1)..(245): Homolog of NCBI NO: 7446516 NR Description: MADS box protein - garden pea
  misc_feature (1)..(245): Homolog of NCBI NO: 31747210 NR Description: MADS-box protein 5 [Lycopersicon esculentum]
  misc_feature (1)..(245): Homolog of NCBI NO: 20385588 NR Description: MADS-box protein 4 [Vitis vinifera]
  misc_feature (1)..(251): Homolog of NCBI NO: 3912986 NR Description: Agamous-like MADS box protein AGL9 homolog (MADS
  misc_feature (1)..(251): Homolog of NCBI NO: 30688808 NR Description: MADS-box protein [Arabidopsis thaliana]
  misc_feature (1)..(251): Homolog of NCBI NO: 22329771 NR Description: MADS-box protein [Arabidopsis thaliana]
MGRGRVELKRIENKINRQVTFAKRRNGLLKKAYELSVLCDAEVALIIFSNRGKLYEFCSSSSMLRTLERYQKCNYGAPEPNVPSREALAVELSSQQEYLKLKERYDALQRTQRNLLGEDLGPLSTKELESLERQLDSSLKQIRALRTQFMLDQLNDLQSKERMLTETNKTLRLRLADGYQMPLQLNPNQEEVDHYGRHHHQQQQHSQAFFQPLECEPILQIGYQGQQDGMGAGPSVNNYMLGWLPYDTNSI

SEQ ID NO: 50879 - protein, 189 aa, Arabidopsis thaliana
  peptide (1)..(189): Ceres Seq. ID no. 13487311
  misc_feature (13)..(115): Pfam Name: K-box region Pfam Description: K-box region
  misc_feature (1)..(183): Homolog of NCBI NO: 7446511 NR Description: MADS box protein DEFH200 - garden snapdragon
  misc_feature (1)..(182): Homolog of NCBI NO: 30314024 NR Description: SEP3-related MADS-box protein; PTM6 [Populus
  misc_feature (1)..(183): Homolog of NCBI NO: 1345965 NR Description: Agamous-like MADS box protein AGL9 homolog
  misc_feature (1)..(183): Homolog of NCBI NO: 5070138 NR Description: MADS-box protein MADS3 [Nicotiana sylvestris]
  misc_feature (1)..(183): Homolog of NCBI NO: 7446516 NR Description: MADS box protein - garden pea
  misc_feature (1)..(183): Homolog of NCBI NO: 31747210 NR Description: MADS-box protein 5 [Lycopersicon esculentum]
  misc_feature (1)..(183): Homolog of NCBI NO: 20385588 NR Description: MADS-box protein 4 [Vitis vinifera]
  misc_feature (1)..(189): Homolog of NCBI NO: 3912986 NR Description: Agamous-like MADS box protein AGL9 homolog (MADS
  misc_feature (1)..(189): Homolog of NCBI NO: 30688808 NR Description: MADS-box protein [Arabidopsis thaliana]
  misc_feature (1)..(189): Homolog of NCBI NO: 22329771 NR Description: MADS-box protein [Arabidopsis thaliana]
MLRTLERYQKCNYGAPEPNVPSREALAVELSSQQEYLKLKERYDALQRTQRNLLGEDLGPLSTKELESLERQLDSSLKQIRALRTQFMLDQLNDLQSKERMLTETNKTLRLRLADGYQMPLQLNPNQEEVDHYGRHHHQQQQHSQAFFQPLECEPILQIGYQGQQDGMGAGPSVNNYMLGWLPYDTNSI

SEQ ID NO: 50880 - DNA, 674 bp, Arabidopsis thaliana
  misc_feature (1)..(674): Ceres Seq. ID no. 12559599
  misc_feature: Phenotype: ROSETTE LEAVES Shape-Lanceolate
  misc_feature: Phenotype: ROSETTE LEAVES Shape-Serrate
  misc_feature: Phenotype: ROSETTE LEAVES Shape-Serrate
  misc_feature: Phenotype: ROSETTE LEAVES Shape-Serrate
aacataaattaagtttttttttgtccttttctgcctttacctttccttctactcccgaaaaagcactgactttgctctgtttccttcgttcacacagagaaagagagaaatcttctgagcgaaattctgacaaaagagatgatggaatgggataatcagctacaacccaataaccatcactcttctaatcttcaagggatcgacgttaatggcggctccggcgccggaggaggaatgtacgtgaaggtgatgaccgatgagcagtatgaaactctcaggaaacagattgctatttacggcaccatttgtgagcgtcttgttgagatgcataaaactctcactgctcaacaagatcttgcaggagggagaatgggaggactatatgcagaccccaatgatgtcatctttaggtcataagatgacagctagacagaggtggactcctacgccagtccagcttcagattctggaacgtatattcgatcaaggcacgggaacncccgagcaagcagaagatcaaagacataacagaagagcttgagcccacacgggcagattgnttgaacaaaatgnctataactgggttccagaacccgacgtgctcgatccaaganggaagcagcatgggngganggtctttcttggaaaaaaaataaatggggaagtctgaggta

SEQ ID NO: 50881 - protein, 94 aa, Arabidopsis thaliana
  peptide (1)..(94): Ceres Seq. ID no. 12559600
  misc_feature (41)..(94): Homolog of NCBI NO: 15218015 NR Description: homeodomain protein; protein id: At1g20710.1
  misc_feature (46)..(94): Homolog of NCBI NO: 30686974 NR Description: homeodomain protein PALE-2, putative [Arabidopsis
  misc_feature (46)..(94): Homolog of NCBI NO: 40233067 NR Description: homeodomain protein HB1 [Populus tomentosa]
  misc_feature (46)..(94): Homolog of NCBI NO: 3955019 NR Description: HB1 homeodomain protein [Populus tremula x
  misc_feature (46)..(94): Homolog of NCBI NO: 34909272 NR Description: putative HB2 homeodomain protein
  misc_feature (46)..(94): Homolog of NCBI NO: 15237035 NR Description: homeodomain - like protein
  misc_feature (81)..(81): Xaa is any aa, unknown or other
MSSMKLSGNRLLFTAPFVSVLLRCIKLSLLNKILQEGEWEDYMQTPMMSSLGHKMTARQRWTPTPVQLQILERIFDQGTGXPEQAEDQRHNRRA

SEQ ID NO: 50882 - protein, 92 aa, Arabidopsis thaliana
  peptide (1)..(92): Ceres Seq. ID no. 12559601
  misc_feature (2)..(92): Homolog of NCBI NO: 40233087 NR Description: homeodomain protein HB2 [Populus tomentosa]
  misc_feature (2)..(92): Homolog of NCBI NO: 3955021 NR Description: HB2 homeodomain protein [Populus tremula x
  misc_feature (30)..(85): Homolog of NCBI NO: 40233067 NR Description: homeodomain protein HB1 [Populus tomentosa]
  misc_feature (30)..(85): Homolog of NCBI NO: 3955019 NR Description: HB1 homeodomain protein [Populus tremula x
  misc_feature (2)..(85): Homolog of NCBI NO: 34909272 NR Description: putative HB2 homeodomain protein
  misc_feature (1)..(85): Homolog of NCBI NO: 15237035 NR Description: homeodomain - like protein
MMEWDNQLQPNNHHSSNLQGIDVNGGSGAGGGMYVKVMTDEQYETLRKQIAIYGTICERLVEMHKTLTAQQDLAGGRMGGLYADPNDVIFRS

SEQ ID NO: 50883 - protein, 91 aa, Arabidopsis thaliana
  peptide (1)..(91): Ceres Seq. ID no. 12559602
  misc_feature (1)..(91): Homolog of NCBI NO: 40233087 NR Description: homeodomain protein HB2 [Populus tomentosa]
  misc_feature (1)..(91): Homolog of NCBI NO: 3955021 NR Description: HB2 homeodomain protein [Populus tremula x
  misc_feature (29)..(84): Homolog of NCBI NO: 40233067 NR Description: homeodomain protein HB1 [Populus tomentosa]
  misc_feature (29)..(84): Homolog of NCBI NO: 3955019 NR Description: HB1 homeodomain protein [Populus tremula x
  misc_feature (1)..(84): Homolog of NCBI NO: 34909272 NR Description: putative HB2 homeodomain protein
  misc_feature (1)..(84): Homolog of NCBI NO: 15237035 NR Description: homeodomain - like protein
MEWDNQLQPNNHHSSNLQGIDVNGGSGAGGGMYVKVMTDEQYETLRKQIAIYGTICERLVEMHKTLTAQQDLAGGRMGGLYADPNDVIFRS

SEQ ID NO: 50884 - DNA, 807 bp, Glycine max
  misc_feature (1)..(807): Ceres Seq. ID no. 12608801
taccgggccccccctcgaggtcgacggtatcgataagcttttttttttttttttttgcagttcaagaccttaattggtattaccacacgagtacagtgtcatgtagtgcactacggaatagtggccagctgcaacgagcatggaatgcttattcaggtttttgatggtcaaccgtgcggtaattagagggcagcaatgcactcaatctcaatccttgcgttcagtggcagagctgcgacttggtaggtcgagcgcgccggtgcaggggctggaaaatatttagcataaatctcgttcacgttcttgaaatcctgtaggtccgctaacatgattgttgtcttgacaactgatgagtagctagcaccacttgctttcaatatttcacccatgttcttcataacctgctcagtttgctcctccacgctttcagagacaaacttccctgtctcaggatttaggccaagaacgcccgagacaaacacaagattgtttgcttttatcgcctgagagtaggggcctagtgctgctggcgccttctccgtctgaacagcctccttttgaacggtggcggaggtggcgagggacgcggcgacggggccgaagcggcggcgcccggcgaaggagacggaggcggcggcggctgctgagaagggcaggcggatctcggcggccggggaggcggcgaacctggagacggcggcggcggcgctccacgccatggctaaaaccctactctaccaactacgagcacgggacggcagaagattggattgtgttgctctctgctgggatggagccgagtttttt

SEQ ID NO: 50885 - protein, 53 aa, Glycine max
  peptide (1)..(53): Ceres Seq. ID no. 12608802
PGPPSRSTVSISFFFFFFAVQDLNWYYHTSTVSCSALRNSGQLQRAWNAYSGF

SEQ ID NO: 50886 - protein, 47 aa, Glycine max
  peptide (1)..(47): Ceres Seq. ID no. 12608803
MECLFRFLMVNRAVIRGQQCTQSQSLRSVAELRLGRSSAPVQGLENI

SEQ ID NO: 50887 - protein, 39 aa, Glycine max
  peptide (1)..(39): Ceres Seq. ID no. 12608804
MFFITCSVCSSTLSETNFPVSGFRPRTPETNTRLFAFIA

SEQ ID NO: 50888 - DNA, 868 bp, Glycine max
  misc_feature (1)..(868): Ceres Seq. ID no. 13594457
aacttaaccttcaaaaatattataattaagacaaattacattcaagtaattaacatgatagtcacgatacccaaaatgattttatacatgtcctccaaactatgagcattaactcatttttccttccctctataaccaaagtaataataattagagtagcaaatcatacacaaatcaaaaactagatttgaaactgcaagttacacgaacatccacgatggctattgcatgggtaaggtgccccgggcagaccttatacatttttagcatgaaaccaaattatgcctgcttatgaatcctccttcaattcatccgaatcagagtcacttgcattataacctgggtgcttatcacctactttccaaaccgaagacctagtccttgatgctttggtcagccaaactcttcccttctgagcatctcttggaaccccataaccaccgtagtacatctgacccaccaacacttgcatgtttatgtcccctgccttagcctctttcagtgcatctctgaaccaccgcttcacacaatctgccaccacctctgaaagtgccacgcgttcactcctctctcccccaacggaactctccataacccctttcagccactttcaacttcaacgtggtttcagtgttcaagtttcgatctttctttcacccctttttgtgagagccctttatattggggtggatttgagtcttcggcgatgctatttgaagatcatttttggtttcaatgctgaggatttgaaacgaaaaaattcaaatattcagaaagagacgcagaaagagaaagaggaagagagaatgagaaatttaaagggaaaaaatgaagaggtttagagaggaggagaaggagtaagaaaagc

SEQ ID NO: 50889 - protein, 123 aa, Glycine max
  peptide (1)..(123): Ceres Seq. ID no. 13594458
MFMSPALASFSASLNHRFTQSATTSESATRSLLSPPTELSITPFSHFQLQRGFSVQVSIFLSPLFVRALYIGVDLSLRRCYLKIIFGFNAEDLKRKNSNIQKETQKEKEEERMRNLKGKNEEV

SEQ ID NO: 50890 - protein, 121 aa, Glycine max
  peptide (1)..(121): Ceres Seq. ID no. 13594459
MSPALASFSASLNHRFTQSATTSESATRSLLSPPTELSITPFSHFQLQRGFSVQVSIFLSPLFVRALYIGVDLSLRRCYLKIIFGFNAEDLKRKNSNIQKETQKEKEEERMRNLKGKNEEV

SEQ ID NO: 50891 - DNA, 1054 bp, Glycine max
  misc_feature (1)..(1054): Ceres Seq. ID no. 12608889
agagcatagcaattgctacccaatgaatatgtataatcgtgttgaatggattatcacacaatcagttttcattatttccccggtcaaaatcccctttttcagggctcaaaattaccactccaattacaacagcttcaattgaatcatgctgcagagattccccaactcatcgcattcggacaatcaaatctatctatgcctcaatcccacgcacccgagatctaaatcgtaaagcaaaaaaagcaaatcttacgagtttgctttggctccatccaccgcaaccgccgcgttctcctcggcggcggcggcggccgcatccgcctcgatctgcttcttgttgcgctcgatggcctcgccgacctccttgggcatgtacttctcgtcgtgcttggcgagcacctccgtgccgcgcaagaagcactggccctccagcgccttatcggagacctttctccccgcccagtcgcggcggaggtcgtcggtcagcggcttgaggaacccctcgacgacgacggagtggccctcgcggaagaggtcgggcagggcgccctcgtagcggacgagcacgtcggtgacgaggtcggtgacgacgaactcgatctcggagttggaggaggaggggtgggcgacggagccctcgaggacgagcccgccgaggcggcagcgggtcttggaggggtcggtggcgaagcgcgcgagcgcgtcggtgggggtgaggtagaagacgagctggtcctggaacgtggcgagcacggtgaccacgaacccggccgcgcagccgaaggtgagcgcgtaggtccagaggcgccggctctgcagctgccgcgcccgcgcgccgatgtccgccgcgcgctgccgcggggcgcccggcccggcccgcctcgtcgcggagaagaagcgcgcgggctggagggtgtgggcgaacggggaggtggtcgcggcggcggggccggtggcgcgcgcggcggggatcggggtcggggtgtggaggagggcggagaggaggcggcgggaggggagaaggcgcgagaaggccatggggacggtgggatct

SEQ ID NO: 50892 - protein, 72 aa, Glycine max
  peptide (1)..(72): Ceres Seq. ID no. 12608890
MSAARCRGAPGPARLVAEKKRAGWRVWANGEVVAAAGPVARAAGIGVGVWRRAERRRREGRRREKAMGTVGS

SEQ ID NO: 50893 - protein, 69 aa, Glycine max
  peptide (1)..(69): Ceres Seq. ID no. 12608891
MASPTSLGMYFSSCLASTSVPRKKHWPSSALSETFLPAQSRRRSSVSGLRNPSTTTEWPSRKRSGRAPS

SEQ ID NO: 50894 - protein, 61 aa, Glycine max
  peptide (1)..(61): Ceres Seq. ID no. 12608892
MYFSSCLASTSVPRKKHWPSSALSETFLPAQSRRRSSVSGLRNPSTTTEWPSRKRSGRAPS

SEQ ID NO: 50895 - protein, 59 aa, Glycine max
  peptide (1)..(59): Ceres Seq. ID no. 12608893
MDYHTISFHYFPGQNPLFQGSKLPLQLQQLQLNHAAEIPQLIAFGQSNLSMPQSHAPEI

SEQ ID NO: 50896 - DNA, 624 bp, Glycine max
  misc_feature (1)..(624): Ceres Seq. ID no. 15172954
atcatcacacaactgtgatgtaaggcaattctgcattcatttatgtatgtaatatttgcttgwgatgcatttctcagtcataatttctctttttgcaggttccacatgtgaatcgcactgactatcagcttattgatatctctgaagacggctttgtgagtctgttgactgataatggaaataccaaggatgatctgaagcttcccacggatgaggcgttgctttctcagattaaagatggatttgctgaaggaaaagatcttgtggtttctgtcatgtctgcaatgggagaagaacagatctgttcgctgaaggacatcggtccaaaaaattaaaatgatgctatggctgtagctatagctgtagctatagctgatagcatgctttttcttcttatgttgctaacaggtagtatattttccgatacatgtgtgcaaaataaacttcataagatggaaatttgcctgcgcttgaaactcaaatgcttgggatagaggaaggggagctgaagtgctttttgtccattaatcaaggaacacaacggtcttgggtggatgaaattcttataaatatctcatcatttgtttttgttgagtttaatatataaccctattagttccccct

SEQ ID NO: 50897 - protein, 49 aa, Glycine max
  peptide (1)..(49): Ceres Seq. ID no. 15172955
MAVAIAVAIADSMLFLLMLLTGSIFSDTCVQNKLHKMEICLRLKLKCLG

SEQ ID NO: 50898 - protein, 41 aa, Glycine max
  peptide (1)..(41): Ceres Seq. ID no. 15172956
MLGIEEGELKCFLSINQGTQRSWVDEILINISSFVFVEFNI

SEQ ID NO: 50899 - protein, 37 aa, Glycine max
  peptide (1)..(37): Ceres Seq. ID no. 15172957
MLFLLMLLTGSIFSDTCVQNKLHKMEICLRLKLKCLG

SEQ ID NO: 50900 - DNA, 664 bp, Glycine max
  misc_feature (1)..(664): Ceres Seq. ID no. 13581889
ggcagaaaatatgcgtgatcccatttatcaaaccagagatttgaacatttgatggcatccattagaaatacaaggagggaaacataaggaggagcagacaactacagagtcataaacatctagcgggattcaagggcagctgacacagggcggatacagagcctaggcgcgctccccgcggatgcggcgggcgagctggatgtccttgggcatgatggtgacgcgcttggcgtggatggcgcacaggttggtgtcctcgaacagccccaccaggtacgcctcggcggcctcctggagcgcggagacggcggaggactggaagcggaggtcggtcttgaagtcctgggcgatctcccggacgaggcgctggaaggggagcttgcggatgagcagctccgtgctcttctggtacttgcggatctcacggagcgcgacggttcccgggcggaagcggtggggcttcttgacgccgccggtggccggcgccgacttgcgcgccgccttggtggcgagctgcttcctgggcgccttgccgccggtggacttgcgggcagtctgcttggtgcgggccatcggagctgcgggaggcgggcggcggcgagggatgggctgctgctgcggtttggagatggagatggagactgagattgagatttttcgcggt

SEQ ID NO: 50901 - protein, 161 aa, Glycine max
  peptide (1)..(161): Ceres Seq. ID no. 13581890
MRRASWMSLGMMVTRLAWMAHRLVSSNSPTRYASAASWSAETAEDWKRRSVLKSWAISRTRRWKGSLRMSSSVLFWYLRISRSATVPGRKRWGFLTPPVAGADLRAALVASCFLGALPPVDLRAVCLVRAIGAAGGGRRRGMGCCCGLEMEMETEIEIFRG

SEQ ID NO: 50902 - protein, 155 aa, Glycine max
  peptide (1)..(155): Ceres Seq. ID no. 13581891
MSLGMMVTRLAWMAHRLVSSNSPTRYASAASWSAETAEDWKRRSVLKSWAISRTRRWKGSLRMSSSVLFWYLRISRSATVPGRKRWGFLTPPVAGADLRAALVASCFLGALPPVDLRAVCLVRAIGAAGGGRRRGMGCCCGLEMEMETEIEIFRG

SEQ ID NO: 50903 - protein, 151 aa, Glycine max
  peptide (1)..(151): Ceres Seq. ID no. 13581892
MMVTRLAWMAHRLVSSNSPTRYASAASWSAETAEDWKRRSVLKSWAISRTRRWKGSLRMSSSVLFWYLRISRSATVPGRKRWGFLTPPVAGADLRAALVASCFLGALPPVDLRAVCLVRAIGAAGGGRRRGMGCCCGLEMEMETEIEIFRG

SEQ ID NO: 50904 - DNA, 718 bp, Glycine max
  misc_feature (1)..(718): Ceres Seq. ID no. 14316124
atacttacacatctcttaaactctatacgataatttaaaaaactagactatgaatctctacttccatctggatctcttgaagatcatgagggatagagagaggagatttacgtaccgatctgatgagatcgaggttgagttcatcgggacggagcaacatatcggcgctatgattccggtaaaacataaattcccgatcaccgtcggccttcaacgtcacgaacgccaaggcggttctggctccggtatcgaagttgatcccctgatcagcgacgccgtttttcctcaggatcccagccaacatgtgtccgaactcgtcgtcgccgagttttacgatgaaggcggatcgtccaccgaggcaagaaacggtgatggcgacgatagccggagcgccgccgggagctttgaggaaacctggagcctcggcgagggagacgcgggattcggtggggacgaagtcgatgagcatcacgccgaagctgacgaagtcggtgggggggggctgtccaataccaaaccgacacgtcagggattcttaccagttctaaaaagcccaagttaagcagcggtcccatcttttttttgggcttttccaattatttttttttcacttttgtttagaacctcttctaaaggacccccgatggaggtggtctaatatgctttgatacttttgttgcttccctccacgttacatatcagaggagcttctaagagc

SEQ ID NO: 50905 - protein, 170 aa, Glycine max
  peptide (1)..(170): Ceres Seq. ID no. 14316125
MNLYFHLDLLKIMRDRERRFTYRSDEIEVEFIGTEQHIGAMIPVKHKFPITVGLQRHERQGGSGSGIEVDPLISDAVFPQDPSQHVSELVVAEFYDEGGSSTEARNGDGDDSRSAAGSFEETWSLGEGDAGFGGDEVDEHHAEADEVGGGGLSNTKPTRQGFLPVLKSPS

SEQ ID NO: 50906 - protein, 158 aa, Glycine max
  peptide (1)..(158): Ceres Seq. ID no. 14316126
MRDRERRFTYRSDEIEVEFIGTEQHIGAMIPVKHKFPITVGLQRHERQGGSGSGIEVDPLISDAVFPQDPSQHVSELVVAEFYDEGGSSTEARNGDGDDSRSAAGSFEETWSLGEGDAGFGGDEVDEHHAEADEVGGGGLSNTKPTRQGFLPVLKSPS

SEQ ID NO: 50907 - protein, 130 aa, Glycine max
  peptide (1)..(130): Ceres Seq. ID no. 14316127
MIPVKHKFPITVGLQRHERQGGSGSGIEVDPLISDAVFPQDPSQHVSELVVAEFYDEGGSSTEARNGDGDDSRSAAGSFEETWSLGEGDAGFGGDEVDEHHAEADEVGGGGLSNTKPTRQGFLPVLKSPS

SEQ ID NO: 50908 - DNA, 1476 bp, Glycine max
  misc_feature (1)..(1476): Ceres Seq. ID no. 14315290
atgattatgctaattctgtaccttgaggtagatatcgacggcgcggtatagatcgtcgtcggattttctcgcgcctttgggaatgaggatggcgatgccgttgaatttcgagatggagagttcggcgtacgcggcgatctcagcgaggtacgagtcgacggttttggccacgcgctgcatcgtggcggagaagtcctcgttgaagttgacgccggcgttgaacaccgtcgtgcccttctccctctccacaaaaccggagataatcctcctcacgctgtccagatccaagagcctctcgccgtcgtaggagaacgtgagcacgaggaggtcgtcgacggtcacgtgctcgagaatctccgtcacgcgcttctccagctcgcgcttgcacgcgctcgacgcgcggaggtagatcgcacaccgcaagaggcagcagaggaagttgatcggaaacgcggctttctccgtcggaaagagaggaacgatagcctgcagaagctcgcgctgttcgcttcttttcgactccgaatcggagtctccggattccggtgaccggattcctcttccgccgccggagtgatccctgacgagctccctcagcgcgcgttcggtgtacgtaatcaacgctccggcgacggttaggtacttcgcgccacgctgcttcatcgcggcgatcaccttcgcgaaggaatccacgtcgagcacggcgagctcttccgtccaccagttcggcggcgactggctcggaaaattcgcctcgttgcaagccttgcagctgatgacctcaacgcagcggtcaacgacgttgacctcggcggcgaaggggagaatcttttggcaggatttgagaaccgcgacggcgctgtggagcgtggagaggccgacctgagagagaaaatcctccgtccttccggcgaggtttccgtcgcaatactcgtcggtcatctggaggaacacagcggcgcagtgcagcgccgccacgttgtgaaccgtgatctcgaagttaacgccgtaacagaacttcgccgctttctcaaaagcttctgatcctccagttaacggtcacagtcagggacacaatattcagcaataagtccgatgctaggtgcagcttgtgagaagtaaccatttgccgttttgaactcaacgcatgttcatacttcataggctatggaccgcaaagccgaaccacacggttaatccactagctagctgcttccatgcaagtgggaagtttgaaattgacatttaacaacgacagtttttttggtagctactcaaaatttttgttctgctctttgactgaggttatcttactttcttacctgtttccattttcttcaatctgcattaattttccgtttttaaacttacagaaattgattctttaaagtttaggtttaattccggcgtgtacgtagcttttcttcacataattttgcatatgggagcttggaaattaaatgatacagtttgttc

SEQ ID NO: 50909 - protein, 74 aa, Glycine max
  peptide (1)..(74): Ceres Seq. ID no. 14315291
MRMAMPLNFEMESSAYAAISARYESTVLATRCIVAEKSSLKLTPALNTVVPFSLSTKPEIILLTLSRSKSLSPS

SEQ ID NO: 50910 - protein, 72 aa, Glycine max
  peptide (1)..(72): Ceres Seq. ID no. 14315292
MAMPLNFEMESSAYAAISARYESTVLATRCIVAEKSSLKLTPALNTVVPFSLSTKPEIILLTLSRSKSLSPS

SEQ ID NO: 50911 - protein, 70 aa, Glycine max
  peptide (1)..(70): Ceres Seq. ID no. 14315293
MPLNFEMESSAYAAISARYESTVLATRCIVAEKSSLKLTPALNTVVPFSLSTKPEIILLTLSRSKSLSPS

SEQ ID NO: 50912 - DNA, 1507 bp, Glycine max
  misc_feature (1)..(1507): Ceres Seq. ID no. 15177882
gacatttcaaagtaggttatgcgctaaacagtgctttattattgcaatatgtctctgtaaactgggtttgacttttgaggttctcagtttatttatacaggtttgctctcctttttagtttgcttacgcttttttcttattgggtctttgcataaattttattaaatttatagtcaagtcccaacctaccaccataaattcttatatctccatgtatacaacatcttgcctcctggacaaaatgtattgtatgcatatcaaactatttgtacctgtttacaccaacagtgtttatttttcctgccaccattttgttttttggggtctctcttttaagttcattttctcttggtctaattgctaagaaggagctatctcgttctcaggaggacctgctgccacctgccaccatatctaattagtttttccctgcttcatctatctgaactctttattcactgtcttgatgtcttccattttatgcttttatgatctggctcttcagccactacactcacttcattgatttagacccaaccacctaaacacgaaagagtccacaggtgaaccttttctttctagctctgtttaatctctaccctctgaatccatggctaacttatagtggtagggcacagaagctattgggtctgtgttccttttcttccagatctggtaagagaagtttagtgttcgttcagttttaatgaagttaccctggttaatgattacaggggcttgattacaatgtacaaatttataaaattaccaagactcgattccaaattttaaaagaagtgtagggaccatttcttagtgacattgttggaatgtggaggacttctactaatgttaatggtgttcaggatatagaaagattgctacaatggaaactggagagaagaaaaggaacttgttaaagtttttcatcttttctcaatcctcattctcatttttttagccttagtgaatcatgtttatgctctgcatacaattttttttctggtttgttaattttcagatgtaattttgaacattttatttgcaggacccactggttactaagggaccaaatttggttccattgcttggtattgatgtttgggagcatgcgtactacttacagtacaagaatgttagaccagactatctgaagaacatttggaaagttattaattggaaatatgccagtgaagtgtatgagaaagagagctcttagtctgaaagtgctacttgatatagctcttgagatgacagatttgcagcacggtaagagatgtggaataaaatgatgtgatgtgatgtaataaataacactaactattttatgtagttgtactgaagaacctcgagcattgtatggctgcatttcttgtactaagttcctcttgtcttatggattttctgatgctctgttaagatactattcgtttccagtgatgtatatattttgcctccagggtttgatccttttactcgaattagtaaaattctgaaattcaagccc

SEQ ID NO: 50913 - protein, 50 aa, Glycine max
  peptide (1)..(50): Ceres Seq. ID no. 15177883
MYTTSCLLDKMYCMHIKLFVPVYTNSVYFSCHHFVFWGLSFKFIFSWSNC

SEQ ID NO: 50914 - protein, 40 aa, Glycine max
  peptide (1)..(40): Ceres Seq. ID no. 15177884
MYCMHIKLFVPVYTNSVYFSCHHFVFWGLSFKFIFSWSNC

SEQ ID NO: 50915 - protein, 38 aa, Glycine max
  peptide (1)..(38): Ceres Seq. ID no. 15177885
TFQSRLCAKQCFIIAICLCKLGLTFEVLSLFIQVCSPF

SEQ ID NO: 50916 - DNA, 1664 bp, Glycine max
  misc_feature (1)..(1664): Ceres Seq. ID no. 15170842
ataggcacagagaataattgatatagtttagagagagaaaaaaaaaaaaactctcttcagtcttcagtcctcacttctcactcagcatgaaatgtcttagttctctctccaattaaatgctcttcctaccatcccattaatgagtctctacaaattgccagaccgtctcattaaattaaatcgcatgcgaccacctccattaaattcctccttgagctcaccctccatcaatctccgatcaaccctctcaccaatcacccccgccacgtgtcctcttgccggccattcccattcatttcagaaaatactgttaacattttcaacccttcctttcttttcacctccggttaaacctctccggcgacagcagcgcctcgggatccccgcacctcagccggctcgacgagaacgccgccgcggctgccacccccgacgaccgcagaaacatcggactcgctatcgacttgctccgccgcgacgagctccccccgctgccgtacctcacgctcgactccgacaacgggaaaaaacccctcctccggaagaacggtgacttcatccctctataatacctgaacgaaaacaccctcggcttccccaatgatccgaatggcgagggcctcttgctccagaaactactactccctctccggtaccgccacggcgacgccgtcgccggttccatcaccatcctctccgacgccagactccgttcaaatccaaacgagtaagacctcttcagcagaaaatccctaaaacaatcctctgagttaacgttcgcatggttctggttcctcctcggagtgttctcgtcgacgcagggagtaatctccgacacggaggatatagccaccgccgacgcaggctgcggcggcagatcgatgagaggatctatactgatacggtggagaattgtgtcgtcgtcgaggctcggtcggattctagcggccatcatcggagtgaaaggtgaatcggtgcagagaactccagcgcggcagagaggacagttagcgtgcgagcgaagccacgcgtcgatgcagtccacgtggaacgtgtgtgaacaaacgggaagcgttcttacgtaatcctcgtcttcgaattcgagcaagcaaacggcgcagtcgtagcgagactcatcaaaacgcgcgtcgtatttcgctgtataaagcgagaacgggattgttttaataaccgtttcgtccaaaccgtagggggagaacacgtgcggtccgtcgaagggagaatcgtaggggagggactcgaggtcgccgacggaggaggggaggaagcggcggcgtcggaagcggcggaggaggcggtggacgggtggtctgaggtggcgcgcgatgaggcgggagtaggtgacgacaagaaacgcggcggcgacgacgacgaccattgctattaagggcggagtgaagtcaacagccggcgagtttgacgtcgggggtaggaaagacttgctgaggattggtgtgggagatggggcccaatgaggtggctgagaaggaggcatcatcgtgggaataacaaaaacagaggaatagggttttagttttagagtagttctacaaacaaaaacagagaagagagagagagagagaagactgtgcaattgggtttaatgcaaagaaagatacaaaggttgactgtggttgtgtgct

SEQ ID NO: 50917 - protein, 137 aa, Glycine max
  peptide (1)..(137): Ceres Seq. ID no. 15170843
MSLYKLPDRLIKLNRMRPPPLNSSLSSPSINLRSTLSPITPATCPLAGHSHSFQKILLTFSTLPFFSPPVKPLRRQQRLGIPAPQPARRERRRGCHPRRPQKHRTRYRLAPPRRAPPAAVPHARLRQREKTPPPEER

SEQ ID NO: 50918 - protein, 122 aa, Glycine max
  peptide (1)..(122): Ceres Seq. ID no. 15170844
MRPPPLNSSLSSPSINLRSTLSPITPATCPLAGHSHSFQKILLTFSTLPFFSPPVKPLRRQQRLGIPAPQPARRERRRGCHPRRPQKHRTRYRLAPPRRAPPAAVPHARLRQREKTPPPEER

SEQ ID NO: 50919 - DNA, 1675 bp, Glycine max
  misc_feature (1)..(1675): Ceres Seq. ID no. 15226473
tttcctcatactccaaatgttacatgatggtggccttttataggcaagcaaatggttgtgcaacaaaaaataatgacagtgtaatccaattaactactagtagtttcgacataattgaagtggtattgattcaaatattttaggaatgctgcttattgacaaaggttccttaatgcttagtcatgttcttcaataattgcacattgaaagaatgtatatttatccgaagtatctaaactaacagcttgtatgatagattcatggcgggaacattgatccttctattgatttcattacaaatattgatatttctgaggggtttttttaaagagttatcgctcctgcgtcgtgtcccctcttctttgacccattgagttccttacttatttcactcataaaatttttgaaatattactcaaatgtacctgcaactgtgtctgcatgtgcgtgtgtcactaccattctctcgggagaacaaaccaccttttcttgttttttccagcattccaatttcccacgaattgtgtagatttctctgcagatatcttcttgtgaagcctctgctactagaagtgcaaacagtaactgtaccatgtattgcagagatcttcctgagcttatctgtacaggaaatacaaggtctcaggtctgcaaaaggccaagtccaagtgaatgttttgtaggttcttattcatcttgagacttgcataatgcttactttgcttaattagtggagttcttcaacaattctgtatagaaaacataggaattcagtggttttcaataaccagattttcagccccgaaaaagtcatggacgaagctctgttccacacttggtcttggctaaaatgcatggacaaagactttgatatgcatttcaaccagtggtcttctaacttgaaggagcagctcccttaaaccacctcttgtctccagcttgagccttgcaaatgaacagttttccatcttttacagttgctctaattatgtggtgcttgccaccttcatctccatcagcagttcttgtcaacacagacaaaaaatagtatggcttcccgtcaatcacaggtgttgcagtctctaagatgttagccgtggccactgcatttggatcaaaaccaccctcagcttgtgtttcgccgaagaaggcctgttttcctagtaaataatccaccttagagaggaactcttcgggtgaaccatagtcagtgatggacttcttatcagttggagtgatggtgacaaccacgttggtggttgagtcaaagttatcctcgtatctaacaacctgacccgtgtactcaacttctttgcttgggttccactttgagggaatagatagtttgaatccatctccattgtatggcaggaaatctgtgtctgtctttggctttccaaacacattggcagcttcaccataggctgcatcagcaggttggactttggagccaacagcagcagcaccaatgagcacagttagagctaaccggcgagagattgggctgacatcaatatcctcttgtggtgtttgttgtttctgtgccttgcaaacaagctggttaggcttggtgctaaccaagatgcgtagtgatggggatctggcactggcaggggtggtaagagcatggtggtgcaagaaacattgggtagaagccattctgctctgtgtctgc

SEQ ID NO: 50920 - protein, 87 aa, Glycine max
  peptide (1)..(87): Ceres Seq. ID no. 15226474
MYLQLCLHVRVSLPFSRENKPPFLVFSSIPISHELCRFLCRYLLVKPLLLEVQTVTVPCIAEIFLSLSVQEIQGLRSAKGQVQVNVL

SEQ ID NO: 50921 - protein, 69 aa, Glycine max
  peptide (1)..(69): Ceres Seq. ID no. 15226475
MSTVRANRREIGLTSISSCGVCCFCALQTSWLGLVLTKMRSDGDLALAGVVRAWWCKKHWVEAILLCVC

SEQ ID NO: 50922 - protein, 46 aa, Glycine max
  peptide (1)..(46): Ceres Seq. ID no. 15226476
SSYSKCYMMVAFYRQANGCATKNNDSVIQLTTSSFDIIEVVLIQIF

SEQ ID NO: 50923 - DNA, 1305 bp, Glycine max
  misc_feature (1)..(1305): Ceres Seq. ID no. 14311227
aattatttatgctcctaagtttttaaaaatagggaaaatcaatcaataaatatttgagaataggaaaagacaactaattacgaataatgatgctgattctctaaatgcatcaattatgctaatacatggaattttgtaaataatggaactttaccattaattgtttaggttcttaagccagctgagtttaggtcatcttactttctttcccttcagaacttgtgttctttaatatttggcaaatagaagctggtgtataaaacaatatgccctattaattggctgtagatagtggatttggctcttgtaaagtgaggggaacactttagaaggtaaaatgtatagttatagccatctacagttgatgttgtgataaaaaatacatgcacatgtatagcaaacttgttaaatctcaactgctaattttttaattaacctttagaggatccaaatccttgtattatgtagtttgtactactgtttaatagccaaattttcaataataaacgtagaataatcaattgtgaaaaattgtggcaccatagcgctgtcgtgttgtatcaccatctctggtccctacaggcttgccgtaatattctatctttctcttgcggctgtgctgactggggttgcagccaaatagtgtttggcactgcacctaagggtgaaatacctgttgtttgactggcatgtcccctttgttatggattaatcccagcaaactgtagtttttcccgccagaaccacccttttccactaattctgagtattattgataaatgtcttaaatcagatgtactttttgagatttgagcattattgtgtattataaattacttaatattgtttcttgtatctcaggtatagtaggctctctgttctgctataacatatttggggttgtccgctgtgcactgctctttggatttgccgcctagaattaatttacatatcttgaaactatttcctaacataaaatattcaagtttctatttttacttttattgggtatgttttgttaggtctattggagatgagagcctttgcaaggaagtatttgaggagtacattgcacagctaaaagaagaggcaaaagagaatgagcggaaacgaaaagaggaaagggcaaagaaggaaaaagacagggaggaaagagaaagaaggaaagggaagcaaagaaaggaaaaagagggagggcgtgaaagagggaaagatgaggcacataagaaggataaagcagacagtgacagtatggagttaactgaaatccaaacctccaaagaaaacaaaaggtctgaagatgat

SEQ ID NO: 50924 - protein, 53 aa, Glycine max
  peptide (1)..(53): Ceres Seq. ID no. 14311228
MSGNEKRKGQRRKKTGRKEKEGKGSKERKKREGVKEGKMRHIRRIKQTVTVWS

SEQ ID NO: 50925 - DNA, 1406 bp, Glycine max
  misc_feature (1)..(1406): Ceres Seq. ID no. 15176536
aactgccaatgttcagacatgtttaattcaatcccaaaaggtaactcaagattcttacaagccaatgtaggtttaactcaatcccaaaaggtatttcgattaccttttctatattgattttgaggcgtctatgactgaaccccgagcacaaactgccttaggacatcttcaggtttgacttcttaatttttttattttatgatttgaattatgtattttgattcttctcttattttatctcctcctaaacttttacaataacccatggaaaaatagtagaaaattttgttcagttgttttaggagtccagcaagcctgtgcagagtagtcctctcatatttttagattctagcatgctaacttaataaaaatttgccaacaattaatatcaaggagagcaagctttggtttggacttctactgtgctcaagagttttcattcttgagttttatgtccttgatttggatgcttgagtatgttatcacagctcaatttaacccctctgcatctccttaaccacatcattgttggtatagcatatgataaaatgggacaaatttgcatacaaaaatagcaatgacaattggcagaagcacttcctgcaagccatgaatggtgctgttccaaaagtttctgaggtttgtctccaatggtgctgttctattagggtccaatcactatttaactcaatatttttcattactacaacaaatactaatctaaaatgcatataactctaggaaactttcttcctcaaattttctgtgcggtgcagtaactttttcctttttgggcagctgtaataatataattaattaacccttcaactttcatgtcatgagtatctaaccacataccaaaaaccattttatgtccctacaggaatttgccacatttcttcgggtatggtaaaaaatgtaatttacattacacaatagttagttagccttttattcattttgttagtcagttttatagattgacacgtgtgctatactacctgtcttaataagaatttaaatagagacttgtattgtaatttttcattcaatcaatattcagaactttatcctctcttcgtttcttgaatagtttgaatttatgctaacaatagttgatcttgacctttagacagtgccattagttcatctaaacttcaattcatcaaacgaagtttgatggccattgaagaagatattcatgaaggataacaattaacaaggtatgaggttttagccaaatatgtagttctgagctttctttctattaaattgtcaaacctggcaaaaaaacgaaaagaatcggctaatgtattctgtcactgtatcgtaatcattaagaacatgtttggttcgcatctcatgtcttgatttttatcatcttccacccaccaagttaattagtt

SEQ ID NO: 50926 - protein, 64 aa, Glycine max
  peptide (1)..(64): Ceres Seq. ID no. 15176537
MIKWDKFAYKNSNDNWQKHFLQAMNGAVPKVSEVCLQWCCSIRVQSLFNSIFFITTTNTNLKCI

SEQ ID NO: 50927 - protein, 41 aa, Glycine max
  peptide (1)..(41): Ceres Seq. ID no. 15176538
MNGAVPKVSEVCLQWCCSIRVQSLFNSIFFITTTNTNLKCI

SEQ ID NO: 50928 - protein, 38 aa, Glycine max
  peptide (1)..(38): Ceres Seq. ID no. 15176539
NCQCSDMFNSIPKGNSRFLQANVGLTQSQKVFRLPFLY

SEQ ID NO: 50929 - DNA, 1542 bp, Glycine max
  misc_feature (1)..(1542): Ceres Seq. ID no. 15226846
cagctacgtaggccccccccccaggaacctaaatccttgcttgatttgatatactttgactagttagtgttatgcttttatattctaagactagtaaccaaatggttcgatactttcatggtgatagggttaagagaatgcctaaacctcttgttaccaaagtgtatgttaggcgccagcctggcagtaataggaataactaaccgaattctgttaggaataactaacagaattctgttagttaaagagtactataaataagagctttaactggttgtaaaggggtgttttttggcatattgggatttgggactaactgaattgggatttagttagagttggttagagaagttcaagtgaattgggattcagttgaacctttttcagttgtaattctctgttctgagttcttcttttataagcaataaagattcttagtgatttactctctgttcttggtgtttggctttgttttcttctattttctttatccgtgagttgccagtgttatcacatggtcatgttttgttgtgaagctaatcttataagtatgcctgaattgtattctatcatatctttttgacctttctacccatctcttaactttgtttaactttattttttcttctcatgataaatatgctaatattcattctaaattctttgtaaattacctcctcgtggattcaataaattgttgcaatgtgcagacacgactactcctttgacaattgtccggatgctgtttgacaactgggattaaggctctgtttggataattctcaagaaagcaaaatgaaaaagtttcttctgtagaaactctcgtttagtttctccaaaagtttattttaactagtgcataatctaattttaagtttataaagggaagtttaattaattttactttcttttctttttctgcaaatgcttagtgataagtttatccaaactgactttcccactgtgggggaaacacaaatttatttgttgcaactgaaattgtctgaaagcatgttttctaattgtcacttcattatagccacattgatgcagattgcttacaagttattttgacacagatttggctcttttgatcaggtatggtgtgatgttggttaccctagattggttcagaggccactagagattgctttgacagggaagatgagtaagcgttgtgcatgctttgaagattctcagttggaccaacctggcttagaggtatatgaagggtgtgattaccatgctaccaggtgcaaagtttaatcaggaatcaaacaccaacggaagaaatttttttttagctatctgtatgtatattaaaagcttaatttagtgaagctggtaattatttttgtacattgttgcttttattttgagggttgctttatgctatttttattccggaataatcactcttctttaacaattaaatttaaaattgtgctatatgccccgcactctgtaacaggaaaaaaaaaaaaaaagtcaagtatatattaatatttaatggatttttaaataaaaatagggtatttcttt

SEQ ID NO: 50930 - protein, 49 aa, Glycine max
  peptide (1)..(49): Ceres Seq. ID no. 15226847
MLSDKFIQTDFPTVGETQIYLLQLKLSESMFSNCHFIIATLMQIAYKLF

SEQ ID NO: 50931 - protein, 47 aa, Glycine max
  peptide (1)..(47): Ceres Seq. ID no. 15226848
MVIGLRECLNLLLPKCMLGASLAVIGITNRILLGITNRILLVKEYYK

SEQ ID NO: 50932 - protein, 43 aa, Glycine max
  peptide (1)..(43): Ceres Seq. ID no. 15226849
MLLYSKTSNQMVRYFHGDRVKRMPKPLVTKVYVRRQPGSNRNN

SEQ ID NO: 50933 - DNA, 535 bp, Glycine max
  misc_feature (1)..(535): Ceres Seq. ID no. 13582419
aaatatacttcaatttactaatactcggtaaatgctggtagagagttttgagttagactttagagtgcaaaaagtcatactgctattattgtagtcaatgataaattacaaggccttggccactagctgcattcagaatgagaaggcaaagttcttgtggggacagggcaaaggttttctttagcggcatactttggggaaaagctttctcacctaactaccactaaagttgggcaagcaataaatttataaatgtcacaagtaattagttctaaaataacttgacattatgaggattaaatggattatttatctcttcattaaattttccttttcgtctataagattaattatatttgtgtatcaagactttgattggccaatgttgagccaatcaggaagagagaattgacatgtagaatgatttattccataagtgttgaatgaattcacccatgggaagcaggaaaaagtgagcaagagtgagttcaaagaggttctctcagacattctattgggtatggctgctggactg

SEQ ID NO: 50934 - protein, 40 aa, Glycine max
  peptide (1)..(40): Ceres Seq. ID no. 13582420
MRIKWIIYLFIKFSFSSIRLIIFVYQDFDWPMLSQSGREN

SEQ ID NO: 50935 - DNA, 1036 bp, Glycine max
  misc_feature (1)..(1036): Ceres Seq. ID no. 12455697
tttctggttatattcagaatgaattgcatcagctatgttggcagcgatcagatgatcagttcatccatgtgaactttagtgaaacagcttgatcaatggcaaacttaaacagctaatcaaatgcgtctgatcaactaaacatagcaactatattgcccaacaactttacaacttcagcattcactttcaactctctactaaacaacggacattatcaacaactttctaatcaggcttttatggtatctcacaccaggcattaatcttgtgtgtggatataaatattttacactcttctcagacgctagattctgtatttggatgaaattttcttactgaggattctcttaatataatgtaaaatgttactctctagaatttatagaagcaagaaagatgtcactaattcaagtttattagctgtttagtgtggtatttggatgttatgtcctttatcaaggaagcactaaagattaactcctgcattttcatttcagtcacgaagaaaacgtgcaagaactccaaccccagggcactatcttggactgaaaaacacaagggagtatggctatcgtggtgaccgaggtggtgaccggggaaggtatcgcgatggtcctgaccgtgacaattactcacgtcgtaggtctccgaggcgttcaccatacagaggtggccaagattattctccccagcgctcaccctatggtggaaggtctaggagggaaaggtctaggtcacttccttattctccacatggtagcccagacaggaagtatgctcgcggatctaggtgatgtttatcttagcattctactatttgaacaaggtaagcaaaaatttgttgactatatggtgctgtgactaccagtttgcgcctatatacaatgtatacgtttattggtggaagctgctgttcctgtgtgactatcagtgtgccttttctcgaagtcacacagaaagttagagtggacaaaagtgtggaaatctgaatttgaagtatgtaagcatttgctatagggaattgagactctggctt

SEQ ID NO: 50936 - protein, 98 aa, Glycine max
  peptide (1)..(98): Ceres Seq. ID no. 12455698
MAIVVTEVVTGEGIAMVLTVTITHVVGLRGVHHTEVAKIILPSAHPMVEGLGGKGLGHFLILHMVAQTGSMLADLGDVYLSILLFEQGKQKFVDYMVL

SEQ ID NO: 50937 - protein, 83 aa, Glycine max
  peptide (1)..(83): Ceres Seq. ID no. 12455699
MVLTVTITHVVGLRGVHHTEVAKIILPSAHPMVEGLGGKGLGHFLILHMVAQTGSMLADLGDVYLSILLFEQGKQKFVDYMVL

SEQ ID NO: 50938 - protein, 56 aa, Glycine max
  peptide (1)..(56): Ceres Seq. ID no. 12455700
MFILAFYYLNKVSKNLLTIWCCDYQFAPIYNVYVYWWKLLFLCDYQCAFSRSHTES

SEQ ID NO: 50939 - DNA, 2117 bp, Glycine max
  misc_feature (1)..(2117): Ceres Seq. ID no. 15174543
atgtccgccccacagcaccagacacaacatgttcatggtaaggtggacgaaattgacgtgcaggaagccgtaggcgagcaggcgccaatactcatgacgcgcgatggcggtcgaatacatgccgccgtagcgatagagcagctccgacgaagccgccggaccgcccgcctggatgaagcaaaaccccgacgcgaggaccgtcaccgtcatcagcgcgtagacggccgcatgaggggtttcgaagaagctggcacgatatgagggcattggcgatcgcaagcaggaggagacgtagatgccaacctagccgagccgatcgatgattgctactccagcgggtgccagccgctgacgcctaccgtccctcgaatttcggcgcgcgcttctccatgaaagccttcatgccctcggccatgtcctgcgtcttgaacagcggcagcagttggagatagacgtgatggacgtggtcgtggaagttctcgttcaggcccatccgcatcatacgcttggaggcctgcaccgcgagcggcgcgttggcggcaatctcgcgggcgacggcgtacgcgcgggtcatcagctcggcatccggcacgacctcgttggcaaggccccagtccaggcactcgcgcgcgctcagcgtgcggccggtaaaaatcagctcggaggccttggcccagccgagcatgcgcggcaacagccaggtgccgccggattccggcaccacgccgcgcttgacgaaggcggcggcgagctttgaggattccgccatgatgcggatgtcgcagccaagcgcggtgtccatgccgtaaccggccgcgccgccattgacggcgcagatggtcggcttgtccatcgcctgcaacaccgtcggcggcgtgttgcgcagattgatcgtcgtcggcgaggacgccgcgctgaggccattgccgtcgcgctccctgcggagatcgaggccggcgcagaacgccctgcccctgccggtgagaatcaccacgcggacattcttgtcctcattggcctcggtcaagagccgcgcgaggtcgttcagcatcgggccggagatcgtattcatccgctccggcgcgttcagcgtgatggtcgcgatgtgatcggcgacctcgtaaaggacttcgttttcggcgtcggtcatgtgtcgctcctcgaattgtcagatcctgcgtcccgcctgctcccaatagggatcgcggagccggcgcttgaagatttttccggaatcttcgcgcggcagtcccgtgcggatctcgatgtgttttgggaccttgtaatcggcgagcgagctcttgagccgcgcacggatgcccgcggcgtcgagcgttacgcccggctgcggctcgaccaccgccatcagcgcctcgccgaactcggcatcggggatgccgaacacagcgcaatcatgcacgccaggcaccgcgtgcagcaccgactcgatctcggccggatagatgttgacgccgccagagatcaccatgtcgcgcttgcggtcgcagatgaagacgtagccgtcctcgtcgatatagccgacgtcgcccgaggtgatgaacccgtcgcggtcgatctctgcgcgcttctcgggcttgttgtgataggtgaagtcggccattgcaggcatgcgcgaatagatctcgccgatttcgccgacaccaagcacgcgaccgtcatcgccgatgaaacgtaattcggcgccgggcgagatcttaccgaccgtaccgggcttcttgagtgcgtcctccgacgtcgcgaaggtgacggcgctggattcggtcgagccgtagaattcgtagatcaccggcccccaccattcgatcatggcgcgcttgacgtccgccggacagggcgcggccgcgtggatgatgtggcgcagcgaagagacgtcgtatttcttgcggacctcctccggcagcttcatcaggcggatgaacatggtcggcaccatgaagatggtgtcgaccttgtagcgctcgatcagctgcagaaaatcttccgcctcaaagcgcggcatcagcaccagcacgccgccgagcttgccggcgcggatgccgaacgaattcggcgcggaatggtagagcggccccggcaggatcgcgcgggctcccggc

SEQ ID NO: 50940 - protein, 99 aa, Glycine max
  peptide (1)..(99): Ceres Seq. ID no. 15174544
MDVVVEVLVQAHPHHTLGGLHRERRVGGNLAGDGVRAGHQLGIRHDLVGKAPVQALARAQRAAGKNQLGGLGPAEHARQQPGAAGFRHHAALDEGGGEL

SEQ ID NO: 50941 - protein, 93 aa, Glycine max
  peptide (1)..(93): Ceres Seq. ID no. 15174545
MHARHRVQHRLDLGRIDVDAARDHHVALAVADEDVAVLVDIADVARGDEPVAVDLCALLGLVVIGEVGHCRHARIDLADFADTKHATVIADET

SEQ ID NO: 50942 - protein, 90 aa, Glycine max
  peptide (1)..(90): Ceres Seq. ID no. 15174546
MVGLSIACNTVGGVLRRLIVVGEDAALRPLPSRSLRRSRPAQNALPLPVRITTRTFLSSLASVKSRARSFSIGPEIVFIRSGAFSVMVAM

SEQ ID NO: 50943 - DNA, 889 bp, Glycine max
  misc_feature (1)..(889): Ceres Seq. ID no. 13637616
ttttttctttttttctttccattgctaatcctttaatatcgaagatgttatatatgccttgtggagtatgaggatggagacagcatgcgagttctgccttgtcatcatgaatttcatacaacatgtgtagacaagtggctgaaggagattcacagggtgtgcccactatgtcgaggggatatctgtgtatctgattcactgccaagggagaactaaggtggccaattgttaatcaatatctccttctgagatactcatggctcctttgatcattcattgcacataagctgatgtgacaccatcagaagaagcactctcattgctgtcaatgattatttactccaatttctgaataaacatcaaaccatagtagaaatagaatgatctactagctcattctctatcaccaagtgaagcagatggcccaaaaaaggtggggtggaggtattgtttaatgaagaatttttccaacatgtttcacaaaaaaaggttctcttttgatgtatccgacaaccttttgttttgccccacttcttgtttaacacacaatttggaaaaaaagcatcattcaaatgagcacttttggtcatggaggaaactgcagattggctcaagcatctttgaccgaatcattctctttagctgtagaccagtcaactgagtggcttcaaaactataagcagtggtgcatgcgtgtgatgatatccttttcacttttcagaggaaaaagggaaaagaaacatttcaattgcagtgtaaattgtggagacaagtggtagttgtctcctaacaaacctaaaaagaccactagctacactgatttttgttgtacaatttgtctaccttgtgttcttccaatgcatgatcatgatgcaggggtggttatagg

SEQ ID NO: 50944 - protein, 68 aa, Glycine max
  peptide (1)..(68): Ceres Seq. ID no. 13637617
MSTFGHGGNCRLAQASLTESFSLAVDQSTEWLQNYKQWCMRVMISFSLFRGKREKKHFNCSVNCGDKW

SEQ ID NO: 50945 - protein, 68 aa, Glycine max
  peptide (1)..(68): Ceres Seq. ID no. 13637618
MKNFSNMFHKKRFSFDVSDNLLFCPTSCLTHNLEKKHHSNEHFWSWRKLQIGSSIFDRIILFSCRPVN

SEQ ID NO: 50946 - protein, 62 aa, Glycine max
  peptide (1)..(62): Ceres Seq. ID no. 13637619
MFHKKRFSFDVSDNLLFCPTSCLTHNLEKKHHSNEHFWSWRKLQIGSSIFDRIILFSCRPVN

SEQ ID NO: 50947 - DNA, 1035 bp, Glycine max
  misc_feature (1)..(1035): Ceres Seq. ID no. 15225973
cagctacgtaggccccccccccgaaaaacccagattcttcttcaccgagtccctggagagaccttctagataatcccatgcagtaacgtgatttccgtgaaagcaaacggcaatggattagtaaaaccaaagcaccctgatttcaaacgcaaggatcgcaattctctctggcttggcaaggatgaaaagtgggttttgcctaaattggaaggacttcaatttgatgttccaactgctatatccaaaaaaggtgatggtggtgagccctgtaatgatttggtgcaaaactatgctaactggtgggataatagattaaataagaggaatgcaaaagctcccgatttcaagcacaaagaaaccggtaaagggttgtggcttgattcttcatcagagtgggttttggaaaaattgccgccacctctgaagcctaaacaaagtgtagatactgaaaggacactggtttcataagcaatggacagtgaagtagaaaatggagtcattctctttgttacacttccatataactttgcccgtgagaagttggctgctgagtatatttgtagagaactacgtgaggcagatgaaacaaatttgcttcaggaagaacgttgtctgattttcttttttttacttggtgaatcgaccctttttttaatacaataagaatgaaggtgctgattgtcacatgctgaaaatgaataaggctctgtttggaaaaacttctcaataagcacttatagaagaagaaaataagaagggatggcaagacccagcaacttgggccaaaactctgggaaatagttggagaacaacaggggatattgaagatacctggaattggtgagcatactcacattcgtgcttttattggacacttgacaaagatattggcagaacaaagctactatttaggttgtgtgaaagcagaaggatctacatacaacatgtgtgttgttctgcttttatttaatgtaacatcttatgtggatgcaagatctaaatttaattatatatgtgcatcattttccccttctt

SEQ ID NO: 50948 - protein, 63 aa, Glycine max
  peptide (1)..(63): Ceres Seq. ID no. 15225974
MDSEVENGVILFVTLPYNFAREKLAAEYICRELREADETNLLQEERCLIFFFLLGESTLFLIQ

SEQ ID NO: 50949 - protein, 44 aa, Glycine max
  peptide (1)..(44): Ceres Seq. ID no. 15225975
MKSGFCLNWKDFNLMFQLLYPKKVMVVSPVMIWCKTMLTGGIID

SEQ ID NO: 50950 - protein, 41 aa, Glycine max
  peptide (1)..(41): Ceres Seq. ID no. 15225976
MESFSLLHFHITLPVRSWLLSIFVENYVRQMKQICFRKNVV

SEQ ID NO: 50951 - DNA, 1371 bp, Glycine max
  misc_feature (1)..(1371): Ceres Seq. ID no. 15225667
cagctacgtaggcccccccccccatttattcttccgtagataagagaattcagcattattcagtacatcgtgaggtgagtgaacaagaatggaatcaccaagaacgtgacaagtagcaaacgaatgtgacaaaaaaaaaaacacttcagctgtcccgattagctgctgttgcatttccacgcattcacacagttcagatctcgcatacattgagctgctgactgcgtgaatgcatggaaaatcagatgtctagaattgtggtttaaagcattccggagggatttgtccgttgaatcttttggtatctgtgcagtagtcatagatcatgtagttgttcctgacccaattcagttgccccatctgggagtgactcagctgcttgtatctccgggaagtccaccaatttgctgggagattggaggcacattgattgatgctctttgctccgccccacttgcaagcccttgctctgaaatggtggaatctggccgtgaatggtgcgctgtgccagtccgtcttaacaaggccgcctctggttgcccagtcgtctgcattccatagggttgtgtaaaccctcattccttgcttggttgggtaagcaattccctctttttcgtagtttcgaaaaacccgaattggcacactatcaacataccacctgacgtactcgtcatagactcatacttagttaatggatcatacacacttagagaaaaaaatgaatagctttgtgttctggtaaaatttatctactcacacaattgctgttggattccagtgaatggtgtaattgtgaaaatcagcagttgggtcaaaccagaggtaaaattgttgctctctgcttccttttccttgtgtgtatatgttagtgtggacagtgtatggctgtcctgtactgttgcctaagaactcaaaatctatctcgtcatgttggcttcctgcagaggataactgtatggattctgagtgagaaacatggacacttcatttagtaatgggagtttgatagatttggttgttcaaaagtgcgtgttttggtgtctttgagatctcttagatccggtgaacttacatagtaggctgtaactgttccggcagaattaccaggtaccagcttgattagcatttcaatgcttccaaataagaatgatctctttgattgagcagctgatcctgaaatccataggcaacaccacattgttccactctagctagtaatagatgaatgcattttttattatttatttaacgtcagtttgcataatgtttagtttgattacaaatcttgtgtaaagtggtatatgaacatatattattgtgatgctcatgttataattcagttgcaacttatttaaaatgcaataaactatg

SEQ ID NO: 50952 - protein, 45 aa, Glycine max
  peptide (1)..(45): Ceres Seq. ID no. 15225668
MLFAPPHLQALALKWWNLAVNGALCQSVLTRPPLVAQSSAFHRVV

SEQ ID NO: 50953 - protein, 36 aa, Glycine max
  peptide (1)..(36): Ceres Seq. ID no. 15225669
MAVLYCCLRTQNLSRHVGFLQRITVWILSEKHGHFI

SEQ ID NO: 50954 - protein, 35 aa, Glycine max
  peptide (1)..(35): Ceres Seq. ID no. 15225670
MLVWTVYGCPVLLPKNSKSISSCWLPAEDNCMDSE

SEQ ID NO: 50955 - DNA, 984 bp, Glycine max
  misc_feature (1)..(984): Ceres Seq. ID no. 13581195
ttttatcaatgtcatctgttagaagagattttctaggcaaggaaaatgagcatcaagctgaacctacagaaggcaataaacagttcaaaaaacaaaatgtgcacagaaggctaaaatcatcagttttatctcctggatctgcttcatctgtttgccagtctcctcgtttgaagatgctgactatgcaggtgatataaacaagagaaggtcaataattgtctatatattcactctatatggcaatgtagtccgttggaaagcaaatcttcaatctgttgtggctctgtcaaccactgaatcagagtacattgcactgactgaggccataaacgaagctttttggctgaaaggatttgtagaggagctggaaggaaagaaactgaagactgaggttatgtgtgatagccaaagtgctatatgtctctctaagaatcagccattccatgagatgacaaaacatatagatgcaaggtttcatttcatctgagacatcattgcaaaaggagtgatccaagtgaagaaaattgcaactgaagagaaccctactgatatgttgaccaaggttctcactgctgctaggtttgagcattgtctagacttagtaggcattcaaagacctaatgagtgaagtttcaattcagaaacttgagacatttattggagctgaagctgataatgaagatccaaggtgaagatttgtgaggattaggggatcaccattaggcttagttagttagatgccatagctgtttttggctaagtgttagttgaagagccttggtagttaagttagttatttctattataactaactttaggcttgtggattccttctatataaagtcttagctaggcaactcatgtgagtgtgaatcacaaacaatttggtgagataccttcgagtatgtgtgagatcaaagtgtgagcaatctagctcttgtaaagttattgtaatctctcaataaaagtccatgaagtatcttg

SEQ ID NO: 50956 - protein, 64 aa, Glycine max
  peptide (1)..(64): Ceres Seq. ID no. 13581196
LSMSSVRRDFLGKENEHQAEPTEGNKQFKKQNVHRRLKSSVLSPGSASSVCQSPRLKMLTMQVI

SEQ ID NO: 50957 - protein, 62 aa, Glycine max
  peptide (1)..(62): Ceres Seq. ID no. 13581197
MSSVRRDFLGKENEHQAEPTEGNKQFKKQNVHRRLKSSVLSPGSASSVCQSPRLKMLTMQVI

SEQ ID NO: 50958 - DNA, 1171 bp, Glycine max
  misc_feature (1)..(1171): Ceres Seq. ID no. 14307284
ataaattgagtatgtattgaattgtaatatatatacatatacatacatacatatatatatatatatatatatatacatatatatatatgtgtgtgtgtgtgtgtgtgtgtgtgtgtgtgtgtgtgtgtgtgtgtgtgtgtgtgtgtgtgcattgagatgttgtgtgcactgagttgtgagctatgaatcgtacaatcacatgactataagaccctttaagggcgacgggttaatgcacgacgagtattgtgatgggaaccactgtggggacccaacgagtttaatcacaagcgtgacaagataaaattattgagaataattcaggaatcgtgtgttttgtatagttcatagatagattctgtgcgctaaaatattttatgatttggacttgaatcaggagggagaggccctaacggactcttcagagtctaggccttggggataaatacacctagtttgagtgctcctttaagtctatgtcgatcctacatggttggagcattctcacaaaacggcgtgatcctaactgatctccctataattttacctaatgagagtgatctgacttactagtgtatggtttgtattgcatgtactcctaggcgcctgacgagatttttcactgacatggtaccacattgcatatagggttgattcttagtgtatttgttgcataactcttgtgtattgattgatattgattaatttagtgatattgtattttgatcattgagtacgtgaataatgtgaaaatgaatgagagttgttgtgttgtgatgtgatgttacgcgacaaagtggtggagtgacgtgagctatctttaagtaaattgtatttcatttatatgatatgtatatttacatgttgttttgtttctctctattagttaggaatgtgataactcactctgtgtgttgtttgtgtttggatcctgtgatgatctcgaactttgtgttcgtaggagcagatgactaggcaaatttctttaaagaaccttgtgctgaaggacgttgggacacaatgttttgcaaggatgtgacattggagcatgagttttgtttaattacatgatgttttgagcaaaaaatgtttctaacaagttttatttgataatagtgaagtgaatgtaaaccttttacccttttgaaatgcttttatttaaatgtgtttt

SEQ ID NO: 50959 - protein, 41 aa, Glycine max
  peptide (1)..(41): Ceres Seq. ID no. 14307285
MYIYMLFCFSLLVRNVITHSVCCLCLDPVMISNFVFVGADD

SEQ ID NO: 50960 - protein, 37 aa, Glycine max
  peptide (1)..(37): Ceres Seq. ID no. 14307286
MLFCFSLLVRNVITHSVCCLCLDPVMISNFVFVGADD

SEQ ID NO: 50961 - protein, 34 aa, Glycine max
  peptide (1)..(34): Ceres Seq. ID no. 14307287
MTIRPFKGDGLMHDEYCDGNHCGDPTSLITSVTR

SEQ ID NO: 50962 - DNA, 1089 bp, Glycine max
  misc_feature (1)..(1089): Ceres Seq. ID no. 15168864
acttgcaagttgatgctgatgacttgcacaattggaaaggttgggtggaatcatgccttcaccaactaactttgatggtgtaaaacagatgttagtcaactgttttttattggcaagattattttacttgactgaaactaaaagaaaggttgggtttaggaaatgggaagaatcttgatcttgaacaatgctcttgatcaaagcttcaaaaacagtgcatcaagtatttgggacctatatgtgcatcttcgatttgattgtgtgtgaatattatatatattttttaaatgcatgaggttgtttgacatgttgctctatttttatattcttttttctactggttattattttcttaaattagcaagagagagaacggtatgaatacattgagcgtgtgggcaaaattatcgactagcaatatggagatttgcttcacacaaatgaagattctgaagatgcaaaatggatatttgtaatgagcaagaaactttatgttgtcaaggtaacaattcaagggtagttacattttaaagttacttattttctttaaagacaattaccatgtctttcttgtaccactattacattgcattaatcttgtagaaaaagaaacattatttcatcattctagtgttttggctggaggagctacattagctgctagaaggctggtggaagagaatggaattcttaaggtgaattaacttcataggttgcatgactaaactattgtgctaatggaacttcttatgatatttgtctgctagcttttatagtgacaaggagatagtggattgcaaatgtgacatgcctaatttatgtgaattgcaaatgtttgattatcaatggcacaatggctttgatttttcaatctatctcagcttatagtggacattatcgaccaatggatagtggattaacttatgtaattttaaaaatttcatgagcgaagattatgtaataaaattttggttcatagatagaatcttgaatccttgattcaccatggaacatcatagagttgtttgatccatgcgaaaaaccttgatagaatcttggtaaattaatagattttttattcttttatct

SEQ ID NO: 50963 - protein, 41 aa, Glycine max
  peptide (1)..(41): Ceres Seq. ID no. 15168865
MPSPTNFDGVKQMLVNCFLLARLFYLTETKRKVGFRKWEES

SEQ ID NO: 50964 - protein, 35 aa, Glycine max
  peptide (1)..(35): Ceres Seq. ID no. 15168866
MLLIKASKTVHQVFGTYMCIFDLIVCEYYIYFLNA

SEQ ID NO: 50965 - protein, 34 aa, Glycine max
  peptide (1)..(34): Ceres Seq. ID no. 15168867
MGRILILNNALDQSFKNSASSIWDLYVHLRFDCV

SEQ ID NO: 50966 - DNA, 1540 bp, Glycine max
  misc_feature (1)..(1540): Ceres Seq. ID no. 15171100
ttcaaagtgacttcgccgccaagagagcgaacaacagacccaccactgcatgcgcccactttgcagcactcttcaagtgacagacctttgatcactccatacaaaaatccacttgcaaaaagatcccctgcccctgttgcatcagttgcctttgcttctccaattgccgggacacgtgcaatctgacacgtttcaaacataattcataataatgactagagttagtacatatttggtttgcagttgaaaaaaaagtacttttgtctcaaaagtaatttttcaccttgttttcaagcatgctcttgatcattctagcacttatcctagaacactattcacttgcttttttcttcttctttttttttttttttttagttaagagggtacaacactattcacatgcttgcttgctaagtatcatgaatgtaaaactaaattactttttaatttcttccttagtgattttggatcccaatcatcacataaaactgatattgtcaaacaactttcggcactagactttttccatggttatatatactattgttactaaagcagattttgagtttattataccaacaagaagaagcttcacaactaaattactttctagattttttccctagtgattttggatcacaaccatcacatcaacagataatgtcaaacaattttctgaactagacttggtccatggttatatactattgttactaaagcagattttgagaatatcataccaacaggaaagcttcactagtctaatattcagtctcatattggaaggaaaaaacatcataacaagttcctactaggtaaattaaatctattgtttgatctagttaattatggtttccatctggaatgttaacaaaagggttcagaatttccaacggtaccacttggctaatagacacataagaataactgtacaacatattaaaaagaatggaaattgggtgtgaaatataattctcacagataatttacacacctcgtttccatgtttagcaatgcatccattaggacccagtgttactacggcccattggcagtatttggcaagaaattctacagcagttactggatcagcattttgttcgcccctaaatccattgtaaaatgacattatgtataaaaaacaatcaacagattagttattaagtgaaactaagacaatgatgaataacttggaataattcatgctttggtaccaagcagggttaagtaaaaaagacaattaccgtagaagctctgttgcctcatcctcattggcaaagcaaaggtctatattcccagactccagtagcttcagaagtggttgtttgaaattcctaaccatcttgccaaaataagaagaaccatatcagactagtacataatttacataactgatgcaattatccaaatatcaactgctgtgtagaagaagaaaatttcccacaatatcgatactgaatacacaaaaaacttgctagcacaaacacaaaatatgatatcatagttcgtaacggaggcgagttgattcagatcatagttc

SEQ ID NO: 50967 - protein, 73 aa, Glycine max
  peptide (1)..(73): Ceres Seq. ID no. 15171101
MLLIILALILEHYSLAFFFFFFFFFLVKRVQHYSHACLLSIMNVKLNYFLISSLVILDPNHHIKLILSNNFRH

SEQ ID NO: 50968 - protein, 61 aa, Glycine max
  peptide (1)..(61): Ceres Seq. ID no. 15171102
FKVTSPPRERTTDPPLHAPTLQHSSSDRPLITPYKNPLAKRSPAPVASVAFASPIAGTRAI

SEQ ID NO: 50969 - protein, 50 aa, Glycine max
  peptide (1)..(50): Ceres Seq. ID no. 15171103
MLWYQAGLSKKDNYRRSSVASSSLAKQRSIFPDSSSFRSGCLKFLTILPK

SEQ ID NO: 50970 - DNA, 1468 bp, Glycine max
  misc_feature (1)..(1468): Ceres Seq. ID no. 15172499
tactttctctttctagaagcaaagagagagagaagaattcactacaagaattaaacaaagaatctaagttacaaaaaaaattacaagagaaagttgtgtcatttgagaggtgcagcaccggcgagttcgacctataggaaagctttgaaaccttgtcgctagcatttggagggcacgccaaagccactatgttgtgggtgtatcttaacgacctctcactactgcaaaaacacatttctactacattgtttctaagaagagccaaggaggaagaggttgaaaggaagccttgtgtgaaggctcttcctttcaaggtgaaagcgatgtcgagaggatcatcgtcgcagaaagcaaggagtggattcttctagaactcaatgtttgattgtttaatttgatgcaccgaacactatgaccctgttctggtgtctcaggaagtgtgcgttgaaatctacaaaggcgtcaccactagccagctcaatgaattggtagcggaaaccaccgcggctatgatcgccaaccaccctgactattcttctgtttttacatttttggagtagctaaatcagatgaggcaaggtggtcttttgttaattacttcaacttaggtaaacgaatctgccttggtgaatctgtcaagattgaagaatagattgcaaactacttgtcttggcaaaaaggatttaaaatgagttggaacccacacatggaggtccattacaataccattagctatccctataatacaacaggaagctttatcgaatattttgaaagtctcacctatgaacatgtcaacttcattttttatggtgaatcgcatgctcaggtactagcaaaaattttcatttatatcatgtttaagatattttatataatccttggtttgatggaaattgttcttcttatcttgttttattaatgtaaatatgtcctgtagttgtgtttcactattttatctcaaactttgttattgttgttcttttgttattaatgataggctactagaaagattcataattctaaagtaaagacataaaattccatttatatatgctggagagttcatacccttcaaagtcaagcttttacaagtttggactatctgaaccagagaatacttcacactatcgttacggtcatgattatgaggtaaatcatcacgaacctgtggtggatgagtataggagaccttctgagaactcattgacaatcaatgaaaagtctgcagcagtaagcacaaaatgggttaaaggtggaaacactaacacacgagacaattatattgaatgtaagtttgtgattttcatccaactgaaaataattacaatagtaatatctggctgttgaaatgcagtcttgggtatatatgtaatgtcctaaaaagttcatttatgctcaatttatactgttacacttgattcttttcgtaagcatcataatgtttgagaaactagttgttgtactg

SEQ ID NO: 50971 - protein, 98 aa, Glycine max
  peptide (1)..(98): Ceres Seq. ID no. 15172500
MLESSYPSKSSFYKFGLSEPENTSHYRYGHDYEVNHHEPVVDEYRRPSENSLTINEKSAAVSTKWVKGGNTNTRDNYIECKFVIFIQLKIITIVISGC

SEQ ID NO: 50972 - protein, 77 aa, Glycine max
  peptide (1)..(77): Ceres Seq. ID no. 15172501
MSWNPHMEVHYNTISYPYNTTGSFIEYFESLTYEHVNFIFYGESHAQVLAKIFIYIMFKIFYIILGLMEIVLLILFY

SEQ ID NO: 50973 - protein, 71 aa, Glycine max
  peptide (1)..(71): Ceres Seq. ID no. 15172502
MEVHYNTISYPYNTTGSFIEYFESLTYEHVNFIFYGESHAQVLAKIFIYIMFKIFYIILGLMEIVLLILFY

SEQ ID NO: 50974 - DNA, 1220 bp, Glycine max
  misc_feature (1)..(1220): Ceres Seq. ID no. 14313939
atatttttctctcaatgatttcatttacatcattgcattatgaagtgttaatccccttcttttccctttttctgagcatcttcctttcatttttggtgagtggttacatgtatatatttatgtacacttcatctcattttttttaaccaattgattgcttgcaattaagttgatggtgcttgcatagaacaaaaacaaggaaagagttattgctgtcaacactcatggtcaacatgttctctattaggctgaagtgtatcagcactagagcttttgtttgcattttcttggacaagggactccaataggtgctactgggcaccgtgcgccactactttgctgagttgcctctctctgacattgacactcgcacttatacatctttggggctctgtatgaggagttaactagaaaagttgtcactttggtggcagagaatgaaaacctaaagagggagaaagaattggctttgaaagagtatgagtctttggagactacaaataagaacttgaagacacagatagccaagtcaataaacactgaagtggagaaaactcctgttgagcctgtgtcatctgtggctgagataacaccttcatccggtaatggtccatggttcctttataacctttttccagttccacaaatattttggccttccatccttcaatcttctaatccaattcatctacaaaatacatcatttaattccatcgccattccacctaatgctaatgtttcatgttcttctgagtctgaatcacatcacaagcaaaataaccttataaatgataatcgaactcgagtaatcactttttaaaattttattttgatctatccttttgatttttgaggttgtaagtttctttctttagcttaatcactagaagaagataagaaagcttttgaaatgactgagtcaaaagaggcaacattgcttgaagcagagaagatttcctgtcgtaaatctgaagtggatttcaagttcctgtgttttttgctggtttctcaagtcaagaattgggaagtaacacattcctgtttttgggatttattgttttttattattattattattattattattaagtcatgttttaggaaattggacgatctgatggtgcaacttctccagcagttgaggctttaaccttctctcatacttactgtttgctgctagctttaattcaatttagttgtccaccattttttcctgcatt

SEQ ID NO: 50975 - protein, 79 aa, Glycine max
  peptide (1)..(79): Ceres Seq. ID no. 14313940
MTESKEATLLEAEKISCRKSEVDFKFLCFLLVSQVKNWEVTHSCFWDLLFFIIIIIIIIKSCFRKLDDLMVQLLQQLRL

SEQ ID NO: 50976 - protein, 60 aa, Glycine max
  peptide (1)..(60): Ceres Seq. ID no. 14313941
MVHGSFITFFQFHKYFGLPSFNLLIQFIYKIHHLIPSPFHLMLMFHVLLSLNHITSKITL

SEQ ID NO: 50977 - protein, 47 aa, Glycine max
  peptide (1)..(47): Ceres Seq. ID no. 14313942
IFLSMISFTSLHYEVLIPFFSLFLSIFLSFLVSGYMYIFMYTSSHFF

SEQ ID NO: 50978 - DNA, 1414 bp, Glycine max
  misc_feature (1)..(1414): Ceres Seq. ID no. 15170255
ataatacatatcataatgaatggaacccctgcgtgattattgcctccgccagcagccacccaattctcatgatacaccctcagagtcaggatccttgaccatcccaaattcctcagcatcccaactgcagagaattatagtcctgcttggcttccaccccgagcccaatagagcagaaaatcaacgagcaacatcaagtagtgcagctgttccaatgctaggatcaacagcaccattcgtccatgcatctctatggttcccaagaagaacatatcaatcaggttctttcgacccctttatgacagctaaaacattttgaattgtggccatcttttcaccctaaaaaatagaaaccaaaagccaacagaaacatacacacaaaacaatatcaagcttcagcttaaatgttcccattcctccttttcaactccccacctcatttctatcaaatcatgtgccatcttactgaggtgttatcttatccactaacggaatggagctgagtcgagtggctggcagaattatggcatttttaggtgtgatctattaatcctttgccattagtccttgatatgatgaacatgtacgatactgaaacagtttcagaaaaagactcgatggcattgtgcgaggcaaagctaggtacataagattcagtaaagattactgcaagtgacatcgctctcacagggccgtgtctaaaactttctaggcctgaggcaaattttatacttgaatttccccatctatcacactgcgttcgactcctataactggatggcatagtattgagatccattcttccaccgccatgttactgttgtacaaaaacacgttgagcaacttgatagaccagaaaatttctctacatccattaaccctttcaattgaagaatctgcttctgctgccaaagaagccgatgatgaattaaagatatgaaaaagcgagcattgaatgatagactaattgcggaaaaaggcttcttggatgcagatggacttcaagcatctctcgtgtttgggccttcaagcaaccatgggaggttaatttcttcccagggatttctgattctatcactaggtcgtcggctatcatcaattcaatatgagatttggagggttgccaaagcaattcgtagagctgctggtgctgcactcagtggagaattcacctaaaaactaatgggaaaaagtcatacagaggagaatggagatggatgaaatcttgtacttgagttacctgtaaatattagcgtttcttttaacacgagcagagtagttagttaattagttagcttatctgcatattgtggtacataattgtacattaagttttctaaaaggagatggatagatattccagccgtttgaagaaatgtacacggtgacagcagattttgtgcttcttataatg

SEQ ID NO: 50979 - protein, 99 aa, Glycine max
  peptide (1)..(99): Ceres Seq. ID no. 15170256
MEPLRDYCLRQQPPNSHDTPSESGSLTIPNSSASQLQRIIVLLGFHPEPNRAENQRATSSSAAVPMLGSTAPFVHASLWFPRRTYQSGSFDPFMTAKTF

SEQ ID NO: 50980 - protein, 79 aa, Glycine max
  peptide (1)..(79): Ceres Seq. ID no. 15170257
MKKRALNDRLIAEKGFLDADGLQASLVFGPSSNHGRLISSQGFLILSLGRRLSSIQYEIWRVAKAIRRAAGAALSGEFT

SEQ ID NO: 50981 - DNA, 801 bp, Glycine max
  misc_feature (1)..(801): Ceres Seq. ID no. 12582036
cagctacgtaggcccccccccccctgattatttactcgatgcagttctttggagcggttatgcgttattctttttcttgtttaaaatgttttggcttaatatggattttaactgctgatattttcccattgcaaatgaaataataaaatatctgcgtgcttttattctgtacgaattggtatgaacgattttcgttgtggtgcttttgttactctattggtttaacgaatgaacatgttactttgtttttcaggacattgcaaatgccgaactgcctccaactcatccaattaggcttggccttgcacttaacttctctgtattttactacgaaatccttaactctcccgatcgtgcctgcaaccttgcaaaacaggcttttgatgaagctattgctgaattggatacactgggagaggagtcatacaaggatagcactccgatcatgcaactccttcgtgataacctcaccctttggacctctgacatgcaggatgatggagcagatgaaattaaagaagcagcaccgaaacaggatgaccagtaaaaatattttactgctaattagaattgaacttctcctccatatctttttgaagggagaaggtgtttgttgctaatatctctttggtactgagattttaggcattcatgtttgttatgattgtggatgtactgggccgtttttagtttgtccttccattttcaagtgttttccaaattgcctattttattaaggacgctgaagtttttattatatggaattggaattttaagattcttaaaaaaaaaaaaaaaaaa

SEQ ID NO: 50982 - protein, 118 aa, Glycine max
  peptide (1)..(118): Ceres Seq. ID no. 12582037
MPNCLQLIQLGLALHLTSLYFTTKSLTLPIVPATLQNRLLMKLLLNWIHWERSHTRIALRSCNSFVITSPFGPLTCRMMEQMKLKKQHRNRMTSKNILLLIRIELLLHIFLKGEGVCC

SEQ ID NO: 50983 - protein, 78 aa, Glycine max
  peptide (1)..(78): Ceres Seq. ID no. 12582038
MKLLLNWIHWERSHTRIALRSCNSFVITSPFGPLTCRMMEQMKLKKQHRNRMTSKNILLLIRIELLLHIFLKGEGVCC

SEQ ID NO: 50984 - DNA, 514 bp, Glycine max
  misc_feature (1)..(514): Ceres Seq. ID no. 14305551
tgaatatcacttgtctcaaaccaaagagaagcccctccaaaagggtcaagtcctgtttcctcacctacacccacaattcgaagtgctgcttgccccaccgtaacgtttgatttggtcaagtcaggtttggttgaacttgaaagtgcccaaaagtcatctatccagcaatttttggttcaacaaatggctacttctttgacaagggataccaatttcacaacagcacttgccactgccatttcaggaaaaattctagaggcccaatggtgaattaaacacaaacattattaggaacatgttatcaattttaaaaaataatctctccttttttttaattaccagaaagattataaaaagagattattttcttaaaataagttcaatcacgtatatactcgctgcaccgaacagggattgtattagtttgcttgcttcttttagaggggccgaagagacaaatagttggaatgtatatagaaaattaaagtgaaaaagaaaaattatatttcctttt

SEQ ID NO: 50985 - protein, 64 aa, Glycine max
  peptide (1)..(64): Ceres Seq. ID no. 14305552
MLSILKNNLSFFLITRKIIKRDYFLKISSITYILAAPNRDCISLLASFRGAEETNSWNVYRKLK

SEQ ID NO: 50986 - protein, 35 aa, Glycine max
  peptide (1)..(35): Ceres Seq. ID no. 14305553
NITCLKPKRSPSKRVKSCFLTYTHNSKCCLPHRNV

SEQ ID NO: 50987 - protein, 33 aa, Glycine max
  peptide (1)..(33): Ceres Seq. ID no. 14305554
EYHLSQTKEKPLQKGQVLFPHLHPQFEVLLAPP

SEQ ID NO: 50988 - DNA, 866 bp, Glycine max
  misc_feature (1)..(866): Ceres Seq. ID no. 15226787
atttaaatgattaatattattggtaatgaatatgataatgtccataaccaccattgtatcagctgctccatagttttcatgggttctaaaatctaaatccgttccatatggatttaaatcttctcaagtttcatcaccagaacaatcaggcacagaaaagcacaaactttttttaatggatatgataattccattaccatcaggtctgctttgtctctctcataatttcttattgcagtgacaggactggtcattgtttcaagtttctggatattaaaaagattaaagaaaaacagaatattgtcttgtaacagcaaagaacatgattggagaagttgcaataagcactttcaatgttattctgaatttttttcacatcaataacttttggaccaacgaaagtgttcatttcccttatattgccacacatgtctataggttgaggcagttattgacaaaattattgaggaggcaagaactggggagattggtgatggcaaaattttcttgatccccatctcagatgttataagaattcggacaggtgaacgtggggagcaggcagctaggatgactgggggccgaagtgacatgttatctgctgtatgactggttggaatgaaagataagcatttgtcatctgcttctcttacccttgtggaatattgaatttactatgctgtatgctttatatgtcttgcacttaattgtgggaagatgtatatgacagccagtattggaagggcactgtagttatgtggtgaagaaacctgagagaaaataataaccaaatgctgagttgcttcatatgccatatgacaccaagatgtgcaataaagttaatgacataatttagatatagtgcc

SEQ ID NO: 50989 - protein, 62 aa, Glycine max
  peptide (1)..(62): Ceres Seq. ID no. 15226788
MIGEVAISTFNVILNFFHINNFWTNESVHFPYIATHVYRLRQLLTKLLRRQELGRLVMAKFS

SEQ ID NO: 50990 - DNA, 517 bp, Glycine max
  misc_feature (1)..(517): Ceres Seq. ID no. 13581259
gaacttcaagggcaaaaaaagttgtgctgtgccgcctcttccgtaggcagcagcaatggcctcaaatcccaaaactttgacctttgaggaggtagctaagcacaacaacaaaaaggattgctggattattatcaatggaaaggtctgcttcttctttctctctatcttagttgatctgtttcacagttttcagtttctgggatttaacatgatgcgtgctaaatgctcatgaagatgaccgaggaattaattataggggtgtgatgcggttcagaagccacatgttaatctccaatacagtgtattaagctaatcaattttattcagagtaatgttaatgagcataataaatcatctaacttaactagttatcaaagtgaattgcttgatttgttgagaattgagattaataaccaaaatgtagaaacaaaaaattcaactctgcaatacaaagacaacgttggaacagaatgccaacagattagaatttggaaaccttatcaagcaatccagattt

SEQ ID NO: 50991 - protein, 58 aa, Glycine max
  peptide (1)..(58): Ceres Seq. ID no. 13581260
MASNPKTLTFEEVAKHNNKKDCWIIINGKVCFFFLSILVDLFHSFQFLGFNMMRAKCS

SEQ ID NO: 50992 - DNA, 304 bp, Glycine max
  misc_feature (1)..(304): Ceres Seq. ID no. 13581394
atattctagttctggccttgcagatgatatatgcttcactgtttattactattattattattattattattattattaggcaatcctttaatataattcggttttgctctgctatgcagaatcgttgacgagagcaccaaagaaggtgcggtggtggaccctgtagagcctcagaaagttctagaagctgccaattctcatggggtcaataatctcaagcttgtcctcaccacacatcatcacggggatcatgctggtggaaatgacnngataaagcaattggtgcttggaatgaaggcctatg

SEQ ID NO: 50993 - protein, 41 aa, Glycine max
  peptide (1)..(41): Ceres Seq. ID no. 13581395
ILVLALQMIYASLFITIIIIIIIIIRQSFNIIRFCSAMQNR

SEQ ID NO: 50994 - protein, 34 aa, Glycine max
  peptide (1)..(34): Ceres Seq. ID no. 13581396
MIYASLFITIIIIIIIIIRQSFNIIRFCSAMQNR

SEQ ID NO: 50995 - DNA, 1030 bp, Glycine max
  misc_feature (1)..(1030): Ceres Seq. ID no. 13595808
ggatgtaaagagtttctttattaatccaagtaaatcaccacagactcatagttatccacgcatggttgcatgtgcagggaagaaaaccaacaaaccgtgaggaaatggagggaacacgacgtcccaccacggacaccaccagccacacaagccaccacaccagtgacggacgcgcggtgcatgccccccggttcgttcacaccgaaaccgacacggcctccgcggccggctcgccgccggcgagggcggccccctccagcagctcggcgaccctggtggccaggctgagcttggccgccggcgacaccccgtgctcgccgatgatggactccagcacggcctcgcagagccgggcgttgtcgatggccacgccgccggactccggcacggacgagtccttggagaaggcgacggtgaggaggccggcgggggagtgggtgaagaggatggacgcgccgggggcgaagctgtggggcccgaaggcctccttgaacttgtcgacggcggcggcctcggcgtccgtgtacacgccggtggccttccagtaggcgacgcagttctccgtcaccttgtccgagtactgcgcgcccgtcagcggcaggatcatcgtcaccctcgtgaacttctcgaactcgccggtgacgacgtcgcggaagaaggcggcgtcggaggcgaggtcggcggcgggcttgccggcccacttggcggcgagcgcggagacggcggcgtcggcctgcaggtagacgccgatggccgtgaacttgatgaagttgcccccgatctccatcccccgcacgcctgcgccggcgagaaagtgggcgtgctcggagcccggcgggcgggcgagcggcgggaagacgacgccgtcgacctcgagctccgacacggccatggtggtgcacggagggtctccggagacgacggcacgtagcgagcgaacacttgtattgatgtgatgggggcaggccggcagggtaggtgcgatctggcgaggcgtaggcgcacgggatttttcgattaggatgttcta

SEQ ID NO: 50996 - protein, 147 aa, Glycine max
  peptide (1)..(147): Ceres Seq. ID no. 13595809
MEGTRRPTTDTTSHTSHHTSDGRAVHAPRFVHTETDTASAAGSPPARAAPSSSSATLVARLSLAAGDTPCSPMMDSSTASQSRALSMATPPDSGTDESLEKATVRRPAGEWVKRMDAPGAKLWGPKASLNLSTAAASASVYTPVAFQ

SEQ ID NO: 50997 - protein, 75 aa, Glycine max
  peptide (1)..(75): Ceres Seq. ID no. 13595810
MMDSSTASQSRALSMATPPDSGTDESLEKATVRRPAGEWVKRMDAPGAKLWGPKASLNLSTAAASASVYTPVAFQ

SEQ ID NO: 50998 - protein, 74 aa, Glycine max
  peptide (1)..(74): Ceres Seq. ID no. 13595811
MDSSTASQSRALSMATPPDSGTDESLEKATVRRPAGEWVKRMDAPGAKLWGPKASLNLSTAAASASVYTPVAFQ
